United States Patent Application Publication US 2015/0376612 A1 - sequence listing, part 7

SEQ ID NO: 15860 - DNA, 1084 bp, Homo sapiens
tccaaaaaaaccagtctcttccttcatgatgcttataatctatatagtaagggacaagacaggtacaaataacttaatagttgacattggtgaaagcaagatgccacatgttcttctcttgtgacagattcaaggcagtatttgtgtggatgctgcccagaagatccgagctgtggactttcctcactatgtgcttttgtggggaggcgagggttggggaggaggtcttaaacaacagacatttatttctcacaatttggaggctgaatgtccaagatctcagggtgctggcatggtctgtttaggtgaagacattcttggtttgcagacagctgccctcttgctgtctcccacatgttggagcgccatgtgcatgttttttgcagtgtagatacacaggacacagcaaaaggaagcagcctgtattgccaaaaaatgagaaaaagctttgggaaacaaatttctaaaccaatgtgtcttctgggcatgtgatttcactagtaactgttgtgctttaaagataagtatgtagaggaaggaatgttactctggcttcaaaactcagtagtagtagtaattcacatcgacagattagggtttttgttggaggcaggaattttgttttgatttggtctggttttagaacttaaaagtacagtaaagtatacagtaaacgcctttatgctctactccaaatgttatatttgcttcaggttaaagttgaaagtcccttttttgattatttgcttctcagcatatgtagtttttagtttttctgttggaaacaggattttaagctatacttctactcatttaactataagataaatgcttacattttaaaatgtatttgaatatttatttgaagtgctgatatgcagccttaagttgtacttcatgtgtgattggatttctgaccgtagatatggttggattgaagactgtaccgtgttttgatgattctcctattattatttttttccctaggcagaagaattgtttttatgggttccacgaaaattgctaatgactgttgaatctgctaaaaattcagtgttgggtgagaataatttctgactcttca

SEQ ID NO: 15861 - DNA, 1034 bp, Homo sapiens
gtgtttattattttaagcgaatacatttaacccaagaatatagcaaaataaagcagtcttcctctccactgttaaaatttgccaagacttgcttgaaccttgctgtatgtactgtgtttatacgggctaccatgcgtgaaagtccagcagtactggattagtcccaagggctgccgtgattgatactttggtgaaattccaacagtttaccgaggagtttttcttcggcctaagaaagtagtttgcaaagccaagttctcaaacagctacagaacctctttattgggaccccagacaaccttggattttagccttctgctacccctttcctgtctgccctccaagtgattgtaagttaatatctgaaatggaactgtagtctgaaggagtaaaatggttgcttctccagtgtgctaacatctcagtgcttttttttcctggaattggagtggtgttggatttgaagattagaacatcttatgtctgtatgtacggttatagcgaaagcttctcgtaagagcacagtgactgtcagtaagaaagtgatggctgctgcgctgctcttccgtgccgtggacatttaggccacattttaaatgataattaagcttttgctttagaagccactggataatgagaaaaatatggaggtgatatttttcctatttaaagcttaaccactggacaactgttttggttttgagagttctgataaacggtcacaacagcctccttggaacacagtactctcctgcctggaggagaatgacaggatgacggcgccggggaaggtatgaccatcagcgacggaggcttgcttggagtgaatatttagtagacaatcattgaattcaatgaaaaccaggtgcatagtttgtgctgtgtagagttgtagtaaaaatatgagcaaaaatcctacctccaagtcagggttactctgaatgctttgtgactagatgtcagtgtagtttgaggcgtaccagttttcttcaatgttttaattacatagagtcttttttcttatcacaaatccg

SEQ ID NO: 15862 - DNA, 1027 bp, Homo sapiens
cagggcacccttccccttgggacctaggctgtccccccaactgctcccactgccacctgtcacctcctggaaagtggggtcagggacctaaccctggctcccacacctctgggcttccctctgcccaaccttccatgctgactgcccagtatgcgagctcctcagggctggcccagggcctgagagggtggacaacacccagttgatgaagaaatgggctgcttcactcctctggcagatgggcagatccaggcaggagatggggcagactcacacggaagcctccccgcctctgccgtgctggactcactggccggtacctccctgggctgggttcccctcctccctcctgggcccgacctcacccacagacagatgaggctgctacccctgtgcagagctgggcagcaggggcacggcgtgggaggggttggctgtaggggggaggtggggttgggtgaggggctgtgcctcttgagtgtggctggagcttggaggggacgtgtgactgccaggacaagggctttccctgctgcaggtggggcaggcgtgggggctgccgagaggaggctatgggcagtcacgcttgggtgttgggggccagctggcttggcgacctctcaagccgctcgctcccccaagcctccgagccctcgtgcgcatccctggcttcatcccagtctccctctccctgcttttcccactgcgccgtgagcggtcagcctgggatacccaaggcgtctctctgggaaccaaccgcagggatggctcagctgcctggccctgttgctaggtgaccagccaggcttggtgccgactgcccagctcaggaattccacggcaccctctctgcccactgggcggctgctgggaggctcacggccccagcagggagcacagctcccactgaggtcatcctcacgtctcacccctttgtgggctgtggggaaggttcccagggcctggtgggattagcagagtgcacgttcctcatttggcctcttgtgaactctcctccacaccccgc

SEQ ID NO: 15863 - DNA, 1056 bp, Homo sapiens
cactacggctttgaactcctagcttcaagtgatcctcctatctcagcctcctgagtggctgggcctacaagcatgtaccaccatggctgacctcaggaaaaaaagtgtaaaattaaaaaaaaagaaatcacaatggggtctcgctatgttgctcaggctggtctctaactcctgggctcaagcgatcctcccacattggcctcccaaagtgctgggattacaggcatgagccactgtgcctggtcaaaatagttttttcacatagaactctctgaccttcctggaactgttttctgtatatggtgtgaggctgagatagagttttactgttttctgggtggacagcttgttgctactgcagccctgttcatgaagcgctctgttctttccccgccggcaccgtggccacacaccaggtgtgtgggtcttttctgggctccaccttgcctctccacgtggctatgttatctttcctgtagagtctggtgcacatagagctgtcttctctgaactcccatcgccctaggaatcctaccacctggctggtgaggatttattcttgttttcattgcctcagtgaaacacagtccagatgtgttgctgctgccagatggaaccgcccagagccccctctttctcttgctgcagggccttggattcccaccactgctctcaccgcagatcaagtgccttccctgagccgctctcccagtgctggctgtgatgacccagccaagcctggatttccctgtttcctgagccgcctccacctgctgcacctcccacctctgcatgtggctgagatgtcccacccctcccacgcctccccactgttcttactaactctgcaggaaagcaggctccggggcagagctgtgggggcagggcatcatcccggccccccagctcttcccacagagcctggcactcgatagagatttggttgacatctagtgatgaaagcagcccccacacactttctcctgaaaccagcaaaattctcccctttatgctaccggggggcttggcacctgcgttctagggctcggtaagggt

SEQ ID NO: 15864 - DNA, 1022 bp, Homo sapiens
tggggtgtgaacttgattacgtggtttgggagggtcccccattgtaagctgagcatacaaatctctgtaagtaataactggtttgcgggaggctcttggagacatgcagatgtcttggtctccagcaggcagacacgcacttgtctcagcatccacagttagctgtctggtggggacgatgctgattttctaacttctcccgtccttccacctccttccacatttaatacttggccttctcctgggagggccgcttcccctttccctcagtgagctatgtatggatgcctttttatcagcgtggactcaggatttttatttcatccaacagggctgtaatccctggctcttattatcattattgccacttggcctgggagaaaaaagtggctgtgtgccagggaggagaagggatttgaaggcccaggtgtgtgtgctcataggacagctgtggggcagggccagggcacgtgttgtcaccccggccatgccactgacttgacctgtagccttggacaagccggcggacaccctagagtcccaaggtcatcctgctggtaggacaggtggggacaggctgacctttaaggcccacttgtcccatcccatgaggctctgagggcccacgccatcctccctgttgagaccaggagttggcttggggcagttctcagcagctgggctgtcacctctcacctgtgggcgtgattacacagagggaggctccctagctccctgtcccgcccgcctcacttccagcaaggccaccctctgcaggactgaggcctgtttgttctcatcagtaaccaaacattgacctcatcctggcactggctctcccctgaccttcaagtctgttcttgctcatacctttcttaaagaaacacagtcttgtgggcaggcaccagacctgaggcccccatgggcctatgtccatctgtgcccacctgtgctgccagaagggtccttggaagctctcaactcccttgtacagagaggtgctctggggcccagagagggaa

SEQ ID NO: 15865 - DNA, 1044 bp, Homo sapiens
ggcccctgccagctcccctgtaggtcccactcactgtgtgagtatctctgagcccacagcagactcggagtcacactgggcctccctgcccccctcccccacttctcttcctccaccggcagagcaggttccacaggtgtgcacagggacactgcgtccaggacggtgcctgttggggcagccccgccacttctctggcttgtttggcaccaaggctggaggcagaacttcagccccaggacagggggtttccctgacgtcatttcatgggggaaaaggcactcaggagcccaggggactgtgtgggtacccaggcgagcacctctggactcagggccacctgggtcagacaggcctccatggtgtgacctgagcacctctcttgggctctgtgcctcagtttcctcacctgcagtaggggcttcatgagcaatggagagagtctgtgggttctcagcccgaagtgttggtaagagagcaccctcctccatgccccagcagggcttgtggatggaggtggggcagggagtgtgtcaacaccagcagggtgacacggaccacatccacctgtcacctagagccttccacggcacggtcacgccttccagcagattattacatcctcactctagggaagcgcttagagaagccagctccggtcttggaagggggctggggcagcagcgcttgtattagaggaaataaaattgtcctgtctcccgattacacgtgatgaactcaccatcacgccaacggcccagcagctgtgagcattcaactaaaggtcaaaagcaaaaatagaagcagtggggagggatgcttttaaatcattgaacatgaccaagaggagggtgcaggctgtggaggctcacacacacagtgacaggggacataggtacaggccatgtgggtgtggagacatgtgcacagtcacacacacacagtgatgggagttgacatacacacactgaataagcaaccacatcactaccatttaagaactactgcatgacggggaacataggtgtgggctgtatgggtgtg

SEQ ID NO: 15866 - DNA, 1077 bp, Homo sapiens
atcgcgccactgcactccagcctgggccacagagcaagactcatctcaaaacaaaacaaaccaaaaccaaaaccaaacgaaaccaaaacaaaaagaagagccgagcaaagtcatgcggtgggcatttgcctgcaccttgggttcagctggggtgatggatgagtggggacccaggacaagcactggggcagtgagcaaggccagggccggtggggtctttgaagcctcttctactgtccctgaagtccctaggttgggctttccttcggggtgtgggcagttctagctctaaccttttctgatggactttccaagaggacccagagttacctgttagaagtcctattagaaactggaaactttttacagcttatccccatctttcccctgctccccacctgataaatatgcagacacatcacctgctgggcctgagtggccttgtcagctgacatgctccctgcctgggggtcttggaagattactagtgttctgtggattggacgatccagacagaaccagtggcttcagcccacttgagacccaaccatgtgtaagtctgtgcctctccctgggccctcattttcccatctgtaaaataggaagcttggatgggctgagctgagagtcccagggaccctcatctcttctggccctttgactcagagccacaaggaaggggtggcctcccctgcccatcctgcctcctatcggtcactcagtggtcctatgagccagctcttttatattcctgggaattctcttcctatgccctacagcctgggttttatcacctgcctcgtggttggtccttgccttggggcaggtgtggggatggtgaggctacctgtgaccacatgggtcccactgtggggcctagagatggtgacctgtctaaacgctgtttgaggctgagaccctggcccagaccagcctcccctcctgcagggccccagtggaagtacctgcctcccctatctgattgcctctgcttaaaggactcagtaaggggtttagtgcaagaggagaacactgagcttcaattcctggtgcaggtttgctggggacaaggctgca

SEQ ID NO: 15867 - DNA, 1057 bp, Homo sapiens
tgcccagataatttttgaattttttgtagagactggatctcactatgttgcccaggctggtctcgaacacctgggttcaagcagtcctcctgccttggcctcccaaagtgttgggattacagacgtgagccactgcacctggccttggctgcctttggtagaggtctggtctgggctgactggacttgggactgggctgtgcgttgctctagtccagtgtggcacactgagacaggtaaaccccaacaccagaaagtcaggttctccttcatgaactgataggattttcaaacaaaagaattttcagttctttttccagctgcccctccgcctgtctcctgtgccccacgacaggcaccatgcccccctcctgcccattgccaggcatttccttccctcccctgataacctgctcctccacggtccactcccctttagccaacctggaggaactaggattctagcaagcctgtgcatgagccccatttactttttaaagttcggattaaaattttgagcttctcaaaatgagacaggtttgttctcctgcttgtgtttttgttggtttaagagggaggatggaacggggtggtctgggcctttagaaaaagacagagcacgctaactctgaataggtcttttctgtgcagcagctcggctaataaggctgcttttcctaaacccagccaagctcaggaacaaaggtcagtgaagacaatggggtgggttagataagcctttccccctccttccccagcctgtcccaagggatccatcaatggccttgggatgctgggcctcagaaaggagggctggccttgagaggctcccaggcaggtgacccaggggtgggtaaactgtgcccagtgcttcacagtttgccacaaacagcatcccagtcccaattccattctgttcagagcttccaaatggtcccaggagggagaccttagcatctccatatcttagatggggaaatcagggcttggagtggtggtgcggtgacttgctctaggtcctgtggggctgattggggggcctgggatgcgtcttgggt

SEQ ID NO: 15868 - DNA, 1035 bp, Homo sapiens
cccaaagtgctgggattacaggtgtgagccaccgcgccccacctaatttttgtatttttagtagagaaagggtttcaccatgttggccaggctggtctgtaactcctgacctcaggtgatccacctgcctcggcctcccaaagttctgggattacaggcatgagccaccacgcccaaccatgcctggctaatttttgtattcttagtaaagacggggtttcaccatgttggccaggctggtcttgaactcctgacttcaagtgatccacccacttcagcctcctaaagtgctgggattacaggcatgagccaccaccccaggccttaagatggtacgttagagcacgagttccccatctcagttttgccggctctctgaataagcctgcttttcctcccaccaaccctcatctcttgtgtctggcttttgagggttgagcaatcaaacctaggttcagttacaatatctaggatggaattggaggacatcttgattttcttccctctggaccctatgtgcctgcctggactgccctggccacccagcagagttctgccctccttcccttgggttgcttgaagtgtctggtgtccttggcaatgatcacagtgtgggtatctcagtgggagccacctgggtggggaggctcaggctgtgtcatcccagattccagatagcacaaggctccatgcttagtggatgacatcagatctgccctgccagaatctcctttctccagcctcttttgtgaatcttggcacggctgacgttagctcaaaagcaaatcatgtttgatattaatttattaaagcattctggaagttcctcagctgccttagtttcaggaccccagagttcccagaagaaccctgcattggctagtgccagccagtggctgtgacggtcatacctgccctgctgagcctcctccagcatcctctgctccagcccaactatccagaccacaacttgtacagtactccctcccagtctttgtttctgctgtttcttcaacctgggataccatccactgt

SEQ ID NO: 15869 - DNA, 1026 bp, Homo sapiens
ccggttttcccaacaatttgggaggccgaggcgggaggatcgcttgagcctaggagttggagaccagcctggccaacatagtgagaccgtctctacaaaaacttttttttttaattagccgggcgtggtggagcacatctgagggcccagctactcgggagctgaggcaggaggatcccttaagcctgggaagtcaaggctgcagtgagccgagatgggtgccacttcactccagcctaggcgacagagtgagacttgcagaaggaaagagagaaaagaaatacagtaacagttaataaaattcttaacacacatgtaataatgtattttactcacacattaaataacaagactaaagttgcaagtctaatattcaccatgattttgaaataccagtgagtataaatgatatttagagatttctgcaacagctgaaatgtgatatgaatatatctgggtttctcttggtgacaaagtcacagggacagctaacacctactactgtgggaattttaatatcagaggtgggtgaaaatgagatcgcatacattccttcaacccaaattcagaagccccctggcttctatcctctgacctcccttcccctcccctctctctgtggatcccaggttaagaacccccacccatgtgacggggtgtgaagagctcagtgggaggggcagagaggaagagcctccctgaccccggtgtttgcctaaagagaagcacagagccagttttcatactctgggcctttgcacatgctgttccctctgctgggccttcccatccccctgccccctctgccaccccaacctcctgtctccttgaaaataccctaccccatgccacccccagcatggggtttcctctcttctcttgctgtctagtatcttcccagctccacacagagcctgtgtgttgatctcaggggtttgtgttcaggcctggcctcctgctgggctgagctaggcaaggcctgggctggggctgctccatccctagggcccatttcaatactggtgc

SEQ ID NO: 15870 - DNA, 1031 bp, Homo sapiens
gccgttaattctcagaaatcatgatttctttgatctcttctgttttctctcttcacagacttttttttttaattcagagactgtttctctgattttctaaccctcctattgttttccatttctgctatcatttttaacttccaggagcatgtatgctccctgaagtttcctcacagcactctgccctgactcataggtacagtaccacccttttctctctgagatttttttttttaatcttattttactgtattaaatcttactaatattctgtaagggacaaaccagacgagtaggctacagtgaagaaatcttattttggagagttaagaaaccactatgatacttccaggtattatcttcagtgatgcttcttatctttattcagggactccaggtaatattcagctcctacagctaccacaaatgcagcaaatccccatttgaatcctttaaacaatacatcaaaaaaggaaacactctttgcaaagccacccatgtatcttcaagcttcattgtggccccacggatcccttagccctttttcagccagcttcttctggatagtttctaatggtgtcccttctgtcttccgttgtctgtaatctagaagttccattttacgatgtccatgctcatgtccatgtccatgggccatgtctgacagcaatctgacctctcaggacactcaactctctctctctgagatcttaatggtagttttccatatgtcctctacatcctttataacctcagtttcttccatcttaatttgttttctacctgcctttcatattagaggcaattctcaactgtttggtgtttcttggctatttgctggtgttttggggggtgcactgaaagctgctggatgcactcttcattggggaagagcttatcaacataggttccacttcctggagagtgaccaggctgctccccttttgttggggaatctttcgtgtcaaggtctttagatcttttctttaaagttaagtgagattccccagagaaagctcccccagtccact

SEQ ID NO: 15871 - DNA, 1027 bp, Homo sapiens
ttgcagtgagccaagatcacaccattgcactccagcctgggtggcagagcgagactccatctcaaaaaaaaaaaaaatcaaatagtaatttgccaaaagtttttagcaatgaacttaagttcattaaaacacattggtatttataccctgagcaaacaggagtcctcctgtgttctgggcactgggtgggggcacaggggcatcaccagatgcaaacttgatcttgactaggagggcccctcctagtcaagtagattcacaccttaagtcagtaaatcctagccactcctttagtcttcatcactggcatttgatggttttcctcttcttcatggccccaaatttctggttctctttttattatattatctatgtcctttactgtaactcacctcacaaccttttcggaaaaaaggactcaatacaggaaaggaaaaacagccgcgatgttgtgttaacctctggtttttcctctctctccttccccgcccccaccccagtcttgactcgtctgctgaacaaatcctctgacctcaggccggctgtgaacgtagttcctgagagatagcaaacatgcccaacagtgagcccgcatctctgctggagctgttcaacagcatcgccacacaaggggagctcgtaaggtccctcaaagcgggaaatgcgtcaaaggtacatgattttgctgggttctccacgaaggcagctgagcctcccaagtctgtagggttgtgttcctctagaatagatggtttcctcaatgactgaggtgttttggttataattttttattttttgagagggaatttcactcttgtttcccaggctggagtgcaatggtgcaatctaagcttgctgcaacctctgcctcccgggttcaagtgactctcctgcctcagcctcccaagtagctgggattacaggcatgcaccaccacacccagctaattttgtatttttagtagagatgggggtttcaccacgttggtcaggctggtctcaaacccctgacctcaggtgatctgtcc

SEQ ID NO: 15872 - DNA, 1022 bp, Homo sapiens
tgtgggtggaaatcaaacacaaaacacagatccccccggaggccccagagcgatgaaagcaacaaacaagatacgaccagagatgggttttgaaggatgaataggagttagctgagctgtcaatagtaagaagtaaggttggtccaaggcacagcgctttctgaaggaacaggaagtgaaaggaaggcgagcggctatgagagaccgcgttaagcggcacggggcgctttaggcgctgcccagtcccggcccctccagcccggggcccgccgctcaccacacgcaccggaagcgctcggttctcccggaggcagaccggccagcacactaccatccagtcacgttccgacgcgacgccgcggccgccagccaatcagtggcggcctctgccccgcccccgcgcgaacagccaatgacggcgccgtcgggccggaagttgttccgtccggacggcgtttccacggacgcccaggagacagccggttgctgagccgggagcgctgactggcccggctgggcagggtaagcgaggggagtaaggccggggcggagtgaggaaacaagggagggagtgatggagggacgctggcgcggcgcccagtggcctggccctcccgggagtatccttagagcccggcttgctgcccgccgcgttctggcactgtgaggcgcggagcctgccaccgacccctcgcccctttcctctgagcgccgccgacccaccccgtctccctttcccactggcacccttcatcgtctccgcctgttcgcttttcccgaggagagaggcccccatttttatttagcgcctgccatgtgccagaggctttgcgtagtgttgcacttagtcccctcaacggtaatgttagcaggcttctccatgcccattccacagatgaggaaaccgaaggggaagcagaaaagtaatgcgacccttgcccaaggtttcgaataagtccaagctgggattgaaacccaggcgtctgtgaccccagaactcctgatctttccactgcactgtg

SEQ ID NO: 15873 - DNA, 1039 bp, Homo sapiens
ctgctggggaagggctgtccgggtgtagaggggcgactgtcggggaccatagggtgggaggaggacactgtggcctcccgagagcctgagatccctcccctatattctcatcctgtttccagtcacagtaggcccacaccaggctggggatgtttgtgaactgacagcctgaacctgctatgccattcattcagtcagtcattcaagaactacgcattgagcacctgctatgtgccaggccctatgcaaagagctgggatacagtggaagttacattctacggggggacacacacacagataataaataattgcaaacattagttacagctgggggccagggctataaggggctgccgcaggggtacttgatctaatctgagggacagagggggacaggctgtgaaactgggaccctgaaggtcagctgggaattagatgatgggaaggaggggaagggagagagtgagagtgtttctggcagagggaaagcaagtgcaaaggccctgaggtcagatagagcttagcacattcaggacctgagagacgttccttggcagcggggagcacggggcgggagggtagcagagagagagagaagacaccagcaattgtcagggccttgcagtgtatatgaaggtgtgacgttgtctagtcacctggcctgtgattttatttattttttctttatttatgtgtttattttttagatagagtcttgccctgtcacccaggctggagtgcagtggtgtgatctcagctcactgcaacctctgcctcccgggttcaagtgattcttctgcttcagcctcccaaggctgggactacaggcaggcgccaccacacccagctaatttttgtatttttagtagagatggggtttcaccatgttggttaggctagtctcgaactcctgacctcaggtgatccgcctgcctcggcctcccaaagtgctgggattccaggcgtgagccaccgcacccggcctggtctgtgattttaaaaggtcacactcgccgtgtttgtgggataggccgggc

SEQ ID NO: 15874 - DNA, 1039 bp, Homo sapiens
acctcagagttccacacacgtatcatccattatccaagattcatatgccagcaagttttatcattgatccaggagggcccacttttcctcaattcatttctaagttatttattgattaatttaataattataattttaaaactctgtgattcacaaaaatgcaagagatttatatccctaatatgtacttaaaaccattctcacttcaatatctcttatgttaataataattgtagtatttcatgtatacactaaaaaaataatatctcatattaatcccatgcttattactaagctacagctcaccttctttgattatatttcacactttttaataatacagtgactgcccataaacaaactatgcaaaacaagataagaactttagctattacattgttctctaggctcctaatgcagacatgcaatcaaaaagcttgtgaccaaggaggaattctgaagtcagcttgagtgggtccattctgagaaatataaatcagagaaaacagcgcaaaaaaaaaaaaaaaaaaaaaaaaaaaaaagacatcctctgcatagaatgaaaagaccaaaaccaagatccttgtatattcctgacaactggctacagggtcacttaaaccagagtaaatgagctacatctctttcacattggacctcagaatttcagacatgtattcatcgtatatgactcatacaccaacagtagtcatcactgatctaggattggcccttttgctctattgtcacctacatttgtttattgattaattcattgaatcataaaattatagtattattattcacaaaaactcaagaagagtccttatatccctaatttctatatagaattattctcatatcaacataaatttcattaactatcctattttttatatatgcattaattgatataatatttcatacatctcatatttattactgggttataattgcattcattgtatttcatgctttttaataatatagtgaataatcttaagataaaagaaatactgaaaccaagaaaagaatgtca

SEQ ID NO: 15875 - DNA, 1828 bp, Homo sapiens
tgtattgtcacaagcacatatggctggacagcaaacatggagagaatcatgaaagctcaagccctaagagacaactcaacaatgggttacatggcagcaaagaaacacctggagataaaccctgaccattccattattgagaccttaaggcaaaaggcagaggctgataagaacgacaagtctgtgaaggatctggtcatcttgctttatgaaactgcgctcctgtcttctggcttcagtctggaagatccccagacacatgctaacaggatctacaggatgatcaaacttggtctgggtaagccttatactatgtaatgttaaaaagaaaataaacacacgtgacattgaagaaaatggtgaactttcagttatccaaacttggagcaccttgtcctgcttgctgcttggaggtattaaagtatgttttttttagggataagtaaggtcttacaagagcaaagaaatgaaattgagactcatatgtcctgtaatactgtcttgaaagcagatagaaaccaagagtattaccctaatagctggctttaagaaatctttgtaatatgaggattttattttggaaacaggtattgatgaagatgaccctactgctgatgataccagtgctgctgtaactgaagaaatgccaccccttgaaggagatgacgacacatcacgcatggaagaagtagactaatctctggctgagggatgacttacctgttcagtactctacaattcctctgataatatattttcaaggatgtttttctttatttttgttaatattaaaaagtctgtatggcatgacaactactttaaggggaagataagatttctgtctactaagtgatgctgtgataccttaggcactaaagcagagctagtaatgctttttgagtttcatgttggtttattttcacagattggggtaacgtgcactgtaagacgtatgtaacatgatgttaactttgtggtctaaagtgtttagctgtcaagccggatgcctaagtagaccaaatcttgttattgaagtgttctgagctgtatcttgatgtttagaaaagtattcgttacatcttgtaggatctactttttgaacttttcattccctgtagttgacaattctgcatgtactagtcctctagaaataggttaaactgaagcaacttgatggaaggatctctccacagggcttgttttccaaagaaaagtattgtttggaggagcaaagttaaaagcctacctaagcatatcgtaaagctgttcaaaaataactcagacccagtcttgtggatggaaatgtagtgctcgagtcacattctgcttaaagttgtaacaaatacagatgagttaaaagatattgtgtgacagtgtcttatttagggggaaaggggagtatctggatgacagttagtgccaaaatgtaaaacatgaggcgctagcaggagatggttaaacactagctgctccaagggttgacatggtcttcccagcatgtactcagcaggtgtggggtggagcacacgtaggcacagaaaacaggaatgcagacaacatgcatcccctgcgtccatgagttacatgtgttctcttagtgtccacgttgttttgatgttattcatggaataccttctgtgttaaatacagtcacttaattccttggccttacagtgtctcaaagttctttacaaatctacttaaagccatcctggctgaggcaggagaatcgcttgaacctgggaggcggaggttgcggtgggctgggattgcaccattgcgctgcagcctgagcagcaagagcgaaactccatctcaaaaaaaagat

SEQ ID NO: 15876 - DNA, 1047 bp, Homo sapiens
caattggcctctttagttttttttttttttttttaattcagaaagtctttgtaaagaacatactttgtttcagcttggaatacacgaagactctcaaaatcggaagaagctttcagagctgttaaggtactacacatctgcctctggtgatgagatggtttctctcaaggactactgcaccagaatgaaggagaaccagaaacatatctattatatcacaggtaagagaacactatgttacagtcatacacgtcgttcttacaatcttgtaggctctgtgggtgtgttttctactcaggtagcactgttacaactggtattgatctaggcaagataattaacatgaactaggtcattttctgtcttaggttctgcctaggtatctggctagcaagaaaagtcagagctagatgaaaccattcttaactgttaaaaggtctaaaagtaactttgtaatacctcaggtgagaccaaggaccaggtagctaactcagcctttgtggaacgtcttcggaaacatggcttagaagtgatctatatgattgagcccattgatgagtactgtgtccaacagctgaaggaatttgaggggaagactttagtgtcagtcaccaaagaaggcctggaacttccagaggatgaagaagagaaaaagaagcaggaagagaaaaaaacaaagtttgagaacctctgcaaaatcatgaaagacatattggagaaaaaagttgaaaaggtatgtgaatacagcatttcctgatcattgatacttctaaggtgctttcaagcttagtcatacatagcccattttcgcatgttttcaacttaaaacagaaaactatgttgtgtgtggctgggcgcggtggctcacgcctgcaatcccagcactttgggaggctgaggcagcggatcacaaggtcaggagatcgagaccatcctggctaacacggtgaaactcagtctctactaaaaatagaaaaaaataaaccaggcgtggtggcacggcctgtaatcctagccacttgggaggctgaggcaggagaatcgcct

SEQ ID NO: 15877 - DNA, 1707 bp, Homo sapiens
tttgcaggctggtgcagatatctctatgattggccagttcggtgttggtttttattctgcttatttggttgctgagaaagtaactgtgatcaccaaacataacgatgatgagcagtacgcttgggagtcctcagcagggggatcattcacagtgaggacagacacaggtaggcacctgaacattcactggttaagtgagcggtggaagggtggggtgctgcaacccttggacccctggggatgcggtgaagcttacagaatttgtgtttgcccaacgatcaggaacaagctagagcacttaattagtgtaatggcatgacttggtgggcggttcttttgggcgaggcaccttgcccaaaaggttctgctgtggtggcctttgcatctgtagtaacggcaaaccttgctttatagacacgttataagggtgttaggcatggcgttgagcactaaattgaatgtattaagtcaatttttctttcttctcttgcaggtgaacctatgggtcgtggaacaaaagttatcctacacctgaaagaagaccaaactgagtacttggaggaacgaagaataaaggagattgtgaagaaacattctcagtttattggatatcccattactctttttgtaagtttttatgtaattgcagagtgaatttctgtctgtaggtgattggggtgactgtactacatccttagtccctagatctgttcaactagtctgaagcctggggaacctaagctctactacctaactctgtaaaagttcctcgggctattaagtggatgtatcaaatattgatgaaaagctgggtgcttctcaagttggctaatttagacttgggccttaggttgaaaatagtggtgcagcgctgtcgcttagttctggagtgcagcagtgatgtgatttcgtgttttcttttgaaggtggagaaggaacgtgataaagaagtaagcgatgatgaggctgaagaaaaggaagacaaagaagaagaaaaagaaaaagaagagaaagagtcggaagacaaacctgaaattgaagatgttggttctgatgaggaagaagaaaagaaggatggtgacaagaagaagaagaagaagattaaggaaaagtacatcgatcaagaagagctcaacaaaacaaagcccatctggaccagaaatcccgacgatattactaatgaggagtacggagaattctataagagcttgaccaatgactgggaagatcacttggcagtgaaggtgagtgactgatgggtgcttcaagcttgtccttagattatcatctttctccaccaccccaaatatcttctataatgcattgttcattggtacttagtgtatctgttttattacagcatttttcagttgaaggacagttggaattcagagcccttctatttgtcccacgacgtgctccttttgatctgtttgaaaacagaaagaaaaagaacaacatcaaattgtatgtacgcagagttttcatcatggataactgtgaggagctaatccctgaatatctgagtaagtatagataggaaaaataatcactgtcactgattaaagaagtactttctgggtgggcatggtggctcacacctataatcctagcactttgggaggccggggtgggcagatcacttgaggtcaggagttcaagaccagcctgggcaacatggtgaaaccccatctctactaaattaca

SEQ ID NO: 15878 - DNA, 1024 bp, Homo sapiens
ccaggaggtggaggttgcagtgagctgagatcactccactgcactccagcctgggcgacagagcgagactgtgtctcaagaaaaaaaaaaattgctttcttctcttacacagtttcattcccactccatgaaaggctagaagctttgccatgaacttttcagggtgaaacattaatgatggtgatctatactggaggtcacataattctcactttcctgattctcccatacacagggaataacgaaaaaatgaaattcctaaacttcaaagacatttccaactggaggccccatatacaaccaattagctggccagtgggtggcgccaaaggtttatcacggcctttgggcgaagggttcccatttggtcccgctggaaagcaattcagttatccattcagcacacatagatggctgtgtgccatgtgctgcgtcttgagacgagaaagacagagtctaatttcaattcacaccagggactaagagctgtggaggaggcatccagagtgaatttggccagagcaggtgatttccaagccaagcttggcagacacgtatttgcctggagaagggcatcgcaagaggttccaggtgcatttggagaacaacccagcatgaagagatgatcgggggcagaccgtagacccttgggctgctgcagtaatcagagtgaatgaaaaggaatgctgtaatgttgaatctgaggggccctgagtgcacttagcaggatctgctgcccctggaggctggagggaggggcgagagaatggagctgctgtgagctcggaggaggtgaggctggaacaaaaccagaaaacaatgcagccacatattcttggtgcacaccccacccctacctcccttttctccgtatctatttctctgccatgttcttaaattaccaggtcccctggtcaggtctgaccatggtgccccattaggctgccttggggaactcaggtgggttgtgggcagggctggaggtgccttggtgacatgtgggtgcccagcattccaggtctga

SEQ ID NO: 15879 - DNA, 1050 bp, Homo sapiens
ttttatttttggaattttaaaacagaatttagaagagataccactaatgacaggaaacccagggtccctgtgagaacggagggacatcaggaaacccgccgctgggcagtagcactaacgggctgacacttgggaaacagaagcaagcatgaagcgtccaccttctcacttagtaagaacatcagccactggccttcgtaaagcagagtgttcttcaccagccctaaacacacgtgtcacatttaattagctagctgttttaatgtggggaacaagattgaatgttgactgaaatgcaatgttagggagttctctctcctgcattttttttctttttgagacggagttccgctcttgttgcccaggctggagtgaatggtgcgctctcggctcaccacaacctctgcctcccagatccaagtgattctcctgcctcagcctcccaagtagctgggattacaggcatgcgccaccgcacctggctaattttgtgtttttagtagagatggggtttctccatgttggtcaggctgctctcgaactcttgacctcaggtgatctgcatgcctcggcctcccaaagtgctgggattacaggcttgagccaccgtgcccagcctctcctgcatttttaagtgaaatacaaaattgttgaaaaggttttcaatttataagcagcatgctgtatgctttggagtgctgcttggaataatacattatgaagtagcttagaaatttttttagttggctattatatatcccttagccactcgaagtatgaacttagcattatgatttgccacaacttattaattgggactgggacacatcagtttataaaacatttgcataatgcttgcttgctctaactttggagaaggtacagggtgtttgcaatgtgtggaggtttcagctcattcttgctcagctctacttaataatccacttctaccctagcttttctgtcctctagtgaaagagtttagaactacattaagatagaaatggcacctggtccaactgtcccatccctactcctcattttacagac

SEQ ID NO: 15880 - DNA, 1075 bp, Homo sapiens
tcatctgtattcttttcgtgggggagggtgggacagggtctcgcttcatcacccaggatagagtgcagtggcatgatcacagctcactgtaccctcatcctcccaagctcaagtgatcctcccacctcagcctcctgagtaggtggaattacaggcacatgccaccatgcctagcgaattatcttttgcagagatggggtcccactgtgtttcccaggctggtctcgaactcctgggttcaagcaaccctcctgcttcagcctcccaaagtgctaggattacaggcatgagccaccacacccagtctgtattctaataaaactaagtagccctataattattactttttaacttgatttaataacataaagcttaatatctttttggtgtgataagtgattcttaagtttttatagcataacataccccttaggaaacttcaggaaagcttttaatttcattctccaacccaaatgtatatgcataccaaattttgcatacaactttatggatcatatagacactccctcaaaacaaaatatcattccacggattactgctatgaattctagtcttcaaaatgcataaagaagaggaaaacggccgggtgtggtggctcacacctgtaatcccagcactttaggaggctgaggcgggcggagcacaaggtcaggagatcgagaccaccctggccaacatggtgaaaccctgtctctactgaaaatacaaaaattagccaggcatggtggcacgtgcttgtaatcccagctactccggagggtgaggcaggagaattgcttgaacctgggaggcggaagttgcagtgaactgagatcgcaccactgttctccagcctgggtgatgagtgagactccgtctcaaaaaaacaaacaaacaacaaaccacaactagttggtagatatgatagaagtttccatatgcaataattatgaataagataaaacccctaagaatatacttaataagaactgtgctagatctttatgatgaaaattttaaaatgctattgaaggactcagaagaacaattaaatacatggaaaggcacaccatgt

SEQ ID NO: 15881 - DNA, 1041 bp, Homo sapiens
gcccggctgatttttttgtatttttagtagagacggggtttctccatgttggtcaggctggtctcaaaactcccgacttcaggtgatcctcccgcctcggcctcccaaagtgctgggattacaggcatgagccaccgcgcctggcctggtgtggcttaattttcatttgaagaaccattcagaaaggaacacacacaggcgtgtcctcggagccctgtgtgctcctcagtgaccagcctggcgaggtggtgcggggcacagggcaggcctgaagggtctcttctgagcataggcttcaaggtgaccacgttgtcattttagctcctggtgctcagctgtctctggggagtatggagccctgcccctggcctgtcagtgggtgctttgagctgtttgctgagtgccaacaataagttgggcaccttgtgtcctagaaagagaaacctgtttccccatggggatgggaatgggaacattgcaaagaaaccgtggcactggccgggctgctgggcacaagaaaagtcctagtaagtcctcttgtttatctgggaaagtaacttagtaattgggtcttctttcttttttgtcatcttcccaaacttaaagagatatttttgaaaaaggctaaatttcccaggctagtagtgtttaagcctccttgctcccctgttgagacaaatctgtgacacccttccttcacgtgctctccagtggtcctggccccagccccaggccacctgacacgacagcggggccgcaggagatggaccgcgggccacgcggagggagggcaggctggaggaggaggcaagggcggggagcgtggggcagcgagtccgtgggcacaggtgcccactctgcaccacatgggggcaaaggaacccaagaagaagggcagattccagtccggaagtgaggcttgccgtaatgttcagaccggaagtgaggcttgccgtaattttcagaccggaagggaggcttgccataatgttccagagcagggtgcagtgcaggcctttccccgggctccttttaaaccca

SEQ ID NO: 15882 - DNA, 1038 bp, Homo sapiens
ctcccaatatgttggaattacagctgtgcctggccactttctgtttttataagtagatgcattatctagcaactgtttctcttgaaataaaaacaaaatgaggtaaacttaatactggctttgtgataaatccaaaccatagaaggttttgagttagcctcaggaccttcccctatttgccacagtaaatcctggttaacattgtcttagatggacattcatacattttctatgcatatttttgtgtatatacacacaagttttatatattggtgtgtgtgtatatacatataaatatatggttgttccttacccaaaatcaaatgggattacattaaatatgttgtattgtagcttgtaggatgatgcatctatgaagatgcttgaacatagttttttttttgtaatagatcttgctattttttttttttttttttgagacgtactctcagtctgttgcccaggctggagtgcagtggcgtgattttggctcactgtactctccaccttctgggttcaagcgattctcctgcctcagccttccaggtagctgagattacaggcaggcaccaccacgcctggctaatttttgtatttttagtagagactcggtttcaccatattggccaggctggtcttgaactcctgacctcaggtgatcgacccgtcttggtctcccaaagtgctgggattacaggcatgagccactatgcctagccaggtgttgctatgttgaccaggctggtcatgaactcctgatctgaagtgatcctcccatcttgcactcccaaagtgttaggattacagatgtgagccatcacgcccagtccagaacatagatctttgaataattcttcaagtttattaacagtggacttactgggttaataggtgtaatttcaattttaaaattttaagaatttttgaatagttttgtgttcttttctgttttcacaatgtttagtaattcaggtcataattttcctcactatatcaaataattaattgtgtacagctcctcttcactgaagcttcctg

SEQ ID NO: 15883 - DNA, 1138 bp, Homo sapiens
ccaaagtgctgggattacaggcaggagccactgcgtccggccccatctgatttcttcactacagagttgctgtcttttgtaatgataattaccatgttatttttgagtgggattagacatcaatttgtgactctcaccagcacgcctaagggccccacgaatcgctggtgtagagcgtgtgtgttttcataacatgaagggagaagagcagttgcgacagttgtccctgagcaaacatttgcatccagctgggcacgcgtgcctccccaggctagggcagcgggtgctcaccctgccctcttcctgttcacagcctgattcggactccaccaaacactcaactccatcgaatagctccaaccccagcggcccaccgagccccaactccccccacaggagccagctccccctcgaaggcctggagcagccggcctgtgacacctgaagccgccagctcgccacaggggccagggagctggagatggcctccagcgtcagtgccaagactgagcgggccctccagtgttgtccaaggaaatgtagaatcactttgtagatatggagatgaagaagacaaatctttattataatattgatcagttttatgccgcattgttcgtggcagtagaccacatctgttcgtctgcacagctgtgaggcgatgctgttccatctgcacatgaaggacccccatacagcctgtctcccacccctgacaacccgagagggcatatggggccctgccaacaccacttcctcagcagaaacccgtcatgacgcggctgcttcggaagcagacatctggggacacagcctcagtacccagtcttttccctagttcctgaaactttcctaggaccttaagagaatagtaggaggtcctatagcattcccagtgtcactagaattttgaagacaggaaagtggaggttagtctgtggcctttttttcatttagccattgcacagtcagctgcagaagtcctgctgaccacctagtcatggacaaaggcccaggaccagtgacaccctgcgtccctgtgtgcattaagttcattctgggtcgcagccatgaagtgtcaccagtatctactactgtgaagtcagctgtgctgttttccattcgcttccacggcttc

SEQ ID NO: 15884 - DNA, 1044 bp, Homo sapiens
gtaggagctcctggcatgttctgagtaccaggctcttgtgagagatgtgatgtgcagatgtcttctcttgttctatgggttgtcgttatttacattcctcataattaatgtcttttttttttttttttttttgagacagagtgcagtggcacgatcttggctcactgcaacctttgtttcctgggatcaagtgattctcatgcctcagactcccaagtagctgggactacaggtgcccgccaccatacctggctgatttttgtatttttagtagaggcggggtttcaccatgttggccagactggtctcaaactcctgacctcaagtgatctgcccgccttggcctcccaaagtgctgggattacaggcgtgaggcactatacccggcctagtacagccatcttaacaatatttttactccacgaacatgagatgtgttccatttatttaagctattttttcagcaatgttttgtaatttatagtgtacacatttttcccttctctggttaaactattcctagctattcttttggatgctgttgtaaattgaattttttttttcagtttccttttcagtgtgttcatttctggtgtatagaaacacaactgacttgtgtgtgttgatcttataccctataactttgctgagcttattagttttttgtggattcttttctttgggattttctacgtgtataatcatgtcatctgcaaagagagatagctttacttccttcctaacttggaatccttttcatttctgtttcttccctgatcgctctgcctagaacctctagccccatgttgaatagcagtggtgaaagcaggcatccttgccttgttgctgatcttttttctttttttcttttttttttttttttgagacagagtctcactctacatgtagcccaggctggaatgcagtgatgcgatctcggctcactgcaagctccgcctcctgggttcacgccattctcctgcctcagcctcccgagtagctgggactacaggtgcccaccaccatgccaggctaatttttttt

SEQ ID NO: 15885 - DNA, 1024 bp, Homo sapiens
acagagcaggactccgtctcaaacaaacaaactagccaggcacggtgccacatgcctgtagtcccagctacttgggaggctgagacaggaggattgcttgagcccagaagatggaggctgcagtgagccatgatcacaccactacactctagcctgggagacagagtgagaccctgtcttttaaaacagaaaggaaaccttaaacctcagaatccctctgatctatcagagtggcctgcaccatcaaatccacagatcaagaggaggccgggaggaagacgagccgcgcatatgggggtaacaggccaagagttggggaatgacattctccctcagttacctgaagctaaacccctttgtctgccccattgtcagccttgctgagacggcatcatacccagggcgtcgtggctagacaccaggcctgtgaggtgcacggccagctccacccacgggcttactgcagtgtgtcccggctccatcccgatggccacaccacagcagacatgtgtgggcagtggggctgggccgtgggcctgcggtgaggtgcaggaaggggccagtcccgctgcctcagcaccccttgtcctggactcttaccccccaacaccctgtcctcttcataggcagccagcacagggtttaaaaccacacaggatttacatttttgcaaagcgtaacgttgaagagggcccaggtcacttagtgcaatgtatttataatcttggccacacgtgtctggcgtagacacctgaagttcctcggttctccgccttggtgggtcttctctcctgcgggcacagtgcagatgcagatgagtttcagagctggtcaaaagtaattccatcacctgtaggatgcagaactgctcattctgcaccctttgctagtgccctgtgtgggtggcctcccctgcccctccccatcccttagggcaggtgttatcagccctgttggagaggaggcagctgaaggccacaggggccgcgtgctctgtatcagtcacatgtcacatctgtcaggc

SEQ ID NO: 15886 - DNA, 1083 bp, Homo sapiens
gcccccacaaactgcatccctcccggccaggtgttccccgtggcagcctgacttcctctgtcccctgcacgaagttgctggaattgcaaggctacccgtgcgggtggtgctggtgcttcttggtgcagccaccatcttgccagttatgggaaagatattgatggggctgacggctgagcggcctgggccctgtgtccctgaagaacagaggactcgcctgggaacaagattaggaaggtcaagagctccattaggccttcatgagacacgccttcctaagccatgactttttaaattcctgtttgaatgtttatatttgaaatattcgtactgttcatggtgtttgcagtagaaaggcccagcatgagctaccgtgttctggacagtcctgagtgctggggagaaatcccggctctctcatcctgacctgccccataccagctcacagacaacctcttctcagtgcacttaaagccatttattttttattttagcaaactaaaggattccgaagccaaaaacagagaattattagaagaaatggaaattttgaagaaaaagatggaagaaaaattcagagcagatactggtaaattaatgttgtgcgattctgcattatttgaatataagtatttttcaaatgaatgtttttattttcttttcgacttaatagttactttagaagcacctacagaattccaaattcagtattttccaaaatcagcattttcaaacaacatcttcaaatatattttccccaaaggtagccattgtttttggtttatccttcctttttttttgagacagtctcgctgtgtcacccaggctggagtgcaatggcacaatctcggctcactgcaacctctgcatcctgggttcaaggattctcccgcctcagcctcgcaagtagctgggattgcaggtgcacaccaccaccacccctggctaatttttgtatttttagtagagatggggttttgccacgttggccaggctggtctgcaactcctgacctcaggcaatccacccacctcagcctcccaaagtgctggaattacaggtgtgagccaccgtgcccagcct

SEQ ID NO: 15887 - DNA, 1030 bp, Homo sapiens
ttcagctgggtccttaatattcctttaaaaaatgatggatgactcaatttgagtaaaattcagttaaacagctcatttgttttgcaactcaacagaaatacttttgcttttattttcacagtacttgatactttttttttttgagacagtcttgctctgtcgccaggctggagtgcagtggtgcaatctcagctcactgcaacctctgactccctgtttcaagccattctcctgcctcagcctcccgagtagctgagattacaggcatgcgccaccatgcccagctaatttttgtatttatagtagagacggggtttcaccatgttggccaggatagtctcgatctcctgaccacatgatccgcccacctctgcctcccaaagtgctgggattataggcgtgagccatcgcgcccagcctacttgatacttttcaaagcagtgtcacatacatcattgtattagagcttcactgtgaccctgtcaccacattttaggttttttaggttgaaagacaccaagacatgggcttagcctacagtcccataggcagtgtggcggcctctcagttactggtcttttccctacatgtgagagcacgttaaatctttctaacattacagcgctttgtgtctgcattggtgtttctttatacagcaagagttcagaataaagatgataatagcagattttgagtctccgcactgatgtttaagatcaggattttccgagttgggttccagctgtgggacttgtttggtgttccagtcggctctgacagggcctctttgacacactagccagtacctttggtcctggagaattttgctcatatctcgtaaaattcttttgttctcatcaaacccatacatgtgtgacttcgtttggggatagacaagctgaggtttaaccaaataaaaggaaaatcttcttcgttgcttattaatttagagagtttcttacaccgaagcatcatcattcactctgtatgtttcatccccaggacctctggaaatgaatgaccatgaacc

SEQ ID NO: 15888 - DNA, 1058 bp, Homo sapiens
acagaagcagcctcccttttcagtgtcagaggaagagctggaagggagacataaagcctgcaattcaccatggctctttcacccacacctgctggatgccactgattttagccagaatctcagcagctgggagaaaatgcacttgggggagcctagagctgcttctcagcgctgtgcctgactctcccctgaagacgccgctgctccccgctgtgccattagaggagaatggacataggcagtcccagcacagtggcccatggggaccgtcagctctctcagttggcctgggcatctgcccatctaaaggcctcggcggttgggagccataggtcagcccttgccctgaacctccagtgctcttctgtcaggagagctttcctcacacaaacagcaagttcacttaaaaaaaaaaaatcaaccaccaccacatgttttaaatacagaattatacggcgcagatgacccccagtgcgtgcaaatggcccctggaaggtatacaaggaagatggccttccggagacccctcctcggcctgtcttctcagagtgtactgtgttggtggtcctggggtggcccctggaaaaacatccctgttttatagggaattcctggcaaccaggtcctgtttagcctggactctggtcgttgcattcctgctaactcggtccatagaacacctgttgtggcgtgtctcggcgcctccttactctcttctgtgtcttcctagcctgtctcaggccacttgggacatttttcgtgtgtatgtgaaattatggttatttgccttaaacattttcctatataatcatttctccatttctctgaattgccctgccttccattcccaaaccaaaaaagttaagcctaaatgatgagatttttggggagaagaaccagtttgttccagtctaaataaagtagtgtaattatccttgtctttaatccatttcttcccggcagccaggtatagagcttgttacacaacctccttgagcttctcttcatacatttgtcctgtatgcattgcttcaagtcttccttgtcataaaactggt

SEQ ID NO: 15889 - DNA, 1030 bp, Homo sapiens
agaggggctggcggggccacagtgagggtgcacgagcgaatgaacaaattgaaaaactcggcggggaaggacgggcagtgcctgagccagggcggggaggctggggctgcccttggcggtggcagggaggcttgaggaagactccacagggtgggacagctgtggagaggcttggaagggatgagagtttgctggtaaagattctgttgagagcagggacctaaaatgaaggcttctgtcgtttcctctgattagctgggccgctcccttcctcagacaagcccaccggtgtggtgcttcccttcctttggagacactgcagtctggttgaatgtgatgggcgtggagtctgactgttgggcccaggtctttgctctgtccttgcttgctgggagaccccgggcccatccccaagcctcccgtgtcgatggggtcttggtgccagaggcaagggcaggtgggagcgtgaacaggacagcactggcctgtgtctcacagcctgggcccgagcgtgggccttcatggtgacagcagctgatatgattaggttctccataaatattacagggtccctgccccggctgataaacagggcgtttactccctgtgcgggttagttaaaagctagctgtccagaccacagcatccatctcttcacaggaaatttgcaccaaggaaggcggctcctgtgaggttcaggccacgtgcttccccagcattcactgaggcacagcggccccagagatggaggtgttggctgccaccctgactctggctgtgatggtcttgcctgtcctgggcctctctgacctgtgagatctccccactggggcctccacagactgtgggctttgtggtctgagctttctgagtgctgcaagagacaggctgtcctcaggcagagctctacgcaggctcacctcggggtcgcccactcccagcacacggctggcccggtggcgagggaactcgcggggaagtgacgggctcagccctgttagcagatgttttttctcccattactccaatt

SEQ ID NO: 15890 - DNA, 1055 bp, Homo sapiens
tggcagctctcacagtgactctacgatgtgactgtgtggtatttgatgttagaaacaggcaggtagatgatactgccatttaagacctcttcaggccatggctgctgcaggcacggggacatgctggctgcttgccattggcagccagaaggtatggaagccgctgtcactgccagtgagtagcttacaggaagtgctgagttggagacttgggcccgtgtgtgagtgacttacgtagggtggaatgcaccagacaatggtgcagacatcttgacgggtgttggtagtgatggcagagcttattcaagatttggtagaaactggaaagtccaagaggacttcctgaaggaggtggcacttgaattgttctttaaagaatgtggctggtggccgcgcgctgagtgctgactgtgccccacagtgtgctgggcacattaactgtcagtgctcatgggtcctcataggtgtctcaggagtccggtcctgccattaacctcctgtagtggtggaacccgagccataaaggggtgaatttgcaggagtgaaactccggagcccacgtggccggtccctttctctgtgaagaaaaggttcttgatgcaggaactggcacatgctaggtgggaaacttggctttcggtcactgctggtttcacaggctcctgggctgttaggatttcactacagtttagctccagcgtgctagccttttgttcaagaaccgcatctttgttcaactcacatttgcactgcaggttgctgttgtcaaaatgaagaatactgaacgaatttatgcaatgaaaatcctcaacaagtgggagatgctgaaaagagcagaggtaagtatggagcttgaaaagccatacaaatggggcttggggtgagcagaaagtgactgtgaagccagctggggaaaagctgcagccaccccacagccctgggcctccctgccccccggacagagcgagcactctcttttgaggaggtctcagtctcctccctggcgcctgctgctccccgcctcagcgaccacttgcttgctggacactgttcct

SEQ ID NO: 15891 - DNA, 1035 bp, Homo sapiens
tgcatccattgagatagttgtgtggctcgttttcttctgttgatatggtgtattgcattaattggtttttgtttgttgaaccaacctcacattcctgggatgaatcccacttgatcatggtatataattctttctctgtgtttgtgaatttcgtttgctagtattgtattttgttaaagattttggcatctattcataaaggtaattgattctagttttctttccttgtatgtcttttttttttttttttttttggtttggtatcaagataatactggccttatagaatgatttaggaagtgttctcctttttctggaagagtgtgaagaattggtaataactcttatttaaatgtttggtagatgcacctgtgaagctgtccaggcctggatagctttcttggtatttttttgattactagttcaatctttgtgcctgttgtagatctattaacattttctctttcttcaagagtcaattttggtagtttgtgtctttttataaattcgtccatttcacctagattatctaatttgttggcatacagttgttcatagtttttcttaataatcttctttacttctgttaatgtcagtagtgtcccttcttttatttccatcctagcaatttgagttgctgctgttttttttcttggtcaatctcaaaaaacggttaaaattgtacattttatgttacgtatattttaccataataaaaggtaattgtagcctgtaatcccagtactttgggaggctgaggtgggcgaatcacttgagtccaggagttcgagaccagcttgggcaacataatgagacccgccccccccccccgtctctacaaaaaatagaaaaattagctgggcatggtggtgctcacctgtagtctcagctactcgggaggctgaggtgggaggattgcttgaacccaggaggtggagtttgcagtaagccgagctcatgctgctgcactccagcctgggaacagagtgatactgtgtctcaaaaaataaaaagtaattgtaagtaagagtaact

SEQ ID NO: 15892 - DNA, 1079 bp, Homo sapiens
ctgttgcctttaaaataaaaagtctgatatccacaattcagtattagaatttgaaattgaccccaaaagacgcatctaatcttagctttagaagttaaggttatggccgggtgtgttggctcatgcctgtaatcccagcactttgggaggccgagacgggtggatcacaaggtcagtagttcaagaccagcctggccaacatggtgaaaccccgtctctactaaaaatacaaaaattagccgggctggtggcgcacgcctgtaatcccagctactcaggaggctgaggcaggagaatcacttaaacccgggaggcggaggttgcagtgagccgagattgtgccattgctctccagcgtgggcaacaagagcaaaattttgtctcaaataaataaaaaaagttaaggttaacagcacttcccaccatgccccatggggtgattttcttttaacatcatttaacttttatcaatgtaatgcatttacttagttttggaaactaagcggtactactgggttgtagtgcaagacagcagtccctctaccagtcgcttgctccgcgctccaacttcccacagactaccacttttaactgctctgtttctacttatcattttagttaggatcacatttagctgccagtaatggagaacaaagtgacagtgacttaaataaaatcaggttgatttctctcacgtgaagttgacgtgtcagcagtcagtgctagttggacagccttgctccaagaggcctccggggctgtggccttttcccaccctcaggccaccatctgagacggtggccatcccaccctccttcagccaagcaggccgggggtgggatgttactatagaagatccttggatattggtgggtgcttagcaatgcctgccttaaatttcatatttctgtgtagcatgctggtactgctaatttctgattttaccattttagacattgctgacttctgctgtagaagaggccttagaactgttctacattgtccctccactgcctgaaacacattcaccccttgctctttttctgtgttccaaatatgtttatataattttgtttaaa

SEQ ID NO: 15893 - DNA, 2304 bp, Homo sapiens
gggcgggtccgcgctgcgggctggaggggcgggcgcgggagccgagcgtcctgagcgcacccctcgcagccctgtccagcctggacggcgacctggcgggccgatactacgcgctcaagagcatgacggaggcggagcagcagcagctcatcgacgaccacttcctcttcgacaagcccgtgtcgcccctgctgctggcctcgggcatggcccgcgactggcccgacgcccgcggtatctggtgcgtgtccctctgcgccctctcgcggcgtcctccctccccgctacctccgctttccctctcgcccccctcgcgggggtggggcccctcgcggcgaggaggaggaggaggaggagggaggggccggccgcgctccgggtctgggttccgtgccgcgcctcctcctgcgccggtgaccttggccgagcaggtgcgttaagggactgggccccggcccgtgggggctcaggactcagcaacacctccccaccccgagacgtgaggtgggggcggggctctctggcgcctctccccgacggccctgggagctggagctctttgttttcttttctcactcctccgccgctgggattctaccaggggctggtgacgccaaagcttctccaggggcagggctcctacccccactgtggggggcgggtcgggctgtcctggcggtccctggccccgccccacctcaggccacagcgcatgatggcagctggggttctcctgctgtgaggcgtcccggttcccccgcccgccccgtgttggcgggtggagtcttggcagcagcctccactcctgggcatggcagggagcagcacctcagggacttgggaagttcctttggtctgggggcggcctggggcttttttctgggtatgccctgagaccagccctcccgcaggcacaatgacaataagaccttcctggtgtgggtcaacgaggaggaccacctgcgggtcatctccatgcagaaggggggcaacatgaaggaggtgttcacccgcttctgcaccggcctcacccaggtgccagggacggggcaggcccagaccccagggccccagcagggatgtgggtgccccagcatcagtccccccgggggatttccggcactggggagtctcagggcctgtaggggtttcaggcaggccttctccctcataccctcttctccgtctgcagattgaaactctcttcaagtctaaggactatgagttcatgtggaaccctcacctgggctacatcctcacctgcccatccaacctgggcaccgggctgcgggcaggtgtgcatatcaagctgcccaacctgggcaagcatgagaagttctcggaggtgcttaagcggctgcgacttcagaagcgaggcacaggtgagcagggcaggtgctgcggcttcccgtggcctttgggcagccctgtttcctccgccctgacttgctgtctccccaggcggtgtggacacggctgcggtgggcggggtcttcgacgtctccaacgctgaccgcctgggcttctcagaggtggagctggtgcagatggtggtggacggagtgaagctgctcatcgagatggagcagcggctggagcagggccaggccatcgacgacctcatgcctgcccagaaatgaagcccggcccacacccgacaccagccctgctgcttcctaacttattgcctgggcagtgcccaccatgcacccctgatgttcgccgtctggcgagcccttagccttgctgtagagacttccgtcacccttggtagagtttatttttttgatggctaagatactgctgatgctgaaataaactagggttttggcctgcctgcgtctgagtggtgcctctcctttcccaggggggagggggaagggcagcagccaggccccaggagtcttgagtcctgggcctgctgtgggcctcgccttctgtgagatgggacaagagccaggaggtggccactctgttctgcctgccctacctagtccatgggccccttccctcgtgtctatcgggctgtgcaggcaggaacatgggagagagcgagggaggagctccaggcctgagcatctgagggcattcaggcctgggtgtggagcctggcacgttcctcaggcccatcctgcagggtgggggaggtagggatagtggaggtggggggttgacctcagaaacttgagagctttccggtccctccaactggcttcctcctccagtcttccaagctgcaacactatcagatgcaggcatctccctgcctccttcctaccccgccaacacctactctctatcttc

SEQ ID NO: 15894 - DNA, 1028 bp, Homo sapiens
gatgggggtggccacacatttgcccctttgtcctggagactggagcgcctatcatgccaaaccaggacagggaggagcagggaccaggggcagagcgcaggtagggctggcctagacagcagctgggggtggccttggctgctagggatcactcagaacagagggggacggtacgtttattgctcatcactcacacttggggccaggcccctgctagcatagcactcaaggcccccagcacaggggaaacagaggctcccaacagccactggctgcctgggcagaaacccaggccccctaggcaccagcggcagctccaagggccccatggctgacacaggcactgctccttccttgaggctgtcagacaccagggcgggcgaggagagcccccagcctgggcgtcctgccctctgtccccactttgggaaatgcccctaagcttagcctttaagaggtgatcacataggcactgtccctgggtggtgtcctgaatgcacctcccctaccccacaccgttgtcactgtggagggacctcctccatgcccttggcttctgtgaggggtaggggtacccacatagttccgggactcacaggctggcattcacaccccagccccgacacacttgcctggttgcctgcggcagacaacccactctgccgctcctctccgcagcgctgcctggcctcagcgagtgcagcccatgtcaggggctctggctgggtgggggatgccccgcctcttggacatgagtggacgaaggcctgggctgagctcagtgctgtgacatcagccaggaggccagagagcagggtcacctccctggttcctgggctggcctggtctcctagcgctggggagagcagggcagggattctgggtcagctcaccccagcttctggccaaggctggagcctcggcccggggactggagaagcacgagatggtctcaggccccgtggggcagccagggccgtgggggcccaggggtcagacgcagcgtggtctcagggtcaatgcccccc

SEQ ID NO: 15895 - DNA, 1095 bp, Homo sapiens
cggcgagggctggcccgggtacgctccgcccctctcagggagattgagactttggattggttagttagtcagtcacgttagcgccgcttcgtctctgattggtgtagcccactcagggtgctaggcgcctattggaggagaaggccgagaggagcaggacggcgggaagaggagtgcggaacccgcgggaggtgaggcccgccgagccgggctgcgagccgggctgcgagccgggcggcagcggggtcggaggtcgtgggcggcagcgggcgtgaggggtgaggcagggtcaaggggcgggggcggccgcgggtctccattgcccgagcctgtgggagcaggcgggcctggggctgcagcactcaccccgggagccccgccgcagctcgggtagcgttcaggcacctcgccggggccgggccgcgtgcgttcggagcggggaaggcggtctccggggcccccggtgcgcgcggggaggcgtccgctcaggggaggccgaggtgggcccgcggctgcgcccccggccttcgatgccttcgctcgtccgcctgggaccgcgctggcttcgcatcgaagtgggagaggtctgaacagttattttaatactttgatttggaaagaaaatcctttaggccgggcgcggtggctcacgcctgtaatccgagcactttgggaggccgaggcgggcggatcacgaggtcaggagttcaagaccagcctggccaacatggtgaaaccccgtctctactaaaaatacaaaaattagctgggtgtggtggcacgtgcctgtaatcccagctgcttgggaggctgaggcaggagaattgtttgaaccaggacccgggaggcggaggttgcagtgagccgagatcacattactgcactccagcctgggctacagaaaaagactccatctcagaaagcacacaaaaaaaagaagaaaatgtttgttcatcctgcctttaattccttattacaaggcgtgaatttttattgttttttttgagacagtctggctctgtcatccggggtggagtgcagtggcgtcttcacagctaggcacaacctcgacctcccaggctctcaagtagctgg

SEQ ID NO: 15896 - DNA, 1050 bp, Homo sapiens
aggtggccatgatggacaagcgaatcagtgaactgcgtgaacgtctctatgggaaaaaaattcaggcatgtgaaaaagtttttgtgagataaactactaaagatagtttatccaagcattgcccatcttctgtaagtagcagtatgctcccccatccaccataactgataaaacataaataggccataaaccatcaaaaatgacagaacagagttccttctcccagtgactcatttatttcctggtgtgtggaggcagaaccatcctcagcctgcagccttgctctcagtgtcctggccttccttcctccccatgtgtttctgtctcctcttcactgggggatgctgttggctctggagtcacagcatctgtcacggtccgcactctgccattttaagctgtgccactttgagcaaattctttgacttgcgtagcctcatgttcttgctgtaaagtgatttgtcctacctgccccgtgagttgttgtaaggattcttataaataagccatgtagaaggattttgtaaactcttgaccaaaatgctatgtaaggggttatgcttctaaaaaatccttatttgatactgaattttaaaggtagtaaatactcattgaaaaagtaatacaataaaatactcattgaataaatactcaatgaaaaaataatacgataaaatactcattgaataaatgctcattgaaaaaatgagtattaacctttgaaattcagtatcaaagattttggacttgccagcgtccacaatcacatgagtcgattccttaagataaatctcttaagtacagaaatatttaagggaaaatgtgaaagtcctttccaccctgttctctagaggtgatagttgctaatggttccagtcttttccctaataaagacacaaaggtacagaactttaactgaaaatgggattgcaggaattacactagtctcactgctcaccttgtctttttctaactgcagcacgggtgtctttccaggtcgttacttcattctggttgcaccatctgaaagctattccctggtcccagggc

SEQ ID NO: 15897 - DNA, 1053 bp, Homo sapiens
tttatttcaaataatctgaatacaatgaccagtatacaatttttaaaaatcacgtgcacaaggaaataagacatcacgaacaaaatgtgacaaacacctcagatactggtatgacctgacacaggctatagaacagctgtgttggccgggcacagtggctcacgcctataatcccagcactctgggaggccgaggcgggcggatcacgaggtcaggagatcgagaccatcctggctaacacggtgaaaccccatctctactaaaaatacaaaagattagccgggcgtggtggcgggcgtctgtagtcccagctactcgggagattgaggcaggagaatggcatgaacccgggaggcagagcttgcagtgagccgagatccgccactgcagtccagcctgggcgacagagcgagactccatctcaaacaacaacaaaaaaaaacagctgtatttactttatttaaataaatgacaagttttgttggtatgttcaagagaataggaaaatattttaaaatggcactgcagaccgaaaaaggaaccaaacagaactttcacaaatgaaaaaaaaaccctgaaattaaaagctcaaaagaaatgtttaacacatatagacaaatctgaagatttgcaatgaataacagaaattgagaataagcattttgaaactttcatatcaacttaacagggtaattttatgtctactgactacaataattaacattgtggatgtattttgtacttctataataatttattttcattgtattttctgataaaggactcatatctgggataacatactgttacaattcaacaagaagaagacaaccaacttaaaaatagacatctcatcaaagaagagagacaagtggctaacaggcatatgaaaagatgcttaacatttccagtcattggggaaacgcaaattgaaaccacagtgagacaccattacacatccacaagaattaagctataagcaaaaagacaaatattagcaagaatgtggacacactggtgtccattgctggtggaaatgtaaaatagtgcaat

SEQ ID NO: 15898 - DNA, 1034 bp, Homo sapiens
gggtccaggagggcagaggcagagctggcgtcttctggctgtccagggccaggacagggaggggcctggaggtttccttccccaaaggctgtcctgctccatggaggaggcatcgaggctaaccctccgtgatgtccccagagactccctgctgcccaccccctcgcccaacaattgtagggcaaagctcctggctctctggccagcggctcagccatgtcccgcactggctgtcctggtggtcaccctccaccctatgtcctgctgttttagctgtgaagagctccaggacatcgacttggagctgggcgtggacaactccgccttctacgatcagtttgcaattgcccaggtagggggctctgggcaagaagggaggcttgcaatgctgggagggggccatttactgctggacatttgctgagctctcccccatccagaggaggaggcaggctcctgtgtggataaggtagttagcaatgggaccaggcagtgggagcagtcgggaaggcttcctgcaggaggtgggggagagctgggcttttgtaggtgggtttggggaggagatggccacagtgagttagaatcaggaagtggcaaggccctggggtctggggtgggaagtgtgggggtgtggggggaggtggtgccagaaacgaaaccaggcatcagatcctgggggtccagtgtagggacaagggctttggactttggtgctggcgctgggtgggcctgttcagatcagagctggaggcttagaggagtcccctagccagggggaagctgatacagagtccaaggaaggaggcaggggatcccacttgtgaattcagatttgccaccctgcccttgtataagctgcgtcccccgccccctaggagacttggtggagggcgatggtggcccccactctgagggacgctatttgctgaaatgcaggcatgtggggacacatcagtggcccgtgagggccggagggggaaccctggaattgggtttgccccttgaaatctgcagatgtgccccagacggag

SEQ ID NO: 15899 - DNA, 1520 bp, Homo sapiens
tggcatgaggcagtgtggtgtggggcagtgtggtgtggggcagcgtggcatgggggcagtgtgatgtgggggtgtatggtgtggggcagtgtgatggggtgtgtggtgtggggcagtgtggtatcgggcggtgtggtatcaggcagcgtggtgtcgggcagtgtggtgtggggctacgggcggtgtggtatcaggcgacgtggtatcaagcagcgtggtgtcgggcagcgtggtgcggggctgccgtcctgcctgtggggccgcagttccagctccccttccttgcaggccctgaagtactctttccagacccacgaccgcctctgctttgtcatggagtacgccaacgggggcgaggtaggggctggggctgcgggggatggacttcgcggcctgtgggccgcccatggtggggccggtccttcccggagcctcggctactctccatggcaccagacggtgctccctgctgggtgggtggtgtgatgcctgcccaggcagctgcctgctgtggggtgacttgttcctgctgagttagggcttctgagactttccaggcccccgtgccctctggtggctggtcccttccctgtgcaatgccgagacccggtctgagaaaccccagccctgcaggccatgggggcagaggcccgagccacggctgtgcctcaggttgcgcctcccgcagctgttcttccacctgtcccgggagcgtgtgttctccgaggaccgggcccgcttctatggcgctgagattgtgtcagccctggactacctgcactcggagaagaacgtggtgtaccgggacctcaaggtgcgctggcgggcaggcaggggggcagggccctgggggcctggcggcactgacctgaggccacctttcccctagctggagaacctcatgctggacaaggacgggcacattaagatcacagacttcgggctgtgcaaggaggggatcaaggacggtgccaccatgaagaccttttgcggcacacctgagtacctggcccccgaggtgtgcgccccacctgcgtgcatacgcgttgctgcgtccccacgtcctgagcacacgcaatgctgtgtcctctctgtgccccaagcacgtcacacctcccccggcagtgtcccggacaccccttgatgccgagtcctgcccatctgccacccgtgcaggtgctggaggacaatgactacggccgtgcagtggactggtgggggctgggcgtggtcatgtacgagatgatgtgcggtcgcctgcccttctacaaccaggaccatgagaagctttttgagctcatcctcatggaggagatccgcttcccgcgcacgcttggtcccgaggccaagtccttgctttcagggctgctcaagaaggaccccaagcagaggtgagggccgcccatcccagctacaggctacacctccatcccctcatccccaggctgcacctgcccctgcgccaggcggtcctggcacctcccagactacactgatagccaaagcttgatgtccttggc

SEQ ID NO: 15900 - DNA, 1193 bp, Homo sapiens
tgtacgtgctgtaggtgtggctgtgccccaggtatgtgttccccaggtgtgcttgtgccccaggtgtggctgtgccccaggtgtgcgtgtgccccaggtgttcgtgtgccccagatgtggctaggtgtctagatgtgttctagatgtctgtgtattccagtgtggctgtgtcccaggtgtgcgtgtgccccaggtgtgtgcctcaggtgtgcgtgtgccccaggtgtggctttgcctccagtgtgtgtgtgccccagatgtatgtgtgccccaggtgtggctgtgccccaggtgtgcctgtgccccaggtgtggctgtgccccaggtgtgcctgtgccccaggtgtgggtgtgccccaggtgtgggtgtgctccaggtggctgtatttcccaggtactcagggtgaggttgggaaaaaagcaggacatttctacactaggtgggacaagcaggtttctggggtgcccccctcatgccagcccctctgtgggatctccatacccctcatcctctgaggcctggcgcacggcggggctcagagactgaaggaaggactgtaggagtggacgatggtgggggtttgacctgacgccgggccagatgccctgtgtggctgcctcagcctggagtagagtgtctgagctggaacaggggtcctagccccactctgtgaggcgagaaactgaggcttggagagaggaagagatggggcttcccaggacctggtgggtggtatgcaaggggagctggctggtgcagcgggggctgtggtgagggccctgggaggggcagggggatgcacgcagacagaggctctgcctgcccgcagagtgccagctgatgaagacggagcggccccggcccaacaccttcatcatccgctgcctgcagtggaccactgtcatcgaacgcaccttccatgtggagactcctgaggagcggtacgtgggctgtggcggccaggccaggcacttgggcagccccagcgcttaggagggacacggggatggcggggtgctggcacctctgcctgtagccatcctcactccccagtgctcccaggccctcctcagagcccagtttggaaactggcccagtcctgcctgtggggtttgggtggggaaactgaggctggagataaaaactggctagggaccgggtgcagtggctcacgtctataatctcggcacttt

SEQ ID NO: 15901 - DNA, 1045 bp, Homo sapiens
catctgaggaccacaacagggtggggaactcaagttaagtcctggatgacaggttccagttcccctggggaccctcaggatagtgaaggagaagactccatgtgggttggtctctttgtgtgaggggtctgggagggcagccctggctgatgtgtctgtgctcccaccctcctgagggacccggagtaggcaggtgcaggcctgcaggcgtcctgtggccatgaggacagtgatgctgggccccgggtggctgtctcctccacctgccccgtcctgtgtcaccccagtcctggatcagggagtagtggggccctgccgcatctgctgtcggggctggccgcccacccagcatcctgtctgggctgaactcgttaagatgcgcgccacggccctggctgcagctggcacccccccaagtgatcctctagctgaccctctaggcgagagatgaagaaagagaactgtgtgtctctggaccccttaccccgggtccctggggatcctgctcctcccctggaggggtctgtgtgctgggctgggatgccgaagacaaaggccacgtgaggccccttcactcacacccgtctcctggggtaggccctgatcgccgtctgttccctgggtctgtggggccaggcgaggggaaggcactgaaagcccagggcccatttgggcctctgcccatcccaggactccccaggaatgctcggggctgggcacctgtcctctcccaccccccacgcctggtaagcgccgcccctgggcctgcccctcccgcacccccagatccagctcccagaaccccccagatgcagctcacagaacctggggctgggcttgtggcagcagggtcaggggcaaggctggggttgggcacgggagctgcgtgctcgggggcagcacggggccatgctgggcacggtgggggctggcagcagttggtggataagatgggtttcaggggtgccgggcctgggcgctcatcagtcttcccgctcagttagcgtcccggggagtggcagctggcaggatgggaggcactcca

SEQ ID NO: 15902 - DNA, 1048 bp, Homo sapiens
tgcctggccgggcccgggtgacacgggaccgtgtgtccatgcggctcacggagggtccagtctccggacatctgagtccttgccatgccctaccccgggcccatgcctggcatagaccccccagtccaggcctcagggcagccccctcaccactcctgctgagttagccccaggcgtcccggtggggagtatggaggctggtctctgaccccaagcaggtgcctaggctgggcctccttcccaccccctctccccgccttgaagtcctggcactggctgtccctgcgggggggcactgaggcagggagagagtggttcctaccccagtgtgttacttcgctttggtgagcgacatagaacctcactgcatccccagctgctgctcagccatccagctggtcctggggtccctgcgtgaggtgggggacctcagagggtacaggccactccccttcatcctggaggaggccttggctttgctgagtaaacacccttgagaagaggtctgtgggggactctgagcccactccagagagcagctgctgcggagggccccgcagggctaattgtttgtgtgcagatggaggctgctcattaccccgccaggatgaggggcccagcaggaccctgagggagggagcccgcagactctcccctcagcctgtgggaacctttgggctccaggccagggctgcctgtgcctcctgggcctcagtttttcccaggctgtcaggtgagggtcaaccccaggctgcgtctaggtggcttcagtgtgagacccgcgggccctgggctggttagtgccaagctctgcctcccctgggggagcgttgagggtctggaacggcccccgtgggcaggccagggacagagatggggaggcaagtgtgctggctcctggtgggagggctgggcagagagtgggggtcccaacagccctgggcctacccgggagaggggcaggaggcacaggctggtggaggtcatggcatggctgtggtggaggccgccagcatcagggaggttcctgttttgggagcttgttgag

SEQ ID NO: 15903 - DNA, 1110 bp, Homo sapiens
acagctggagcagacagggaggtgtggcaaaagtaggtgtcacaagatggggcattgtgggatgtataggagctcacagaagagcaggcctaaggagccacaggagcctgggggtggggtgaaggagtgaccgagatgagatgctgggggaatcaggggtgtggctggctgtgtgtttggagtgtttgagtgggcagctaccagtgatggcacgcggggcctcgagatgaagacaaggaggctgcagacgcctgtggtccttggggagcttctggctctgcttccccccaaggcctcctgccgcatcctgccttctccatcccctccccgtgtgctgtcccctgcttgttccccaggagtcctgccacctgtgcctggaggtcctctcctcacctcacagccctctttggtgtcagggaccccctgccccgaccctggccctgttcctctctgtgtcacatagtctgctgcctggggccgctgcttctttatccttggcaaatgtgtgtttgttgatagactgttggatctcgggctgacccaggagatgccagggccttgactgcccaggggcccaggccccagttactggggcacccatcagccagctgggcctaggcaggagtgctcccccgaggccaggtgattttcaggctgctgctgatgtcgtgccttcaggaggggcctggcagggacaggacatcaggcccagtggggcgtccagagagctgagtttgaaccctggttagccactctatcgccatgaccctttccaagagcaaggtcattgagctccttgggcctcagtttccccatctacaccagggagcggtggtgggagagagacctggtggagtggagaatggcttgtgggcggccctgagttggggtccggccagcctcagcagcctctgggctctgtcatctggcccctagcctcaggccaggagagagggtcctgtacctctacccccggctcttcctcctccatccccagtgtagtgggcgctgaggatgggaggtggcgtggatatgacatatgcccttggcaggcatagcccctcttgttgccgagagcaggtggcgtccacccgcatggccggccgctcc

SEQ ID NO: 15904 - DNA, 1071 bp, Homo sapiens
gctgagggagaggaccaggcttcctacagcgccgccgctcccggaggagacagccgtggcccgaagccccaggagcgccggcaggtggacgggaggagcgagactctgtctcaaaaaacataaaataaaatcataaaataaaataacacgttatgatgctccatttggtccagccgcttagcgtggctgctgtcgaatgcagacacagcaaggaaagggaaacacctccgcacgtgggggaatttatatgtgacatttgctcccaagtcagcaggggtaataagtgacgttgcttggcagggcgcggtggctcacgcctgtaattccagcactttgggaggccgaggcgggtggatcacctgaggtcaggagttcgagaccagcctggccaacatggtgaaaccccgtctctactaaaaatataaaaattagccggtgtggtgttgggcgcctgtaatcccagctactcaggaggctgaggcaagagaattgcctgaacccatgaaacgaggttgcagtgagccgatacggtgccactgcactccagcctgggcgacagagtgactccacctcaagaaaaaaaaaaaaaagttcctatatgatatggaaagatgtctacaatctcctttttttttttttttttttgacggagtctcactctgttgcccaggctggagtccaacggcgtgatctcggctcactgcaacctccacctcccagctgcaagcgattatcctgcctccgcctcccgagtagctgggactacaggcgctgccaccatgcccggctaatttttctattttttagtagagacgggattttgccatgttggccagtctggtctcgaactcctgacctcaggtgatctgcctgccttggcctcccaaagtgctgggattacaggtgtgagccatcgcacctggcctacaatctatttttaagtgaaaaaagcaaggtgcagaacaacatacatggtatgctgctttttgggtggtaatgggggaaaatatttgcttatagttgcgaaaagaaacactggagaatacacaagaaactaatagtggttccttg

SEQ ID NO: 15905 - DNA, 1023 bp, Homo sapiens
cctgcttcagcctcccaagtagctgggattacaggcacccaccactacgcccagctaatttggtgtatttttagtagagacagggtttcaccgtgttgccaggatggtctcgaactcctgacctcatgattcacctgcctcagcctcccaaaatgctaggattacaggcgtgagccaccgcgcctggcattcttggttttttgacaggatttaacttttgttgcccaggctggagtgcaatggcgtgaccttggctcactgcaacctctgcctcccaggttcaagcgattctcctgcctcagcctcccaagtagctgggattacaggcatgtgccaccacgcccggctaatttttatatttttagtagagatggggtttcaccatgttgatgagactggtctcgaactcccaacctcaggtgatccacctgcctcggcctcccaaagtgctgggaatataggcgtgagccaccgcacctggccatgtatgtggtatttttaagtctgtaggtacaaattgactttaattgggaagaaattttccaagtgtttaataattttgtttacaaaatgtttattcagaaacagaaatacaaattccagtcatctaaacttggcactgttctctgcggtttgcttctggccaaactgaggggagcgggcatgttagttgacagtttcccaggggcgtttcctgacgtgtggtgggtacccctcacgtgcagcatgccttgcacacagcttcggagccccttctacctcagaagttcggtttctagggttataaagtaatgcacgtttatttgaagacatggaaccagtatgaagatagcagactcctcccagggaaccgatcttcctttcaggggtgacagcgcaccttggagaacgctacctgctccgcccacagatgcctgcgcaggatttcctcgggggcggggcggggtgggagggggtggtctccacagggctgagcccagccatctgggcctggatccctgctgggccacatctgggccaggc

SEQ ID NO: 15906 - DNA, 1040 bp, Homo sapiens
aggctcacacctgctggtcctgtccttgaatagacagaaaaaaggttccccctgttctctgaatttcttttcggtgtgatagatctcattgcctgtgcatttaacactcctaaattttataaaacgattatttctttggcatttatccaagagaaatgaaaaaccaatgttcatgcaaaaacatgttctagaatgtccatagcagctttatgtgtaataactccaaactggaaacaaggaaaaagttcccttcagctggggtgtggtgacactctgctccgtctgtgcctccagatcctactctgttgggaactgttgacacacaagagtttgcaaggatctcaagagaattatgctgaaggagaaaagccaacctcagaagggtgcttgctgtgggatcccatttatgccacattgttgggctgacccagagctgaagggtggcatggccagaaaaggacctacacagggaggccagggtgtctggtcctggcaggagagcagccgtggaacagggtaggaacacagacgtggagctcagtggaggagggaaggaacgcttagctgtggggcttagagacttggcaaaacaagaggaagctttaccagcaagtgtgcagaaatagtgcgggagaaagttggtggagcgttccaccttcttaggatgcagtttaataatgtttatcaagcctcttaaaaatgtacctgcacatcaccctagtaagtaaagagccgaggctaaggaagccaaatgctagaaataccaaaacacctaaagttagaaactggtatcatttgtgattgggaaaattgtcagtagtgtgaaacttccctcccttgtgcagagaggaaagtgctgggagaaacgactggaaaggaggaacccaggtggtgactgtgtttttctgagtggatgggatcctgggagaaaattcgttttatggtttttgatgctcttccagattgtctatggtgagctgtggaaataagcaaccaggtgagaacaggcagaggctgtttatccagagcttcccctagca

SEQ ID NO: 15907 - DNA, 1049 bp, Homo sapiens
gcgccatcagggatgtggtggaggcaggggcacagccccgggttgctgtggcctcgtgaaggcactaggtttgtggtgcccctggggtgtggcccataggtgggggtgggggctgggaactgacaagaagggatggccatcacggagcaggtgtcagcgaatggggccacacacctccccaactcactgcctggtggcgaggtccccaccgcaggaccccgggctctcctgtgtgcccggacggggacaccctccacccctccacttccccccacccctcactgcctgctggtgaggtccccaccgcaggaccctgggctgtcccgtgcgcccggatggggacatcctccacccctccccttccccccactgctcgctgcctggtggtgaggtccccacacctcaggaccctgggctctcctgtgtgcccggatggggacagcctccacccctccactcctccccccgctactccccactcactgcctggtggtgaagtcgccactgcaggaccccgggctctcgtctcccgtgcgcccaccttgctccagtgtggccagggcctcagtgttgggggcaggctgctgggagcctggagccctcgagccatccccacaatgccgttctttgccgcagtccttcagccctgccagggacctgcctgacagcagcctgatccagggcgcggcccacgccatcgtggccgccatcacccagcgggggaacagctcactgctcctggctgtcaccgaggtcaaggtggagacggttgttacgggcggctcttccacaggtaagcgcgggaggtgggcccctgggaaggcaccaggcaggcaactcaggcattgggcacagagccggccgatcctgccgatcctgccagccaccaggaacacagaagtccctggcacctgctgccccagccgcccagccccacaacctgaccttcccagcccccgtcctgggaccctccccacgagccagcaaccggagggtggggcccggccgcctggcccgcagggccctcccaggcctgggtgtgtggctag

SEQ ID NO: 15908 - DNA, 1085 bp, Homo sapiens
tttactgggagcgagcgaaatgactgcctttgaggtgggggcgagggcacgtgctgtgcccagggccacatggccgaggcagagccaggagtgctcccctgctgcccgctggcctacccagcccctggtgcctcccggccctggcagcaccttgtgagtccgagccggcattctcatccccggggtcccggcagggccttcctttcctggtgcctgctctcggggcccagctcacgggtgaatcccaaaatagctcagggaggagtgacgggacagctggggctgaccgtcggcagccagcggccgggaatgcccgtgacagtggggctggccggcagggctgcaacccctgcctggctggggctgctccagttcaaaggcctgaggccgcccgccggccctgggtgtggcgtgggtgactgtgcctggctcccctgccaccctttcaggcaccacagctcactgggtcttgcgcccctcctccttcccccaggtgcagctacggctggcaagggaggttctgcgatgagtgtgtcccctaccccggctgcgtgcatggcagttgtgtggagccctggcagtgcaactgtgagaccaactggggcggcctgctctgtgacaaaggtagtggtagggggcggcaggcctaatgctctgccatcgaagtgtgggttgtgggggagcggggggccggcttttcccctgagcatcccacccctgcccccagacctgaactactgtggcagccaccacccctgcaccaacggaggcacgtgcatcaacgccgagcctgaccagtaccgctgcacctgccctgacggctactcgggcaggaactgtgagaagggtacgtggggggctggccacccaaattctggccaggcagggactggttccctggggagccggtcaggccccatccctctggcgtcctgtgtggtgggcccctgacccccagcttgggaacctgtgggcttggggaggagtgcttgtggaaagctgggggcctggctgccagctctgccccctccccgcggttctacagctgagcacgcctgcacctccaacccgtgtgccaacggggg

SEQ ID NO: 15909 - DNA, 1035 bp, Homo sapiens
aaaccaagtcggggcgttggtggggcagcaggtctaggaggctgtgttgtgttggcctggaccgtgcagggccctggacctgggggggccgttagcggggcagcagggaggctgtgttggccttgaccgtgcagggccctagacttgggttgcctgagttttgggatgctgtagattggggtacagtgggcagtggggtgccgtggacttagggtgcttggcatttggagtaccctgggccatgaggtgtgctgggccatgcagtgccctgggctgggggtgccctggacctggagtgccctgagctttggggtgccctggactgtgggtacactgggccatggggtgcacaaggctgtggggtgtactggatctagggtgccctgggcaggagggtactctgtactttgggtgccttggacctgaggtgtcctgggctttaaggtgccctggaccttggggtgtgctgggccatgcagtgctttggggctctggggtaccctgggctttggggtgccctggaactggggtgccctgggtcttggagtatgctgggccatgcagtgccctgggctgtgggatactctgggctttggggtgccctggacctggggtaccctgggctttgaggtgccctggcctggggtggaacatctattgtcttgtctgcctgtcctctggcttgtgccactgctgttgcccctgcctggggacaggaggaggggtttagacttagccttgagggttcgggctggggaggaggcaatcagatggtgggagatgaagttgggctgcgggtctgcttgtgcggtgggggtgggtcaggccgggcttgtagggagaggcttagctgggcctgcaggggtgaagcccttcccccttggcctccagagactgggcaggggcatagccctgctaggctggccttgagggagggcctgggttcctctccctgcttgccggggaacctgggcaggtgatgggtctctcacctgtccccagacccccagcccacacatcgcctattgcccctgc

SEQ ID NO: 15910 - DNA, 1052 bp, Homo sapiens
gcagccctggtctcctgccatgtggcctggctgccgggcgggagctgtgccgtgatgccagcaccctggtatttgcactcgggcggcggcagtccctggccatgctgccctggcttgctgaggtccagctctgtgcggtgagctgaggtgtacttggctgtgatgggaaggcaaggaccgagttcaggctccctgggacctgaggaggggtttcagcctggaggctagggtggcatcctgcccaggcccgtggggcttttgggctccttggagtaaagggaatgagagggccttgtggaagaggagtgggggagtctgggctctgcattcgctccctccaccccctgccccctgagtgactctcccaccttgtggtctctgctgttgacccaggcctggctgggtggccctctgccccctggcctggcttcttgtggccggggtctgtgtgctattagtcatggatctgtgctggtctcgggctcagcttccctcagtgggtgggcccagggtcttgaatgtggagaggtggtggaccacatgccagcaggctgcctggctgcccctcctctcctggctccacccccagacgtccccaggaggccggtgtcagcctgggttggttctggtgcctggcttgtagctggcagggtgaggccacattctcccagctgcgtgtgtgcacgcaccccgggtgctctgtaggcatggcaggtggtgatggaggtttggggaggagtagtgtcatgctgggggcagcagggagctttgctctggggcctggtaggtggcaggcccaggggacacctgctggctgagggaggagcagggtggtggcagttggccgtgacctgggcagccagggccccaccctcagaggtgcagctggaagtcgtgcctgcctggctggcccatctctggagccaggagcccaggagcctgcctgccagcgagggtctttcttgttctgtcttggcatgtgtgtgctgggctccagggcagctgtgcggggtggtgtggctggagcatggtccccgtgacagatctgggct

SEQ ID NO: 15911 - DNA, 1022 bp, Homo sapiens
cactgtgcccccagctccccagcccatagtactgagcacagccgggaggcatgggaggggctggagtccccttggtccccctggaggaggtgggcctgggcaggttcctggcagagggaccgcacaggctctcagggcaagtggtcaagcagccctggccgcggtggttctactggtacagcctctgggccacagcctgattgtgagggtgctggggagccaaggagggctctgggaagtaggcatcctgcttagactcgcatcgggaagagcaggccgtggcttcagggatgcaggactggagatgctgctgactaggggtcagggtgtccgtctctgagggcctgatggggggctggactgacagcaaagttcacccaccctgtggcagggcccgtggctccctgtctctgattctggaggtgagccaggcctcttacctgccgctgcaaaggacaaggcccagggaggcagtcagcttggggcgtgatggagtgaagttggaacgtgccctggggtgggggaggcgttgcccagcctggctggcagattcctctcagcccgggccaagggccgggcctgtctccttcacaagccggcggaaaccggggctggaaaccccagacccgccacttccctcagaggcgcagccgcggccgccgccggaaatgggccatcaggaaggggtctgcgggaggtgaggggctagagggcaaggaagcagctgggtaaggtcggtctggggtgagtccccccggaggtggggaggccttgggggtggggcatggaagcccccagttctgtccctgcccctgtatgttgggtacatctcagagggcggcctctaccctgcaggcctccggctggccttggttcatggcacccgacagcccctcctgcggcgagccagggctcccccaccccctggtcatcttcccagatgcccctcagtcccgtttctccccagatccacacctggccctccccctcctgttccagaatgcagcccagcccctctgcca

SEQ ID NO: 15912 - DNA, 1028 bp, Homo sapiens
tcacaaggtcaggagatcaagaccatcctggctaacacagtgaaaccccgtctcttctaaaaatacaaaaaattagccgggtgtggtggcgggcgcctgtagtcccagctactcaggaggctgaggcaggagaatggcgtgaacccgggaggcggagcttgcagtgagccgagatcgcgtcactgcactccagcctgggcgacagagcgagactccgtctcaaaaaaaaaaaaagaactgatcaggttgtctccaaagggttagcaccatgcgtggaagtgcaagggagcgtgttccccctgtctgggaagtgcggcctggttttcttttcagggctagacattctgatggttgtgaaggaggagcttggggtggtttcatttgcatttccttcaggactggaggtctttgtatatgttcatttacaccaatatgtcgtcttcgccggagtgttcagatctttttccattttttaattgggttgtgttttcttgtgaagttttgggaattcttcatctgttctagatttaagtcctttatcagttacgagatttgcagataagcctgtgggctgtcttcattgtcttaacgatgtctttcaaagggcagttcttaattttttggaaatccgttttatcagtgttttatggattctgcttttagaaccattagaaatgtttgccttatccaaggtcacaaagtttttcttttacgtttttgtctgaaatgtctgtactttaactctccccctaggtctgtgatctgctttgagctaacttccgcgtgcagtgcgaggtgtgggctgaggctcgttctttggcacctgaccgccaggcaccgtgcactgacagccgttctatgggttacctggcagcttggtagcattgttttttgtcacaaaagcgggcaccctggccctctgcctggttaacaggtggattgtgtacacctaggctccaccgaggacaccgcgtccagcttgtgtggcgaggaggacacagaggacgaggagctggaagccgcggcca

SEQ ID NO: 15913 - DNA, 1050 bp, Homo sapiens
tattgcccagtctataagcgtatctttttttttttttttttttttttttttttgagtcagaacttcgctcttgttgcccaggctggagtgcaatgctgcgatctcagctcaccaaaacctccacctccctggttcaagcaattctccagcctcagcctcttgagtagctgggactagaggcatgcaccaccacgccctgcaaattttgtatttttagtaaagatggggtttctccatgttggtcaggccggtctcgaactgcggacctcaggtgatccgcccgcctcggcccccaaagtgctgggattagaggtgtgagccaccgcgcccagcctatgagcatattttttatcgttctctttatttctagctgcgatgattgtatcttattgaaaatcattaaaaatcttagcaattgttttaaattatctaatttttttctccaaataatatctattttagcagccaaatcaccacaaatcattggtttttatctttagttgtgggtgcacagcgggtgcgtgtattttggggcatgtgaggtgtcttgatgcgttcatgcagtgtgtaacagtcacatcagggtaaatgggacatctttcacctcaagcatttatccttcgtgttatggacaccctcagctggaaaggggggctgcgtcgtgagtatgaatggatgcaagtcatagccacctgagcctggtggggcacagcagggccctgtggagtcacatcccggcctcatgctcggcataggggagcgctgcttaggtccatgcagtcgctcagggcccaggctgtgcagcgcccagcctgtcctgctccaggcactcccccgtggcactgtgccgtgctggcagaggtgcacagcgccaggcctcagtgtgcacacacagcccccgtggcaccgccatgctggtagagatgccagaagtgggccctcctctcacccatgagtgtcagctgatgccggccggctggcgacttgtgtacccagcccacgcctgtcttgctctaagagtccccggaccgttgttgcgtgtggtgctgt

SEQ ID NO: 15914 - DNA, 1024 bp, Homo sapiens
gtgcagtttgcccatttttaatcgattttgttcctgagttggagttttttgtatattcaggctgttaaccccttatgagatagatggtttgcacatagtctcttccattctataggatatcatttctgttaatagattcctttgctgtgcagaaactttttagtttgaggtcatcccatttgtctatttttactttcgttgcccttgctgttggtgtcatgttcaagaaatcattgccaagaccaatgtcgtgaagtctttccctttgttttcttctaagggttttacagtttcaagtctgtgtttgggtcttgcatcggttttgagttagtttttgtgtatgatgtaaggtaagggtctatctttatttgcaagtggatatccagttttcccagcgctgcatattgaagagaccatcctttccccattgtgcaagaagttcttgtcacccttgttgaaggtcatctgtctgtcattgtcatttctggccctgtgctgtcctgtcctgtcctgtcctgtcctgttctgttctgttggtctgtaggtctgtctttatgtcagcaccatactggctgttggactttttaattcttttcttgacagtggtaatttatttgcttctttttcttattagtccctttgcctactttaaataattaattttgttaatttttagttttctgttattttagttcattaatttcattgcttcctttatttatttatttattttttttgagatggagtcttgctctgtcactcaggctggagtgcagtggcacgatctcagctcactgcaacctccacctcccaggttcaagtgattctcctgtctcagtctcctgagtagctgggattacaggcacttgccaccatgcccggctaattttttgtattttttagtagagacggggtttcgctgtgttgcccgggctggtttcaaacttctgagctcaggcaatccacctgcctcggcctcccaaagtgctaggattacaggtgtgagccaccacgcctgacccat

SEQ ID NO: 15915 - DNA, 1114 bp, Homo sapiens
agaatctaacctagcggaaaagtctagaaggaaaggatcaaaacagcactcactgcccgatggttctgacctaccctttctttaccaagcagatgactggtttccatggcccgcttagaggcccctttcttactttgcctgtttgcatctaggagcgtatgtcctttgggtagagaagcaccaggtggggctgggtcaccaacaggactgagcaacacgggctgcagcagcagaggggcaccggctgaggctatacactcggcccatgccctctcccaggtgccaagaggggccatccctcttttcgggggtcatacaggttttccagaaaacaactgcctacagggtatgcagagtgggaggagagagacaaggggtgggagagcctgtttcaccctatagtccactcctgcaacaggctgtcccgcagcagtgtcacagctagtgacagtccccagggtccagaacgctgggcccagcagaatgctcccccgacagtctgttcatagggtaggactctgaggtgctagtgatgcattaggacatagagacaaccaggcacctggtgtttcctagggtggcccagaagccagccagcaacccaggggacagatgggcttcactggggcgcagtttgctcctaaccacatagcatgttcagcatgacaggttttctcctcgggatgggagggagctgttctgttgcatgagaaagagaataccccactgtacaactgctgtagtcatttactgacacgtgggtgttattttaggcaacctttattacagaagtccactattttaagtgactttttgccaattttagatttgaagggaaggtctcaagttaagcttggaaccacttagaatccaagagggtagcaggaagatccaacccctcaaagcaggtggcatgggtgccactgggaggggatctggggcctgtcttgagccgtaaatcttcctccacctgagacgtgcaccccactgtaccagagatgcctaagactccaatccctgggttctggctgtgtggaaaatgtctctacacagtcaagcttcagctgactacatgtcaaagagagacaaagttaagagcagcctttcatggtgt

SEQ ID NO: 15916 - DNA, 1023 bp, Homo sapiens
gtgcggggcctgaggatgcccagtctgcctgccgggctcctgtgtgggtgcttggtcggccgctgagtgctgtatgctgagtgctgccagggccttgcccttggtgggttggggctgggcactactgctctacacggagcttcggccgggccgtgtgttcccgtgccaggtggtgttggctgccggtgaggagcactcagagcagggggggcctgcagaaggggagtggcactgggtaggggcagtgagccgtgggccggtgcagtgctgggcatcattctccagaaggtgtgggtttcgctccttggtcctcacgccgtgtgggcgccgcagtccccctctccagtcccatggggccgggaatgctggtgtccgctcagggtggggccctgccggcccctgcactgctggctgttgtggacacagccctttctgtggggctctatatacaagagcactttccctcgcttctctctttgggtatccagtaagagcatttgtatgtgaggctgttgagagaaatttcttgtttttttaagttttagttctgccttatgtaaatctctgtaaacttttccatgtaaggaaagtgtgtctgagtcaggacccatctgcagtttttctccctgcaagcatcgtgcagccagccagggtgtgggcagcctcagtttccccatcctcttcacagtggagtggcccctcgctgtgttgtccacagctgtggtggggaagcctggttggttcctggagccgggacagtttgatggcacagcagtggggtgcagggctgcaccgtcatgactggaccatttctgggccttgtcatctgctgatgggagcctcgcgtgggcctctgccgcactcaggaatgtctggcgccctttgagggcattgtgtcacctgccctctattgtgctcccgcgtctctcctttgactggcactcagctgcaccgagcagaagaccacccggcacagcgtggcaggggccagaagggaggcagaaagaggccccagctggcaga

SEQ ID NO: 15917 - DNA, 1057 bp, Homo sapiens
aggacaaggttgggagggtcaggaagaacctgtgtgctggagaaaggatgcttgcacagtctcggacacggtgattatttgcctgcctgatggtggaggtaacggaggacaaggtacactccattctggaaatgtgtagctgagtacagagcatatgggggatatggagggccatgagatgagttcacttacctgtgtgacagagttggcataagaattgcattttgtctttaatagatttcatcgtttcttggatgtcaacagccacaaaatagaaaaaacaatcgaagggtaagtcagtgtgtatatatacgcatccagaaatatatgtattttcttatagatctttttaagatagctttataatcttttcttatattttagaatttatgaaaaatttgtcattcattctgatctaagcaaagctgctagttggaagagattaacggaggaatttctaaatgcaccacttcccagtataaaggaaataaaggtatgccttcaattatgagatctccactgtgtattttactgtttcctatctgattatcgtcaatttgtttcagttactgtttaaacattctattttagtattatctactggctaacgggatctcttggaaatttacttaaatattgccatcaaaccagatatgcctcagtttgtgatgaaagaaagagcttgtttttaatcattttttcacctcagtcctactaaggaaagagagatcagagattgatacaaatagtagcattgtttgggtatctcaaaactttcaaatggtttctcagcacttggcagtgactgtctgtagatgcttactagatgcctggtatactttcatattgtttgggggattccccaagaccaccttttggcataatgatttgctcaaaggattcacagaacttaaaaaaaaaaagctgttatcctcactgttaatagtttattacagtgaaaggatacagattaaaatcaccaaagggaaaaggtgcttagagcaaagtctaggagaagctaggcacgcatgtccaaatgttccttcctagtggagtc

SEQ ID NO: 15918 - DNA, 1047 bp, Homo sapiens
tggggcaggagaatggcgtgaacccaggaggcagagcttgcagtgagctgagatcgggccactgcactccagcctgggcgacagagcaagactccatctcaaaaaaaaaaaaattatggcaattaaaaagcaggagatataatacggtaggaactaggttttcttaacacatagaagagaagacaggaaagaaacattccagatattaaatattaatgatggaaatccaccataaatgatgggatttggatttttttttgttacatttttgtgactgcccaattttctataatgttatagaagataacctttctgatgatgaaaggaaaacctatgctgtttttattattggaacaagtttaagaggtgttaatatttctaattttagtaaatgtagaatgtaaacttgttccactaaaaacaggttacaaaacctgttgttgatccagaatcctgccttacgaatgccagagatcttagtgtcactcattttctctccattcaggttggtagaatacttgcaagctatgaggaattttttcttaatggaaggaggagataccatgtatgacttctacacgtcaatttttgataaaataagagaaaaggaaacatggcagaatgtgtcttttcttaatgtccaactccaagaagcagtaggacagcgttatcctgaagatagttcacggtaaaatatggacgccacctttatttaaattagtgtaacatgaactatgtgccagtaagtcttctatgaattacacatattattttatcctcactattcctatgagttttactaatattattttacttattagaaaatggaggccaggcacggtggctcacacctgtaatgccagcactttgggaggcagaggcggtggatcacctgaggtcaggagttcgagaccagcctggccaacatggtgaaactctgtctctactaaaaatacaaaaagcatggtggcaggcgcctgtaatcctggctatttgggaggctgaagcaggagaatcgcttgaacctgggaggcagaggttgcagtg

SEQ ID NO: 15919 - DNA, 2015 bp, Homo sapiens
aattgaaacttgtatttagccattttgagactaatatcttgaataagtaaaattcatttacactacattcttcatcttttggatgctgttgtacatggaattaatttccttttgggattgttcattgctaaaatatagaaatgcaactgatttttacatgttgcttttgtatcctgcaacttccctgaattcgtttattagctctaactaataattattatggaatctttgggatttactacatataaaatcatgtcatccagagtttcatgtgttatgaggcacagagggactacctttttatcataatgtttgtagtaatttttgtccgcaggtctgttttgtctaatacttgtctaatgttagtattgccacttccctctcttttggttactctttgcatggtatgtccttttgcgttcttttagtttcaccgtacttgtatttttatatttaaaatttgtttctagtggatagcatatagttggttcatgttttctgtttactctgtaaatctctgccttttgatttgagtatcttgttcatttacatttaatgcaaatatgtatgtagtgggatttacatctgtcattttgttatttgttctctttatgtcttatatccagagagctgatggccacagcagctccggcctgatttctaataggagggttatctaatagaaggatttcagagcattccagggacaagatttgcatttgtatgaatttttttgtgttaaaagcctcttagaacatggtctcaagaaattagggatgtgtttttcaccatcgtgttggtttaagcctgatgtgcatctgtgctattcagcacaagctcactgggcatttgttttcctggtcgctccccctccaactttattacgactgcatttccttcacgcacagcccatgccgtgggctgtggcttggccctccatgggggcagaggtgatgtctgttgaactgtggctcccaggttttttagatgggaataagacagatgtacagtgatagccgctgtgaccttgtcatgccctgttctttgctttccccttcacattcacatttgcatcacaggggagggggaaaaaagcccaaaacactctgaaagcagtgggtttcatcttgaaacctgattccatagccaaaatttgatgctcagagcctgtgtggtcactccttgcagtcatgttttcctggccaggacagtggggatgagtgttgatttgtccttgaagatactcacagaaggagatgtgcttgctctgaagaaccacatagccccacagctgaagtggtgaagttctgcattacatttgaatccctgtccaaagctcaacttctcaagctgttcctagaaggaccagtctccacgaaaccagtgagccttaacaccacctggactcatggctcagtggggccagctgcccccagagatcattgaataactgtatgtgttaaattgagtagacttgtgcatatgaacaaaaacttcactgactcttgagaggtagccttgttcctgtcaaggagaccacagggataaggttttcatatgcacaagttgtgttttcttgtttgtcgtgatgacagggtgtggaggtggtagaggtgatgtattagtcagggttctccagagaaacagaagcagcaggatacgtgtggatgtgcgtctagagagatttattttaaggatctgactcacaattgtagaggctggcaagtccagcgtttgcaaggcaggcccataggctaaagacccggggaaaagctgatgttgaaggcagcctgaaggcaagattccctctttcttaggagaggtcagtcttttttctttcaaggcctgcactggttggatgaggcccacccaaattatggagggtaatttgtttcattcagagtctactggtatagatgttaatctcatctaaaaagtactttcatagcaatgtttagattggagttggaccaaaaactgggtaccatggcctggccaagttgacacataaaagc

SEQ ID NO: 15920 - DNA, 1042 bp, Homo sapiens
gtctctacaaaaaatcaaaaaaattagccagacgtggtggtgcacacctgtagtcccagctacctggggggctgaggtgggaggatcacttgagcctgagaagttgaggctgcagtaagctgttatcacaccactgcacttcagcctggttgacagtgagaccctgtctcaaaaaagaagaaaaacaaactggttaatgcatagaaatatgtttcatctcagtgataatacaagaaatgaaaattaaggccaggcacagtggctcatgcctgcaatctcagcgctttggaaggccaaagccggcggatcacttgaggtcaggagttcgagaccagcctggccaacatggtgaaaccccgtctctactaaaaatacaaacattagcccggcatggtggcgagcccctgtaatcccagcttctcgggaggctgaggcaggagaatcacttgaagacaggaggcggaggttgcagtgagtcgagatcatgccacttgcactccagcctgggtgacagtgagactccatcttaaaaataaataaaatataaataaataaataaataaataaatgaaatacaaattaaaagaacattcagattaaattataaaaacagaagtgacccctggattctgttgggaagcgccatgctactgtccggctccaccttgttcgtgggcccccgtaggagggcacctggcccaaagccacctgcagctttagagacattgtgtgacctaagaaacctcctgggatgtgctgctaggaaagtcatctgcaaacacactccaggcttttccgcccagatgtggtattgtcaggcttgtctcatgcctaagcaggaggagggcgggccgccctgaagcaggctgcggttcatgcatgggccagtggtgtttccttcacatgttctggatgtgcaggtgttgctgtaatggtggaaaagatttatatgacctcagtgaaagagctgctttctgcttttgttcctttgatggacagctaaatggcctggatacctttcccacagttttcgtgaagaccc

SEQ ID NO: 15921 - DNA, 1034 bp, Homo sapiens
gcgatcttggctcactgcaagctccgcctcccgggttcacgccattttcctgcctcagcctcccgagtagctgggactacaggcgcccgccaccacgcctggctaatttttttgtatttttaatagagacggagtttcactgtattagccaggatggtctcgatctcctgacttcgtgatccacccgcctcggcctcccaaagtgctgggattacaggcgtgagccactgcaccaggccctgatcctattgttaaactctaaagtgctggctagtagcaccggcagaacagtttgtatgccgttccaaatacgtgactttaattatgctgttggatatttgcactgtggcagccacttataaaggctggtcagatacaactgaggctccattccaagggcagtggacactggctttgcagtgaccaggccagacctggtgctgctgcctgggaatgggggcttcttagacacagaaggagactagaggctgtgctggatgctggtgctgggggaaaatccctgtgggacgtggcattcatgggaggacaaaaggagggccggaaaaaatcccagggtgcaggcggctggagtcacgcattgcctttgttctctagcagtggggtgcagggtccgctggtggcagttagagacggagcaaagtaaatgcacttgaaagagctttgggaggtggaactgtgaggagtcagagaacaagatgggatgagacatgagctctgatgtgcctgtgtggagtggacaccgccagggcccccacgctggctctgtaggtggcacccaggccagaccctgcacccacgctgccagggctgagaccttggagacttggatttagagctgattactccaagtccgcctaacagggtgaggcagaagctgtgcagattcgcatctatggaagatgcacggacggagagcccttggaagcgggccgggcccaggccgtgtgcgtgcggtgacagctgcttggcatcacacaccaaggcggatgtgggagggctgcctatgatcatga

SEQ ID NO: 15922 - DNA, 1052 bp, Homo sapiens
aagcgtttgggcatgtcagacaaggaggctgtcctgggtgagtcagtgagtgagtggcgagcgagtgggaggcctaggacagtactgtgcactgctgtggcctttatgaacactgtgtgcttaggctgtgctaaattttttaaaaggctttttctttctttaataacgaattagccttagcttactgtaacttttttactttataaactttttacttttaaaaagagctttttggcttttgtaacaacactttgcttaaaacacaaacacactctatacctgtgcaaaaatattttttctttatctccttattctgtaaattatttttctaccaaaaagtttttgtttttttccttttgagctttttcgttaaaaatgaagacccaaacacacacattagcctaggcctacacggggtcaggatcatcaggacatcactaggcagtaggaatttttccactacgttaagattttatgggagcaccatcatgtgtgtggtcttgttgactggagcatccttaggtggcatctgactgtaattgtttctctggcattgtctaaggtaacaaatcagtttttttcggagtacagtttttttttttttttttttttttgggtgagacggagtcttgctgtgtcgcccaggctggagtgcagtggtgcaatctcggctcactgcaagccaaggttcacaccattctccttcctcagcctcccgagtagctgggactacaggcacccaccactacgcccggctaatttttgtgtgtgtgtttttttgtgtttttttttgtgtgtgttttttgtgtgtttttttagtagagacactgttctagccaggatggtctcaatctcctgacctggtgatccacccgtctcggcctcccaaagtgctgggattacaggcatgagccaccgcacccggcctctgagtacaattttaaagtgattcgactttaggtttgttgattttcttttttctgaaagctgaacatcctggtgaatgacgccagcataatttgatttatgtcattatgtcataatctagtctt

SEQ ID NO: 15923 - DNA, 1035 bp, Homo sapiens
gtatcttctctgatcacaatggactataactaaaaatcaataacgaggaattttggaaactccaccaacacatgggaattaaacaatatgctcctgaatgaccaacaggtcagtgaagaaattaagaatgaaattaaacaatttcttgaagcaaatggcaatggcagcacagcatacgaaacctgtgggatatagtgaaagcaatactaagaggaaaatcaaaaaagtagaaaaacttcaaataaataacctaatgatacatcttaaagaactagaaatgaaggagctaaccaaacccataattttaaggacagaaataataaaaattagagcagaaataaaatggagttgaaatgaagaaaataatacaaaagatcaatgaaatgaaaagttggtttttctaaaagataaattgacaagctttcaggcaggctaagagaaaaagaagacccaaatcagaggtgaaaaagtaggcattacaactgatattgcagaaattcaaaggatcattagagactatgaacagctatatgtcaataaattgggaaacatggaagaaatagataagtttgcaggctgggcgtggtggctcatacctgtaatcccagcaccttgggaggctgaggcgggtggatcgcttgaggtcaggagtttgagaccagtctggccaacatggtgaaactccatctctactaaaaatacaaaaattaaccaggtgtggttttgcgtgcctgtaattccagccacttggaaggctgaggcacgagagtcacttgagccctgggagggggaggttgcagtgtgctgagatcatgttactgcactccaccctgggtgaaagagtgagactgtgtcttcaaaaaaagaaggaaaaagaaatggataatttcacaggcacatacagccttccaagtttgaaccatgaagaaatccagaacctgaacataccaataacaggtaatgagattgaaactgtaataataaaaagtcttccagcaaagaaaaaccccaggacccagtgacttcactgctgaa

SEQ ID NO: 15924 - DNA, 1022 bp, Homo sapiens
aagctggacagagatggattgcatgatctcaatgtgcagtgtgactggcagcagaaagggggcatctactggtttaggtacattcatgtggaacttataggtgagcacattctttgtttagtgcttttactttttcttagagacagaattcccataaatgaatactgattataatgatttgttattgaaatctgtaggctatcctccaccaagaagttcttctcacatcaagattggtgataaagtgcgggtcaaagcctctgtcaccacaccaaaatacaaatggggatctgtgactcatcagagtgtgggggttgtgaaaggtaatatcatctgggtaattaaattcctgatgttaacttttcattaatgcatatgtacttagtatttctttttgttcaagcacacaaaacagaaaacaagtgtgaagaaagagatagagtgttcctttgcttgtcagtgccttctgccaaaggccacaaaggaactcacctgcagtgaaacaatcagatttattaatattaactcattgcagtacaggagaacacacaccttggggaatgggtgtctccatcagagggagtgagcgaggactaatgaagtttatgttgggtatttgggggaggggtcgagaaagcaggggtaatcctaaaacaggatgtcttaataaatttacctagcaggcagaaagaatggagccatgctaacgtcatgattggtaaggaagcagtcattcatatcaccaggataggggactgtgtggttgtttgtggtttggattagactcaactttaatcacacatggttaaggaggggttttggttgtgccttgattcatcagtcacagagtggccttatctgatgttcgtgttctgtaaacttgtcctgtcatttgttctgtgaaatggcctaacattgacattaacaggccagctcctgactgtcaggactgctttttctttctcctcccctgatcctcaggctggagtgcagtggcgccatcttggctcactgcaacctcc

SEQ ID NO: 15925 - DNA, 1033 bp, Homo sapiens
tgttttgtgtctttctccacatgatgcttagctctttccccacgtcccagattaaagtctgtatttttgtaattgtgggcacacaatcatatctcttttaatctttgcaacgatgttgaacttctgtagacagaaggatagagaaaacagcttgaaggcagtcagtgtgtttttccatgaagggaaaaaaataaataaaaaaattaaaatgggtgcttttttaagagagattgtcctatactttttcattctgtttttcatcacgtagtttgtatcatagcaagttcattgtcattccagagttcagctttgcccttgtactcagttgtgcttttttcccattggtttttgaggttttgctaaactgttgaatatttaatgtggggacaggaatggactcagaagaaatgttttttattttgattcttactagtcttgtaggcaaaccttccattactttttatgcaaataggatctagttgaatattgtatatcgagtaaatatgcgtctctctctgctcttttcgttgatatttacataacattaaaaagattatactttatcagagattcaagctttttcttatgaatgaagccctataaataagaatattttgttacagggattttgttcttttgaaatttataacaataaagctaaaagttctctaagctgttttatattttttcttatttttcaaagtgtgaaatttttctatcatctgaaaataaattttatgtaactatagtcttagaaatttaatacatttgaattgtatatttagcctctttaatatttccaatgaatacacttcttaaaagtttaattaggaatacagttcttagtttttgagctttctctttgttgactaaattgaaatgttaataaatcatttataaatgacttttccttctctctcttttcctctcctaatttatgctcaaggccaggtgattttatagacctttattctgtgtagtttatattacaaaataatatgttacatcttgatttagaatttacattatagta

SEQ ID NO: 15926 - DNA, 1012 bp, Homo sapiens
catatgacagtgccttccatgacaggagtcagcaacctttttttttttttttttttaacacgtatcagtaattcattctgtatattttgaaaagttttaacctcttcttcctagccctccagtatttgttaataaattaaaacgtttcccaaagtgttttttgtgaaacaataattctaaaagatgctctaagaaaagctaagtacatggaaaaatccaaagtgtatattttatttattacatttcatgaatttttgtttctgttttttcctcttgagagggagtcttgctctgtctctcaggctggagtgcagtggcatgatcttggctcactgcaacctccgcctcctgggttcaagcagttctctgccttagcctccagagtagttaggattacaggtgccctccaccacggccagctaatttttgtatttttagtagagacagagtttcaccatagtggccagactggtcttgaactcctgacctcatgatccaccctcggcctcccaaagtgctgggattacaggtgtgagccactgtgcctggaccacatttgatgactttttttgtcctttgttcttttaaaaatcatggttagaaagcagagcataattgttctttatgtagaatccaactgattggggtttttagggagatgttttgacattcagtaaatgtttttgttttccattattaagactatgaattttttattttactttctgagacagggtcttgctctgttgcccaggctggagtgcagtggcgtgatcttggctcactgcaacctctgcctcctgggttcaagcagttctcctgcctcagcctcctgagtagctagcattagaggtgcccgccaccactaccctccgcctttcaggttcaagcgatcctctgcctcagcctcctgagtagctgggattacaggtgcacgccagcatgcccggcaaatttttgaatttttagtagagacgaggtttcaccatgttggtcaggctggtctcgaatt

SEQ ID NO: 15927 - DNA, 1056 bp, Homo sapiens
gctgtgctgagcccatctggaagtgtttctgattctaatcagaagtggaacagtttcagtgcagattataggtttatgttagctttagtgatggagggatggaaatagatgcttcctcgctattaccattccaagtaaaataatgaggctgcatatttgcagtgagctgctgaagccagacgtcactagagtaatttggattagtgggaagttggaacatattgttttaaaagcgatttcaagagcatcatcttcggaaatcctatatagcaatgaagtgattttttttcactttttcatttttatttatgttgctgtatctgtttgaatttttagtttcatatcagttccctctaatagcatacgtgcttgagatattttgacttctattaaatgggcttaatatgaaattatattaaataatttttattgctatttggaaggccaggaagtgtttccagttttcatattttgggtcatggagatgctacttcccatccattttgtgacatgtaagagtcaggccatttcaaggaagggccagaggagagactttgtgtttctgggaatatactatggattaggacatgtgggttattcaaagatctatccttttgtgctttgaaatctgaaatgtagaaactgtggcctcactgaggaggagttttagaatatgcaagggagatgatcaggactggatcttgtatttgggtaccacatccagtcccagacagcattgctaaggcaaggagctcataaaagccccaagctctagctgttggctacttatctcctggagcatcagggtgagcgcggttcaggctggggagtcctgatggctgcctggttgttacaggatgttacagcttaggcctggggacatagcccagcaccctccagaggttgtgtctgttctttactcttcaggttccctggaggcaggagaggagctggcctcatttctggcaggcaccccactactgttattgagcaatcctccaggctgcagagatgtcagaggaggaccctaatgtctcctgattttgattattttgt

SEQ ID NO: 15928 - DNA, 1028 bp, Homo sapiens
aagctcagaggttgcaggagaaagggcctcctggtggctgcttactctgccccactgtgaagtgcctggtcactagagttaggcctctctcccactccgggcttcagggattccactgaggatggagggtgttggatttagtttcttttttttttcttttttttcttttgagatggagtctcactctgtcgcccaggctggagtgcagtggcaccatctctgcttactgcaagctccgcctcctgggttcacgccattctcctgcctcagcctcccgagtagctgggactacaggcgcccgccaccacgcccggctaattgttttgtatttttggtagagacggggtttgaccgtgttagccaggatggtctcgatctcctgacctcgtgatccgcccacctcggcctcccaaagtgctgggattacaggcatgagccaccgcgcctggcccccttctggagtatttcgttcattagaagtaagtcagggacttagtgtctttagctccagccagtcctgtggcctctctgccactgtgtgaatgtccccaaccccccacctgataagcaggtgtcctgaggtcatcagggatttggacttagttattaaaaagcaaccagcacccttaggagcctccagagcagagattgccaaactttctcagaccacggtgccctggatctcagcaatttcatggtgtttctagaccaaaacacatagctaacaactctactctttaagtagctaggtccaaaccacatggtatttatgtcccaacaacttggaagccacatgagaaataatactcataaattgaaacaaatgtatttcatcctaaaccacaattacaaacggaagtgtgtctgctgaatgagattggcaccattctcatttcctgtttgatgctgacttttgtgtgggacttgctgtttaaaagtttatttttatttttaatttttatacacatatcatagttatacatattatgggggtacgtgtgatattttttcttgagacagcgtgacag

SEQ ID NO: 15929 - DNA, 1028 bp, Homo sapiens
gaaggcttaaagaatattttccaagtatacacaaatacagagaataataagaggaatgactttgagagcctgaggcaggaggattgcttgagcccaggagttcaagaacagtctgggtagcatagagtgaccttgtctctacaaaaaaattaaaaaaaaaagccaggtgtggtgacgcgcaccagtggtcccacctccgtgggaggcagaggcaagaggatcacttgagcctgggaagttgaggctgcagtgagccatgattataccactgcattccatcctggctaacagaccaagactctgtttaagaaaaaaggagtatctggggtacctgctatccagtttaagacatgtacaaatatgattcagccttccatgagcatgcctccccagccacccctgtgaaacccagtaaattgaatttactgtttgttttttggaggcatgttttatttttacactgcatgtatgcctaaatgatatatcccattgttatgatattttcaaactttgtagaaatgataccttactgtgttcctacaacttgaattttcattaactgagacattttacatgtatttatcttcttagcaatcctgagaaaagcaagagtcactatctccattgtatagatagagaaactgataatgtagagcaatgatgtgatttttgctaatttcaagcagctaatggagatcgactcacatttgtaccttcagagccctagtccatgctctttgtatgacataaatgtcaagattcatcaggaaaaggaagaacaggcgggtcttgttggttactctgtgaccctgttgcttccctgggacctggaagtcctggtgtctcccttagcctggaatcccagtctccatctgggttttgcaggctccaggagttttgatgaaatgaggacccatatggctggttgagactcccaccccctcatcactccctaccagcgtttgtgcagaatcctcctctcctcccgagttggaaataatgtatagttggctcaaaagtcagcccct

SEQ ID NO: 15930 - DNA, 1057 bp, Homo sapiens
ctaaaataaaattaagacccaaatctacatggaaatatagtccactgccattccgggaatggttgactcaagatttatgctctaggaagactaaattctaaagataaagagaatatcagcagggcctccaggcaaaaggaccaagttatttacaaaggaaatttacagagttgtttacaaagttacaagttatatgcaaagtctggtgtcagacttataacaacaacaaagaaagcaagacagcaatgcacaatacttttaagaaactcaaggaaagaaaacgtgagtgaaggattttatgcccagccaatggttctttaagtgattcagaaacaaaaatattgtgcccaccaggcacacttaaagaatcagctggcattagtgatatgtcagaggctggacggcagaaatggtctgccctggttgcaggcaatgaggagtttcatcatctgtcgataatttaaaaacaataataaaactgactgaaagtccgtctgctttttatgtcactgtgatccaacacttttaaacaatgtcagccaaaaaatactcctcctgaaaaaacctattgttggtctaatttctaagcaatttttcctattacaattgcattttaatgctatgtgtaaacctcaaattagcatatttgcattacttatgctttaataaacattatattctacatggcatttaatttggagaactcccaagtatacgatcagcccctgacatctgcagactgaggcacatgtgtttattttgagaggaagtttgtagcaatccagaatcatgcaaactccattgaggtccggactcctgtgaccctgtgtattcctctgtttggatagcagattaggaataaccagtgatatcacaataggtaaagacaaagaaacagaacttggatttcttcaattctgtcattctatgtgaacactagaggtttttattggtgtgtaaaatttgaagagtaagagcacagatgatgagattggatatttttgtttgattggtgcaacttgtagttgacacatgaaatattttactgaatatgagc

SEQ ID NO: 15931 - DNA, 1043 bp, Homo sapiens
atggtgacataaactttttcttatgtcattggaaagtccagaatacctggttgcaggcaaggtttgatctagcagcttgaccttgttagcacaggtccagtttctttccctcagtcctccctggtattttatcagcttcatcctaaggctggttcagggaagatattctgatgatatatatttctgctttggcaatggaggatttatattcgattgtcagaagtcctcatgtcctatttaaagtctagtcattggaaaataggttgataaggatggacctgaagaaaataaagcagcaatttgtcatgacaaagcaagactaggaagaggcattggaccagcatgaccaattcaaggacacgttgatgatgtcttcagcgcaagtgttcttcccaagcttgggggacctggcagggctgcctacagggctggtgtccagcctgctctatagaaggcgaattagagatcgcaataacgggccagcttccatgatgaccccaggttgtagtgatgtctatgtagaaatgaaataaatgcataattaaaaccaaaggtaggcttgcatttgggttgaggtcctggcacctacggaggccacaagtgtgtcagggtggaaggtaacttggtgaaataggaagtcactgcctattgcccactcatgtccccactgatggagttagctgggggatcccctggtgcagaccctggagaggcatcactgtcttccttgttcagtgggcttgggtcacctgcatgaattctgaggttgggaaggtgtaaacatttccctcaacacctgcagcccagccgccgtctccctgggtgcttcagtcagccgtcacgttggggaggcgtcatgtaaggtggtccttgtctgagtagaacctgattttgaaaatgaaattcatttccttgccttcattttccagacgaaaagatatgtatttgtggtgtgtgtgtggcgggagagtaattggctttggttttgacaaggaggacaccagagtcctgttctgatactcagttttgggcccatgcgtgac

SEQ ID NO: 15932 - DNA, 1062 bp, Homo sapiens
tatttttatgtattgtttttatagaggtgggattttgccatgttgaccaggctggtcttgaactccttggcccctagaatgctaggattacaagtgtaagccatcattccctgtgtgaaatgagtaggatttctgaatgagccaggctttgcacattgacctggctctgcctcttgaactgctgccttcacatgggaggctccttctggccctgcctgtgtggctgattcctctctcaggtgcttctctttatcttcacagacgaggctcatgggcttcactttttgggaccttaggtggacatctgagtccacagccctcctgcctggcttctgtctctgtggatttgcaggcctgcttgtcccatatcctccagtgcccagcccagtgcctcatgtacagtggatgctcaagaagtgtgtagtcatcacatagctctagtttcttatttttatttttatttatttattttttttgagacagggtctcactctgtcacccaggctggagtgcagtggcatgatcataactcactgcagccttgaactgggctcaagcaatcttcccacctcagccccctgagtagctaggactacaggtgagtgccaccatgcccagctaattttaaaatcttttgtagagagggcatttcaccatattgttcagactggtctcgaactcctggcctcaagtggtcctcccacgtgggcctcccgcagtgctgggattacaggcatgagccactgcctctagactttagaaatgttcagaagctcaccttcccatctgcaaagtggagactcatgagttgggggcgggtagattgtgagaatgaaccacataatgaagaggggatgtgtagcacatgtgagttttcccatcttgctggtttccttccctggaagaggcaaagagaggacaaggagctggctgttactatttgcttgcagacttggtgtgtgctttcaaattggaagctcctgctctgacacccagttcttttttgttttaagttgtactttagaagagaaaaaaattcatcaacacccttttttttaaaag

SEQ ID NO: 15933 - DNA, 1043 bp, Homo sapiens
acaaaaattagctgggcattgtggcgcatgcctgtgatcccagctacttgggaggctgagacaggagaatcacatgaaccagggagtcgaaggttgcagtgagctgatatggcgccactgcactccagcctggagacagagtgagactcagtctcaaaaaacaaacaaacaagcagacaaacaaacatatctacctctggtcaacacagaaacaaggtaagcttttgttatcccctttgatagacaaagcaacagagcttaatgagcatgcatgtcacaaggaagcacaaattcacgcttattatttttatgggaagacccctcacttcctggtcctgatgttctctgtgggacctttggtgagtcagggaaggcctcacagtatggagacaacagtcccagcctctgacttgcaggagtgtggggactaagtgacactggaagtgtgctgcacacgtgcaggcctggattattaggagggaaggttagaaatcaagagccaggggaaaactgggaatagctggctggcttttcagaagggagtcattattttgtgcaccttgcaactcaggcagtgagcctggcggggaaagagaaatggctgctctttttttctgtccatgtgtcaccccctgtcagtgtgttactgggtgcaggtgtctcctctgatggtgtctgggcttttctttcccctcccttccttctttgcctgcttctcctttgctcctctgtctccgtttctctctccctgcattttgtctctttctattccttctttcttccttttttatcttcagattttaacctgttcctttcatcaaatgatgcttattaaatacatttggtgatttatatttttgtttctaagaaagctgatcaaaataactgtgtaagttcagtccgtgaaaagacaataatgatgacaggcaggcagcgctttggaggaaggagggttgggtcccgggtacccctgattcggtgggtgtttgtgcatagagtggtacctgcctgcttgaggataggaggctttgcagcttgaggtc

SEQ ID NO: 15934 - DNA, 1055 bp, Homo sapiens
gaggcagagactgccgtgagctgggatcgtgctactgcactttagcctgggcgacagagcgagaccttgtctcaaaagaaaaaaaaattccctaaagtaatttataacttaaagttactccagccaaaatttcagtggaatattggggatacttggaaccactaactcttaagttcttttgggagaataaatgtgaaaatagcaggggaagatgacaaaatgagaataatgagagagaacttgccttatgtcgtattaaaatatgctctaaattcataataatgaaaatggcatggtactgttgctgggcagatagaaatgatgtagactagaaagtccagggacagatctaagtttatgtaagaatttagtgtatgatggctgggcggggtggctcacacctgtaatcccagcactttgggaggctgaggcaggtgaatcatgaggtcaagagatcgagaccatcctggccaacatggtgaaaccacatctctactaaaaaaaaaatacaaaaattagctgggcgtggtggtgcgcacctacctgtagtcctagctactcgggaggctgaggcaggagaatcacttgaacctgggaggtggaggtttcagtgagccgagatcacaccactgcactccggcctggcaacagagcaagactcagtctcaaaaaaaaaaaaaaagaatttagtgtatgacacgcagggtgaccagccatcccagttcctgtggaactgagggtttcctgggacatgagactttgagtgttaaagttgagatggttggtcactgtaaaacatgagaaacagaatagtctatttagtaaagggtattgggttacctgagtaaagctgtggtgcccacactttgctgtatattggaatcacctgggaaacttttatgaatactgatgcctagttcctatctgagacattctaggttcattggtatgtggtgtgacctgggcatcagggttttcaatgggtaacaaaacttgaaaatcactggggtaaccatcgtggagaacatgaagctgctccctaccttgtgtgttta

SEQ ID NO: 15935 - DNA, 1028 bp, Homo sapiens
ttagatgctgtagactcctgtttttaaccctaacccagcagcattggcattactggggagccccgcccccacattgctgaatctgaaatctgcatttcaacaagatgccacattccagctgtgatgctgtaggagactcacttggaggaaattgtgtagcaaccctcccctctcttctactcattttacagcttgaaaaagtgtgtcctggatattttgaagaggactgaatagcatttagtcattgcacgaatggcaatagtaaaatagagttagaaaaaatgggaagatgaaaaatgtattctccatggtccctactaccctaacggatgagctatttcatcagtgtgccttttcagaccatagcattgagcataaatgatgtacgtagctgtcatcataacccagatgtatttttgtcatacagtttttaaaatctgatgtatgataaatgtttctccatgtcaccatataattttcatgattatttgtagtgacctttccatgatccatttgggcgatgatgtgctgtataacatatttctctgtacacactctaccattgagcatgcagattgtgagtggcattttctcttaggtgtaaggctgccacagacatctttgtacaaaccatgttttccttctttggtttattacctgaggataaatccccatgccgtacatcaacgttgaccatttcccctcgatgaccttgcctaattgtttcccttcttctgtggatgttggatgcatgccctttatcttttggggtttggatgcatttccatctcatagaagcactctctacactgtaggtgtgacttcctgttgcgtatgtcctcatctttagtacattttcttttgaattttggttatattattttcaccatctctgcagcatttttaagatgttaatgactcatctgtgacccctccacctcctttcggtacagagggatttaattggatgtttccttcttccctgtctgggtagatgtattcacagaggacattgctttggtctggtc

SEQ ID NO: 15936 - DNA, 1049 bp, Homo sapiens
gcactcagaacctgggctcgctcctgcagtggctaatcttccccagggcagaggcaccctgcgcatggtgggacagagggcgcagtgctgccctggaaacctggtagctctggtaagggccagggcgaggcttgtccccgctgcacagaggggctaccgaggctgagaggggactgcctgcctctcccattgtgtgttctcactgcccccggcctccaccaccctgccagcctcgctcatcctgggtcaggcttgatgtctaaggcccagcctgtgactcctgtccccgtgctctgcagggcctgaagaaccagacacaggtgaagctcaacattgtcagctgtcccccggtcaccacggtccttatcaagcggccagacctcaagtaccagctgggcttcagcgtgcagaatggaattgtgagttccccctcctgctctgggccaccaccaccactgcagggcccagggagggggagcagctcccgtccaatggggcaggctatgtctggcagcctggtaggacctggcctgtggttgcagctgcccacagccaggccacctggggcaggaactttccatggctctctgggaggtcctggctagaaggggagggccagggcatggccgtggattgggcccctccagcctttcccaggctcccttgtccccatggtggttgtcccctgctttggagggagggcagcagacttcaccagccactgtagcttggacacaaccaattgtggcatcacttactgtgctcaacaaacagacgttcactcattcattcattcatgtactcatcattcgcttgttcactcagccattcagcagacatttgtgaagtacctgctctgtgttaggctttgtaccaggcaatgggaaggcaggagtgctgcctggaggaggtgatgctgggcttgagtgagtgtggttctggccaaaaacctgtaccagttccccaggccagagttctttagcccagagtttccaccctctcactgacctgcatttgactggcctgaattcttttttcctttgtttttc

SEQ ID NO: 15937 - DNA, 1025 bp, Homo sapiens
gcctggcggtaaacaccgggcccttcaggcccccaggtgcggaccacaccctctgcacctgctccatgagtgcccgtggtcatggtgggggttgagggtaggggtctggctgtccccatttggccctctgtgcacctagacacagaggctgtcacagtggctgccacttgtgcccctgcaggccagggctcatccaccccagggccatgtccaggcatctgcctggctgaggtgcactggggctccactgcccagccgggacctccagggagcaatgagcctgggataacattcaggagacccgagggtgctggctactctggtccaagcccctcgtccctcacagcgtgctcaggataggacccgcagtcccaagggccctggcctctactttcaggagcctggaaccccgggctcctgctgtccccggccctgcagcagtggggcgcttcccttggtgtcacctctctgggcacccccatccccaccatgcccagtgaagctctcacctgtgtcctcccgtccttgccaggcccttcgcctgaagtcctagctccagctggcctggggcagccactcggcaccttgtatcccgggagctggtgggcagggactggggttcccctcagcctccatgtgcctggccacctggggagcatatgcaggcgctggaggatgcctggctaggagtctatcagctcctgtcccgacctgcagcggttctccctgatgaccacagaaacattccctgtggcaggtggcaatgcttagcacccagagcgagcagtcagatgagatatgggccagctgcagaaatctgggtgctggtgtgtaggagacggggaggccccctcacagttgtctgtgtctgcatgtgtgtgtacacgcatgtgtgtttgggacaggtgagtctgtgcttctcccatcccaggccactcgcctcctcccagggctcagcacagtctcctttctccaggataagagggccctggggtggcgaaggagctgccttgcggtatggaatc

SEQ ID NO: 15938 - DNA, 1050 bp, Homo sapiens
ggttttccagaaaaaacacttcctcacaggttctctagggctcattgaaatgtgatgatagtaactctgaagcttatgtctgtagcttttgcagtgttcacaggttggagacttaaacttttttaagtaacatagttcagtttttttttttttgaatatttaaaagcctttgcagtttggaggactttttccaaatggcaaatgggagttgtagttctacctgcctttgcttattagcattacattttccccaaggaatgaacatactgattccttcttctcctcctccaagctcccaaaacagaggttaaacagtcttgttctatttttagtttgagcttgcctaatcaatgaattttttaataaaaaaatttaaaagttcaacaataataatcgtattatttttacaccacttttctttgaccctactttctcagccacaattcaacaaattccatttgcaaaattgaaaatagattgatttctaagtttagattataaaaaatatgatgcttttaaaaatatataaagacaacattagtctgtagtccatagagtatctattcataattgtctcttttttttttttttgagacagagttttgctcttgttgcccaggctagagtgcaatggcacaatctcggctcactgcagccaccacctctcaggttcaagcgattttcctgcctcagcctcccaggtagctgggattataggtggccaccaccacacctggctaattttcttttgcatttttagtagagacggggtttcaccacgttggccaggctggtcttgaactcctgacatcagctgatcaacctgccttggtcttccaaagtgctgggattacaggtatgagccaccatgcctggccataattttcttacagatgtgataaatttgcattgttccatatattctgactgtgccttctgcgaccattgacgcatttttttatttttattttttgagacggagtctcgctctgtctcccaggctggagtacagtggcatgatcttggctcactacaacatccacctccgat

SEQ ID NO: 15939 - DNA, 1071 bp, Homo sapiens
accactgtgtaatcattgtggtttctatatgtaatttaaataaatatttctgttattaagccaatatatttagtttgaagcatgcagtggatatattttaggaaattaatacagactcatcaaatgcaataactgaaaagaatttttttttttttttttttttttggtgaccaagcctcactctgtcagccaggctggagtgcagtggcacgatcttggctcactgcaacctccgtcacccaggttcaagaaattctcctgcctcagcctcccgagtagccgggattacaggcgtgcactgccataccaagctaattgtttttgtatttttagtagagacagggtttcaccatgttggccaggctgatctggaactcttgacctcaaataatccacccatctcagcctcccaaagtgctgggattacaggcgtgagccaccatgcccagccaaaaggaatattaacagacattctaggttaaccctttcattaaatttttttattatcggttgggcatggtgactcacgggtgtaatccccagtactttgggaggctgaggtgggaggacgacttgaacctaggagtttgagaccagcctgggcaacataaagagaccttgtctctagaaaaaatagaaatagtctggcgtggtggtgcggatctgtggtcccagctactcaggaggctgagacatgaccctgggaggttgaggctgcagtgggctattatcatgctactgcactccagctgggtaacagagcaagagcgtctgaaaatttttttttattataatggaaaatgtcaacatacatagaagtagagagactacaataatgaggaagcatcatttgcttccagcagtcatcaacattggctaatcttgtttcatctatgtctcctgctttcattctccctctccctttttctccccctctctctctcactggagtattttaaataaaatgatatcattttattagcaaatgtatttttctaacagaaaaagattagaaaaatatataaccacaatttcattatcactcacaatacattcaacagtagtccttga

SEQ ID NO: 15940 - DNA, 1084 bp, Homo sapiens
tgggaacatcagaagctttattgcacccttttggtgttatttaacagagtcctttatcacctgcctttcccttcttgcacctggctgcttatatgtggacccttggttcagtgcttttttgggggcatggcttagggaaataggaatttttcatagttggtgctgtatttttcctattgcttcatagaaagtgagacaactaagcattatatacctctattagaggggttaaagttgatcactggagtcagatgttgttggccttattataaatattcccatcactcttttttttcttcataccctcatctgtgagccaggaactcatcactcttttatttaatagttttaacatcaattgattattgtctacatgtaataatcctttagagatgcaaaatgataattttcttgttctgtaatttcctttctatttgtagttggaagttttcttacagaagagctttccctgatcaactgtttggttatcctaaaatagaatttgtttctcaaggcaggataaatgcttgattgtttctcttcataggtcagttttcagaataaagagttggtaccatagaaatctccataaatgtccagtgagttggtaccttagaaatctccataaatgtccagtgaaattgattttatattcttaagaacttatagatgtatatatgtatatgtatatcatctagtcctttgcagtcgttagtctttttgatgcttaaattgtttcatctccatccagtgggagccattcaagtttgctcctttctcccgttgacatgagcctactcctgtctctgatagcttgctggcttctcggcagtgagctttcacaggcttgttttgggaatagtcagcccctagttttgaaaccacttttataaggaatctcatttactttttgttagaagatgtagttagagaacacagtctgggttctctaggatttttttctttttcttgtagagcttttcagagttcagatctgggtactattgtttcttaaaaagagaaaaattctgagtttattgatacctttccaattcagatttttttattgagatggagttttgct

SEQ ID NO: 15941 - DNA, 1060 bp, Homo sapiens
ttgcattttctctttttttcaacagattattactatttttatttttgagatggagtcttattgtgttgttcaggctggactacaatggcacaatcatagctcactacttgggcttaagctatcttcccacctcagcctcctaagtagctagtactacaggtgtgtgccaccatgcccagctgttttcgtttgttctttttttttgtagagatgtagtcttcctatgttgcccaggctggtctttttagttttaaaaaaatcattttagcctagctttattgaatgcttactgtgtaccaggtgccaggctggtcttaaactcccgggttcaagttatccatccatctgagcctcccaaagagttgggattacaggcatgagccatcacacctggcctcaacagattattaattcactatcaccatgattgtttttgaaattaatctaatttaatttttgttttttgaggtagggtcttgctctgttgtccagagtgcagtagcatgatcatggctcactgcaacttcacactcctgggctcaactgaccctcccacctcagccttcctagtagctgggactacaggtacatgccaccatgcctggctaatcttttaatttttacttttagtagagatggtgtctcgtattatttcccaggctggtctctaacttctggtgacaagcaatccacctgcctcagccttccaaagtgctgggattacaggcatgagccactgcacctgacctctaattaattaattgatatatttttaatgtttattttttatttcaatagcttttggagtatgagtggtttttgattacatggatgagttgtacaacagtgaagtctgagattttagtgcactggtcacccgagtagtgtagattgtgctcaatatgtagtttttttaatccctctctcctccctcacttgtgagtctccagtgtccattataccactccgtatgcctttgcatacccatagcttagctcccacttataactgggaacataagatatttggatttctgttcctgagttacttccttagaata

SEQ ID NO: 15942 - DNA, 1041 bp, Homo sapiens
tattatcctgaaggttcagaggagaaacacttggtgactgtgacttagataaagagattttagacttaacaccaagagcatcatctagaaaagaaaaaagttaataaaagttaataaattggacttcatcaaaattaaaaacatttgctccaccaaagaccctgttgaaatggtgaaaagacaagctagacacatggactaaatatttacaagctacatatctgacaaaggactcatatctggagtatgtctcaaacctcaatgcaaaaaacattcaattagaaaatgggcagaagacatgagaaacattttaccaaagaggctatatgaatagcagatgagtacatgagaatatacttgtcattgttatctgttaaagaaaagcaaactaattctgcaactatacacctattaaaacaatataatagtggcagtaccaagtgctgtcaaggatgctgaaaaactagctctgtacattgctaatgggagtgtaaaatcgtacaactactctggaaacattttggccatttggtaaactaaacatttacttaacatattttaactccatattacatatccatatgaataacatattaaatattcactttgagctttttttcagaggtatgaaatcttatgttcatgcaaatatctatatatgactattcatactagctttatttgtaataaactgaaactggaaacactagaatgtcactcagtttgtgaatgattaaacaaactgtgttatatccttagaatggaatactccttagtaaagtgaaatgaactattgatacccaacaacttggatggtttttaagggcattaggtgagtgaaatgtcatattaatacaccattcttgaaatgacagtgtgaggaaacagatcagtgtgtattagtccattcttatgccgctatgaagaaatacccaagactgggtaatttatagggaaaagagatttaattgactcacagttccacgtggctggggaggcctcaggaaacttacaatcatggcagatggcacttcttcacat

SEQ ID NO: 15943 - DNA, 1026 bp, Homo sapiens
aaaaagaagaaggactagctgtatacagtttctatgagacatagtttaaataggaggttagacctataaaatagaaggaagatataccatggaaacactagcaacaagaaagcttgagtagctatattaataacaaagtaaaaattaagggagtattactagagataaaaacagttcataataatgaaagtttcagttcattaggaagcattaacaatccttattttgtctgtgtaaaatgagactactttaaaatatatgaaggaaaaattgacagaactaaaaggagaacttgataatgacaaattcattattgttggatatttttaaaataagtagataaaaattctgtgaaaacatggaagatttgaatgatattaataaaattgaaaaaattaacatttatagaatgctaattcccacaattgtgcaatacctttattttgaaaccacactgaatagtcactgaaacagaccatactcttggccacaaaacatatctttgtaacaaagtattgaaattgtttagaatatgttctctgaccatgattgaattaaattagaaatgtcttaacaagaagaaatctagaaaatcccccaaatgttgggaaattaagaaaaatacttgtaactcatgggtcaataaaatctcacaaatttttagaaaatatttaaaactgaataacaagggaaacccaacacctcaccatgtttgtgattctgctaacgtgggagtaagagtgaaataattcatagccgaaatgctcagattagagcagtcgttctgaaaactctgaggatcacaattgcccagacggtttttgctaaaacaaagattgtcacaccgagcgtggcgactcatgcttgtaatcccagcactttgggaggttgaggtgggcaggtcacttgagcccaggagcttgagaccagcctgatcaagggtgttttagtagaaactctgtcttctaaaaatacaaaaattatctgggcatggtggtacacacctgtaatcccagctacttgcaa

SEQ ID NO: 15944 - DNA, 1033 bp, Homo sapiens
ctctatcctgagcatgcctgtggctctattagggaacagagatttcatctgtcttgttcaccactgtctcttcagtgcctagcatggcacagggccataataccccacaaatatctgctgaatgaatgaagtcatggctggaactgtcaccatggggtcaactatagacaggatgctgtctgagtgctctcagatggcaagtttgtcggaaaaagaattcaagactcaagtcttagccacataacggggaaatacaatcagcagtcaagagaaagaggagacccaaccagccatccaaaacaagagtgttcagaggatgcctgaaagctacaggtatggagacaggacaagctagagaagctgatcatgtttcagcaggggcaggtgaattacgttaatataaaaaatgtcaattttttcaaaattaacccaaagctggaatgcactgtcaatcagagttctaatattgcatttcggggaattggatacaattattttgaagaatgaacaaaagaactgataagaatagtagtagtacaccaacaacagtcaaaccaagagctaaatcaggaacctactcccattcacaattgtcacgaaaagaataaaataccgaggaatacagctaaccagggaggttaaaaatctgtaccaggaaaaatgcaaaacactgctcaaagaactcaaaggtgacacaaacaaatggagaaacatttcatgctcatggataggaagaatcaatatgattaaagtggccatactgcccagagcaatttataaattcaatgctattcctattaaactaccattgagattcttcatagaactagaaaaaactatcttaaatttcatatggaaccaaaaaagagcctgaatatccaaggtaatcataagcaaaaagaacaaagctggaggcatcatgctacctaacttcaaactatattacagggctacggtagccaaaacagcatggtactggtacaaaaacagatacatagaccaatggtacacaatagagagcccagaaatagga

SEQ ID NO: 15945 - DNA, 1047 bp, Homo sapiens
gaaagcctagaacaggccttggactatgtaggaacttgtacaaaatagaggcagccttgtaaatcagcacaagctctgctgtgggaaggttgggaaaggtggggatatgaggtgaggttgagagatgagccactcggagtatgggataccaggctgagaatggatgcatggccaagttcttgtgctggacatgatggggtgatggatttgagacctggtaggggagagagtctcttaggggagaatgagcgcttggagctagcacctgctcccacatggcccatggccctggtccaaagcctcctgtctccctctcagtcagcctcacctctctgattaggagtcaaaatagggagatgtaagtgaagatttcagacgtttccatgtatcgtaataggacatagtgaagcaggccgcatgtgtttttctgttactatttttgctgttttccctctctaattcaggtggattttcctagaaattgacctatgcaggaacaaccttcccattgaacactgttgacaaaaagaaccgtggcaatgccatcgtcacttctaacattgagaactcctctagaatgtgctcttggctgataggtgcagtggatcattgcagccattggagcccacatgaagttactgatgactgaagtgtcctgtgagagcaatgttctcaagggcatatttcttaaggaatatacgtcttgggaaagggtctagtttaggttctgattcttgcttcgcaaaatgatttgttgaagacaggttgctaatggggtacaataacattctgttcgtagtgtttacattttctgtttgatgtgatcaagcttagatctccctttccttttttccttccttcctttcttcttagctacactgttcaagggatttttttttaattatgaaatttgctccagtcttactacttaagtgggaaaaatgcaaacactatttcacaaagtgtgtatgtgtgtgtgtgtgtgtgtgtgtgtgtgtgtgtgtgttgatgtcttcaaggagcttttttatattaggtaataatggt

SEQ ID NO: 15946 - DNA, 1033 bp, Homo sapiens
gtgtaccaccagttcattcattcatactatgctattcatgtactatttgtccatgtgtgagtatactgtagtttatccatatattccaattgtccagtggatccattggttatcatttgggctgcttctagttcttagtcctatggcgatatttcccgtattttttggtgcacaggtgtacacattttggttgtgtaggtaccgagtgctgaaagtactggcttacaggggttgtgtaggatgagctgtggtagattctgccaagcggtttttccaagttgccttactaattacactcacaccagctccgtgggagggccctggttgcgtcacatctttgccaacactcggtattttcaatttttgtaatttagacattctggtgggtatctaattttcattttaatttaatttcactgatgactaataaggttgagcaacttttcattgatttttggccattcagatgtcatcttgtgaagtgtatgtacaaatatatttccattctgctattgaattgactgtttatttcttattaacttctgaagtgtttattcagggtaccagtcctttactgagtctatggattgcaatgatgttttctctctgtgtaggttgcttttcaccttctctaggttgtttgctagtgcagagaagttcttaatgtatctactttatctgttagggttttttgttgttgtcgttattgagacagagtctctccctgttgtcctggctggagtgtagtggcacgatctcagcttattgcaacctctgcctcctgggtttaagcgattcttctgcctcagcctcccgagtagctgggactgcaggcatgcaccaccacacttggctaatttttgtatttttagatgagacaaggtttcaccatgttgcccaagcttgtctcaaactccccaccttaagtgatctgctcgccccagcctcccaaagtgctgggatcacaggtgtgagccaccatgcccagcgtactttaccattttaatagtagttttggcatcttgtttcagaa

SEQ ID NO: 15947 - DNA, 1723 bp, Homo sapiens
agaaaagactctatcagctacactagtgtcaagggaacttgattcaggacttaagcatcaataaagacaacaactgctctatattggatagattgaaatgcataaaatatgtttaaattgatgaatgcaaaatacttcaaaaaaaagaagtaacaaattgatcccatggaaggaagctagtgaaccaactcgtccaagtaaaatgatgaattaaaaggtcataaataagcatctatcttgccttttctattagatgtctaccactgggtgaccaaatagtagattagtagaagtttccctttaagaattccagctaataaataaagaatgaatgaatgaattatgctgccagtatatgcaacccctcttgaattgctgggtctaggcaatgaacatcagtggctgctaccatcacaggcagagacagatactcagtgccaactgatggaagaagacagcaccaaaatgtgccccaaattgaatctgaatctgatcgagtcttatatcccagtgctgatttacatgaaatagagaggacagaggagcatgtgacatggcaccatacgagcaatcagtaaaagccagatgatagaaaactctagagaaaaatatatatataagatttttcaacagaggaaaaaagatggaggcaaaatctgtagattaaaaaagacatatcaaccaagtacaataagagatcttacttgaattctaattcaaacaaactgaaaaactaaatatgtgaacttacaacatttgatatcattggaaatttgcatactggatattgcactgaagaattattgttaatttttgggtgggattatggtactgtggtttgttttaaagagtctcttagagagagatggaagtagttgtggatgaaataacgtgttatctggaatttgcttcaaaattatgtgagcaggagaagggttggagatagagaagaagcatggttggctaagagttgatgattgtcatgcctgagggatgggtacattggctttaatatccttttctgtctacttttatacatatttaaatttttattggaaaaatacttttaaaatatgtaccatcaggtaattctgtgttctccttgttagcctaaaaatctaagctcaagagtagagagactggaatgttgaggtgccatttacaatttctagtgccccactttctcctgtcagttaaactactgtttaacttgtattaagaaccgttaaagaatttgatatgtcattgatgagtatataatttcaatgcatataagacaaaaccccagtagatcctacacttactgctattcccaaagttacacattttaggagagacttttcttccatctttccatactaggagaaaattatgaaaaagtacaatgagtgagtgtcaactaaggaaatgttttgcttccaatcatgcatctatgcacatattttatcttaaaggcaccagatgctctgagagctggcataagacccagtcatggcccctgaacagaaggcatgtctccctcccattaagcccattgggtgtccagcccgcggcacctgctggacaagtgaaatgggctcaaagcccacacgtgtgccttctccgagcctcaggtacaagtggtgggtcccggcactgcccactgttgctgctggagccttcctcagttcctacaagacaatgtgtttgagcgtatcagcttcaacaaggggaaaactaaaga

SEQ ID NO: 15948 - DNA, 1089 bp, Homo sapiens
gatggatcatgaactccccgacagcaaggaccatacaaggttttgttcactgtttgcccaacacccagcacgtatgagtccctcagtagagtgatctattaatagctgctgaggtgcagtgatgagcagccagacagaaattgcccacatggagacagatggaaataagttatatagtgtgttagccattagtgctgtggagataactaagtcggggagaaggaagcaggtatgagtgtgtacagttttaaattagggttgtcagggaaggcttcacttaaaaaaaatgggatctgagcaaagatttgaggtgagaaagcaagccacgtggatgtctggaggaagaagtttctatgacgaggtaaggattcactgataattccttgccctcctgtggaactttgtggacttctgctgcagcttgtatttggttgtgccttattttataattcatcacatgcttatcaagctggatttgcccagtcttgagcacatgccattgattgagcagagttcacggctctggcgttttcaagtgtgtgcaattagaggactgccatgggcaaatcccacacccttgaatgggaacaaaaaggtggtctagggaccatgaatcctaagcaggagttaacactcgaccacaaggtgtgatggcccttggccggggctgggaccatcagtgggtctagaaatactgaaaggaaaccgctggctgcccttccaagtgtcctgttcccactagggagagctctgccgttagaccagacatatttgggggaaaaatggcaaaaaaaataaaaataaacatctccagatcagaattctaagatactccctctcgcctggcctcattcaggaagacacattcttcctttagagagatgagtgtatttaaatactcttaaacagacccattaagaccatttgcagtgagtttccttgtgtcacgctgatcaattaagtagatcttatttccttcatttccttcctattggggaagcttgtaacccccaggtatcatcactggcctattttgttggttttattcaagagtctgtgccattgtggctgcttgaaattaaacacttt

SEQ ID NO: 15949 - DNA, 1039 bp, Homo sapiens
tgcagcggcaaggcggtgtcggggctctctgcccccaggtctctccccgcctggttccattggctgctgggaaggatgtttggatgggaggtctttgtgttttcaggcaggaaatattatttgctccgctagccctaggccttactaatttactgtgcagtcttcaacaaatttcttgatcttctgctctctgttttctcatctgtaaaattgagggcagtgagcaaggtgacctgtaggtcccaggagtgccaaggtagtgccgtatttagtaccaggttttcctaagaggaaatgggggctacttggggtcaaaacaaaggagagtctttctagatagggaaggactagcagtgggtcaaaacttgccaagaaggactatgaagggagctttgcttggggtttaaaagctctgatcacagacttggaggggctcaaacccctcgctttagaaggcagaaaccaagaaccactaaggacctaggacttgctgacggtgtctttggagttaaaggtggaactgaagttagagctgattttcttcctgtcacatccagtaagactgggaatggttgggtgccagaggcaggttccagaaggtgggaagagtcctgtctgcatccccagggtcctaaccttgaggaaagcttgctgtccttttgtcctgcttcacactccctttggttaaaggtttcactcagagcccgatggaaaccttcaggaaaaaagggccccaaaccgaggcgaggacactggggaagccttgggtggtttctgtgtggggcggcccctgctctgtgaagcacaggggaataggactccatcgctgtcatcgtcactcatgccctggtgcagacctgcaggaacattgcctgctgtatacagggcaaatgggcactgtgccgggagaagcctgtaggaagagagacctggagggatgaggagggaactccgaccatgagcatgcacggagctccgtgaaggagggccttgacagacagaggcatggtgggtggagacgggtggagaacatccgggc

SEQ ID NO: 15950 - DNA, 1027 bp, Homo sapiens
tgtgctcgccagcaggtggggagcaagagagatggagtgtgggccctgagagctgaagcctttatggggtccaggccatcaccccagcaggttcccaagaagttgtaattcgttggcttagatcaggtaggcacaagttacgggaggccatgttgtgagggagaggtggtcatggcagcatatctgggcagtccatgccgggtgtgagggtctgcagggtgggtcaagtaggttgcatctagctgtcccttagggacttggtcaccaggaggcagctatataaggcacatctctggatcgaccattttgagggcctgggaagaggtggagacgtggaaactttcaaggatgactaagccctgcttctggtatgagaaagtccaacatatattcaaaataggtaccaagaaagcataacattgtaagaattcactgcagtggatcatctgaagggtctaaggtgagaaatgaatatgtagtgtagaagttgaagaggcatccacaggaatgatctctaatgaactggatctgcctccaagatagagatcaaaattggtttaaaacaaatacaagccaggtgcagtggatcacgcctgtaattccagcactttgggaggccaaggcaggagaatcacttgaggcgaggagttggagcctagcctgggcaatatagtacgaccctgtctttactaaaaatgcaaaaattaaccacgtatggtggctcacacctgtagtcctggctactgaggaggctgatgcaggagaatcatttgaacccaggaggtcaaggctgcagtgagctatgattgcaccactgcaatccagcctggacaacacagtgagaccctgcctcaaaaaaattatattctgattttctgagtccatgaacacattgtccaaatggatttttctagctcctccaagttacagatagttccacgcacacacagaactcaccactctcaaatattttccccactagtatactattaaatttttcaaacatgcaaaagatgaaagaattgct

SEQ ID NO: 15951 - DNA, 1028 bp, Homo sapiens
gttgaaatgaaggaaaaaatgttaagggcatccagagagaaaagtcaggttacccacaaagggaagcccatcagactaacagctgatctctcagcagaaactctacaagccagaagagagtgggggccaatattcaccattcttgaagaaaagaattttcaacccagaatttcatatcctgtgaaactaatcttcataagtgaaggagaaataaaatcctttacagacaagcaaatgctgagagattttgccaccaccagacctgccctacaagagctcctgaaggaagcactaaatgtggaaaggaacaactggtacagtcactgcaaaaacatgccaaattgaaaagaccattgatgctaggaagaaactgcatcaactaacgagcaaaataaccagctaacatcataatgacagtatcagattcacacataacaatattaactttaaatgtaaatgggctaaatgctccaattaaaagacacagactggcaaattggataaagagtcaagactcagtgtgctgtattcaggaaatacatctcacatgcagagacacacataggctccaaataaagggatggaggaagatctaccaagcaaatggaaaacaaaaaaaggtaggggttgcaatcctcgtctctgataaaatagactttaaaccaacaaagatcaaaagagacaaagaaggccattacataatggtaaagggatcaattcaacaagaagagctaactatcctaaatatatatgcacccaatacaggagcacccagattcataaagcaagtccttagagacctacaaagagacttagactcccacacaataataatgggagactttaacaccccactgtcaacattagacagatcaatgagacagaaagttaactaggatatccaggaactgaactcagctctgcaccaagcagacctaatagacatctacagaactctccaccccaaaatcaacagaatatacattcttctcagcacatcacacttattccaaaattgaacacataat

SEQ ID NO: 15952 - DNA, 1067 bp, Homo sapiens
aaatagtgaatgtcatttctctttattttagatgaaaataatttgtaaaatctgacatccaaatgcttaaaaagctaaaagttatttctacattgtacatttttcagagccaaagccttggctggacagtcagtacgaatctgtaaaggccccagggctgtgttttcccgcatcttgctactgttttcgttgaccgactcaatggaagatgaagacgccgcttgtggaggtcagggacagctttcaacagtcctgttggtcaacctcggccgaatggagtttcctagttacaccatcaatcggaaaacccacatcttccaagacagagatgatcttatcaggtaagatgatgttagctcactataatgtctatatgtgtatttcacaatttagtaaaaggttttgttatttttttccagccaaagtagaaacattaagtccacagccaaaacagtttttaatctttttttgccccacttgtatacatttctatgactatagggaaaatgtagaagtgtgctgagattatggttgccaaaatccaaggaattttgagttagaactacaaaaacttctctggtttatgtttccaagtacctttggaagggagtattttttgtttgtttgtttgtcttaatttgagacaggatttcgcccaggctggagtgcggtggcatgatcaccgctcactgtagcctcaacctcctgggcccaagtgatcctcccacctcagcctcccaagtagctgggaccacaggcacatgccaccacactcagctaatttttgtatttttttggtagagatggggtttcaccatgttgcccaggctggtctcaactcccggactcaagcaatccgcccaccttggcctcccaaagtgctgggattataggcgtgaaccaccgccctcggcctgtattttttttgacacagacatattaacaaacttgacttaggaatatgttgttggcatgaacaagactgaatgtgaatattttcttattagtaacactttaggtaaagctattaataacttgtatattgtatatcatacatatgataatta

SEQ ID NO: 15953 - DNA, 1082 bp, Homo sapiens
gcttttctggcttgtgagaatgtatactctgaagccaagttccagtttctataccaatgaactgtgaacccaccctgtgcctcagtttcctcatctgtcaaatggggagaataatagtatattcttacagacatgtgtggggtgcatgggaagtgcttaaagcctgggctatggggaatgcctactacatgttcattattattttaattgtcattcttactgttatacccaagttctatgacaaaaccatggttgacaagttcaaaaggcatctcatattctttctagaaagtaagtgtgctgtaaataataaaaataatgagaactcccttggttaagcagagagccttaagatgtaaatgaaactggatttaattgacttctggaaaggtaatagtattcaatatctggtaatgtgatacctggccaggaaacccttgttgtctacctctgtacttgagataatttatccttttaaaatgtttcttattcattcagtacaaatgagtgttgagtaccttttatgtgacttggttaggggttgtagcagtgaacaagagagggcctcagccatcatggggctatgtttcctggggagatagaaattaaccactatttaaagtgtgtgagaagtgctgtgataattgagggacaggctggataagttctttatagacagagtggccctggagaggtgacatttgaagtgggacttgaggatgagaatgaggtagctgtgtcagggtctgggtgcctgcgtcccggccgcgagatagcatgtgcacaggccctgaggcaggaaagagcttgctgagttggaggaactcaggagacccctggctaagatgtgggggtggacaggactgggttgttggtagcggcagtggagagaagtgaatgtgtatgaggcagtttggaagcagtaaagacaagacttgattctgatgtgggcgagaaggtgaggagtggatcaaggatggctctggtgttttgccttggggtggggcgccatccagtgaaggggattgggagaggtgttggtgctggaggcgtcagtgtgtggggtgctcttcagccgtttg

SEQ ID NO: 15954 - DNA, 1065 bp, Homo sapiens
cattatatgctgtattcttacaataaagtaagctagggaaaagaatatgttattaaggaaaatcataagggggctggtacggtggctcacgcctgtaatcccggcactttgggaggccgaggctggcagatcacctgaggtcgggagtctgagaccagcctgaccaacatggagaaacctcgtctctactaaaaatacaaaattagccaggcctggtggtgcctgcctgtaatcccagctactcgggaggctgaggcaggagaatcacttgaacccaggaggtggaggttgtggtgagctgagatcacgccattgcactccagcctgggccacgagcaaaactccgtctcaaaaaaaaaaaaaaaaaaaaaatcataaggggctgggcgtggtggctcatgcctgtaatcccagcactttgggaggcagaggtgagtggatcacttgaggtcaggagttcgagactagcctggccaacatggtgaaacctcgtctctactaaaaatacaaaaattaggtgggtgttgtgacgagtgtctgtaatcccagcctcggaaggctgaggcaggagaatcacatgaacctgggagacagaggttgtaatgagctgagatcgcaccactgtactccagcctgggtgacagagcgagactctgtctcggggaaaaaaaaaaaaaaaaagaaaatcataaggaagagaaaacatatttactgttcgttaagtggaagtggatcatcatgaaggtcttcatccttgttgtctttacagcaaataggctgaggacgaggagagagaggagggcttggtcttgctgtctcaggggtggcagaagcagaagaaaatccacatataagtggacgtgtgcagtttaaacccatgttgtccaggggtcagctgtatatttatagagaaataatattgacttaaaaatcacaagaagttagattactataaacagaggttgataaacttctgtaaaaggtcacatagtgaatattttaggctttgcaggccatatggtttctgtggcaccaactttactctgctgttttagtgcaaaagca

SEQ ID NO: 15955 - DNA, 1049 bp, Homo sapiens
actacatcacagccaggcggcattccctgccacagtggcggcttgaatcatcaagaaatggataaatggggctttagtaaatcaggcttgcaggctcaaagctgcaatctgcccactctcaggtactgagactttgtgggcctcagacaccaggaagaaagctgggatacagtcatttgagttaaaaagggaatgacccctcagaaacccgcattagcagtgttactcttggaagtgcctttacttttaacgctctctgttctgaaaaagaggtgtttggttacgtgtgagccaacatcacgttttgttagctgtgatttacctttgtccgtttaaaagacttcacggagccattctgtatacaaggtgtgctctttccaatgtagaaggggttatggaaaagggtgcgatcctttgctgtaaactggagagaccagtcccaaacagaggggaattttaagcccttctcatcacccaattggatgtttttgcttatagcaaattcctgcaaaataaataaataaatatttgcaaaactaaagattctctcatgaatgccttttttcagatgagccactcatcattacacaggttaaatgttctgtactgcagccctcaaaacccaccagagtggcactttcacttcaagagaggagacgctcctggcctttgagctcagagggccccacagtccccatgaacaaggagtgtgcttttcaggtgccctctgccttaggaccccaaggaagccgtgccctttgggcaataagaatgttattaagagaagtttcactaacatgatactagaaagtcttaaacatgttgaatttatttctataattacagtattttacttttatgagcacacggtcagtacatttaagtagttacctgttggtaagtggattaacaaaatctttggatggaaatcactgccaccaattttataacttacttcgtaagtggggagctacacttcactgagccagtgatctcaaatcacagaccacagactcagggtaggaaggaagggatcaactccctgtggt

SEQ ID NO: 15956 - DNA, 1076 bp, Homo sapiens
ctgccaagctgaggttcagtctggccccattctcacttcctctactcccccttgtactgtgggatctgagcatttctttaacagccttcaggggtttccagcccttaggacaagcagcaggtgggtatacaggggagcagaccccaggggggcctgaggagggagggtgaaggcaccccttctttgtgctgtctgtagctgctcatcctgggagacactgtgggggaggctgtggcttccttcttccgccctctggggatgccctggcggcctgtcccttgggtgttgggaggaggtggcttggctgactgtccctgctcatggtcagggtcctcctacacagcagaactggaggtaaacactgggttgccttggcaactgggctgtgccatggctccaagtgctcctggctagagaagttcccattgtctcaagtttctaggatgggtttctattttgatttttttttttttaaattagcaagaatgactaagataccaaaatgtctgacctggtttctataatttcttaataaacatttgtcttccctttataggaggaatgttttagtgattcattgacttttcttttagacggtggcaaggccctggtgaggcagtgcgggggcagcacagaggaccccccactgccgacagctggcacgggaggctgggagagcactggccacgatccagggaccaggcatgcttacgtagacaccacacgaggattttattggctttgaggctaattaagttccatggaaaattttggggagatgcctctcccctgtggggggttcagatacccacaactggtgcttccagaagctgtctgaaggctgatgcgtctgactgagcccgaggagcgccctcccacccagtgctgcactctcccgccagaggcctggccccctccctgcaggtcagggcatgtgcttgtttataccttgttggtgtttgctgttaaattctaactgctcacctaggtagcctgggctggctgcgcccagtggatgtcctcccgccccccgcctgctgtctcgtgggagtgccccaggtggcactttgctgtgg

SEQ ID NO: 15957 - DNA, 1048 bp, Homo sapiens
caagcagccatctgtaaggtgaggaaagaccttgtgtccacagctgctttatctgatgttcaggtgccccccaccaactgcacccccacccccgccagagactcccgagcctttgtggggaaacgtggattgcttccttgccttctctgctgtctttctaatttcttgcttccagattatttttgttactctctttcccttttgctttgtctgttaaaatccactttctttcattgtagtgggatctggggctggaagggtggtgggtgcctgtgcctgacctgccagctttatccagagttcctgttaggcctttggtccagtgcaggaggcgtggggagagatgagggtaaggtaagcactaggtagggggcggctgagagttgtccagctgttgggcagccagcatctcctttgttcttgcccaacaatgttatccaggagtttgccagagatacatccagcaatatcctggaagcaactgaaggcagctcacaagaagacagttgtgcagtggaaggagggggtccaaacctaaggttggcaggttgactatagtacagttgcgattgtctgcattcttacagtttctgtcaaaacatcgttttcccaagtggctggtcagctcccctgtggttaacatgcttgcagcaatggatgagagctccagttgctccaccagcatttagtattgtcagtgttttggattttaaccattctcataaatatgtatagtgatatctcgttgtaatttgaattttcataataacaaatgacactgaacaccttttcacacagttgtttaccatctctctatcttctttggtaagagtgttcagatcttttgttcattttttaaattggcatttgcttattgttgagattgagttctttatgtattttagatacaaattgcctttacttttgatcagcctcaaatgaagagcatttttatcagctaaataaacctggctctgtaattgtggattccaacctcatattcctgtcttgccttgtgtttcagaaaatatctgaagaggtgcatagg

SEQ ID NO: 15958 - DNA, 1050 bp, Homo sapiens
tcacatgcttccccagcctgcaggcagaagaagctaaaggacaaggctcctcacaagggctattaggaagcaaggctgagtctgaatttgggttggcttccccccacaccaacaggcccaaatcagaggagacccagttgacagggctaatgactaagagcaacaataacagctgagatttcaggagtggacctttggaacgtgccaggcgctgtgctgaggccggtcgtgcgcagccccatgggatcactgtatggaccccccgcatgaggacggggcagtgtgctcacttcctgtggctgctgtcacacattaccgcaaactgggtggctgaaaagcaaccgaaacttactctctcacagttccagaaatcaaggtgttggcagggttaattccttccagaggctctgagggagaatccactccatacctccccttccttcccctgccccctttctcccccttctcacttgctgccttccccgtctccctcactcccctcccctcttctccatgctccacacttgggagctcatctccagatcctgacctgattacatctgcaaagaccctttttccagataagatcacatgcacaggttctggagggttatcacttggctatatcttttgggggaccattatctgccctactgctggcagcacggagctttttcgaggccatagcgtcacaactcagggcaaacagggtctgaacctcatctgtcagacctgacatggttaatgctaaaccatttaatgctggactttcccaagcttttaatgactagtgtgcgttgtgaatctccaagagtggaattatcatgcaacattttcactctttagttgacaaaattttttttctggaaacgataaacagttttatacaatgataacatttctttgaacatgttttgggaaatattggactagatatttaaggaactatatttaaacacttcttcttcttgttatggaagaaacaaatacataggatttttttaaaaggcccaagccaggcgtgtggctcatacctgtaatcccagcact

SEQ ID NO: 15959 - DNA, 1053 bp, Homo sapiens
ctccccgccgccggggaggggcagcgggggcgctgcgggggctgcttgtctgggctgcaccgggtgggcggcgggggacgccggcaggagggagtcgggggtacccccgccggcctgccctgagccccctgcccgggtcttctctccttaagtgtccctgcaaggcgagttccagaggaagctttacaaggagctggtcaagaactacaatcccttggagaggcccgtggccaatgactcgcaaccactcaccgtctacttctccctgagcctcctgcagatcatggacgtggtgagtcccgcctggctacagggctgccctctccccttcctgggctccgaggggctttttagacagcgtcgggcggccaggcggtggagctcggctggggcactctagttggccccaagctaggcagggccatgctctgagtctgtccccagcctgccctctcctgagtgtctcatttctcggtttcccctccagccaaggagggacctggtaaagcttattccatcaccctggccacctgtgcatggttacttgggtcccacctttctctcaggttagaaactcaagcatcctgagctgggactcagtagcaagaacaggtgaagttcactttttaatctcccttatggtgtaagtgttgacttgcattccagcattgtcaatttagccacttctagacttttctgccgcctatggtatgtaacttctttggtgggggcctggccctgagctttgcagctggcgaatctatccaggcagagggcaagagggccagctgtgaactttcactgtgaccccatcttaggaatgggcatgctttgccttcctggtgaggacaggtactgggagtcctgctccgaggactcagggttccccgtcaggaatacatgtgtctgtccctccaggcagctgccatcagttccgtgggtctcttgccttgcagccttgctagtgcccacttcagttagccaatctgtgtaaacttgcctattgttcctctatgctgctttggatattcaatattcatggtatattctcca

SEQ ID NO: 15960 - DNA, 1065 bp, Homo sapiens
attaaatgaatggattatgcagtagccaagataattgaaataggtgaccagtgagattttattttcagtttgaactattgatttttttggcatttgatatgttttactccattgcagttattctttctgatgcttgaactgtcagattggctcctgcattgttttgctttggtcactgtgatccttaatcatttcttctatttcctggcagaaaataaaataaggtgtcctgggctcactgtgtgtacctcccaccacagactggaatctgcctttgctaaggagcattacagtgggaaattaaatttagaagccacagactgacaggaggtattggaagaaattccaacttgagtctaacagatatctcagaaagagacaactgagcgaatgggaagtacagatatagagaaatgatttttttttgttttgtttgttttctaaaagcttctagatttgagggaaaacacaaacacatacttagaagcagcagacccacttcatccttcaattccagtacatcaggtgtaaggaaaaaaaggctatttaggacattacagagggctataacgcccaagctccgatgagaaactgattagtatcctaagatctctgaaacgccaagtagaaaagcaaaaaaaaaaaaaaaaaaaaaaaaaaaaaagtgttttcatgtatgcaaggattcaaagtttaccacccacaaattatctgaaagaattgctggaataatgtaatccagttatgcaaaaccaaaatcaaactctaagcagaataagtgagatataataaatccaagcagttagagtccagaaaatttggcattaagcctaattgtcagttgtcaaacatcccatgaaacatcaacagcaatctataactgaaacttcagaattcactctacaaacggtcctggaggagtgagggtagtgtatttcagaggtagaaaaagcagagaagaaatgcattctaagatacttttctatatctatatcatctatttatatgtatacctgtatatacatacctgtgtgtgtgtgtgcacgcgcacacacgcacgcatat

SEQ ID NO: 15961 - DNA, 1060 bp, Homo sapiens
atcctgttataagcaacagaaaacaaactaagacagtagtagttccaggtgagcagaggtaattttgctgctggagatctcagagaaggagttttgaggatgtgctgttacagcttctgtattaatcagatattcacacctgagctggagggaggctgtttctaaatcatgtgttgtgggaagagggggagcagcagcttgttttaaagcagtgagtggagccagccaacctatgtttgcatcttcaaagtcatcctccgaactgtccatctcactctcccaggtctcatcatggtcgctcttgctgtttgtttttaatttgttcattcactcaaccaatatttagtgaaggctccctcagcataatcacacactgttctgggaactaaggattcagcagtgatccagccagacccaaacccaccagagaaacagagatggggaagagaggagggaggcatgggccagattgtaggtgatcccagaaaaatgaagcaggaaagggaatagtgagggctgagccagaggtcagggagagaccaggagacagactagagggctgcaaaggaacaggccctgtgatatcaagtggagagagtgttcctgacagaaggaacagccagtgcaggggccctgtcaagaaggcttgtgaaagacttcgaaatgcaaaaaaaaaaaaaaaatagtgagggaagagaaaaaaagacacctcggttcctacagaatactaggcatggtcacaggcaccttcctggtcatctgagtctgtagtggactgtgcctgtcatggtcttcaaactagttttcaactctaacttctagaaaactgatggcaaaaccaatgattctagtccacggagaagcaaatgtgttttgctggtggaccaattcccctgttgacagattcagatcagtgtgcctggttgtctttgtatgtgtctgcttttaggatgctctgcagaattggttttaacattttcctggttccttccttcattaatgacttaagtagtctttgacacacgatcactttatatttgtgcaagtgtcatgattttat

SEQ ID NO: 15962 - DNA, 1026 bp, Homo sapiens
tactaaaaaacactcatagccctaccttccttccagtgactgtctcattctgttctttttatccaaaactcttatacttgagttgatatcaaatttccttgcattggagtacccaaagcttagtccttggacttctcttttttctctccactcactcaaggtgatcatcagttttaaacattatatacaggttgagtagcacttatccagaatgcttgagaccagaagtatttcagattccccatttttgggggggattttggaatatttacattatttttactagttcagcatccctaatctgaaagtctggaatgctccagtgagcattttctttgaacatcatgtcaaatacttaaaagctttggatttttggagcatccagaactttggcttttcagatttggaatgcccaacctgtatttacttaaaacttccaagtttatgttctctagtcccaaatgctcttctgaatgactccgctgtctcttaacatctgcttttttgactctcctacttggatatctaatccaataggcatttcaaatgtaacctgtcccaagcagatggatttctttgctgctgctatgccctgcaccaaacaacacttttacctgtggttttccctatctcagttatggcaaatcgttcttccagtcacttaagccaaaaaccatggtcaaatccttgattcctcactttctctgagacaccatgtctaatccattagagaatcttgtctaacttctgcttttagagtatctccaaactgaccagttctcactattactacttttcccactttctctaagttctgtcatctctcagctggattactctagtaaactcctgttaatagttcttccttctcctacccttgctgcagttctgtagttgaaatttatcttttaaaatctgttaggttatgtagttttctgctcagaactctccagtgactcctcgtttcactctgaataaaagccagagttctcatgttgacctgcaaaggcctcacgtgatctgttc

SEQ ID NO: 15963 - DNA, 1027 bp, Homo sapiens
ctcttgtaacaaataaaaacattgtatggctcaacgcaatagaagtttatttttcacccgtgtgaagtcctgccagaggcgcgtgaggctgtagtgcggtggatggttcggcaccccagactgccatctttacacttgacccccacagttgccctggcaacatgtaacaagctgaccaggagatgggggtggggaatgaggagaagtggagcatggtatgagaggtttttatgcttttaggtgatgtatttcaattccaggcctgggaatggaatacattacttgtgcccacattctgttggcctccactcaggcaaatgactccacgtgattgcaaagcaaggctgggaaattagtctagctgggtgctaaggaggaaagggaagtgggtttggtgaacagccagtgagtctctgcacaggagtgggagtttgagatgagtaatcctatctaactggatcctagagggaaggtggctgctagtgttctaagttactactgatgtgaacagattctgacctttggctgcctagttgtttttgataaattaactcttagaataatgatgaatgtcttggccgttcctcaaaaacctttggctgtttgcagcagatgatggatgtctagaaaacacccctgacactgcagagttcagtcgagagttccagttgcaccagcatctctttgatccggaacatgactatccaggcttgggcaagtgggtaagtcctatctcaattgttagtagattttgcactttggtactctgaaggtgctgatggcagggatgagcaatatgggcagaaggagagaagaaaaattatttagaagctaatttttcagaaatctctggttgacagagcttcaagtcatgactactcaaaaccacacttatgtgtccaggcagcactataccaaatccaactaaagagacagcaacctaacattgaccatagtctccagagtcttctactctggtctgcttcacagcctgtgtcatacacatcctaaatttcaccagtgtttc

SEQ ID NO: 15964 - DNA, 1050 bp, Homo sapiens
tgtgtatgatggcctggcgacccattcaggcacttatggccatttcagccagtaagtattcttgaaacaataacccttccataagtttgaagaattaaaggcaggccgggcatggtggctcacgcctgtaatcccagcactttgggaggcgccaagctgggtggatcatctgagggcaggagttcgagaccagcctggccaacatggtgaaaccttgtctctactaaaaatgcaaaaattagctgggcgtggtggcacacgcctgtaatcccagctgcttgggaggctgagacaggagaatcacttgaacctgggaggcagaggttgcagtgagccgagatcgtgccactgcactccagcctgggtgacagaacgagactccatctcaaaaaaaaggaagaattaaaggtaaattcttagggacagtttttggctaacaggtatataggggagtggggtaatggtggtggcatggaggggagtgtagtgcttaccatggttttctgtttgcctttaatggtcctatttgctgtcttactatgggtctgtctatatgaatttaatatacagttggcttgattcgtattgggggaaagagttcttttggtttgacaacttctgttaccgcaacagctttcaagatgttagaaagttcaagccagaagtttcttcagggtttggtctatctcattgggaacctgatgggtttggcattggctgtttacaagtgccagtccatgggactgttacctacacatgcatcggattggttagccttcattgagccccctgaggtaaggcaaaagaaaagctgaattttgggtagttgtagtatacagtgaatagctgacctacttgatggtaggaaattggagttggtatttgagtttctttttttttttttttttttttttgagacggagtattgctctgtcgcccaggctggagtgcagtggcatgatctcggcaacctccgcctcctgggttcaagcaattattctgcctcagccttccaagtagctgggattacaggcacctgccaccatgccc

SEQ ID NO: 15965 - DNA, 1033 bp, Homo sapiens
ttgttatcactgttcgctatcgctaagtggatgtgggcaaagtcacataccaaatagttagttgcaccaggatttgaattcaagtagtttcaccccaatgtccacattccaagtcccagcataccacagtgccacagggaggtgacagctctctgtggctgggcccctcatcataccacatttctaaacaagattatcttctttgttgcattttacataggcatggttaaagcagatgtccctatgtactaaacatgtaagcattcaatcatggaaatatttattcgtgtatttacatgtcagatcttatagagcaatatttaagttatcaaaagacatagcatgtagtactgagtattagcataatattaaagaaagaaccttggagttgcaatcaaaaggcatggactcattctgtctcttctacttgagaaatgaatgttttaaataagttacctgagcgtcattggttctcagaatcctcattcataaaaagaagataataatatttatactaatacttttctctgactggatttttacaaagattaaagggactaattaacacaaaagtaagagtaaagaatatagtagaaaagcaatagatgatggtgcttttgcttccttcttaccaagcagatgttttaaaaatagtcaaaataatatcttgcaagtacccagaactcaaactatttgatgatgggttgcttaacttttagtaattatgatggaaaccaaaacttgtcattaactaaatgattacatcattttatattattggtgagaaatcattttagtactataagcattgagatgttaattaaatgattcacactgttcataaaatttctaaaatgaagatagtttaaaaagtgattttcagactgtgaagttgtagcccattagagggtgatgaaatcaatttacatctcattttagagagaatgtttatattttaatacaaaaagaggaatatatcactcatagttaagtattatttttgtgaaattttccatttgattttatacacata

SEQ ID NO: 15966 - DNA, 1065 bp, Homo sapiens
tatttagttactcaatattcttaagactggggctcttacatactgctttctatgacacttttaatgtattctgttaataaacactatttttgttcctagtcgatagatatttttgttcctagttgataaagtcgatagataagtggctcatctccattacataatctggtgagttgttgaaggaagttttatactgtacatcatgactgtttttcttgggttggaatgcatgcacataggcattgttttgcttaggtattgggttttcctctacaattttacttgatggtaatctttacaaaaacctctcccagtttccttatttaaaaattcagcattaaaagaatgaccattgaggttagcgtgtgccgggggtgctgggggctcgagaactgagcggagctggttgagccttgaaagtgctaaaacgcgcggccgtgttattgattgaattccagcggcgcgggagcctctgcagagaacgcgagagatgaagatgggcagacggattcatttagagctgcggaacaggacgccctctgatgtgaaagaacttgtcctggacaacagtcggtcgaatgaaggcaaactcgaaggcctcacagatgaatctgaataactggaattcttcagtgcaaccaacgtaggcctcacctcaactgcaaacttaccgaagttaaacaaacttaagaagcttgaactaagcgataacagagtctcggggggcgtggaagcattggcagaaaagtgtccgaacctcacgcatctaaatttatgtggcaacaaaattaaagacctcagcacaacagagccactgaaaaacttagaaaacctcaagagcttagaccttttcaattgcgaggtaaccaacctgaacgactaccgagaaaatgtgttcaagctcctcctgcaactcacatatcttgacggctatgaccgggacgacaaggaggcccctaacttggatgctgagggctacgtggagggcctggaggaggaggaggaggatgaggatgaggaggagtatgacgaagatgctcaggtagtggaggacgaggaggagga

SEQ ID NO: 15967 - DNA, 1047 bp, Homo sapiens
cactggggtgttttgcctaagcatatgaaaacatagtgacataaaataaattccagtttcatccaacaatgcagtagataacataaaaaaaatttaaccatgtacaggaaatgatggaaagtttgcgggagggagctatcattatggcctggaatcaagccagtgtgccagtctggaggggcatccgtctaactcaccctgggttcctagacatgtaccacactgggttactcttactaaaatacagtttttccactctctcttctcctaatgaataaatgagggcaggggaagttgaagggatccctttttcttctcctgtcggctctaagatcctcaacctagctggcaaattctttgtaataatctcctaccattttgtttcccatcctgtcccaaacatcacctgtctctttgagtagcctcctcgctcttttgtaaaaatatcccccgcagttcgccgctgtgccttgcttgggatgcctctgtctcttgtctgacagctcctgcccaggaggtctctgccttccctatatgaactttggcagtgcattgagtgtaccccacattttagcacttatttattcaaccatttaacaaatatttgtggagagcctggtctgtgccaagcatggatctatatgcactaaattatatcctttcttatattatttattaattgttttacgtggcctatgtggtagataaaagcgttggatatagagtctggaaactgaggttataatctcaatcctgttactttgttaattgtataattttggggaaaatccctttagtaagccacagcttccacatatttcgatgagtttttgagtggactgtacaagataatgtgtatctatattttcccaaaagatgaatatgctaatgaaatgtaagaatataattactatgtaacccatatgcccctcaggagtatttgtgccccaaactctgtgctctcatatatagatatagatatagatatgagataataatagattgaggtacaataaacatatcaggtaccaaaaattactaaaaagg

SEQ ID NO: 15968 - DNA, 1048 bp, Homo sapiens
ataaagactgatagtctcactcatgctctttttactgggagtcagtaggcaggaagctaaaattagctcagttttgtcaaattgatttgagttcatccatggtaaaatgaaatctaatattttccttcctcctacatggttagaaattttggttctcagcaggtgttgaatttaaatagtaagaacaaatggaagccacagctatggctctgagaacaattatataggtccttgaaaatccatttccaatctatattaaaaaagaaatgttattttgcagcaatgaggaattaaagtctgctgaaattatttttttttctgcttcaagaaatcagtccagaaatcccaaacttttgtaagtcatggtcttctttgaaaccacatttcccttatgtttcacattgtcattgcatgaattctgttactttgatgtcctcaataatttattactttttgcatttttcttatgacacagaccacagagctataagaaactgaccattgcatttcacgtgacttgggcttaaaatatgataaaggaaaagagtaaaagttgtcatggtatcttatattaaaaaaggtattctatgtaacaaagcttattaaattcaatgagcttctctgtaaaataatgacctttttatcaaattttatataatgaatatttttctgcaatgaaattctacttgtttctctcttataatcactatcactaagcaacagacttatttgctgcttgcaataatgagatacagatgaattcattataattgtttcatcccaccatccaacaacagttacaaataaactctcctaaagtttttgctctttaattaccaaaaaaagttcagccagaaaaaagactcaaatacctaaagtttgatttcactgaccccgaacaattacagtaactaaaactaaaaatggcagatactacgcaacatcttccacttttcctggcagaaaaccttcttttcctcacaagctaattcaaagtatgaatcctataagattcttttcatctttaccacttgctgatggcaaactg

SEQ ID NO: 15969 - DNA, 1060 bp, Homo sapiens
aggccaatgcaagtggattgcttgggctcaggagtttgagaacagcctgggcaatatggcaaaactccgtctctacaaaaaatagaaaaaattagccaggcgtggtggcatgtgcctatagtcctagctattttgggggctgaggtgggaggatctcttgagcacaggaggttggaggctgcagtgaaccaaaattgggactgcactccagcctgtgtgacaaagtgagaccctgtctcaaaacagaaacaaaaacaaacaaacaagaaccccccctaccacccaaccccaaaacacagataggctatagaatcttggtgaaatcagactctaccaattattaatgacctagggttaagaggaagaattgtgacctgagatgcctcctaagttctatcaccttcagagttgatactgggtgcctttctcttaacttttagctttctttttacagtcatggtcactcatagctacaatctatgagaggatattttgggaggattgcttttgcctatttgctaaattggccgagtggcacttattgtaaaactctaatttacttcatgctttttttttcacagttatggcctatatacatgtgcccacaccctcattgtggagccatacagaacccagaagataagtccgacatttaaaaactttatccacagaccagctctagtctttaacgagcctcctttattattccaaagttttcaaaatgaaaaaaagagatgaaaacattatccagagccctaactccttttaaaattttatttttcaaatgatcacacagtaaagttgactttttagatgtaaagttctatgaattttaacacatgaatagatttgtgtaatgacctccacaatcaggattcagaacagttctatcacccctaaaagccccttgtgctatcccttcatagtcatagtctccccccaacccttggcagccactgatctgttctttatcactgtagctttgtttttgtgaaactatcatatgaatgggatcatgcaatgtgttatattttgagactgatgatctagataaactaga

SEQ ID NO: 15970 - DNA, 1050 bp, Homo sapiens
agccacagggcattgtaaaaccccagtgaactaactacttgtgtgatttctggagctctttggttttctcagtctgccatgaggtcacaaatatggcagtttccaaagcagaacatttttagcttcctcttcaagctaagctgctttatcttaactgtctacattagacctttgcttttggccttctctgggactggaattcctaaccgtatgagtaaaatcctcgtgtcctgcctggcacacagtgctagtgagctctaccattgtactgcctccagcatcataaaaatagacagcagtgctgattgacttttctgggctgctctctgaaaattcgtcatgaacctgacacgatcatagcatcactgaatcattaacttgcaccatacaccaaaacactcagggttttatcgatagcagctctcaatttttttttgtattcatagtgataaagctactattattcctaattgggattaggaagacatgaaaaatcttgttagggtgttgaaaaattattatgtaacagtaagagggaaagagtttgaatttcacttactgtgaattcttaagcgtatgtgctcagcgtgaacgcttccagccactccagtggaaggggctgatggttttggttggtggtgtgccctgtgcctgccaggctatcagcgcctgcatcttgtcttctacttaactcttctaatgtcctccaataaccaaacttttattttccctcacatgtattgcaactataaattaatggctcacagttttaaaagtgctataatgaatactatttcctactgcggacacattgtaatgatagcaaaaacacttttgggacttctcttttggcaagtatttttggagtgtgtgacacagtgtctttggtacttttgagaatggagacaaaaggcattattaagtttgaaaaataagggggctgatgttactaggtgaccataaattctagagacataattattttgccatgtgttataattcaataacaataaatcctttattgtatttatctgtgtttctagacgtggt

SEQ ID NO: 15971 - DNA, 1039 bp, Homo sapiens
gttttaaagctgtttcaacaaaatgttattggaagacagattttctgctacagatgttaaaacctttggaatatgtggggctgaaaggaccagttcgggtgtgatcttaaaattgggcagcttgccttctgcttcaatgcttggttccaccctgaagaggggagttacacaccactatgtgcacttgacacatgcaaatgctaaattcagtagcagcatgaggtctctgtcattaacagtaatttatgtaatgaaagccacctggcttttttttttttataattaattgcttgtaaataataaatttaagtgtaatttatggttttctaaatttgattaccatgtagacccaacagcaaacccaaaaaaattatcaattccataatgttcttctatgacttttaaaaggtacacacacacacacacacacacacacacacacacacacattttagagtaaacatcagatgaaaatacttttggggagcaataagaatgtaatcaactcctgttggttttattcaagttggaatgctaattttgaaatagtctcattaagttttatattattatgtcagctgaccttttaaaagtatttacacatatagttagtacactcagaagaaagtatacctacttaacagtaatatagtaaaactcctttaaaaaaagctttttccctattttgtaaaattccaattatgttttcaaaagaatttatatatgaagaaaaagcacctaagcatatatgatgatatttaacatattgtggtgataataagaggctctttgcctaatagatttaccaagcacaatatcttagtttaaaatggctttacggtagttctttttgtttatgtggtcacatatatcagctgccaaagaattgtgttttctgacatagaaaatatctaagattcacatggtttaaagagaaagggggatttagacccttgtcctctgtgcttctctttcattaaaaaagaaaggaaagacggaagtaaggaaggacataatttatggctttatgtttaagatt

SEQ ID NO: 15972 - DNA, 1049 bp, Homo sapiens
catatgacagatgcactcccttttcaagagcttgtatgataagttttgattgtagaagtgggaatttgacctctagcttatcacttgcttcattagcgtgcttgaggacaaggagttttttttttgttttttgttttgacgtgagtgttatcttactcatgttccagaattctatctgcctccttctctctgctgatctgaagtcacagtagataaccttgatgctggttttttaaaagcatcacgcattgtgtagtgttacatatattttatatataaatatatacactatgaatatgtttctgagcatgggtctttcaaagttttgattcattattttagatatactacctcccatgtgatttctgttctttttcatggaaaaggaagaaatacactttttggctcataaagatgactgaaagtccgacttctacatttccacaaactgaccacttcttgaagtgaatgagaataagggaatgaagtttgggactctgcacacacatggaggaaagtatgctacccaaagaatgaacgaatgctagaggtgtacccataaagagatgcggaaatgaagcttagaaggatttcatgtggtaaactctgtgactgcagcacttaaatgaaattgctttttattatctggttgaaaaatcatccaaaataagccatacaggacaaaggctaaaaagcttctgggtaaaagcagtcttggataatttaattttctcccacagcagttctgtatttacctgcttatgatgtctgtttcaattccttaaaagactgtatacctaaactttattttaaaatgttttctgttaaattaaaatcctctgtttatagaagtcactattcccttaacctctaagggggttatgtaaattttatattccctaagggcacagtcatatttagctgtgttcctgtcaattaccagcaagctctttttgtacaattagggggtggttaatttactctagtaaggttgccacctgtctagggattaacccaaacaggttggaagtcacagagagacttttgaa

SEQ ID NO: 15973 - DNA, 1029 bp, Homo sapiens
gaatttattctgtaacttctgttccctttggccgaaacagatcaaacacggtgggacagtacagtgggcgcagggtagaggtggtgagttcctaaaaacgatagccttgagatcatgggactctgatcctctccccacctgcccagtatttccctccggtgtcccttctcagcattaacacgttggaagaaagtacaaataatatacactgaagtcaatgtcttggttgtactaaaactactttcctgctccttatggtgtgacatttggtcagaacactcttctataaggttagcacatacagaaacagatagttggctggcagactacctagcaaagttcactttattctctacagctttgaattagttaaacaaaaccaaaacattgtggacccgaatctgtctttctgttgttactatgtatacgtaagtggttttctctttttattaatagttctagccagtttttacccccagtgtaagctggcaaaaatcactctaaccctctcggccatagaaaactgagttgcttcacaggctctgtccatggttttagctgaattgaattctaagcagtttgaagacatttttctagctaaagacgtttttctatccttggcttatacagtactctcaactcctgaccaacttctcattttgaactatttattcttgaacttatttctccaactgcctcttcccattctgggcatctacagttatgttatgttttatttacagtttagttttcttttcattggtcattggtccctaactttctcattacaaatacatttatttctatcatcttttttgaagcacaaagaatgacatgttgtgtaccattagatggttaataatatacatggttgctatacagtgaggagggggtctatttatggcacataaatatctaacattaatttattaagggtttacaaagatttgggcttcattttgcctccctcccaccccagaagattattgtcagcaaccctactagggtatgtgatttggatgttaagct

SEQ ID NO: 15974 - DNA, 1047 bp, Homo sapiens
aacaataagaggatattaattcctttggaattcatgttcttcattcctctgcagattgtcaagagctatttgaatcctaactatattccaggcactatgttaggtgctacagtggatggaagaaaggataaaactcatcaaagaactcatagtttagtggaatgtatcatgtgtgtacgtaacacaaatcgagtatcccttatctgaaatgtctgggaccagaagtgtttcagattttagtttttttttttttttttttggatttgaaatattttcattatacttactggatgagcatccaaaatccaaaatccaaaatgctccaatgagcatttcctttgaaatgctcaaaacgtttatggagcatttcagatttcagatttttgaatttgggatgcccaacttatgatcctgtctgtgcctttagaggtaaaaacatctctttgaaaggaatcaaagaagagatgtgttctagtttgtagaattagaggaagcctcatggattgaggcttcaagagaagacaatttaagacagagaactctatgaacaaagaaagtttgtatgtacaatcttagtgggaattaaagttggacaaattcagatggggttatatgatggaagatactgaaatccagacctaggtatttatatttaaattaacagggaatgggaagccactgttggttctgaatagcagagtgacttgatgagagcttttatttagttttttatgacagtgcttttcaacaagacagatacggaagatatctgaaatggtgtggctgtatctccaccaaatctcatcttgtagttccccgtaatccccacgtgttgtggaagggacccagtaggaggtaattgaatcatggggggcggttacccccatgcttttgttcttgtaatagtgagtgagttctcacaagatctgatggttttatacgggctcttcctttttgctcggcacttccccttcctgccaccatgtgaagaagtatgtgtttgcttccccttccaccatcatcgtgctgaactgtgagataaccagg

SEQ ID NO: 15975 - DNA, 1100 bp, Homo sapiens
tcattccactgcattccagcttgggtgacagagtgagaccctgtctctaactaaaataggtaggtaggtaggtaggtagatagatagatagataggtaggtagatagatagatagatagatagatagatagatagatagatagatagatagatatgagcatttaaagtctcaaaaggtgtgacgaacttgctgcctactcctaggcttagctgtacaaaaaactcctcaacgttaaattgaaccataagcattgtgatcatcccattacctctgctaagggttcactcttagcagacaaaatagaaaatgtatttcatctactggtagagacatgttaactagtatctctcaagtgattaatgagaccgtattttgctgtgtttttttgtgtgttttttttagcagctttggacaaaaagacaggaaaggaaaagaaaatagtgacaatgcaaagacaacaagacagtttgccctgttagctaaaatatgaaagagcgcatacaaaagactgaagataaaccatccatcttttatgggttggcatatctccaggttggagggacttccgttagtgactgccacagccactgtctggtgcaaattcttgttaagtctggcctaataagaatggttctggagatattttattctttccagtgaatgtttccctgttagtagatgctaacaattattttgagtgacacctgggaggcatttgctgtgcccctgcctcaccctcgcccccatgtttggacaaaccagcaaattttacaggggtgcttgtgtagcatttgtgtattactctgtgggactctgagagagtataatctgtaaagccaaataggcttagtgaaggatgtcccttgtcgtaagaaattaggatctttgtttctaagagttcatctgcccctgctgctttattcctcacctgaagcaataatactctgctggggaggtgattatgatgtgacaaacaggggattatgacttcaggtgaaggacaggcagcaggagcagatgagatttagaataccaagactgtgtgtacacgcagatgtcagtggcagagagtaagagaccagaaatggaacatacgatt

SEQ ID NO: 15976 - DNA, 1050 bp, Homo sapiens
ggagtccccttctacattgtatgtctgtgttctctgtgtagagttcaactcaacctcaggccaagaatcagctgctggctccacctaaaacctgtttattccttaactagatactcctttcagcagctgtggcttctaggaggcaaacactaactagagggaggtggcagcaaaggctatatatacatagtgaatgtccacattcagtgacagcctgtataagtctggtgactgtcagtatccattctctatgcgtaccaaaacaaaccacaagttcaaaaaatcattccagtaaatcaccccttctattcagacttcaaacaaaagaagattgggggtggaggagggaatcagtttgacctcacactcagagtgaagtatctatgctgtgagttgttttacctgttgtgataaattagcaaagccaataggccaatccagaaatccaccatggactaaggcctaataagcatttttattttctttctgtggttttggtttttttttttttttttttgtcattgtgaaatctgctgtgttataaatgcataatcctgtagcacctgtattttctgcaccatgatgtgacttttagagataattctgtttttactgttttatgatgccaaaagactcatttatccagttgtctagtaacatgtaaacaaacagaagcaaaggtagtttgtacatatgcatttgttttctaccagtagtcttcagagctttggattcagtttttaaaggtatttagtaggcaagaaaatgttaatggggttgtatggaaaaaagaatgcgtttatctgctacatagaatctttgtgtttgtttattccctgccccattcccatgcaaagcttctaccggcatccagaacaagctttttctttttatggttttcatcttcattaaatcttgaccaacagcttaaatatctgcagctgtcccctaatatctgttctccccttctttctttaaatcagtgtctggttttacttaggtatgtagtcacctagaataaaaactccagctccccttgcagtaagatgt

SEQ ID NO: 15977 - DNA, 1059 bp, Homo sapiens
tggtctgaattcaccaccaatgaacacctgaactctcttcattcatttatcttctagttcctcactgagcacctaccgtgttgatcaggtggagagaacactccctggcctcttgaaactaactttctactttcccagttctgcatcagaatccttgttctatgccagtgccaagtcacatagagctaaaaaatattcttcttggtaatcatgcacaggctgtagccttcaaaataaaattattcttcgtgctaaaaggatggtgttttctgtcattatattgtttctgcagtatgcttgttcagttatgtaaactcattttctgtgacatttataggatcctggcctagaatgcaggtttaaaggaggaaaaggcagcaaagagctttggtagaaataattatttccctgagtaaaagaaagataaaatgagttcatttaaattatagtaaaagtggttgccagtcgcccaacatagtgatctcttttttttccttacctaaatgaaatctaaatcttagagccattttgaacgttttctaaaacatgaggttgttttgccaattcgctttcatttggaaataatttttaaatttcctattatatcataaactttgaatttcaaaaactgctgcatgaagcgctgttttcatctttttgtcccaatatttttgatgccacacttctgatcttaaggttatataattttaaaggttagtctgaatttgatatttactggggaaaaaaatacttatcagtagggattaccattatcttggttgttgatgggcacattttttaatagtgcttactttactggatgtgtatttaataggtccatcagcaatatttactgagcccagagtgtgaatagaatgaaaatgttttcaacgttgtggctaattagtgacgggagaaaaaaagaaatacttgagcttaaattgttttaataatttcctcagtttctaagtaaatctctgcacccacacaccctaccaaactcacttgctcatttcaggtcaccttatgttggacaaacccttttagagttacgctttg

SEQ ID NO: 15978 - DNA, 1028 bp, Homo sapiens
tacttaagtaagtaagtgttttcaaagtaaacataacttcgggtactttgttacttttagggtttctatgtcttttgctatgtttgctgtctctctcttcccatttgagaaggtgttctgtcttctccatgcatcctgtttgaaacagaaccacagctattgtcctgaaactcatcctcccgtttcccagtgaaatcatctcaatatacttctgaccccatcatccctctaagtctctcgggacccctaacctcacctttccctcccctcaaaaatggatgtatcatggagaaagtttaaagggctgatgtgaataaatacaacatagttaaatagttgccttttccaggaagacttctagaatcattgtcattgctctaattagtctgttactgtgaaccctttggcattttgtttattcaagtgatatagtttactctgaaaatgtgaagagatattgattactatgttaagcaatttatggagaggagcttttcttctgtgacttgtgctctatgcaggatggatagacaagcttgtatgtagattcttataggtaaatgcagaggggctgacccaatccaggagtaaacatttcttctagaaaacagagagtaaagacaacagattaaagacaaaatcacttctgcctttgttttctattgtaatcttctgagaaaagatttacaacaggctagaaagattataaatatagcatctatctatatccaatatagaacaaagcaaagtagaaattaactactttttcaggtaatttaacatggatgtgaaaatatcaaggtatataatcaccatggagaatttcagagtgttgtggttgtatatttatatacatttaaatttttgttcaaaataacattttctttgtggcataaaggcccaaagtgaatcagtatttatcatatgcttttacttttttattttcaaaattatagaaagttgtttcaaagagataaagttgcacttttcatagccaacatgcatagattgagtgagaatactcataa

SEQ ID NO: 15979 - DNA, 1035 bp, Homo sapiens
tctggaacatttctattccttcaagcccaacaccttttttgaaaactatgacatgttctccattcactctgctgaagaaagtttctaattgttttttcatggagaggtaacttgaggtagcatagctttttccaaaatgtggaatttgccactggtatgtaagataattttagttgtttcacagacatggcatttatattagtctgttctcactgctataaagaaccatctgagatgggtaattattaagaaaagaggtttaattaactcacagttctgtaggctatacaggaagcttggcagggaggcctcaggaaacttacaatcatggtggcaggcaaaggggaagcaagtattagcaaggcagagcaggagagagccaagtgggaagtgctacacacttcaaacaactagatgatctgagaactctatcacaagaacagcgagggggtagtctgcccctctttcaacacatggggattacatactcgacctgagatttcagtggggacacagagccaaaccaaatcagcattaaattaaattgagaagttattcctttcttaatacttgttgaattttaaattaaaaaaatgtatgtatgtatgtatatatactaattagtatactaatcttcatatatcagcttttgtacatatgtctcttgaactgagtgaaatgttttctttaaacatttcttgttgatacctttgaggtagtgctttgtaaagctaatcatctttatgatctgctagatgaaccatagattgttgttcatttgtttgttttgctttattttaccttttagacactgggtttttaaagataaatattatataaaaatgattcttctggtgatatgagaatttacttaataattattgagcgacaaagtcattagacccaataataaatacctaattatccgtgtatcatgccaaagtgtgatattatctaaatgtcagatgttaaagtgtttagattctatgaaaatagtgtttagacctgtttcagtaaggaaatgtcttttaattc

SEQ ID NO: 15980 - DNA, 1033 bp, Homo sapiens
ctggaaattttctacttcaggcttgtttacaactaaactttcataacatatgttattgtcttcatagaggttcatgaatatgacatgttaataaattgagaggaaggttcggagtttgtagtgagcaaggaaaacaaggttcctactcatggagcgtaaatcctattaatggaggacagacaataaataaataaataatttcagatagtcataggcattatgaggaagataaaaccagaaaaagaaatagtggagagaaggtggatggatgctggtgctactccgaggaggattcttgttagctgatggcttagaaaggagcaaccgatagaatatctcaggggaatacccaactaaaggaaacagcgtctagagccccacggtagaagagaactattatacttaaggagtacaaaaatactatcattgcaatatagtgagtaagcagtaagagaggtggtcagagaggtatagccttctaagttatagccattataagatttcatattgccaggctatgctaactcagtatttttttgctttgaatattgtgtcttttttttattgcttttctttagtactcaatatttaggattattcaaagccctaaactagagtaactgtttggttaggctacattatctgcagtgatatgagataaattattctggatagaattttacagcaacaaattttcagttagtttattcaaaattaagattagttttctagtttaccaatattccaaatacaacatcataacttccttcggaatttaaactacaggtttcctgtgccttaaaccttaggaatcagggagtagacttgggaatctgtgtttttagttacctctaaaccaatggaatttttcgctaaaacaagttttgccatgattcctgattattagtgtggtcattattaaatgaatttgttggggttttacaagttttgtattccacgtttaagaaaaactgcaatcagtgctttgaaatggaaaaaaaaaaggtaatctctttaatttgcattcctctta

SEQ ID NO: 15981 - DNA, 1043 bp, Homo sapiens
tatagtatagcattctaggtaggttatggggacttgtgtgatcaaaggcagaggcgataactcatggctgtaaattgaaaatagcgaagtcttgtgaaatctcaagacaaatgagacggtgatattgaaatgagattaatttgcaccctctgctgggtaatacactgtgatcaagactacttctgaaaagtccagcagtagaattgacatatacatacattagtttacaatatcactgcattttgagatcactaatgttcatttctgtagtcattgattttattcattggttattcattggttttattttaacccattttcctgagttctagtttcttgatttttttttttaaagaagtattatgtttactgagtctgtaagtctacagggttcctcccagattaatggtagctttcctttaaaagccttctcggtgaataaacagtgcactttagtagtagttctgatgtaatagttatgtgaaagacagttgctgaaaactgttctgtaaccattttgcctgtggatcccatcttagaatcctctaccttagatgaattctagaagtgagattcttgcccctcatatcccatgaattcatgcccttgaagaaagaataaatattcagaagaggagtatatgaccactcgtgtggctaataaatacaatattttaatgagtgtttgtaagtcagaatactgataacaatagtgaagaagatggcccttatcagttatgagagaaccactttcacagaagacttttccaacctttgatttacaattacaggtactaaaaataagtcttgttacgattcccagaaagttatatactttactgttttatttttatttttttattttttattttactttattttatttttttaagaaagggggcacaaatgaagagcaggctgcctgagacttgttcaagaagacatcattttgtgtaactgagtcagtgtttactcattcactcattcagtgatcctatgttgcttacctataaagcatctttatgatgcctacaaaaggtggag

SEQ ID NO: 15982 - DNA, 1031 bp, Homo sapiens
agaagtgaactaccgtatgctactctgcttccaacacctatcattggcaaaatgatgatatgccctatttttaccattatcagaaacgggttgtttcatttctaaatatttggggttttctggttttctctttgatgttacaaataaagatgatttcatgtatgacttcatttttttgatatttgttggaacttggttgatggcccagcatatatggtcagtgttttatgtgcattaaaaaagaatgcacatttttagtagttgggtatagcagccttttttgttgaactgatccttttgtcattatgagatatcctcttttatctctggtaatacttcttgcctaaaaatacttttttgatatctgattacttcagttttcttctggttagcgctttcacaataggtttttttcttttttccttccaacatttcagacctctcttttaaaccatatatagttgggtttgggtttttttttttttttcccccagggtgtctttgtcttttaattggagtattttgttcatttacttttagcacaattattgatataaatctaccattttattcattttttatttgccccatttgctgtgttttttttccttcactttgcttattcaaatatatttaactacttgattcttatccctttattagctaattagtaatacagctgttaagtatttttagtggttatcctagagattacaaatgtatcttgcatccttaaaatctatcctgtattaatgttttacattttcagggtaatgcacatatctacagtatcttaactcagtttacctcccttttaccttttatgtaactgtcattacaaactttataaaatttaaaaccttgcaaaaatactattttaaacagttagcattcatttaggtttattcacctttttatgacttttgacattcttcaataccttatgtattatacttccatctaggatcatttgctgtttattggtgcttgctgaacctcagttttcatttatctgaaaaaaatcttttatt

SEQ ID NO: 15983 - DNA, 1056 bp, Homo sapiens
gctcaagcaaccctctcaccccaccctcccaagtagttgaaactgcaggtgtgggctaccgcacccagccagatctaacagttcacttgacgcaaagtaaactaatttgaattctaaacatataacacgactgcctacataattacattatgaaataaagataagcagtgagggttaattagatggttgcatttattttctgaatatatagaaatatagtagaaatggatcatttgctctgaagtgaattaataattatagccataataatgcttttactatttcagttgttaacgtaagcttcgtgatcacacatttaaggatttaatgtgaaaatttagaattgaatgtaaaatggaaataaacgagtagattttatagtattggattatatggtaaatgctcagtaaatgttttatgatttttcttttttaaaggaagagatgatctagagagcttccagcttgagataagtggctttttaaaagaaatggcatgtccatattctgtactcatatcaggagatattaaagatcgtttaaaaaagaaggaggactgtttgaaacttctatgtaagttatcttgaacatttaaatgcatgtgtttgacatggtttttattattttcaagtcaagatttattaatgaagcattagacattttgtatattaaaagggttttaatattttacttaaaatacaaagctatctcagaaatgtttatataatatagtataaattttaccagtatgccttctaacacttgtgatttatttggccaatatagaatgtcctgtgtttgtgatttatatagtactttagtaatttttcctttatctcattctatctgttattgttcgtgactatatggctaacattgatgatctccaaagtcctatttaatctaaaaactctctgaaactaggcactggatgataatttgttgatcacttactctaacaccaagaactgctctggatactagggatatatgagggttgcttgttttgtttttttttaaaaaatataaaatttgtgcctttaggacactttaaatg

SEQ ID NO: 15984 - DNA, 1034 bp, Homo sapiens
gttttctgggggcctgtatctttgcctgcttaactccagtaggagctgctagggctcctccggtgtgaaaagaatcaaccatttaaagtggcatttacagtgtaaatgcatttaatagggtgtctattttatatagctttagttagttgttttttctcatttcatttaaaaaaacgtaacacttgctatggactagggaatcacttcgtttataagtgtacagtgttctacaactgttgttctttgggtctttgtaagttggcattattggtattaattgatacttgttttaagtgaataatttcagtgaaatatttcaagagattcttatacatgtattaacattatttattttctctttattgtagtatttttaagtacagaacttcaagcttcacagatattacagaacaagaaacataaaaattctcaattagataaaaatagtgaagtttatcaggaagttcaagctatgtttgatacacttggtatacccaagtcaacaacttctgacattccgcatatgctaaaccaagtggaatcaaaggtattatctttgttttattttccccaaaattcaactgaatggtaacatgtaagtgctatattaaaaatgaaactattccctataattatgaggtatacattttatttcaagagtttatcttcatataaacccagttttggattcagacttaacaggcatgtgacctaatctgtcagtagctgatattcaggaatcaaatcttaatgagttactggccttcagctttgccagagtttaccatgatagaaatcacttagcaaatttaaggatcactttcttaaccagggttttaatgtagtataagaaagaaagaaagaagtagaagtagagttatcctacaaagtgaaaggaaactaaactttttaaaaaatggatgttaatagaattgcagagtggtttctttggcagtgagcatgcagtttttggtggataaatgtttagtaagagtaagtgcattatataatgaatggaagaatgtattaattag

SEQ ID NO: 15985 - DNA, 1040 bp, Homo sapiens
atttttaaaaatacctggctgaggatattgatagtgctcaatgtgctagcacagttgtgatttgaaaagaacagaggctcaaagccagcaagatgagttattggtattttctttccttgttggtccagactgcttagcaggtaaatgttttacttaaattaacaaatttgattatagataaagtatactctaccaacgggtggagtttaatttgtatgtttaatgtcttctggatatcataaatgttctttcaattatgctttagtatttaaataatttaccataaagtctcatgggaacagaaaatggtcagtaagtacatcttttgactcagtaggaagtacttagcacaattttcagatttcttttctttgcagaatgaaagaatctaaagtttattatttttgtttccaaattttttaggaacaactggaaagaatcaatgatgctctttcctgtgaatatgagtgccgccgacgaatgttaatgaaacgattagatgtgactgtacagtcctttggatggtctgatagagcaaaggtaaggctgttttcccatatgtgtcctgtaggtggtagcctataacagctcttctggcttgcttgtctgttatgtaaccatgccacatttgtacttcatcaccatctcaactacatgcccaggccaactactggtcttacaagatgatcctggtcttgtataaatccctgttgcatataacttaatttctccccacatttttgacatttattttaaactcatagatattgtgatttatgccaggatatgcataaaagaaggggcatcatatgagataatgagatagatacagtgagcagtgtaagaagaaagcaggatataagaatagttgcaggtagtactgatgccaacaggccttaaaagtatcttaaggctggatgaatatagaatgtgtttcagttgaagagggggttgggaggtgagggcatttccaaatttgaatctcttcagatagctttctaaagagctgtctcccatcattcccattttatgcctttaat

SEQ ID NO: 15986 - DNA, 1023 bp, Homo sapiens
cttacatattgagtttctggatttaactttagatttttttttcattctctcaaaaactatttatataggattataagttaatttgggggaaaactgacaataatacttaatgttcccatacagaaacttggtatttcttaccatttatacaagttttccttttgtttttgcaagatttactgatgtttcccttttaaatgtcctgtatgtggttttggtaaaactattttttaggtattttttgttaatatgtatagaaatttttttgttattattttttagcgagttgttgctggtagttacatatttttaacacctgttggtctattttatttgttctaaattattcataaattctcagatatttgggtgtttttgctcttttctaactccttgcttatgcattatctccttttctttatttctaaagattatgattgtttttgctctttcattaaaatgtacttttgttccttttttccttaactcttgtcatttaggtaaaaacagatgatatagcaagaatttatcagcctaagcgttatgctttgtcacccaagacaacgattacaatggcacatctacttgctgctcgtgaagatctatccaagatcattaggacaagtagtggcaccagccgggagaagaccgcatgtgccattaataaggttggtgtttctttcagtacagtggaaaatgaattgatgatatcttacttaatgtttttacagattttagtctatttttctttcatgtcctggtaaatgtttagaaaaaagagtggcaggggggttcagtctaggcttagttatgttatttttgtgtatgtgtgtatgttcacttgaatttgtgtattcataaatcaaagtattttctgaattagaggaattatgaattgtttttgtcaaagctttagcaagaattatgttccatctttctaaaaagtaatcattttttgtcagtaagaatctttcggaattgtttcaagtactgacagattcgttatatccttggtgtaaaggg

SEQ ID NO: 15987 - DNA, 1029 bp, Homo sapiens
aaggtgagcaggcagtttaatcttgccttcaggatcaggctgtcagtgtgactttattactttgtatgaagtattatgaattgcccaaatgataaatacacccccatctaaatgttccagaatgcattccacagaggaatttgagtgactgaaatttttcctctttcttcattggtgtggttaaacaaaaattagctggggattaagggaaaattgtggctatgtctgatcattctaaataatcatgaccacaaataaattgccctgagtaggtctgtaacctggattgagctgtcgttaccaattttatccatagcttcaaaggatttcttctttacatgctagtttgcttagatgaaactgtggaattaaaagccacagagaagggacaacctcaagtctgtctcctttaatgttaagtatttatagacttaatatttggggaccactgtaagttatgaataagatggaaagagattgaatatttctgtagtgttacttcttcgtgttgtaaaaagatgtagaaaattttaaactgaatagctgctttgcctttccttccaggaaaactcaatttgattaatagaatagggcagtggtcttagctgtggaatataggaaaaattcaggtaaagtgtttacggggtcacgaagcagaagaaacacaagacatttgtgttgtagggatcctaatgtcttttatcatataaatattacacaaagaaaacttacattaggtatcaaaaaactttacaatctgtacatttgtttttttcttgcatttctatattatacattttgagacagaaattcacaacggtcagtaaaaaggtaagtcagcaaagaaaatgagaagtgaccctgctgttaatacaacaagatttgtccttgttttggcagataaatacctggccaaactaaagtcgtgtgagatgcagaaatttacactaggcttgataagccaaagccttttttttttttttccagatttctgtgatcccactagccccatgttgctcaacacaaata

SEQ ID NO: 15988 - DNA, 1050 bp, Homo sapiens
ttgccaaccacatttttccttttcatcggcatgtaaaatgtcaagatttgaggcaaacctttcagaacatggaatcccagccctgtatttcacaaggaccaaataggctgtagagtttaacagctggtgtaagaaatgtctgggactgaaaacacaaatctttgcctccaagaccaaagttctttctattctaccgagttcatttttcgaggtttctttcatcatttttagaagttgcatttggcagtttctatccctaaagaggaaggggtttgtctaacccacgttttgccaccttctcattgacttggtttttacagcacatcttaacaataactctgagcaagagagtaccattcatccagaaaatctgttgttcttttttcgtatgtttctcttaatattatgttctttgtaccaagcaccaaatcaagagttccacatacgttatctaacttgtttcttcagatgtttctctaattcagtttctgggggtctgacagggaaggtagagcattgaggacaatgcagggaatcctgaagccctcgtggacagtttttcagtctgtagaatgtagaattatataaggaattctactagctggatattggttttgtgtttgcactgacaggtctccaaaaacacagtgcaaaccttgatgtttttgggaaaagccagaaaggcattcctcctcctgtaataaagtgaatagtagtgttgatattaacgtatccttgcttccctgtctctaaaatggcttagttatctataattaagaaactactatgccatgggacagtagtttcttaccatttgtaggttcttaccaattataggtaacctcttgagccagccctgtgagttgtgtactgtactcgaaacaaaaagaagtatagtaatgattgaaccttcagaattgagtatcttgacagttggctgttggctctttttccttctgctgttcccgtctcctactcctccccacccgctttttttttttttgagttggagtctcactcagtcgcccaggctggagtgcagtggtgcca

SEQ ID NO: 15989 - DNA, 1042 bp, Homo sapiens
tggtgttttcaaaaaggccaaccagataggcctcacttgccttctgcaaagcaccaatagctgcactctggaagcacagatctgttttaaaatcctgagcaatttctctcaccagatgctggaggggagtttgcaaatcagttcagtggacttgtggtaacgtctaatttcacagaatgccacagtaccaggcctgaaatgatcggtttcttcactcctccagtagaaggtgcagtcttgcaagcggctttctgtagccagtggcttcaacccaggaggcagaggttgcagtgagccaagagctttaccacctgtggatttgtgggcagtctcctttgtattatacaagccatggtatagagacctccttacttacccccttctccttctgctggagttataggtggtgcagcggcggctgcaaacgcaattctcaagtgcatcttaactgcttacctatactacgttctatttgtcaatgatctgttcaactcatctgttttttcttgaatctctaccacactctttgaattattgtatctttataatgctttaatatctgacaagtcaatcctacccctccccatcccttcatcttccattgtttttgtttctcagccattctcacccatttattcttacagaagatgtacagaattactttcccatagtcaaaacaaaacaaacatcctgggatttttattgattttaaaaaatcttacatatttatttaggaagaattgatatcttcacagtatttagacttcccattcaggattgtttctttttccatccagggctgtttgtttttgttttctgttttttggattttttttcttttttttttttttgagacagcatcgtgctctgtcgcccaggctggagtgcagtggcgcaatcttagctcaccgcagctcaagggatcctcccgcctaagctgcctgagtagctgggactatagccgtacaccactgcacctgcctaattttaaaatttttttgtagagacaagatctccctatgttgccaggctggtcttcaac

SEQ ID NO: 15990 - DNA, 1066 bp, Homo sapiens
tctcatacgcccgacctcaggtgaaccgactgcctcggccttccacattgctgggattacaggcatgagccaccgcgcccggcctggatattagccctttgtcagatggacagattgcaaaaattttctcccattctgtaggttgcctgttcactctaatgatagtttcttttgctgtgcagaggctctttagtttaattagatcccatttgtcaattttggcttttattgccattgcttttggtgttttagtcatgaagtcttttcccatgcctgtgtcctgaatggtattgcctaggttttcttctaggattttcatggttttaggtcttacatttaagtctttaatccatcttgagttaatttttgtataaggtgtaaggaagggatttggtttcagctttctgcatatggctagccagttttcccaacaccatttattaaatagggaatcctttccccattgcttgtttttgtcaggtttgtcaaagatcagatggttgcagatgtgtggcattatttctgaggcctctgttctgttccattggtctatatttctgttttagtaccagtaccaagctgttttggttactgtagccttgtagtatagtttgaagtcaggtagcatgatgcctccagttttattctttttgcttaggattgtcttggctatacgggctcttttttggtcccatataaaatttaaagtagcttttcctaattctgtgaagaaagtcaatggtagtttgatgggagtagcattgaatctataaattactttgggcagtgtggccattttcacagtattgtttcttcctatccatgagcatggaatgtttttccatttgtttgtgtcctcttttatttcattgagcagtggtttgtagttctccttgaagaggtccttcacatcccttgtaagttgtattcctagatattttattctctttacagcaattgtgaatgggaattcactcatgatttggctctctgtttgtctattattggtgtataggaatgtttgtgatttttgcacattgattttgtatcctgagactttgctgaa

SEQ ID NO: 15991 - DNA, 1088 bp, Homo sapiens
ggctcccaggggtagacagttttattttgtctaacctccattggtaatgtgaggttacctcatgacctgatccatctggggtcttatctggcactgtccctcctcttcaatagcaaagacatccttgtgtagaaccgaatgtgtggccatacgtgacttatggttattcatttggtacaatgcatgctctgcttcctgtgagtggcatagacagttaacagatcatgcctcacttttaagaaacctttttttgtttttagtttgtgtcttctgtaagtgctattattgggacgttttccctctgttttcctccacacaggtcacttaactgggatggttggcactgctctctatgtaagcccagaggtccaaggaagcaccaaatctgcatacaaccaggtaagaggttttgtggggaaaaggaatctcaaaattaaggtaataggacatctagatcacagcatttgggatttagtcccggctaaaatagtcaagacatccactcattcacactccaggaaggactcatggtcctaaggatagtgactgaaactggcactgctgctgccaggagcttacagtccatccatccatccatccatccatccatccatccatccatccattcatccatccatccatccatccatccatccacccacccatccacccatccatccacccacccatccatccacctgtccatccacccgtccatccacccatccatccactcgtccatccgtccgtccgtccatccatccatccatccagccatccatccatccatccatccaaagaatgtgcaaaccaacccctatcttgggcaaggtgccaggaacagatgtggctccagccctcagggagcttgtccactggtggatgaaacagacaacaaataagtaaaaaataaaagatatagccacaaattgtggtgagggctaggaagaaaagaaatggaactgagtgacaaagagaacagattgaccagggaagatctcttgagaggatggcatttaggataaaggatgagaaaggacaagccacacagatttgggggctgacacatgccagggagggagatggta

SEQ ID NO: 15992 - DNA, 1091 bp, Homo sapiens
atggttataacaagggagtagattgtaaagaaatgggtatttagttctagaagttaaagatgcctgttgaatgggccagttgtagtaacgtctaaagaaaactaccaagaccagaagttaaaacgggtccgaaaaaaatatctgccccttgaaatgtttttcccaatgaaatttccatttgtgttcttgggattaatccttgcctcatttactgcctgagctaaaaagggaccagtgttacatgtgcgaggtcagagatgcccatgagcaaaccgcattaagatgaaagtgaagagtgaggtttgggtgagagtgatttaaattcacatatttatgagcgagacatctggagagccaccttctttcttactgagcagagtgaagcaggaatatttattaagttaattcataaacacgataactagaatgcagtaagaatactcctgtattccactataagaacacttctctggataattttgaaaacaaattattttactgtgagtacagtgtggacagctgtgttcgtaaagtataggactaagtgaagtgatttctattgcctcgccttgactgcaatgctcttagatgattatgtccttaatgaagtgcctttctttagtctaaaattcatgtttatttaccagaaaggtgagaacttttggggaagtagagattttttttctcttactctatctgtgttggtatatgggtgtggttttttttttttgttttgtttttttttgccttttttcatctgcatgtttaattaaactactttgttgttctctgaagccattaggtttttactttgtacccagatgtgctttctgccccttgaaatttttttctcagtgaaatttccatttatgtttttggggttagtccttgcctctgttactgcctgagctaaaagggaccaatgttatagtatgtgaggtcaaaggtgcagacagcattaggacgaaagtgaagagtgaggtttgggtgaggctgtcatttgggtaaagtttatattaaaataatatgtatgtaattggaagaataagcgtcaggtttcaagaaggtatcacctatcttttcttgctagc

SEQ ID NO: 15993 - DNA, 1049 bp, Homo sapiens
gattcctaagatgctcttagcctgttcataccctgtttggaaccctcagtggctctatcctacacccgatctcttcactccccaacttcccttttcaccaagtctgcatgctgcctagctggtggggactgctgccagcacttctcaggcttccctccccaccccacacacacaccctgtcattcctgccaccgtcagtcaaatgttcccttgtctagaaagtctttgcccagccatggtttgggccctttctccccaggaagcctcactgcaccctcattaattagttggccaccttttcttctcaactctcacaggtcttgatctgagacacccatgtactaccttgagttatgttcattgttttctccaagcagaacatgtgtttttagggcagagcctacgagtccgctttgccatatacccccattgcagccagctcggcacatggctcaccactcggtgaatactcattaatcgatttgtgtggacaaaagttaacaataactattccactggcctgtgcttatgagtcgattactactggaccagatccttctgtctttgaaatcaactctctcgggctttttaacatagctgaagaccagtcagagttgtttttgttttgttttgttttgttttgttttgttttgttttggagacagtgtctcgctctgtctcccaggatggtgtgcagtgatactatcacagctcactagcccctaccttccaggctcaagcagtcctcctgccttgctgcttgaatagctgggtctacaagcatgtgccactgaccccagctaattttttatttttttgtagagatggggtttccctatgttccccaggctggtcttgaactcttgagctcaagggatcctccaaccttggcctcccaaaatgcttgaattacacaggcatgagccaccaccccagccagtctgagtactttggatatatataatatagtattaaattagagtatactctgactataacagtgcaaaaagaatgtatgaaaaaaaaataaactaggaagccatatgcta

SEQ ID NO: 15994 - DNA, 1064 bp, Homo sapiens
aggatttctttgcaagtgccactgttcctatcatgaagcagttcttactatgttagcctcagagaggtggttattcttaaagagaagagaatttattttacttgtcaggctatggttaaacagactttgagctagatcttactgaatattttgtttatgctaaatagattgttctgatgctattgatgggaaacaccattttcagcattatattccacattctaaatttcaaacccttgacacatttgtgtggcatctctctttataggtcttgatcaatttgggcttggtttacaaggtgcagcagcacaatggaatcatcttccagtttgtggctttcatcaaacgaaggcaaagggctgtacctgaaatcctcgcagctggaggcagatatgacctgctggtgagggcttgccctttatttatttgctctgacttaattttatttcttctaaacttgttattttgaaattttcaaactaacaccaaaaatttgaaccagtaatatcattggatacttctattaatatatgtttcatctaggaatagaaatataatgtgaaccacatttgtagttgtttaagcttaaaacaattatattattttgcaagatagttgcaaagatagtactgagagggctcatgtaccctttactctgtttctatatatatatatatatatatatatatatatatatatatatatatatatatatgtattttggagacagggccttgctctgtcacccaggctggagtgcaatggcgcaatcttggctcacagcagcctcgacctccctgggctcaaatgattctctcaccttagcctcccgagtagctgagactacaggcatgcaccaccacacccagctaattttttgtattttcagtagagacagggttttgccatgttgcccaggctggtctcaaactcctgagctcaagcaatccacccacctcagcctctcagagtgctgggattataggtgtgagccaccacaccaccccttgcataagtacagtaaaatatcaaaaccagaaaattgacatttgtataatgtatgt

SEQ ID NO: 15995 - DNA, 1022 bp, Homo sapiens
gttttcgtgaaagccaagagggcacagtggtgatagttatgcctttgctttcatcacctctagcaaccttacttcttttttaaagaagtgttccaattaaggccatgagaagacatatttggcttttaacagaattgagtctttcccattctcttctgttagcactaactttgtgttgccatcagatttccaattcttgcaggaatttaaagaagtatgcaggtttggtgatattcagcttgattttcttaggcccctgaggttttgatgactcctgttgcctccctgccccttccaccaccccccaacccctgcctgaggagagaagcatcaaaactgctgggtgttggggttctgggctcctcacctatccggtgcagatggttgtagggatagaaaacacagcccagtcgtgatctagcccttagaatcacgacaggatgtctactaataaactctgccatctctctgtagtatgttgtagaaagtgggaccagataaggccataaattctgaaactctcttggtctcaggtttgtttgaaatccatggagcaacagtggttcccattgtgagtgtgctagccccggagaagctgtcagccagcactaggaggcgctatgaaactcaggtacactgggtcagggtttctttggctttctaatatgagttacagaagagaaaaacaacaacaggaaaggaaaataagataaacatggaatttcttggaaatattttttccaagaaaaaaatttttcttccaacttgcctaactgggtggcttctggctccaggattcccatctgtccttcagagaggggccattgtgcactgtgggcacctcaaggcagctgttgtcagagtgactgcatctaaatgaaaactatctaatctggctctaaaggtagttgaggtttgtttgtgctctaaatagcaaagtagaagaggccgatgacaagacttaaggcaggcttctcattccatacatggtttcggcatttgctatatgcctactggtgtgc

SEQ ID NO: 15996 - DNA, 1035 bp, Homo sapiens
cagtgaaattgaaattctggctgtaagtggctttctttagtattttgaaggtggcttctgtccatactgtcaaagtagttgcctcagggttcagagcttttttgctcagtgtcagcagaatttggatgcaggccttattgtgatgtgaactacacgcaatttaaaactattaagaactagggggagaatttaaggttttttgtttctcctctttgttcctctttaagatagaggaaaatgaaaacaaaagtcattttcctacatatatcaggcctttgccttgctaagcttacaccgaatacatgtagcagcgtcagacctttcgggtgtggtgtagagggacagggagtacagtttccactgcttattaattctccagggctaagatcttatcactgcacagttcattaagcccttttacagcacaatagcatctcagactctgcaaaccctattcatactgctgcatttcacgtgacactatggtcacaaggcagtattgtgctgctgagagttgatgtacatttgtgtgtattcacaggtggatctacccaaagaaacaatattacagtttttatcattagaggtaagcaatatgaactcttctgcactgtggcctttaagatcccaaatctttgctattagtttgccaaaatactgaagacggcattcattagtgatagtatttttctggcagctgcaggaatttagtaacatttttccttttatgtaacatatatgttcctaaatcctatgttgaaggactcatacttttctagtgactttatttttcagatacttattttattaaaaacaaaaaacaaaaacaaaaaaacacatatactgcttttactatgtgtcagggtctggcaggccttgttgtaagcattttacaagtagtaactcatttaatcattaccaccccaaaatgtagatactgttattatccctttacagagtacggaagtagagaggttaaatatcttacccacagtcacccagctagtaagtagtagaaccaggatttgaacctaa

SEQ ID NO: 15997 - DNA, 1065 bp, Homo sapiens
agcccactttttgataggattgtttgtttttttcttgctgatttgtttgagttcctggtagattctggatattagtcctttgtcggatgcatagatcgtgaagattttctcccactctgtgggttgtctgtttactctgctgattattccttttgctgtgcagaagctttttagtttagtttagccccatctaattatctttgtttttgttgcgtttgcttttgggttcttggtcatgaagtctttaccgaagccaatgtctaggagggtttttccagtgttatcgtctagaatttttatggtttcagatcttagatttaattaagtctttgatccaccttgagttgattttttgtataaggtgagagaggaggatctagtttcattctcctacttgtgacttgccaattatcccagcaccatttgttgaatagagtatctttccccactttacgcttttgtttgctttgtcaaagatcagttgactgtgagtatttggctttatttctgggctctctattctgttccattgatctatatgcctgtttttataccagtattatgctgttttggtgactatggccttacagcatagtttgaagtcaggtaatgtaaggcctccagatttgcagaacataattattgatggcccttgtaaattatttttagcttcttttatcaatcttattgattttttttattttgacccatatgaataatagtaattttgcttctttaggacaccatgtaaaattgaacctagtataaaccacatcctaagcaccagaaagcctggaaaggaagaaggagatcctctacaaagggttcagagccatcagcaagcgtctgaggagaagaaagagaagatgatgtattgtaaggagaagatttatgcaggagtaggggaattctcctttgaagaaattcgggctgaagttttccggaagaaattaaaagagcaaagggaaggtgtgtgtaattcaagtttgtgaagaggacttaacttagttgtgtgaaggttgagctgacctattaagtctgaagaaaactaaccttatagtttgt

SEQ ID NO: 15998 - DNA, 1040 bp, Homo sapiens
cagataaaatgacatgtctggaatttgctttaaaataatcctgttgggttgggtttggggagtagtgacagtggtagagaatctaaatggaacaagatcatctaagtttaggtaattggtaaattgtttaatgaccttttatatgtttgaagctttttgttattaaaaaaacaggttgccttcctgctttcaaacaacacaaaatattgattaatttatctggttgtcttgaagagtaaagcatttactcctagagtatgtatctagtctctctttctctaggtcccagtgtacctttctccatttttgatgagtttcttctttcagaaaagaagaataaaaggtacgttgtttttttgtttttttggtttttttttacttaagaattttctgttattataagtgaggataaattaggggttactgttatgaaaaaaattgctaagtgaggtatgtctttttccagtcctcctgcagatcccccacgagttttagctcaacgaagaccccttgcagttctcaaaacctcagaaagcatcacctcaaatgaagatgtgtctccagatgtttgtgtaaggagcagtatccttaagttaatgtaaatgggctagtggattgtttattcaaaaccacaaaagcttaaggttaaaattgaaaccactgacttgaattaagcacatgaaaagatgctcagcattactactcaacagggaaatgcaaatcaaaaccacagtgagatactactttatatcctctaggatagctataataaaaaattacgcacagtaacaagtgttggcaaaattgtggagaaattagaacatacattactggtgggaatgtaaaatggtgtagccactttggaaaacagtttggcagctctttaaaatgttaaacacagttaccatatgatcctgcagatctctgcccaggtatatactcaaaataattgaaaacacatgttcatacaaaaaatttgtacacaaatgttcatagccgtattactcatgatagtggaaacaaccccaaatgtccatcaa

SEQ ID NO: 15999 - DNA, 1054 bp, Homo sapiens
tagatttatgcctttaaaaatatctctttattatttctctatcagaagggctggaaggaatgtgtttcaacctgccagccataaccatagacttaactgaacttatttttaaaatacaatgtcttacaggtatcttctcaacctgtcccatgggacttttatatcaacctcaagttaaaggaacgtttaaatgaagattttgatcatttttgcagctgttatcaatatcaagatggctgtattgtttggcaccaatatataaactgcttcacccttcaggtctgtaatactaaaaacataatttaaagtcctgaagtagagagatttgtgctccatttagcaaaggaatttagtacaaaattcctgtcaatcttctagaaatagaccaattcaagtataagttagaagcattgataattttctcgttattttgaccaaagatctctttggtatttttttaactttttttggtccgttgtcaagcataaataaaagtagaattgtacaatgaactcccatgaactagtcatctatgataatcttagctcatggtcactcttgttttagctatactacccccactggatagtttttaaaacccagacacaatatgtcattttactcttcggtttgttcttaagaaggtttgctatggattttgatgataatatgaattctcaaaaatggttggaatgagggtattttaaatccatttattaagtacctattttgggccaggctcatgcttgatgcccttcatcattatgtcattaaatccttacaaacaatcttatgggagatggcagtgttattaaaactgggacatagactcagtctacagaggtgcctacgttccagtagagaacaaggaagactacaaaccatcagttttcaaggtattgagtataactacgatctgccaaacttgagaaatagtgagttttctgtccttcaatttccaggatcttctccaacacagtgaatatattacccatgaaataacagtgttgattatttataaccttttgacaatagtggagatgctacacaaagc

SEQ ID NO: 16000 - DNA, 1047 bp, Homo sapiens
atacacatacatgtgcaaacacatgactaactctgtaaccgagtgccagggccactcctactgcctaccacccatgtaatcttttataagtcattttctgtgatcttctctgtaaaatagggataacagtctctgctatgtgtttatcagaattgttatgaggagtaaatgaagtaatgtatataaaaagaacattagcacaaatgtaaagtcttttgtatggtggcattatatgcagaaattccttctaactcagctttagacataagacatttgctgattgaatatgtagcacaaacctgaactaatcatgtggaccccatttagatcacagctggagttcatgcaaactcagtaggtctacaaatttgaatgtgatagtccaaatatttcatcttttgttcttaaggataattcctagaattggctctattgatcacttctttggagagcttctccctttactgtaagggtgaggaacagtctactaaaatgtatgtcataaaataaacttagttaagcactgtaatacctttcaacttcctaccgaaataagctgccatggtagaggcagagaattattttagctgatggtgctttttgtgatttcaggtagacctgtttggtatagcagatttagcacatttactattgttcaaggaacacctacaggtcttctgggatgggtccttctggaaacttagccaaaatatttctgagtaagtattgatgaatgtcagggtctctgcctgtcccaataattttctgtttctcttgggtgctatctctgctttggcagccttagttttttaatccaaatgccatggttccagtagtttcagccagttttcattagagtatcagcagagcagctagtgcaggaaaaaggaactgcttactaaaaataagattcaaaactattcagacttcaggacatcattctgaatctagctgtatcttccagactacagctatagtatggaagcttccctgtttagatatgtgaaaagaagcatttcatgagaataattttctaactaattggtg

SEQ ID NO: 16001 - DNA, 1063 bp, Homo sapiens
ccgcgcgacgttcccccactgcaggcggcgcgaccggcgcctccggagccccctgcggacagccccccggccgggccgctcgagcggcctcgggggccggacgaggacgaagaggaaacggcggcggcgcccgggagtcgttgaagccctccgcgctgggggccgccgggaaccattctccccaagcccagaggcaggacttcgcagcaggatggggtggagagcccgcgggagtgacccccacgagagtgaacgcccctcacactcccaccatcgccggctggccccggagcgggaggcccgcagccagatcttcagccaagggaccacgattcgccggggggctgggggtttgctgcccaggaccgtgctgcaccagggccctgagccgtagggggatggggggaggggtggggagatcccggcaccaaacccttctgcgccgctcgctctggtgtatcctacatgcaggggtgactggggctttcccccaagactcaggggaaggatggagctgtaggggctctttttaagtaagctgaagctctcgaaaggaggagggcaccaaaagtagtggagctcaggtacgtcaacctagttgcagtggccagagatgcattaaatttctagatccctgtatatagttgttgacatatgcactagaagctataatcacatagaattctatgtatatcctcccacaccctgggtagctactgactgaaggggtcaagcaagggctatttgctgtcccccaaaaagtacacctggccagaagggcacaaacacggcttcttaaatcactcactttctcctgttcccctcctgtttctgaaatataagtttatgacgttctttcacaaaagagtataatcattcttagactgttgacatggctgtggaaagccttaggagaagtagaaacaatttagggagggtggggaatgtactcatcccctcttctttccatcctagtgcccccaccaaagaggcttcttgttgcagccctcagtatctggatatgggccagggaggaaggaagggaaagagcaatgctgctgtg

SEQ ID NO: 16002 - DNA, 1048 bp, Homo sapiens
cttgctgcccatgttttccctgcactctttttttttttttttttctgagacacagtctcactctgttgcctaggctggagtgcagtggcgtgatctcggctcactgcaacctccacctcccaggtttaagcagttctcctgcctcagcctcccaagtagctgggactacaggggcatgtcaccacgccttgctaatttttagtatttttagtagagacagggtttcaccatgttagccaggatggtctcgatctactgacctcatgatccgcccgcctcgacctcccaaagtgctggggttacaggtgtgagccactgcacccggcctttttttttttttttttttttgagacagagtcttgcttactctatcgcccagcacagtggtgcgatctctgctcaccacaacctccgctgtctgggttcaagcaattctcctgagtagctgggattacaggcaccccaccccccaccaccacacccagctaatttttgtatttttagtagaggcgtggtttcaccatgttggccaactcctgaccttaagtgatccgcccgcctcagcctcccaaagtgctgaggccaggcatgagccaccacaccctgccatttttgtatttttagtagagtcgggtggggttttgcccagttggccaggctggcctctaacccctgacctcaagtaagccacccacctcagcctcccaaaatgctgggattacaggcgtgagccaccacgcccagccctccctgcactcttaagcatgattatctgcctgctgtttgctttgcacagccaatcctaggcctggtccaatagatcctttagtacatggcctgaagtccatgacaggcctccccccggtttaccaaaggcatggccaaatttttttcttaaccaaactaggctgactttggccatctcctgttctttctgcacctcctaatttcttctccaaaccctcccacccccacccttcagcatctttaaggctgcccagagacactcagtgaagccagtaacactccaacctgagcttaaagggcc

SEQ ID NO: 16003 - DNA, 1198 bp, Homo sapiens
gtggctcatgcctgtaatcctgacacttcgggaggctgaagtgggtggatcacgatgtcaggagttagagatcagcctgaccatcatgatgaaaccctgtctctactaaaaatacaaaaattagctgggtgtggtggcacacacttgtagtcccagctactcgggaggctgaggcaggagaatctcttgaacccagaaggcggaggttgcggtgagccgagatggcaccattgcactccagcctgggtgacagaacaagactctgtctcaaaaaagaaaaaagtatgaataagttcataccaataatacctgtcttgctgggtggttataaaagagaattatgtccagtacctaacccagtgcctggcaaaggtactcaaatcctggtggtgatattattaaagtttaaaacttatcctggcaaaagattcccttcataaattcaccccaaacttctattccagtgcccccttctccccaccccaaaacacagtcgctgatcttaccatgcctttgcaggcctcagttattcaacttccttctgacttgggaactctcaactttgactcttaagttcaaattgcaaccatcttaaaacataaagccaaaaccccacccttatcccctccagctaccacatatactatattcacagccaaatatctcaagaagctatttccttaccatttttctttctctgccaatctggcttcaaagtacacagaaacactaatgtgatgtagctacagtaggcaaatccatccaaagtagaatatagattaccagggactgagcaggaggggaggggagtttctctttgggatgatgacattctggaaatggaaagtggtggtggttgcataacattgtgcatatacctaatgccactgaattgtacactttaaaatggttgaggccgggtgcggtggctcacacctgtaatcccagcactttgggaggccaaggtgggtggattacctgaggtcaggagtttgagcggcctggccaacatggtgaaaccctgtctctactaaaaatacaaaaattagccggttgtggtggcgggtgcctatagtcgcagctacttgggtggctgaggcaggagaatcgcttgaacccgggaggcggaggttgcagtgagccaagatcgtgccactgcactccagcctgggtgacaagagcaagactccatctctaa

SEQ ID NO: 16004 - DNA, 1046 bp, Homo sapiens
acttctcagtagtacttcaaattatggtgagggggtgagttagaagctgaggaatgggtgcagggaagttggatgtggtatgaatgatctaaaaatgagagcaatgtgccaagtactgtgctgaatcattaagtatgcaatctcttttattcctcatagtagccttaaagttggttggtatcattttcgttttaaagatgatgaaacagtgactgaaaagatctaagaaacttgccgaaagtcccacagctatgtagtgggattgcatagactcctggactcagggtaccaacctgagatgagttgttcaagagcattgacttggctgggttccgtggctcatgcctgtaatcctagcactttgggaggccaagacaggaggatcacatgagcccaggagttcaagatcagcttgggcaacatagtgagactgcccacccccaccccggccccatctctaattaattaattaaattttaaaaataacattgacacaacatggaggaggaaaatagagcaagtggagaggggatagagacttaattccatcagctcccctctttcccctcaccactcttcctttccctgtgtcccgaacccgtgtttctaagtcctgactgctattattctggtgtattaaatacatactatttactatttaatacatcttttgttgttgtttgttttctcaaattttttgtggagacagggtctccctatgttgcacaggatggtcttggactcctggcctcgagcgatcttcccacctaagctcccaaagtcctaggattacaggcatgagcaaccatgcccagcctatttaatacatcttatttaatatatagtataatacgtaaatatgtactatttaatatttaacacatattaaatacaaatggtccccaacttacaatagttcaacttaagatttttcaactttatgatggtgtgaaagtgatagacattgaatagaaactgtacaatattcaataaatgatatctaacactgtcttataaaatatgctttgtgttacatgattgtgccg

SEQ ID NO: 16005 - DNA, 1026 bp, Homo sapiens
cttttgcccgtggacgatgcaatcaatgggctaagcgaggagcagaggcaggtgaggagactgacccccttcctggccccaaggcctccttcctgcctggtccccaaggcctccttcctgcctggtccccatcggcccagcgcccacccagccttggcttttgcccgtgggccgttgggagcgccagcgcgggggcgggacgcggggcctccgacctcgggtccagtcctctgacctcggcctcacgtctgtggagtgaagatttgagaccgtgggacagtactgctggaagtagagaggaggagtcgaggctgggagagctcctgagagactgatggtgttttggtggaggattggccaggctacctaccgcttgtggcacaagggccctcaatctgtatgtagttcacttacacctgaacaggctgaggtatgcttctcacacctgggtggtcatcgtaatcaccagggagtcttttttgtataaacagtttgggggttttaaaaagccacagtgagctctcctgtcgctcttcagcccattgggtcaaaacacaaaagttgaacaagtacttgaaagaagtagttggaggccaggcgccgtggctcacacctgtaatcctagcactttgggaggccgaggtgggaggattgtttgagctcaggggtttgagatcagcctaagcaacatagccagacccccatctcataaaaaatagaaaagaagacgaagtagtatttacaaatggagcagaaccagagtccttcctgaggtttcacttggaggctggatggagttggcggaggtatgagcctcccagcaactccgtagtttatgtttatagccagcgagcgctcagagcttccgtgaaccacctcaagtggaaagggttcaatccctattctcaagctttcctggcaagaggagtttcttttcttttttcttttttttttttttttgagacggagtttcactcttgttgcccaggctggagtgtaatggcgcgatctccgctcaccacaacg

SEQ ID NO: 16006 - DNA, 1114 bp, Homo sapiens
agcaactaactttaagtgaaaaggagcctagttttgtgctcttgccacatttcttctctgatagaagattcaagaaattcagtgctcatgacaagtgttttattcctttcatggatgggaggggttattccaagagagaatgcagaggaggacaatgcttaactcagctccagttgtggttttagctgtaattggaaggaggtggcttctaatggggcagggtccttcccagccctcacccagatgacctgatctacccttatctaaggctcccctgaatccctccctctcattaaaaataaaccgggctaggtatggtggctcatgcctgtaatcccagcactgtgggaggccaaggtggaaggattacgtgagcctaggagtttgagaccagcctggacaacatagtgaggccctctacccccggccccccccaaccccctgcagcctgtctctaccaaattacctgggcatggtgtcacgcgcttatagtctcagttactggggaggctgaggtggaaggatcacttgagtctgggagttcgaggctaccatgatccatgattgcgccactgcactccagcctgagcaacaaagcaagaccctgtctcagacaaaaacaaaaaacaacaaaaaagaaaaaccaaagaagcctgaaaagcaaaatttaaagtgtagtcctgaaaccctcaggatggtgtgcggggtgcaacccagagctgggtgggtaaggggagagcagcaaccacaactgagggccacttcctgccccaggcagcctctgcttgtgggagtgatctgggctgtgacctgcccttccaggccctcacccttgtttccccagagcagtgccagcaccccgtgctcccctgggcctctgactctcccttgaaccttcagcccggcatgaagcaccttggttgtgctctgcttgtgctggtggggttgctgtatggtgctgctgcagcttgagggccagagcagggcatctgtctgtccctttctgcttctgtggagatgactacactcagaccctactatgacagtttagctgggcctgacctccccctcgattttgagatcctgatgcccctgaggtgaaggtggcctgttt

SEQ ID NO: 16007 - DNA, 1116 bp, Homo sapiens
ctggcgtgagtctccccgtgttcctggcacagagtctgccttccactcggctggggtctctctgctgccgagggctgtgggtgaccttgtggcttgggttggatcagctcattaacctttccagccagcagagcctgggcacctgtccccccacctcacctgtcagtgccttctcccccttctccctccatgcctaacagcattccaggcctctgaatgcttggcctggggcaggggacatgggttgccggagcctgcaggattgaggttggatgaacctccagggcagccagccagcctctctgcctgtctaagtaactcaggttgccagttcaagccataaccactgtgttgtccttccaggagagctgatgatgagcctcctgtggtattacagacctgagcacttacagggaggccgcagtcccagcatgcacgaggtgagctgcctggcagatgggtcagggagggcaggagagacagagggaaaggttatggcactaagacgtggtagggggagggcagccatgggctgtagtcaaatccctgcgcttgtcactttggactccagagaacctgggaaagggcccaggatttattctcttttcccaacactgccccaattcatgtttcaaagggaataataacctttgtcttaaaaagaggaacagaaagggaacccttgaggtagcaggtgccaatgggagcaagtggatgtgttcccctggaaacaggaaaggtgaggtggagctgcatacctggtcacttttggtattttctgtagtaggggaggggaggggaggaaagactcctcctaacaccccataggctctccaccaagctgtgtgctaaaagaggtgactgccatctgtgtgtgccctgggctcaccttttatttcactttcccttgcagggactttccatctaactggaaagatgaagaacatttcccctctcctacgctaggcagggctggggtttgggaggtcagtgacaatcaggggctagagcagatacctggctattctggagaagggggggacctagaagggactcaggaggaatgcctggaggcagtaggtgaggcatacttaggctgaatttccagggaagctt

SEQ ID NO: 16008 - DNA, 1043 bp, Homo sapiens
agaaaccaccttaaatttggaggctcttcccgcccctcttcccactctcgcctctgcccccacaccccaggagcatcacaccacacagggcccctgcaggacacaacaagggcagagtggggcagctgacccacccccctgggtggacactgaaccctcacctttccatgggcctatcaccacagggccaagctcccaagaccccactcaggatggatgtttcttttcttttgctttctttcttttttttttttttttttttgaaacagggtcttgccctgttgcccaggctaaagtgcagtgttgcaattataactcactgcagcctcaacttcccaggctcaaggagtcctcccacctcagcctcctgagtggctgggactacaggtgtgcaccactatgcccagctaatgttttctattttttgtagagacagggtgttgcccaggctggaaggatctttctttttgaacaagcccctgcctggctctaaagagaggaaggcattttttctcttcctaaagagaaagactaataatgaacagtaactactgtgaactgagagtacccgtgctggtgctttacatgcctcatcctctccattcttacaacccagcaaggtaagtaacattatttccattttctagatgaggaaattgagcctaagtgacttgcccaaagagatggcagggttgggattaaaagtcagctccaactaaggtttttctttttctatttttctttctaacttttaggttcaggggatacacgtgcaggtttgttccatgggtaaattgtgtattgcaggggtttggcatgcaaattatttcactgcccaggtaataagcatagtactcactgggtagtttttgcatcctcactctcctcccacctttcaccctcaagtggtcccagtgtccattgttttcttctttgcggccatgtatactcactgtttagcttccacttataggtgagacaatgaagtatttggttttctgttgctggtgttaatttgcttaggataatggcctctagctcta

SEQ ID NO: 16009 - DNA, 1335 bp, Homo sapiens
caacatgctacaccattgattcaagcaaaccaacgtgttatgaaaccatcactgaggattttttatataatacatgttgtaaaatgcctttttaaaagtttgcttttgttctgatctcttatattttgctttcattatagttttcaattatagaacatacccgtgaaaggaaacatgcaaatgaccagacagtcattttttcagatgaaaaccagatggacctgacatcaagtcacactgtaatgattaccaaaggccttttagataatcccataagtgaaaagtccaccaagatagataccacatcatttctagctaatttaaagcttcacaccgaggactcaagaatgaaaaaagaagtaaatttttccgtggatcaaaacacttcttcagaaaataaaatagatttcaatgacttcataaaaagattgaaaacaggaaaatgtagtgcttttcctgatgtgcctgataaagaaaattttgagatacctatttattccaaggaaccgaacagtgcctcttctacacatcaaatgcatgtatctcttaaggaagatgaaaataacagtaatattactaggctctttagagaaaaagatgatgggatgaatttcacccagtgtcatacagccaatattcagacattgattcccacatccagtgagaccaactcacgggaatctaaaggtaatgatattacaatttatggcaatgactttatggacttgacatttaaccacactttgcagatcttacctgcaacaggtaatttttctgaaatagaaaatcaaactcagaatgccatggatgtaacaacaggttatggaactaaagcttcaggaaataaaacagtttttaagagtaaacaaaatactgcttttcaagacctttccataaactctgcagacaaaatacatattaccagaagtcatattatgggggcagaaactcacatagtctcacagacttgtaatcaggatgccagaatattagccatgaccccagaatctatatattctaatccatctattcaaggttgtaagactgttttctattctagttgtaatgatgccatggaaatgaccaaatgtctctcaaatatgagagaggagaaaaatttgctaaagcatgacagtaattatgctaaaatgtattgcaatccagatgctatgtcttctctcacagagaaaactatttattccggagaggagaacatggacattaccaagagtcatacagttgcaatagataatcaaatttttaaacaagatcaatcaaatgtgcaaatagcagctgcaccaacacccgaaaaagaaatgatgctccaaaatctta

SEQ ID NO: 16010 - DNA, 1050 bp, Homo sapiens
tacagtatcatgggaacaatctttgttttctaccacaaagccattattttcatcaggacagttctctatgaaaaatcatgatactgctataagtagtcatacagtgaaatctgtactaggccagaattctaaactggctgagccactgaggaaaagtttaagcaatcccacacctgactattgccatgacaagatgattatatgttcagaggaagagcaaaatatggatctaacaaagagccacactgtcgtcattggatttggtccttctgaactacaagaacttggtaaaactaatttagaacacactactggccagctaacaacaatgaacagacagatagctgtaaaagttgaaaaatgtggtaaaagtcccatagaaaaaagtggagtgcttaaatctaactgtattatggatgtgttagaggacgaaagtgtacagaaacctaaatttccaaaggaaaagcaaaatgtcaaaatttggggaaggaaaagtgttggtggaccaaaaattgataagactattgtattttcagaagacgataagaatgatatggatatcactaagagttatacaatagaaataaaccatagacctttattagagaaacgtgattgtcatttggtgccattggcaggaacttctgaaactattttatatacatgtaggcaggatgacatggagatcactagaagtcacacaactgccttagaatgtaaaactgtctcaccagatgaaataactactaggcctatggacaaaactgtagtgtttgtagataatcatgttgaactagaaatgacagagtcccatactgttttcattgactaccaagaaaaggaaagaacagacagacctaactttgaactatcccaaaggaaaagcctaggaacaccaacagtgatatgtactcctactgaggagagtgttttctttccaggaaatggtgaaagtgaccgtctagtagcaaatgacagccagctaacccctctggaggaatggtctaataataggggccctgtagaggtagctgataacatggaattgtc

SEQ ID NO: 16011 - DNA, 1001 bp, Homo sapiens
ttgataaaaaacctgagcaggaccccatctagttgcagcagctctctggattcaatcaaggctgatgggacctctctggacttcagcagtaagagcttcatgaaggctaaataatagcagccatctgcttacttaactaataataagtagttttcagttcaggaaatatttgaatgttgtatatgcctttttggggttataaaaagttgatcagtaaaataatatttagtttatttttaattcttagtttgtaatgcactgagaagtgacatactacagagaaatagagtgatttccttcatgggcttataattagtggagaaacactggagccttaaaactataatatactttgccctgctacatgactgtcttcccagaaagatcccaatgggtagcttcaggatcagaaacaatctgaatgataaccacaattaagttcacagtttagttttgacttgttcgtcaccagaatttgctttacttctagcttaccgcagtagtcaaatggaatcacagtttctcagagatactatttgtgaagagagcttgagggaggtatgttaaaattctttttcttttttttatttataaagaaaagaggtttaaacgtctcatttctaatacacgtaatattcttggtttaaaaaattttttttaattacgaaatatttcaaatatacagaagactacttttctttgttaaagatccaacataacaattaattaaatggagtagaagtcatgattaaaaggtatttgttttggccgggcatggtggttcatgcctgttatctcagcaacatggtgcctgagggaagagaatcacttgagcccaggagttcaaggctgcagtgagccatgatcacacaactgtaccccaggctgggtgacagagcaaggtcttgtctcaaaaaaagagaaaaaaatgatgtatcttttgggttttgggatttttaaaactctatttgttattcaataaccttaagaaatgatcttag

SEQ ID NO: 16012 - DNA, 1046 bp, Homo sapiens
gtgaaatcctgtacaaaatgaaataattagccaggcctggtagcatgtgcctgtagtcccagctactcgggaggctgaagtgggagtatgacttgagcccaacaggcagaacttgcaaggagccaagattgtaccactgcactccagccttggagatagagccggaccctgtctcaaaaaaaaacgaagaaagtgaaaaggcaacccacagaatgtgagaaaacagttgaaatcatacatctgataagaagctttatccaaaatatataaagaactcttacaactcaataataaaaatacaatccaatttaggcctggcttggtagctcatgcctgtaatcttagcactttgaggggcctagactagaggattgcttgagctcaggagtttgagaccagcctgggcaacatagtgagaccccatctctatttaaataaataaataaaacatagtgagactctgtctctatttaaataaataaataaaatacgacccaatttaaaaatgatcaaaggatctgaaaagatatttttccaaagaacagtcatgtactgcgtaaggacgttttggttaacaacggaccacatatacacagggggtcccataggatttttatggaggccaggcatcgtggctcacacctataattccagtgctttgggaggccaaggcaggtgggtcatttgaggccaggagtttgagaccagcctggccaacatggtgaaaccgcatctctacaaaaattacaaaagttagccaggcatgatggcgcgtgcctggagtcccagctactgaatcgcttgaacccaggaggcggaggctgcagtgagctgaggtcacgccactgcgctccagcctgggcgacagagcgaaactctgtctcaaaaaaaaaaaaaaaaaaaattgtaatggagctggaaaattcctattgcctagtgacattgtaatgtagcacaacacattactcacatgtttgtggtgatgctaatgtaaacaaacctgcgctgccattcctgttaaagggtagtacatataattatgtaca

SEQ ID NO: 16013 - DNA, 1050 bp, Homo sapiens
tcacttcctcaccatgcccagctaaagtttaaaaactgttttaaagacaagctcttgctttgtttctcaggctggtctcaagtgatcctcctgcctcaacctcctgggattacagcatgagccactgtgcccaggtctgccatttctttttcttttctttcttttttttttgagatggagtcttgctctgtcacctagtctggagtgcaatggtgcgatctcggctcactgcaacctccgcctcccgggttcaagtgattttctcgcctcagccccccaagtagctgggattacgggtgcccaccaccacgcccggctaatttttgtattttttagtagagatggggtttctccaggtgggccaggcttgtcttcagctcctgatctcaggtgatccgcctgccttggcctcccaaagtgttgggattacaggcgtgagccaccgcgctggctgccatttcttttttttctttctttcttttttttttttgagacgcagtttcgctcttgttgcacaggctggagtgcaatggcactgtctctgctcactgcaacctccgcctcccgatttcaagtgattctcctgcctcagcctcctgagtagctgggattacaggcatgcgccaccacacccggctaattttgtattttgtattgttggtcaggctggtcaccaactcccaaactcaggtgatccgcctgccctggcctcccaaagtgctgggattacaggcatgagcctctgcacccagcctgccatttcttttttaaccagtacatatagttttgatttttatgtataattctagccttaaaaatcctttttttttttttggctgggtgcagtggctcatgctcataatcccagcactttgggagaccagaggaagaggatcacttgatctgggagtttgagaccagcctgggcaacgtagcaaaaccccataactaaaaaaaaaaattttggccgggcacgatggctcatgtctgtaatcccagcactttgggaagccgaggtgggcagatcacctgaggccaggagttcgagac

SEQ ID NO: 16014 - DNA, 1021 bp, Homo sapiens
aattgattaaatagcaagcaacccattttatatgtgccctaatatattaaaaagtttcattaactaagagcctgtcattttctaatttataatatgaataagtgaattaaaggcaggaatcaaaactgaaatcttttttctggtcttagacaattacatggaattaaatttgcaaatgacaaatatcctgccttaggataggcaaagcctagccttcctagaccatttacctcttctgactcgtttgttttagtacagtgttctctataactttcccttccagctgaaggcctttggaatttatcttaacaaaataaagtcatgttttaccaagatgactaaagtcttcactcaccaaggaaaagtggctctgtatggcaagctggtgcagtcagctcaggtaatttgagacagttaatatcatagaaagagagagatattaaaattactttctaatggttatagaatatgaagaatcttccttagaagacatgtgaataagacttgggcaaaaacttaacaattaagaggtaaggttcaatttgtcaaaagtggcaaatcctgacatcttgagtaatactggaatataattactaatgtgggcctatgtctcatctcaaatactattatccatcatacatactgaaataaaatacataggattctggtctcccattgctaaggactataccatagtattatcttcttcatagtccatactaagctgtatatgtatgcacatgtgtttaaagtagcatttcccaaaatgattagcttttttaaaaggctctgcataaaaaaactttccattggcaagtaagtatgggaaatgttgcaagcaatatgccctttcagagaaacataattttttaaagtctaagcataaatgctgtaattctttttgaccactgtttcctatgtttagtttatcatagaaatgtttttaagtaataaatattaatatattgtattccatggaacacctatagaaatgctaaaataaagtaccagaattagtttt

SEQ ID NO: 16015 - DNA, 1051 bp, Homo sapiens
gctaataggagttctttttaatgtacatggcttagtgctagtttaaaattattgattttgataatgaaaaggttgttaatttgttattaagtacctcatatatagggctcatttttcagcttttgcatataataacagtaggctctctgtatctccggattctgtatcagcaaattcaacaaactacgtatcaaaaattcaatcaactacatatcaaaaaaaagtatacaggaggatgtacataggttatatgcaggtaatacgccattttatataagggacttgagcattgttggattttgttatctgctgggggtcctggaaccaacttcccatctccccccgcccccccaaggatttcaagggacagttgtattacaagtcttcaagcacctctgtgaagtatgtaggacacataacatctgtgttagattagagaactaaagcttaaatttatccatggttttcttcatttgcagcagtgtggcataaatgccaacgatgtgaagaaattggaagaagctggattccatactgtggaggctgttgcctatgcgccaaagaaggagctaataaatattaagggaattagtgaagccaaagctgataaaattctggtaagtactgcttacttaacctagggaggcattagtgggaatagtacaaaagggaatgtagtgaaagacttcttccttctatctcttattcttcggtcatctcattatcctttccaggggtgactgttacctgtttcttttcttcttttcttttcttttcttttttttttctttctttttttttttttttggagacgggttctcgctctgtcacacagggtggagtgcagtggtgccatctcagctcactgcaaccttcacctcccaagctcaagcgatcctctcacctcagcctcccaagtagctgggactacactacaggcacatgccaccatgccggggtagtctcgaactcctgagctcaggcgattcacctacctcagcctcccaaagtgctggattataggtgtgagctactgtgcctggcctattta

SEQ ID NO: 16016 - DNA, 1057 bp, Homo sapiens
atttttagaagagacagggtttctccatgttggccaggctggtctcaaacctgacctcaagtgatctgcctgccttggcctcccaaaagtgctgggattacaggtgtgagccactgcacccggccttaatggtgaaattctgaatgcttttccccctaaagtcagtaacaaggcaaggatgcccactttcactatttacattcagcaatgtaccaaagattatagacagtgtagtcagacaagcagatgaaataaacggcatccagattggaatggaagaaggaaaactatttgctaatgacatggtgccatatgtagaaaatcctaaggaatccatccacaagaaaaactagaactaaataactgttcagcaaagttgcagaatacaatatcaatatacgaaaatccattgtatttgtatatactagacaataacaattcaaaagtaaaacttgaaaaaaaaacttcattcacagtagcaagaaaaagaataaaatacttaggaataaatttaacaaaagaaatgtaagatttgtacagcaaaaactctgaaacattactgagaaaaattgaagatttacataaagagaagcattccacatcatggatgggaaaactcaagattactaaaatggcattcttggccaggtactgtggtgcacacctgtaatcccaacactttgggaggccaaggtgggcggatcacctgaggtcaggagttcgagaccagtctggccagcatggcaaaaccctgtctctactaaaaatacaaaaattagccaggcatggtggcacactgcctgtagtctgagctacttgggagggtaaggaaggagaatcacttgaaccagggaggcagaagttgcagtgacctgagatcgcgccactgcactccagcctgggtgacaaagcgagactctatctcaagaaaaggcagttctcctcagattttatctatagattcaacccaatccttatcaaaattccagcaagctttttttgcagaaatttacaaagtaatcataatatttatggaacataacgtggaaatgcaaag

SEQ ID NO: 16017 - DNA, 1039 bp, Homo sapiens
cgtggtggcttatgcctgtaatcccagcactttgggaggccgaggcaggtggatcaccttaggtcaggagtttgagaccagcctggccaacatggtgaatccccgtcactactaaaaatacaaaaaattagccaggtgtggtagcacagacctgtaatcccagctactctggcggctgaggcaggagaatcgcttgaacctgggaggtggaggttgcagtgtgccgagatcatgccattgcactatagcctgggcaacaagagcgaaactctggctcggggaaaaaaaaaaaaaaaaggacaaaaactgtatgattccactaacatgtggtacttcaaaatcaaagagacagaaagtagaatggtggttttctgggggtagggagactggggagttgttgtttaatggtacagtttcagtttgggatgatgaaaaagctctggagatgaatagtggtgatggttgcacagcagcatgaatgtccttaatgtgcctgaactgtatactttaaaatagttaaaatgctcaatttaatgttatatgtgtacgttttactatactgtttttagaagggtgatagtcctaaataagagcctaactataatttttcagagagaacatgggagaaaatcttagtgaccttggggtaggcaaagatttattagctacaacaccaaacacacagtccatgaaagaataaattgataatagagttagttttcacttcatcaaaattaaaaacttctgtgcttcaaaggacactatgaagcaagtgaaaagataacccaaagaatgtgagaaaatatttgcaaattacgtatctgataaatgtctagtatctagaatatataaagaactattataacccaacaataaaaagataacccagttgtttaaatgggcaaaggatttgaatagacatctctccaaagaggatatacaaatggttgatgagcacataaaaagatgctcaacatcattagtcatcaggaaaatgcaaattgaaaccatggtgagctaccacttcacacccactatg

SEQ ID NO: 16018 - DNA, 1053 bp, Homo sapiens
gagtcccaaagtaccatgcgtatggaaagaaacctcattaaatgacctttcaggctaccgtagctaaagctgttgccagtatatttaattcataagaaataatcaccgtgattgacatggtgttgtgtttgttatatttcacaatcagagaggaccaggtaaacttccgtggattcatgcgaactttggctcatttccgccccattgaggataatgaaaagagcaaagatgtgaatggacccgaaccactcaacagccgaagcaacaaactgcactgtaaggagctaaagtcttctggcttaaaatacttgcttttcatttcttaaaagtcatgtatttactcactcattatttgaacaagcatctacaagagcatactggttaagacctcagactctggagctaaactggccaagattaaatactagtctacccttttttggtcgtgtgactttgggcaaggtacttaacctctttgggcttcagttttctcttctgtaaaataggatactaaggggttccacattggattgttgtgaggattaaatgagttaataaatgtcaagtgcttcacatagtgcctggcatatactaggtacttaataagtgttacctagtatcattataattcattgagcacctaccgtgtgccaggcactgtgttaagtgctagcatggcaatagtgaacaagacccaggccccacctttaaggaataatggcaatcctcagctcatcttagaatttgatagacactggatgtgacttaagtaatgggggacagctggatacagtgcaagatttaatttttatacccgtgtctcatgcctcttttcctttaatacttgtttgccttcccttctgcccttattggttcatgtacaatattgcccaatcccttacaacacttctccaggaaattgaaattaaatttatctttttattcagtacaagttgaaattacagttgtattaaaactgactgaaggctgggcgcagtggctcatgcctgtaatcccagcactttgggaggccaaggtaggtagatcacttga

SEQ ID NO: 16019 - DNA, 1034 bp, Homo sapiens
ttcttgtttgaaaaagttacgttttagtggctgggcgcggtggcttacgcctgtaatcccagcactttaggaggccaaggtgggcggatcacgaggtcaggagttcaagaccagcctggctaacatggtgaaacctcatctgtactaaaaatacaaaaattagccaggcgtggtggcgcgtgcctgtaatcccagctacttgggaggctgaggcaggagaatcgcttgaacccaggaggccaaggttgcagtgagccgagaccacaccactgcactccagcctggcaacagagtgagactctgcctccaaaaaaaaaaaaaaaagttacgttttactgcacaggaggaaggggggaaaacattactcagataagagcttgggagtgttgtaatcttcataacctttgtaactgttactggttttctcccccaggttttggagaaggtggatgtagaacagaaaatgagcatccgatttcttcactaaaggagaccaaactgttccttgcggtctagtatttaagaactggaacttgaaagtcctccttctaccaactccacctccaccccctcattccccttctcccaaagtactactgctgttgcatgacaaccccaaatatgttctgtcaacacaaacctgcctttggtgtataaacagggcattacagaatggtacaccctatatatttctgttcagtatccattcactagttcttcatttataaatatcatcttccccattctgctgctgaatgccacacatccatccagtctgagaaagtgagagaggcaatcatgccaagaacaagccagcaaagctctttcaccagatgtagactgtagccctgctgccttccctccagcgagtctgccagcatgcttcttcatcctttttatatgttctttgcttcctacttccctgtcttccaacatactgttcacttactctggcagtctttctgcttttcattaagcctcaaaatctcctctgttctacttggcaccacaagctatgtcctatatatgtattt

SEQ ID NO: 16020 - DNA, 1034 bp, Homo sapiens
tcttgaactcctgacctcgtgatccgcccaccttagcctcccaaaatgctgagattggaggtgtgagccaccgcgcctggccagtgtgtcctttcttaattgacagtgacattatatctgcaaaataggcttcatacctactgtgttagttttagtttcctaggcctgctgtaacaaagcaccacaaattgggtagcttagaataacagaaattgtttgatagttataaataaaggtcagatgtctaaaaccaaagtgttggcagggccgtccctctgaaggcactgaaaaaaaaatttccagtccttctaatttcttgtggttccttaacttgtggcagcataactccagtcttcacatgaagttcttcctgtgtgtgtatctgagtcctaatataaggagactagtcatattggattggggtccatcctgctctgttaatgacctcatcttagctgctgacatctgtaatgactctattaccaaataaggtcacagtatgaggtagtaggggctaggacttttaacatacgaatattgggaggacacagttcaacccattaacacctacttataccttgattaattatatgaaaaccattcagtgtacaactgcttcaaggattgaaaccttgtatgtagtcccagctactctggaaactgaggtagtaggattgcttgaggcctgaagttcaaggctgcagtatgctgattgtgcctgtgaatagccactgcaccccagcttgggcagcatcagaattatagagacagaaagtagaatgatggttgccaggggttgcaggaagggcagcgagagggaattactgtgtaatgtgtacaaggtttcagtttgggaagaagaaatgagtcctggagatggattacggtgatggttgcacagcagtatgaatgtacttaatactactgaattgtatactcgaaagggttaatatggtgaattttatgtgtattttatcacaataaaaacattgaaaaataaaacaatctttgtatgtatatgtatatatgtgtgt

SEQ ID NO: 16021 - DNA, 1033 bp, Homo sapiens
aggatttagagtatcctttccaggaacaaagggcagtcaaagtctttattatacaacagtcacatagattaaccctgattcattgttggaggagactgtaaaaaggcctgaataccaggaggcagcaatcactggtggctattttggaggctggatagcacagaaaatcattggctcacaagctagcttacctaaggtgtccacataaatttttttttttttcttctttttttgagacagagtttcgctcttgttgcccaggctggagtgcaatggcacaatcttggctcactgcaacctccgcctcccgggttcaagcgattctcctgcttcagcctcccgagtagctgggattgcaggcatgcaccaccacgcccggctaattttgtatttttagtagagatgggggtttctccatgttggtcaggctggtctcgaactcctgacctcaggtgatccacccgccttggcctcctaaagtgctgggattacaggcgtgagccaccgtgcccggcctgttctccttttcgatcctcccaataagtcaggttttttagtagaaagttactttgtataatcagcaccagtaagcaagtaagtaacttcagccacttgaaagtacctaatgtgaggccaactttaggggaaatttatttgtaagttttgtgtatccgttgtatagttgcagttgataaatccagaaaactagattttcagcagctggttgtggtagctcacgcctgtaaccccaccactttgggaggccgaggtgggtgaatcacgaggtcaggagttcgagaccagcctggtcaacatggtgaaaccctatcgctactaaaaatacaaaaaaaaggtcaggagtttgagaccagcctggtcaacatcctgaaaccctatctctactaaaaatacaaaaaaaattaaaaataaaaaaaattagcatagtggcaggcacctgtaatcccagctactcgggaggctgaggcaggagaatcgcttgaacctgggaggcagaggttgcagtgagtcgaga

SEQ ID NO: 16022 - DNA, 1050 bp, Homo sapiens
ccttaagaaaaagaagcaaaaatccctcatgcagtgccatctgactttatggtgtttcacattatatagttactttttttaataaacgcataagattaactcttcctgcaacccaaggtggatacttggatgtttgatttttatttatttatttatttattttttgaggcagtctctctctgttgcccaggctggagtgatgcgtgatttctgctcactgcagtctctcccacccgggttcaagcgattctcctgcctcagcctcccaagtagctaggattacaggcgcgcaccaccacgctcagcctgatttctaggctgaaaaggctgggactcaggtactttccccagttgggactgaactttctcatcagagaatgggcctcagaagcaatgttcccaaacttgtggttgggtcatcgtggaaaagaaacctcaaataagaaaaataattacaataagaaatggattttcttttttcccacaacagttatacattataaagaacagactgtcgtagaaaactgtctttgcttccaaatcagcagaggaccattgtatgtattgtcaggtctttatataagagtgaaacctttatttatgcttcttgtgagtagagaataaattttaaaactaattagatgaaattaagaacagagtattggaacatctctgtgttttccggaatgtttactcaggtccatgaatgctgtgatgctgggaacttagggaagattcaccaaaatttgagagtgataaaaatggcctaaaatgggaaatggtgagcactcttattattagtgagattggtcaatcagcccatttgaaatgggtaaaaaatactttcagtaaaataattacatattatatataaaatatttctttttttgagggcagctactgagtgataaaagcatagtagaaatcactttggttaaaagtaactcaaatttttctcttaagtaatctaccaacttcctgatgtttttctttaatattttggaactgttcaagacagaatggagcctacatatatggtgttccactagt

SEQ ID NO: 16023 - DNA, 1055 bp, Homo sapiens
tgtcatatcatggagaatggagacaccttccaggtgtctgttaaacccatcttctctgtgtacttctggcatcttttttggtaggatcatttggcagggggtagagtacctgtacttttggcaccattgaaaccagctctggcccacttgtttgaatagctatcagactcagcgtctctatatgctttatatacagttgagagaaccagtgtttaatgctcttgaaattgtatcttccatgcttcagaccagatgcatttaacaaaatggatatattccagctgtagttgcccagtgtttacttaacacatctacatttttttcttgtctattttggtccccttgataggaaaagctataattttaggcaggactatacgtcgatttgtagccatgcttccttcctttcccttgctcatccatgttagctggcagtttttcttttgaaaagttaaaaccgggatatgtgcaatagaaatatatatatatatatgtatattttaatacttgtggacaaatgttacaagttgtttaagaacaacaaaatcaccaatgtcttccattttgagatgtgtatagttttgtaagcattagtgcttggtagcatattgtagtgccatgttaggggttagtgcatgagtctagtgattttaaacttcaggatgaattattgataataacaaatagtgtaaaaagagtggaaaatctaaaccttttctttttccataatgtctaaatctgttatattcttcctggggaaaagagattaaggcccaaaagactcatttatgaatagaaatgtggggtcaaaatctgagatactatatttgaggacatttcagctttccataaggtatctggaaaccagctgtctttgtgtcttatgaaacctcaagtcaaaatgagaccgcatttaattattctgctttgctctttttttggggtgggggggagatagagtttcactctgtcacccaggctggagtgcagtggcacaatctttgctcactgtaacctctgcctcttgggttcaagtgattctcgtgccccagcct

SEQ ID NO: 16024 - DNA, 1033 bp, Homo sapiens
atctactttacttgtggaaataaaacagtcattttgttctgaaagaataagatagctttctgtagagaaggaattcctacctctaaaagctgccttgagaactcagaactggcagttttctgaggtgatttttaaatttcagtattagggagagtccagcatttgctgacacagattctacataactaatgtatgatagcaaatgcaaaactattataatgtggtgtatcttgcgcatacacaggttagaacaagtagactctggcagcagatctccagagacccaagtttaggttctcatagtgtatttgaagtagttatactcctggcttaagtagtttagtgcctgggagaatccattactgaaaagcatttaacttaaaaaaaaaaaaaaaaaaaaaaaaaaaaactgaaaaggtagtgaatacagaatagcacaatatataggaaaggatatttcctgttgaaaaaaaaagccataaaattaatagtaattttcaagaggtagaattttagtagcaataagtttgtgcatgtatagtaatttgcattagcaaggttgtacaatagaataagtgatactactggagtttgtggggctctgcaaccaagagttgcacaagggccaggtgcggtggcttacacctataatcccagcactttgggaggccaaggtgggcggatcacaaggtcaagagatcaggaccatcctggccaacatggtgaaatgccatctctactaaaaatacaaaacttagctgggcatggtggcacatgcctgtaatcccagctactcaggaggctgaggcagtagaatcacttaaacctgagaggcggaggttgcagtgagctgagatcacaccactgtactccagcctggtgacagtaagactccacctcaaacaaacaaaaaatgcacaaaaggaaaaaatgttctggataaagagcatatgaaaggtactttcttttagaacagtatgaatgtatatgaatttatctttatgtgagaaataatcttttttgtaagttaaag

SEQ ID NO: 16025 - DNA, 1032 bp, Homo sapiens
tgcatgcttattaaactcaaactgggtctgattgaaagtgcaagcaatagtgacaggaccttaactctggttttagagtacgaacattctaatgcatgactcaaaatgtccagtgttgtggttactagttattttatatatgcatttgttaataatgaagcaatagagactaagaccaatagcttgaatatattcagattattttcatgttttaataaaggatttttcttacttccattgaaaatgggaagtagaagataaacaggggcaaccacaagacattcaaactgtcaggactagggcgtagcagtgcccaccctctaaccacttgcctggttccattagtccccaagcatgtttgaaaacaaaagacacaaactaagcatgctgaataaaactagctgctatggctgtaataatcagaaaggtgcagagtttcagaaagagtaggaaagtagggaatgccagtatggagtatgtaaaataactagatatggatatggggtttgtttatgatatgctttatgtagacaaagtttgaggtcttttaaaactgggatttgagttgaaaagagtcaggatgcacatatttccactatttcaggattttcagatgactaggcacatgttgtggatgatactggtaccaactaccaatgaccaactataaagtacccctgcaataagggagacttcctttttgtagaatagtcctgaaaatactgacagatctgtggttagtttgttattttattgcataaaaaacagtttaaacaaattttatagccaaagttttatccttgatgggtttggccagactgcaatttcttgactaaagcttttaatgccaggttaaacaggagaaactttttccactagaagaaaatccttgctatctattttttccaatagaagaaaatccttgctatttattttatttgatgaataaacaaatttattgcagtagcttaaaaaaattttttttttaaacagtctcactctgtcgcccaggctggagtgaagcaatgtgat

SEQ ID NO: 16026 - DNA, 1075 bp, Homo sapiens
aaggtcaagcatttaattttatttatttatttatttagagacggagtcttgctctgtcgcccagagcaaccaggggtgactcaatgtggtacttattaggtcttttttttttttttttgagacggcgtctcactctgtcacccaggctggcatgcagtggcatgatcttggctccccacaacctctgcctcccaggttcaagcgattctcctgcctcagcctcccgagtagtgggactacagacacacgccacatgctcagctaatttttgtatttttagtagagacagggtttcactatgttgggcaggctggtctggaactcctgacctcgtgatctgaccgccttggcctcccaaagtgctgggattacaggcgtgagccactgcacctggcctatattaggtcttattctttaaaaagtaaaagcttttattgggctggtttttgccagaaagcatcaaccttgcttataggaccaaatttttgcaactctacgcataatcagacctggcacaatggctcaccgctgtaattccaacacttcagaaggctgaagtgaggatcccttgagcccagtttgagcccacagtgaggccttgtctctacaattttttttttttttttaattagccaggcgtggtgacacaaacctgtggtgccagctattcaggatacagttgggaggatcacttgagaccaggaagtcaaggctgcagtgggccatgttcacacctctgcactcaggcctgggtgacagagtgagaccctgtctcaccaccctcccctcaaaaaaagcataagcaggccagtcgcagtggctcacgcctgttatcctagcagtttgggaggccaaggtgggtggatttgcctgagctcaggagttcgagaccaccctgggcaacacggtgaaaccccgtctctactaaaatacaaaaaattagccgggcgtggcggcatgcacctgtaatcccagctactcaggaggctgagacaggagaatcgcttcaacactcgggagatggcagttgcagagatcaggccactgcacgccagcctgggcgacagagcaagac

SEQ ID NO: 16027 - DNA, 1030 bp, Homo sapiens
ctaagtctactcaccacaccattttgtcactggaaaggcagaagtgacctctcaaggcagccagggcagcatgggtagaatacagatggaaaccaacgggaatcccacaagaaccacagaataaaaggttgtaagtactaggggtggggaaaaacacaatatgggtaagaataaaaaatcatataagaaataaaaaataactagtctctgaagcattcctaacacctaagtcagggtgaaaattacattgtaataggaatgagacggaaagaatgtcacattcaagaaagggtaactcagattgtaatttaattacatgctggattgcggataccctcgtatattctggtcaaagcaatcatggatgtataattgtcgcttcagaagagaaaggtaatttacccctaataaacacaaaaagagctaactaatctgattaacatttaaacatttaaaactacaaatcatgtaaaatggctatcattatataaattcacagttgttgaaaaataatcaagttgactggggccttactaaacaaattgttcatagaactaaaatcaaggtttgtcttttgcttatattaaaaaagaaagttaatgaaaaaaatgcgccctctccctctccctcctctccccacggtctccctctccctctctttccacggtctccctctgatgccaagccaaagctggactgtactgctgccatctcggctcactgcaacctccctgcctgattctcctgcctcagcctgccgagtgcctgcgattgcaggcacgcgccgccacacttgacaggttttcatatttttttggtggagacggggtttcgctgtgttggctgggctggtctccagctcctaaccgcgagtgatccaccagcctcggcctcccagggtgccgggattgcagacggagtctcgtctcgttcactcagtgctcaatggtgcccaggctggagtgcagtggcatgatcttggctcgctacaacctccacctcccagccgcctgccttggcctcccaaagt

SEQ ID NO: 16028 - DNA, 1054 bp, Homo sapiens
atcgacttttaggggagcacctccttgggtaaatttttattgatgactgttgggttgatggtctctatcaaaaccagtaaggtctttgactccgaggctacaagatgtttggagagttggcccggcgctgtggctcacgcctgtaatcccagcactttgggaggtcgaggcaggcggatcacctgaggtcaggagttcgagaccagcctggcccttaaaaaattagccgggcgtggtggcacacgcctgtgatccaagctttttgcctgtgatcccagctacttgggaggctgaggcagaagaatcgcttgaacctgggaagccgaggtggcagtgagccaagatcgcaccactgcactccaacttcggtgacagagagagactcagtctcaaacaaaacaaaaacaaacaaaaaacccaagatgttagaagaagatttggggatttaatgtaggatagcggttttatatattttgttaatagttgagacttcccacataatactgctatatactctggaggtttctcctgcaggctgtgatactgacagtgagtaaatgcttaaatcaatcgtcacaattttttttttatttgtttgtttgtttgttttttctttgagacggagtcttgctctgtcgcccaggctggagtgcagtggcgccatctcggctcaccgcaacctccgcctcctgggttcaagcgattctcctgcctcagcctcctgagtagctgggattacaggcgcgtgtcaccacgcctggctaatttttgtatttttagtagagatggggtttcaccatgttggtcaggctggtctcgaactcctgacttcctgatccgcccgcctcagcccccaaagtactgggattacaggcgtgagccaccccacccgacctaaattgtttaaacaaaataatcagggcctaagtgcctgttggggctgaatgaccaaagggttttccttggggatatttctgggctgtagtggttagtggctcctctatacttcgtaaacaaagccttaatatctcagcctaaattccttaggcttttt

SEQ ID NO: 16029 - DNA, 1007 bp, Homo sapiens
ccgagttcctgggattataggtgcctgccaccatgcccagctaatttttttgtatttttagtagagacaggacttcaccatgttggcctggctggtttcaaactcctgacctcaagtgatccacctgccttggcgtcccaaagtgctgggtttacaggcatgagccactgcgtccggcccattcccataagttaaaatttacccaaaagctaatgcctcccaaacccacatctccagtaggacctctctctcccctgggatgctgactcgtgtatttaagtgcattttcaacaacacggtcaggtccaagcattgacagtctcttccccatctcagtacattgttcaggcccagtttggatcaccctggattcctctcttcttcacccacagccatccattcttgtcagcacctcctcctaaatagacctgaaatctgacctctgggcaccatctccagcgctgcaaacctgtgccacagcactctcatctcctgaccactgcctcagtctccctattgggcttcctgcctcaactcttacctcacaatagtgttctcttggtagttggagtgatatttgaaacttagggaaaagaaaaaaaagagagagagaccaggcgccaggcgcagtggctcatacctgtaatcccagcactttgagaggccgtggtgggtggatcacttgaggccaggagttcaaggccggcctggccagcatggcaaaaccccgtctctactaaaaaaaaaaaaaatacaaaaattagccaggcgtggtggcatgtgcctataatcccaactactcgggaggatgaggcacgaaaatcccttcaacctgagaggtggaggctgcagtgagccaagatcacggcactgcactccaccctgggcgacagagcgagactctgtctccaaaaaaaaaaataaacttagaacgtgtctttctgctcagtgccctccaatgacttccctcacatctaaaataaaatctaaactctttccagtgtaat

SEQ ID NO: 16030 - DNA, 1257 bp, Homo sapiens
acttagccagtggccttgtagctgcattaaaagaaaaacaagaactggctaaatacagacatttgtaaaacataatcatgctaatcatgcttaagaagcccgggaaaagagtaacattaaaagaacttgtatttctcttttttttttctttcaaccttgctctggaaccaggggtcggggggagggtggtgtctggagcttattcctttggccttggctatttggacagcgttatcttctaactgtcttcaaagtgagctactaggcagaggaaaacttgttcttttctttttaactcttgccttgccacattctgggccttagtttttacttttcttggagtgaataaatgcagtacttattattatttaaatttctgcctcaatgtagtcacttgctcagtagactgtctaggtttcttcatttgtccttgctaacagagctaatcttgccatttctattttcctcttaatgtgccctagtatctcctgttctcaaatttacattctcgtgacagttgataaggcagagaaccaaatctgccaccaaaaatctcattctcctacttttcttcctttaaccccttttccccctcactttggtacttatctttggaaggcagcaattcttatttatcatcgaaatcttttatttcctttttaaatttgtagcagaatcattcagagataaaaataagtaatcccactgaattccagaatcatgaaaagcaggaaagccaggatctcagagctactgcaaaagttccttctccaccagacgagcaccaagaagctgagaatgctgtttcctcaggtaaacgtggaataaatggtatgtcaagtaactttaaaaaccaaaattgctagaagtagccaggtacattaatttcctaggactgttgtgacaaagcaccacaactgggcagcttagaacaacagaaatttactctttcatagttctagaggctggaagtccaaaatcaatgtgtcagcaggaccatgcttctctgagactctgggtggactccttccttgcctctgactactttgcgatggctgtcgacgcttggtgttccttggcttgcagctgcatcattaccagtctctggctctgacagcgcatgacattctctctctatgtcttcttaataggacagcagtcatattggattaggatccacccaaataggccaagcatagtggctggtgcctataatcccattactttgggaagccaagtcaggaggattgcttgagc

SEQ ID NO: 16031 - DNA, 1035 bp, Homo sapiens
tgggcatgtaagtcttctctatcttatattgttggaacattgcttggcacatagaatgttgattattatatttatagtagttgcaatgctgcttatcgtatattcaaaattcaataaatgttcatatacttaatcagaataggatacagttggggtcagcaaactgttgcctgccttggcctgtcttatatcctttgagctaagagtggtttttacattttttaaagaatttaaaaacaagaagaatggccgggtgcggttctcacacctgtaatcccagcactttgggaggcccagggggctggatcacctgaagttgggagtttgagaacagcctggccagcatggtgaaaccccatctctactgaaaatacaaacattagccaggtgtggcggcaggtgcctttaaccccagctacttgggaagctgaggcaggaaaatcgcttgaacctgtgaggcagaggttgcagtgagccaagatcatgccattgcactgtagcctgggcaatagagcaagactccgtctcaaaataaataaataaataacataaaaacaagaagaatatgagacagagaccataccatatgtggccataaagcctaaaatactttttttttttgagacgaagttttgctcttgttgcccaggctggagtgcaatggcgcaatctaggctcactgcaacctccacctcccgggttcaagcgattctcctgcctcagtgtcccgagtagctgggattacaggcgtgcgccaccacacctggctaatttttgtatttttagtagagatggggtttctccatgttggtcaggctggtctcgaactcctgacctcaggtgatctgaccgctttggcttcccaaagtgctgagattacaggtgttgagccaccatgaccagccaagtcttaaatacttttatctagccctttatagaataaatttgtcagtccttgacatacagcattataaaatatcaaattcattattaaataaagaccacttgtgactaattggtaggggagaagataaa

SEQ ID NO: 16032 - DNA, 1053 bp, Homo sapiens
ggctcacgcctgtaatccaaacactttgggacaccaaggcaggcagatcacttgaggtcaggcatttgagaccagcctggccaacatggcaacatcctgtctctactaaaaatacaaaaattagctgggcatggtggcaggtgcctataatcccagctactcagaaggctaaggtgggaggatcgcttgaacctggaaggtgaagattgcagtgagcccatattgtgccactgcacttcagcctgggcaacagagccagactctgtctcaaataaaaaaaaaaaagaaagaaaatgcctgggtccatagcagccgggaaaggctttcttgtaactccttactcagcctcaactggaaattgctctttataacagaatccccatagcaataaatggcaggtaactgtggagccagccagacaggtagaataggatgaggtgaggtagtgaggaaagaaaagattccaaatggagttacaaatgaggaatgaaacagggataaatggaaacgctcttctgaactttgcctaggagacaatactgtatcagaggccaagtctttttgtttgttttttgtttttgttttttgagatgtagtctcgctctgttgccaggctggtgtgatctcggctcactgcaacctccgcctcctgggttcaagtgattctcccgcctcagcctcctgagtagctgggactataggcacatgccacaacgcccggctaatttttgtatttttagtagagatggggtttcaccatgttggagaggccaagcttttaaaatgatgcattttctcttcagcagcagcccatcaataagggaggggtcaggactccagtacctccaagaggaagactctctgtggcttctactcccatcagccaacgacgctcgcaaggccggtcttgtggccctgcaagtcagagtaccttgggtctgaaggggtcactcaagcgctctgctatctctgcagctaaaacgggtgtcaggtaaagaaatcactccaaaatgtaatcatgaacaagatttcacatggactatataaaaaaaa

SEQ ID NO: 16033 - DNA, 1084 bp, Homo sapiens
gggcgacatagcgagactccgtctccaaatgggtgaatggttgaagcccaggagtttgagagcagcctggccaacatggcaaaaccccatctctactaaaaatataaaaattagctgggcgcggtggctcatgcttgtaatcccagcactttgagagactgaggcaggcggatcacctgagatcaggagtttgagaccagcctgaccaacatggtgaaaccccatctctactaaaaatacaaaattagccgggcatggtggcgcatgcctgtaatcatagctactggggaggctgaggcagtagaatcgcttgaacctgggaggcagaggttgcagtgacccaacatcgcaccattgcactccagcctgggcgaccgagcaaaactccatctcaaaaaaaaaaaaaaaaaaaaaaattagccaggcgcagtggcacatacccatagtcccagccactcgggaggctgaggcaggaggatggcttgagcctaggaggcagaggttatagcaagctgagatcataccactgcatgccagcctgggtaatagagccagaacctgtctcaagaaaaaacactaccaattaactattgacatcttatgaattgtaaaaacacatcccaatttcagagatgttaaaatgtagaaaaaatactatcagtcaatcaatcaaatacatttgtggcaatttgccatatgtaaagaatggtaaagaatgggcttatttctctaccacacaaatgaatgacattcttttaggaacatacaagacctgttctcaccactcacctagcatagcagtcttctgctacctgtgacttcccctaacctggaggaggaggaggaggaggaggaaggggagcttttggcttgcctcttggactataatgaggcctccacacctattcctccatcaccatcattgtccaaggcagggagagcagaaaagacaagaacatattttacaaataatgttagttgatatgtgatttaatttagcattagccttttaggaatatgtctcttctgcaaaagaggttcgttcctatgacaattattaattgaggcccttttcactgcttgc

SEQ ID NO: 16034 - DNA, 1051 bp, Homo sapiens
ggagattgagaccatcctggctaacacactgaaaccccgtctctactaaaaatacaaaaacaaaatattcagaacatttacaaagctgcttagcaaaggaaattaatctcaatggttagctttcctcaattattgttttccccttttctccattttaacccttatttcagactttcatctatttcagactattcatgtagattgtcttagtcctttgcggctgctattatataacaaagcaccaaagactgtatcttataaacagcggtaatttctttctcatagttctggaggctggatgagggcagatcagggcactagcatgattctggtgagggctgttttccaggtagcagactaccaacttcttgttgtatgctcatgtggcagaaagagagctagagaaaattctatggggtccctatataaggccctgaatcccattcatgacctatttacctcccaaaggccctacttccttacaccagtcatattgacagttaggatttcaatatgaatttgggatcgcaggagatacaaacattcaagctataacttttttctttttttgagacacagtctcactgtcgccaggctggagtgctgtggtgcaatctcggctcgctgcaacctccgactccctggttcaagggattctcctgcctcagcttcctgagtagctgggattttgggcacacgctgccacgcctagctaatttttgtattttagtagacacggagtttcactatgttggccaggatggtctcgctctcttgacctcatgatccacctgcctcggcctcccaaagtgctgggattacagtcgtgagccactgcacccagcttcttttttttctttgtttgtttcttttgtttttttgagatggagtcccaccctgttgcccaggctggagtgcaatggcgcaatcttggctcactgcaagctccacctcccgggttcaagtgattctcctacctcagcctcccgagtagctgggattacaggcacgtgccaccacacctagctaattttttttttttccctctctg

SEQ ID NO: 16035 - DNA, 1025 bp, Homo sapiens
ttctcctgcctcagcctcccaagtagctgggattacaggtgtgtgccaccacacccggataatttttgtatttttagtagagatggggtttcgccatgttggccaggctggtctcgaaatcctgacctcatgatccacccacctcggcctcccaaagtgctggtattacaggcgtgagccaccatgcccggccaaagcacttaaacattgtttgtttttgtttttttttcttactgccagggaagacagaatcaacattgtatctttcactcacttctcacttcctttgccacgctgtgagctttcttgggtccagactgcgctgtttttcctttccccagaatgtaccatagcggcgggaatttagtgcttagtgtgaatttgagagcatatagttccgtaacacctttgttctctaaggttccgaaggagctcactaaatacactagccctttccatgttttctccttcactagtttccgcgccgcctcctcttcctcaaattcggcttggcttctctagactctacacttgccccctcaaaccttacctttctgcccccatcactgactcttctattctcttcccacaacctttaatgcgggctgtctctccatggcccatcctgcctctacctcttttctagtttcaaatataagttatcggccgggcgcggtggttcacgcctgtaatcccagcactttgggaggccgaggcgggcggatcacaaggtcaggagatcgagaccatcctggctaacacggtgaaaccccgtctctactaaaaatacaaaaaaattggccgggcgtgctggcgggcgcctgtagtcccagctactcaggagactgaggcaggagaatggcgtgaacccgggagacggagcttgcagtgagccgagatcgcaccactgcactccagcctgggccacagagccagactccgtctcagaaaaagaaaaaatcgaaatgtctttttgttgttgttttttaggaaatatccttgagcaataaagaaaactaaatgtc

SEQ ID NO: 16036 - DNA, 1008 bp, Homo sapiens
gtctcaaaaaaaaaaaaaaaaaaattgccaggcgtggtggtgggtgcctgtagtcccagccacttgggaggttgaggcagtagaatggtatgaacccgggaggcggagcttgcagtaagccgagatcacaccactgcactccagcctgggcgacagagcaagactctgtctcaaaaaaaaaaaaaaaaaaaaattagccaggcatggtggcattctcctgtagtcccatctacttgggaggctgaggcacggccattgcttgaatctgggaggtggaggttgcagtcagccgagatcgtgccactgcactctagactgggcaacagagtgagtctctgtctcaaaaacaataagagaccaggcatggtggctcacgcctgtaatcccagcactttgggaggtcgagttgggcggattacaaggtcaggagatcgagaccatcctggccaacttggtgaaaccccgtctctactaaaatacaaaaaattacccaggtgtggtggcacacccctgtagtcccagctactcgggaggttgactcaggagaatcgcttgaacccgggaggcggaggttgcagtaagccgagatctcgccactgcactccagcctgggcgacagagcaagactccatcttgaaacaaacaaacaataaaaaccaagaacaacaaaaaaatctcttttctttcattatctttaaatggtaatgatatcagttgttgtgaagattaaatatcagatgtttagaaaagtaccttgcattgggccgggtgtgggggctcacatctgtaatcccagcactttgggatgccaaggcgggcggatcacgaggtcaggagatcgagagcatcctggctaatgtggtcaaaccccctctctactaaaaatacaaaaaaaaaaaattagccgggcgtggtggtgggcgcctgacagctactcgggaggctgaggcaggagaatggtgtgaacccgggaggcagagcttgtagtaagccgaggtcgcaccactg

SEQ ID NO: 16037 - DNA, 1100 bp, Homo sapiens
cctctgactctttttttattttcagaaaaaaacacctaaatcaggaaccgtgccctctcaaacacatcttttttgtggccattgtcagtatctagaataatgactatagaacttttcttatgattagtttgactcagaataacattcagttcatatggaaacctacaatgttacagggtcttagagatcatctgaactttttttcccccacagatgagagaacagactcacagaaattctcatttttggccaggtgcggtgtcttaggcctgtaatcccaacactttgggaggttgaggcgggcggatcacgaggtcaggagatcgagaccatcctaacccagtgaaaccccttttctactaaaaatacaaaaaattagccaggcgtggtggcgcacgcctgtagtcccagctactcaggaggctgaggcaggagaatcgcttgaacccaggaggtggaggttgcagtgagccgagattgtgccactgcctgggcaacagagcaagactccgtctcaaaaaaaaaaaattattttcataaaatagtacctcacatgtatgtagaacttcctggtttctagtgtgcgctaaaacttgtcttattctctctccttttagtctcacactaccctggtaggtggtcaaggcagtgttattattcctactttacagataaggagatactctctggttagaggcttgggctctatcccatttctttagaccctaatcccagtgtagtttgtcactagcccagctgttatttttttttttttttttgagacggagtctccctctgtcacccaggctggggtgcaatggcacgatcttggcttactgcaacctccacctcccaggttcaagcaattctcctcccttggcctcctgagtaactgggattataggcgcccaccaccaggcctggctaatttttgtatttttagtagagtcagggtttcaccatgttggccaggctggtcttgaactcctgacctcaagtgatccacctgcctcagtctcacagaatgttgggattacaggcatgagccaccacgcccagccccagctgttattcttgaaccttacttactgaaaggtatt

SEQ ID NO: 16038 - DNA, 1062 bp, Homo sapiens
aatggcgcgttcttggctcactgcaacctctgtgtcccggggttcaagagattattctgcctcaagcagctgggattacagatgctcaccagcacacttagctaattttttatatttttagtagagatggggtttcaccatgttggccaggctggtcttgaactcctgacctcaggtgatccacctgccttgtcctcccagagtgctgggattacaggtgtgagccgccacacccggccataaaaaaattttttttttaatgccagctaataaataaaaaagaaattatagggttagaagaatcaccacttttcaatcatagtgataaagttgatttactcaagaatcctcaatgattgttaaaaccactgggtgagagtttgttggaaaacaaaattatatagtcttaaaccttctgcctatacatactattacacaaagaggaaaaggtgcctttacaaagggaaaatctgggagacaccacctttaccaagtaatccaaattaaaataatgggacaaacagatgttagggcttcctgatgtgatacattgaaaaggacacaatcacttatggagtattcttgccaaaaattcataacctgaattgtttcttaacaaatcaaccaaaccaaatgaagtggacatttgataactgttgctatttcaacttaaattaactaaaaagtcatgtttaaaatttagtttttcagttgcactagccacatttgagtttgtgaatacccatatgtggtggctgctgttcagatagacaaaattttcatcaccacctcacagaattctactagacaattttttggggcttatactcttcaaaaattcagtgcaccaacaagtggataaagaaaatgtgtatgtatgccagccgggcatggtggctcacacctgtaatcccagcactttgggaggccaaggcaggcggatcacaaggtcaggagtttgagaccatcctggccaacatggtgaaaccccgtctctactaaaaatacaaaaattagctcagcatggtggtgcctacctgtaatccctaatactctggaggc

SEQ ID NO: 16039 - DNA, 1216 bp, Homo sapiens
aaaagatttaggttgcaaatgtttcaagcatgtgcagttttgtgtgtgtgtatacatatatatggtcagcatatatattgtgcagctagggcgaagccagcagaggtgtgtgtatgtctttatgaaatgtttgaaaagagataaactgactgcttgataatcactctcaggtgtaaagctccaagtgtaaataaaagtggcatttaacaaatctttcagaacaaagtacagctgactatatataccaagagctaagctaaaggaacagctgagagctccgatctccacgagagactaatctaaaagctctgctttgtacttcctcaccctgctttcgtacaaggaagggggacgatgggaaatcatggacttgtaagttgtatttaaacataaaaatgaacttggtaacttctgggtttagtagagcctcagtgtcgctttaacttagtttactttttttttatttttaaagcagcaatggatggttttaaaggagtattatgattgtaaaattgctaaatatgactgtaacacagctttgtggtagctgtgacacagttcacttgggcaaaggagtggtgatggactcgttaaaatcatatatacttgaatagtccattgaccgaaactctttatagactattgtgtaaatgtggaatcacagactgttaacattgcctggacttcagcagagtcctggagctgctgggacctctcctatcatgatgaacttggacttttttttttgatttctggttttaaaaaacataaaattatagaatccagataattcgctggagtcattctgatccaccatgtagatctgtatttagtatcatttggatttggagaagtgttgattacattatggctgtgtaataaaatttttattaaaactgcatcacactgtagccactttgccaccacctccccacatgtagccgctgaaacccccacgagatgccaatgcacacagcagggagaaaagccaaccaaagaagaccgaagggtatctttccacccgagtagcctctgtagtgattgggaccaagactaaggacttgtctccaatctcagctgaggcagtgcctctgaaccaagatcttggtcaggcattaagacactggctttgtcctaccaactaggatttcttggtggttcacactatttcttgtgctggggaattccctcattgggcccctcctccctccacagt

SEQ ID NO: 16040 - DNA, 1029 bp, Homo sapiens
cccggcagcgggctcttcgcacctgcagcagccgcgccgcctttccacctcgtcggtctcctccactggctcctcgtcgctgctcgaggactcggaggacgacctgctgagcgacagtgagagccggagccgcggcaacgtgcagctggaagcgggcgaggacgtgggtcaggtacgggccgcgggggcggggccagcgccgggcgcgggggctgcacgggggacctggctgggtgctcccggaggacccgctcctgtccatgctccctccagcggaaggtcctgttctcgcggtttaggaggaatctgggggtcagagggaggcgcctggccgacctctcgcctgggcaactttcacctcggctccgccggcgggtcgtggcgctggccctggggcgtctaagaagcggggcgaggagcaggcgacccgccgcggggactgggcgaagcgggggtagcggaccttgttggctgtgggttaggacaggagggatcggaggggctgagccttgccgggtgaaccctcggaaggagagaggcgaaggagagtttcccttaccccccgccccctctccggtgccgcggccgcacccccgccgttgccacggtttccctctcctgagtgggagtggagcggcgctccaggctctgctcgggagccgctgccgtctgctcccagcgcccgcacgaggcgtggacgcaggggagggaggggcgtgggcctgggagctctggctgggagcggaacgcagcccacccagtgcgcgccctgcctcccatcttcccggctcgccgctcctgagcgcggcagagaggggcggtaaactgaggctgcaagggggcaggatcactctgctagtctctgcctctgatagcctgggtgttctgggaccaggtctgaccctcggaaaacacagccctgggcactgttaagtcattcctgacgcccgccacttagggatgtgcggctcccgggacaccctccttgttcccctcgttttaaccaaggccaaataccttgaataactg

SEQ ID NO: 16041 - DNA, 1025 bp, Homo sapiens
ttgtctatcagtctcttttctccagtttgtaaggagaaccaggaaccccaagagcagaaggcacagtgctgagtaacagtgtgggaggtttccctgccatcttcccacccgtcattccttttctttttttaatttgtatttattttattttatttgttctaccctagtgaatacaacctttgtcctggagaccccagctagtctaagaaaacttcctaggctgagctctcttgggaatctaagataaagaactgagatcctgggaagaagggaactgcctcctcttctttctgcaagcccaaagccctcgggactgggcaggcaatgataccacccactttgctacagtgataacagaccctgtgacaagataatgggaagtgtcactgacattagctgggcatttaggcattctttcaggtaatcttcctctgaccttatgaggaaaagactattatttatccccactttgtagatgagaaaataggattagagagattaagtaacatggccaacgtcacagagctagtaagtgaataagttggaatttgaacctagatccctgtagttttagaatatatactcttaactctttatgacaacaactgtgatttgtctgttctagtcttacactcccactccatccaagccaagggctccctaggccttcagacaaccttttgtgagtattttttgttttgttttttgagacagggtctcgctttgtcacccaggctggagtgcagtggcgtgatctctgcttactgcagcctcaacctcctgggctcaagtgatcctccctccccagccttccaagtagctgggactacaggcacgtgccaccacactcggctaatttttgtatttttgtagagacagggctccgccatatttgtcaagctggtcttgcgctcctgggctcaagggatccatctgccttggcctcccaaaatgctgggattacaggtgtgagccaccacgcccagcccagaggacctttcatgagccccagggggagtgggagc

SEQ ID NO: 16042 - DNA, 1020 bp, Homo sapiens
taaataaataaaaataaaaataaataaatacggtgcctttatagaggggggtactttgtacctggtaaacatgatatagatctctattaatgacttggaaagcatgtgataagtgaacaaagcagattacaaaattatgtgatcacatttttgtagaaatatacctgtatatatccctttatagtacttctcccttatccatggtttcagtttcagttatctgctgtcaactgtggtctgaaaatattttgagagatcacatttacataacttttattatagtatattgtaatattttattagtttttaatctctcactgtgcctaatttataaattaaactttattataggtaagtatgtaagtataggaaaaaacactgtgtatagggttcaatactttcctaggttttagacatacactgggggatcttggaatgtatcctgtggggataagaggagaattactgtatatagaagtctaaaaagataaatatcaaacgtaagctaatggtgacatttttaagcagtaggattttggatgaattggattagaaaaaactattttcctcttttttttttttttttgacaagtggtctttccatgttgcacaggctggtctcaaactactgggctcaagggatcttcttgtcttagcctcccaagtagctgtgactgcagctgcacacttgactctaaaaaaacttttttttttaaaatttttttagacggagttttactcttgttgcccaggctagagtgcaatggtgctatctcacctcactgcaatctctgcctcccgggttcaagtgattctcctgcctcagcctcctgagtagctaggattacaggcatgcgccatcacgcccggctaatttttgtatttttagtagaaacggactttctccacattggtcaggctggtcttgaactcccgacctcaggagatccacccgccttggcttcccaaagtgctgggattacaggcgtgagccactgtgcccggcctaaaaaaactatt

SEQ ID NO: 16043 - DNA, 1060 bp, Homo sapiens
gtgtttttttttttttttgaaacgaagtttcgctcttgttgcccaggctggagtgcaatggcgtgatctcggctcactgcaacttccacctcccgggttcaagcttttctcctgcctcagccccccaagtagctgggattacaggtgcccgccactactcccagctaattttattattattattattattattttagacagagtcttcctctgttgccaggatggagtgcagtggtgcgatctcagctcactgcaacctccgcctcccaggttcaagcgattctcctgtctcagcctcccaagtagctggggctacaggcgcatgccacctcacccagctaatttttgtatttttagtattgacggggttttaccaggatggtcttgatctcttgaccttgtgattccccctgccttagcctcccaaagtgctgggattacaggcatgagccactgtacccggccatttttttgtatttttagtagagatggggtttcaccgtgttggccaggctggtctcgaacttctaacctcaggtgatctgcttgcctcagcctcccaaagtgctgggattacaggcgtgagccaccatgcctggccttttttttttttttttcttttgagactgggtctttgctctgttgcccaggctgcagtgcagtggcatggtcagggctcactgtagcctcatcctcccaggctcaagtgatctcttacctcagccttccaattataggcatgtgtcaccacacttagctaattattttttattttttttttagaaacagggtcttgctgtgttgctggggttggtcttgaattgagctcaagccatcttcctgccttggcctctcaaagtgctgggattacaggtgtgagccatggtgcctggctcttttttttttttttaatttattttattttattttattttttatttttattttttgagacggagtctcacgctgtggcccaggctgtagtgcagtggcgtgaccttggctcactgcaacctccgcctcccgggttcatgtgattctcctgtctcagcctcctgag

SEQ ID NO: 16044 - DNA, 1217 bp, Homo sapiens
ctcacttgattaaagggtgttttttgtttttggtttttttttgcttgtttcttaggatgggaaggccattgtgactatgtggtgattacagttgtcttactactgagtttcctactgaaatcatggaggagaaacagcagattatattggctaatcaagatggtggaacagtggcaggagcagcacctaccttctttgtcatcttaaagcagccaggaaatggcaaaactgatcaaggaattttggttactaatcaggatgcctgtgctttggctagtagtgtgtcatcaccagtaaaatctaaagggaagatttgccttccagctgattgtactgtgggtggaatcactgttaccctcgataacaatagtatgtggaatgagttctatcatcgaagcacagagatgattctgaccaagcaaggaagacgcatgtttccttactgtcgttattggataacaggtttagattcaaatttgaagtatattcttgtcatggatatatctcctgtggataaccatcgttataagtggaatggtcgttggtgggaacctagtgggaaggctgaacctcatgttttggggagggttttcattcatccagaatctccttccacaggtcattattggatgcatcaaccagtatctttctataaactcaaacttaccaacaatacactggaccaagaagggcatatcatcttgcactctatgcatcgttacctgccgaggcttcatttggtgcctgcagaaaaggctgtggaggtgatacaattaaatggccctggtgtccacacttttaccttcccacagactgaattctttgcagtaacagcttatcagaacattcagattactcagctgaaaatagattacaatccatttgccaaaggctttcgggatgatgggctgaataataagccccagagagatggaaaacaaaagaacagctctgaccaagaagggaataatatttccagttcttctggtcatcgggtccgtcttacagaaggtcaggggtcagagatacaaccaggtgatttggatcctttgtcaaggggtcatgaaacatcaggcaagggtttggagaagacttcccttaatataaaacgagactttcttggtttcatggatactgattcagcacttagtgaagttcctcaattgaagcaagagatttctgaatggtaagtagtagtttttctgttcttagaaata

SEQ ID NO: 16045 - DNA, 1059 bp, Homo sapiens
tctgttcgcctatatgtttatgtttatctttatgccagtgtcacattattttgattactagacattttcaaattgggcagtgtgagaccaccaactttgttcttatttttcaaaattgtttttgctatttaaagccccttgagattccattttcttttctttttcttttttgagactgagtcttgctctgtttcccaggctggaatgcagtggtgtgatctcggctcgctgcaacctccgcctcctgtgtttaagcaattctcctgtgtcagcctcctgagtagctgggactacaggtgcgcaccactgtgcccggctaattttttgtatttttagtggagatggggtttcaccatattggccaggctggtcttaaacccctgaccttgtgatccgcccgccttggcctcccaaagtgctgggattacagggattataggcatgagccaccgcgctgggccgaggtttcattttctacttctgaaaaatcccgttgggattttgataaggattttgttgaattcgttcaacactttgggttgtcttcctattcatgaacatgggatatctttccattttaatttttttcaataatgcttttatggttttcaatgtaaaagtgttttgctttcttagttaaatctattcctaagtattttattctttttgatgctattatatattgagtgatttccttttctttttatattgcccattgctgttttgtattgcatattgttcattgtgtagaaatacaattgatttttgtgtgttgagtttgtatccttcaactttgctgaattgtttattaagtgagtggcttgtgtgtgtgtgttgtgttgtgggggggactgagtgcgttttttttgtgtgtatatgtgggtttttgaaagtttctctatataagattgcaccatctattaaaagagatatctttacaaactccttgacaatttgaatatgtttttttttctttttcttgtctaattgctctaaataggactttcagtagtaggtggcaaatagtggcaaaagtgggagcattatggttgtagtttg

SEQ ID NO: 16046 - DNA, 1035 bp, Homo sapiens
atcttctttccaatctttatgcctgttctctctcttgctttattgcattgcttggactcccagtactgtgttgaaaataaattttgaggcagggtgtggtggctcacgcctttaattccagcactttgggaggccgaggtaggaggatcacttgagcccaggagcttgaaagcagccctggaaacatagtgacacccacccagctcacccccatctctataaaaacttaaaaaaataattagctgggcatggtggcacacacctgtaggcccagctacttgagaggctgaggtgggaggattgcttgagttgagcctgggaggttgaggttgcagtgagccatggttgtaccactgcatgggcaacagagtgagatgctgtcttaaaaaaaaaattttttttttgagtggtcattcatgtctcctgatcttagagaaactcattctgtattttttatagcatgttgggtgtagtttttgtgtagtgctctttatcatgttgaaatactttcctactgttacccattttcctgaatattgttaagaatgagtgttgaatttcatcaaatgatttttctaaatccattgaaataccatatgttttttctcctttattttgttaatatggtgaattaacattgatttagaggggaggggtgatcttacattcttgggctaaacattacctggccatgatgatatcatcctttttaatattactggtttcaatttgctaatattttattgaggatttttgcaccaaattcatgtgggatatttgtttatagttttatttctgatgtgttagcagtagggttatggttacctcataaaacacgttgcaaagtgttctgttttctgtatgtgctgagtttgtgcaagattgctgttttttttttcattatgtatttgatagaatttatcagtgaagccacagagttttcttgttggcagaattcaaatcatgacttcaagttctttgtttttttctatttcattgatttttctctcatcattaactcctttgttctacttg

SEQ ID NO: 16047 - DNA, 1054 bp, Homo sapiens
ttcccattttccctcaaccactccccagctccacccaatccaacacaaccacctgtctctgtctctgtagatttgcctattttggatattttatataaatggaatcatttaatatgtggtcttttgtgcctggcttgttttacttagcttgatgtttttaaggttcatccatgtgtagcatgtatctgtacttcgtttctttttattgtcaaataatattgtgtggacattaccacattttttttattcatcagttggacagtaaggtttttagtttttggctgttacgaataatgttgctgtgaacatttgtatacaagtctttgcgtgaacacagttttttggtgttgaaaagaccattctttcctctcttgaattgtcttggcaccttggcaattgaatcagttgacataaatgtgggcatttatttctggactctcaattctgttagttgatctgtatatctagtcttaatgtcaatatcacactgttgactgggcacggtggatcatgcttaaaatctcagcactttgggaggccaaggcagtaggatagcttgagcccaggagtttgagaccagcctggtcaacatggtgaaaccctgtctctactaaagagaacctgtctctacaaaaaaataaaaataatagctgagtggtgtggtggtatgtgtctgtagtcccagctactcgagaggctaaagtgggaggatcacttgtttccaggaatttgaggttgcagtgaggtatgattgcaccattgcactctagcctaggtgacacagtgggaccttgtctcaaaaccaaaccaaactaatagacacactgtcttaattactgtagctttgtactaagctgaaacctggaagtgtgagtcctctgagaactttgtttctaattttcaagattgctttgttttttttttttttttttggtggctcccttgcattttcttgtgaattttagggtcagtttgtccctttctgaaaaaaaaaatcacagatggagttttggtagatactgcattgaatttgtagatcactttagggattatt

SEQ ID NO: 16048 - DNA, 1101 bp, Homo sapiens
agtgcgatggtgtgatcttgactcactgcaacctccacctcccaggttcaagagattcttctgcctcagcctcccaaacagctgggactataggcatgtgccaccacggctggctaattttttgtatttttagtagatacagggcttcaccatgttggccaggctggtctggaactcctgacctcaggtgatccgtccgcctcggcctcccaaagtgctgggattacaggcgtgagctgccgcgcccaagccttccatggtttaaaatgaactgaaaatacttgtcttgctgttttctgtctgctacccattttcctgtagtcacaaccctgaggttcagtcaggcttaaataattgctgcagcctttttaacagcatttctgttatttctgtttctgcagttacaaaaaacattctcaagcattagtttagaactgtatacttcagagttttatagtgatttcctatagtcttatacttcaaactaaactaatccaagcattttgactgtatccctcttggtctccgttcttagtgcttttccttgttcactgcattcgtttgcaatttaaccagataaatatgccagttttccaaaatacttttctcaccttttgatcttttcacagtatttataacaatgtaattcatgtctctgtacttaatttttttgtttcttaaaaactaaattttgtggttgggcatggtggctcatgcctgtaatctaccagcactttgggaggccgaagcaagcggattgcctgagctcaggaattcgagaccagcctgggcaacatggtgaaaacccctctctacaaaaaaatgcaaaaacagccagatgtggtggcgcattcctgtagtccgagctacttgcggggctgaggtgggaggatcacttgagcccagggaggttgaggctgcagtgagccaagatcacaccactgcactccagccggagtgacagagcgagaccctgtctcaaacaaacaaacaaaaacccaagtaaattttacacgcctcttcttgtggtcttcctttttctctaatgttttgtatcacactccaggcattccagtctttctccctcgctttttaaagacg

SEQ ID NO: 16049 - DNA, 1023 bp, Homo sapiens
gcaaatgtatacaggatctcatattaggaaaaaatttcttaaacatgacagaagaaaaccaattcttagggaaaagatcaagccatttgacaactttaaaataagaaattcagaggctgggcacggtgtctcacgcctgtgattccagcactttgggaggctgaggtgggtggattacttgtggtcaggaattcgagaccagcctggccaacatggtgaaaccccatctctaccaaaaatacaaaaattagccaggtgtgatagggtgtgcctctaatcccagctactcaggaggctgaggcacaaaaatcgcttgaacctgggagatggaggttgcagtgagccgagattgtgccactgcactccagcctgggagatagaacgagactctgtctcaaaaataaataaaagcagatatttgtaatatctaaggacctatatccaaaatatataaaggtgtctacaaattaataataaacactcctgtagaaaaaatgagcaagagttttagaagcatttcataaagtggaatgttgaatggctcatttgtagttggggaaatccaaattaaatccatgatgagattctactagacacctgccagaatggttatcattacaagcctctactaataccaactattgataaagacaatgaacaatgggaaatctcctacactgctgatggggaaataaataggtgtaaccgctttggaaaatagttgggcagtatctactgaagttgaagattcatagcccttgatctagcagtttgactccagagtaacaagcagaactgtattatataagaatatttacatgattctcacagtatttaaaacctgaaaacaaccccaaatgtctaataacaatagaagaataaacagtagtatgaatattcagtgaaataacataccacagtgaaaataaatgaattacaactgtgtgtttcagcatagatgaattttacaaatataatgttgaaggggaaaaacgccaggtaaaagaatgtatctttgattcc

SEQ ID NO: 16050 - DNA, 1036 bp, Homo sapiens
tggcatcctcctctggcactgcaacaaatcgccctgggaagaatctgaaggcgtttgtcccagcaaaacggccaattggtaagttggggtgtatgtatggtttggaaaggcctatgacttggtggtgggacagtgggtacaggtatggaggttgtaaaaattagagaaatatgtactttggcattattcttattcttgttgtctgtcttgcctggacttttttgattgtttggggttaacgtctgataacctgcaatattagatgaattgagttgttttatagttaatttcttggttttatatatattttttattttttaataacactgacttgaaggcaagttttatagttatttttaaggttttcagactggttgttattaatgtagaaaagacttaaggattttaattttgtttctaaaaagggaagacatttaaaaatagtttactattatactaaattatttactaaaatattttactaaattaaaaatagtttactattttcctgtgaggactggtgtttctggcctcttgttgaactcttgctggtgctatgtaaatgcttctgttgatacttcttaaacttatgaaaccaaggagctagcaaaagctagtggtgtaagtagtataggcttaaagtggaaagctcctataaatacaattttgaaagtgttgatttattccattcatctctgttctatgaatgaaaatctctcttttccttaacatttaaatgctgaagtctgtaataaattaccttcttgaaacatttgtgttttagcattgagagtatctatagttggtttattgaattcctctttttgttgtttcaaatctgttaggaatgttaggtaagagtgtcagttgaaatctctggctgaatggttagagttgtgtgaagatagaagatatttattgtttgccttaaaacctattttggccgggcgcggtggctcactcctgtaattccagcactttgggaggccgaggcgggtggatcacgaggtcaagagatagagaccatcctggccaa

SEQ ID NO: 16051 - DNA, 1051 bp, Homo sapiens
gaggcaggagaattgcttgaacctgggagacagaggttgcagtgagccgagatcgcgccattgcactctagcctgggcaacaagaaagaaactccatcttaaaaaagaaaaaaaagaaattggcacaaataatacaggtaggtagtacctgtaagaaattgacccagtagtgcacagtaaatgtcggtaagcacagtcactaagaggataaaatatgagaactgaagatttttgacctgcaaatttctgtttgcagcggctcgaccctctcctggtggtgtgttcacacagtttgtgatgagtaaagttggagccttgcagcagaagatacctggagttagcacaccccaaaccctggcagggacacagaagttcagtatcagaccttctccagtaatggtcgtcacacctgtggtttcttctgagccagttcaggtgtgcagccctgtgactgctgctgtcactactaccacccctcaagtgtttttagaaaatactactgctgtgacacctatgactgctatttctgacgtggaaactaaagaaactacttattcttctggtgccaccactacaggggttgttgaggtctctgaaactaataccagcacctctgtaacatctacccagtctacagccactgtgaaccttaccaaaaccactgggataactacccctgtggcttcagttgcttttcctaagtctttggtagcatctccttcaaccataactcttcctgttgcttccactgcttccacctccttagtcgtggtgactgcagctgcatcttcctccatggtgaccacaccaacttcatctctgggctctgttcctattatactctcaggaattaatgggagtccaccagtgagccagagaccaggtaaggcctagatgttactagctgctttattttactgtacacctatttatataactttgtggttgtgttaggattatagatatatcaggataacagtataggtatttctgttgtaacatgatacatgtattcctgaaaacctctgcatgctgcaaaactgaacactaa

SEQ ID NO: 16052 - DNA, 1035 bp, Homo sapiens
tgttaattctaatgatatgttatctttctgtcttaattccttattatgactaacaatcttaggattatcagtactcatgatataacatgaatgtctggcattagttggttttataaggggaacaaacatttgaaaagtttaggtgtgcttgccactcaatacattatttacttttataatgatgtatttcagaataactgtgtagaatacattgaggatgatgaggagcacgtggacattgagactgtagaagagctctcagaggaaattaatgttgctcacctgaagaccacagcggcccacacacagtcattcaaacagccgtaagtcttatttctctttggattgttgtttttgtagttttgtaaccagaaacaaaatgagatgttctgttcaggagctctgggtaactcatctggttccttcttcctctagctttttttctgattagtatagatgaggagaggaactagaatttgggtaattaattttctttggtcgttggtaggaggcagtgtgtaaatgtgaataacatgcttttggagcccgatagactggtattataaaatattagttttgctagtttgtaggtatttaaccttgggcaaatctttaatctctctgaacctcagattctttacctatgaaatgaggaaaatgcccccatttgaagtgttaaatgaggtagtatgtgcaactagcataataactgatataagtggactactcaacaaaggttagtttcttttatcatttaagaataggcattacattctaaatttggttactttactagttgaacaggtgagatacaggtaggaaaatttttcttcctgtttcactggtgagatgaaaatatgaaaggaatgatgacttgctcaggaaaatttatttcattttctgttttagtaagccttatattgattatggattgggctgtgagaaagagtagagaaggaagatattttgtgccagacattgtacttttcctgtcatctcattaactacgatgatatgaaagtagctatgagttga

SEQ ID NO: 16053 - DNA, 1482 bp, Homo sapiens
tcagtaaaattttcttttttcatatcctaagtagctcccattccctcaccttttcaatcagaattaacaaattcaagccttcagtaaagtagggatgcttttaacttttattattaattattttgagatcttaaaaaaatagtagttctcccttattatttttgtgggcattgaaaagctcatttcacagtaccagagatttttactgggagtatatattttggaggtaggcatagagggagccctaccccttccacaaattacgttactcaagagacagctaaaataaaatgcattatctccccagaccagagacagtggccaaaataaaaaatcatggggctggaaatttcccaaatcaaaccagcctcctggtgcttgaaggtttcattcactattacctgcacaggatgtaaagaaaagtcacagtaggcactctttaccagggaaataaggcagtatttgaatcacaagatatattttttatctgcaaccatggatccaatgatctgtagagctttttcactcattaactgtcaggatatgaaggactgacagtctgtaaagatatttatatttttgtatagttgttttcatagatttctcaaaggctgaagttttcaacctagaagatgagatttgtattgagtatagaaatgatgtttcctatctagtttgtaaataatcatggtgcacttgaggggtctcttggaaactcctagggggtcaagaatcactattctgaaactgtatagactgggatttagctgctgcattttgcctttcttaaataattatattttggaatgtaacccctgttctgtcttcattgacaggatttgcttgtgttgttaaaacactaacacaagagcttccagtgcctgggccgtgcctaggtgatgctatttcttctatatctcctgtcttctttatcccaaatcccactcagcatatcttcagacctaggttgtaagaccaactttggattggatctagccagtgaattattatttccatggttggttccctttctgttaactctggtaatcaacagattgaaaacggtggaagaacttctgaaaattgcagtgggagcaaattcttgttggttttgtgctgcttgcctttctagatctgctcatcagcacttaaccttccctcctctaaaggttactaaagaagcctgaagtaggtaaagagtgctcctcagcttcttatccttccactctttacccagcagatttcattcaatgccttagccaaggagtccagcacctgtctcccctgctaataattgtccttagagatgctagtactttaatccaggtatagcagtttcccgttattttcttgcttgtcgttcccctacatttcctcctgatttcccaagactctctttgtggcttttgagggtcagccaaggagcaggcaagtgagtgaacaatcctcaggaaaagaaggaccattttagcttaacacttc

SEQ ID NO: 16054 - DNA, 1705 bp, Homo sapiens
aaaagggttaaggagtttgcttgaggtaacatagctagtgtgtgtaatggggttctaacccaagtagtatgactgtagagctctgattgttaaaatggcacagagtagggggagaccacactgtttttttttgagacagagtttcattcttcttgcccaggctggagtgcaatggcacgatctcagctcaccgcaacctccgcctcctgggttcaagcaattctcctgcctcagcctccagagtagctgggattacaggcatgcgccatcatgcccagctaattttgtatttttagtagagatggggtttctccatgttggtcaggctggtctcaaactcccgaccttaggtgatctgcccacattggcctcccaaagtgctgggattacaggtgtgagccactgtgcccggccactttctgcttatttttaacaaattgcttttcctctaagctgcctacctgccctttgaatgagaagagccccatttatgggcagctcagtctgtgcaagggagacttctgcccctgggtttggggtcagtgtctctcccaagtggtcctctggtgtttaatggctgcagtaagggtgctgtgggagccacacgggctctgcctggcaaaggctgggctaggctccattttcccctagagaagcaagctgatggaaagacctctctactggataagtttgtgcagcctgcctcaggggaattccacttgttcttgcctctgcctgggaaagccaggttccctcttgttggaggtggggctggggctggatgtagcacaggcaaaaaaggccttggggtgctgcttggtgcatgctgagacctgtgtccctgccctggagagtgtggagtcctgcccgctttcttcctcacacacccctggactccaggcctggcctttaagggcatgtgcttatgcatgtttatgagcaggtctcagcccagtgcatgtgcctgggagtcatgatccttccagatggtgtacaggctttcctgatggaacctctagtaggtttcctaagcgtgtatgcttggcttaggccatccctgggcagtgcccctaatctgttccctgaccttttgatttcttagaacttgaagttgtctgtgcaaatggcttcttttctgggtgtttgagttttgctgtgttctagaactccctgatgtgctgctgtgatgttgggggccaccagattctgtgtgagcacaagcaggttcttcacctccctccttgtctccctgcttttcttatctgatcatccttacactgcccccagcccccacgctcttgttcctcctgtgcctgttgctttgggagccagctcaggtatcctagaaacaaggagagaaacaaaactcagaaaattctctgaggcccggaggcgaatatcaaaccaaaacaaagttttctgaaaggaaatggaacagcacaggaaaggagggtgggcagtgtgtcaggcagaggtgggtaggagctccaggctgagcatggagcctgtcctagtggctcctacatcccttggccgttgtttccccacgggaagcccccctactagaggatgccagacagcccctttgagagacttaattgagttgaacacccttaattgagttgggccttttcctcagccagctggtggaaggttgatgggccttcaagcccagcacagcccctgtgcccctgtgcccctgtgc

SEQ ID NO: 16055 - DNA, 1020 bp, Homo sapiens
catgacatgatcgtcaacgtgtgggcctggaaggtgagtggctgggtggggtggcctggcagcctcacaggggtcaagtgtcagctggggaggcaagagactgctgacctgcactgctccattccaccccactgaaccattctcattctagaaagttatttgaagcagaaaagagcaactgtgtggccaagcatgttggttgaaggggctagctttatgccttcaaagacttctgcaggaaacgaatcttttcagctcctctagaaagggattatttccctacccctctttttctggccagtaaattctggaaagaaacactttgtcaagtacaaattctaattctcctccattctctgagtcactgtcttcttagctccaagagacagagccttgattcttcctttggcatcccctccagaaaaacattgtggtggcctccaacaaggtgtccagtcgggtgacagcagtgtccttctctgaggattgcagctactttgtcactgcaggcaaccgacacatcaaattctggtatctcgatgacagcaagacctcaaaggtgaggtgctgaagctgggagtagccaccaaggcccctggcagggcctgcccagcccaacccaggagactctgccccacttgggcctctctctgcattcccagcagtcatgcagaagttttggatgagccagatgctgtctgggctgaggagtaggcccaaagagcaaggaggtgctggaggcgtcccctgtactctcctagggcccagtttccaggggcaggctctggggtggatgggggtgtaacagtggtgtgcctccacaggtgaatgccactgtgcccttgctgggccgctcagggctgctgggagagctacggaacaacctattcactgatgtggcctgtggcagaggaaaaaaggcggacagtaccttctgcatcacgtcctcagggctgctgtgcgagttcagtgatcgaaggcttttggacaagtgggtggagctgagggtaagtacctccg

SEQ ID NO: 16056 - DNA, 1140 bp, Homo sapiens
cttaccactgaacagcaacacaggctcatgtgtatgtgatgggtatgtaatatacagtggtacgcaatgtaaatgaagcaaggtttcctcccagccccagtttgcattcttacagaaagattgtttatatccgtgcacacacgactttttaccctttttttgtacaaatagtagcctgctaaacacactcttctgcaccgtgtatcttggagatcatttcacattcctctacctcagtctttttcacgtctgtgtgctagtgctgtattcacttagtcatttaggtcatgtccaatccgttgttttcaataatgctgcaacgaatactttgaggattgatttaacaaatacttattcagcatctctgtgtgccaggctctgttcagtgtgtttgagatacatcactgaacaaaacaaatctgtcttttacagtctatgtcctgttacattctaagtgagaacgtggacaatcaaccacaggtgtactgaatgagtacattgtagagtagaagaagtaggttagaaggtaagtgcaggcaaagccctctttgggagtatgcctgatgtgtttaggaaacagtgaagaagccagtctgcaggagcagcgtcttctgcgcatgtgtgagtatgtttgttggttaaatactttatattttttgagacagggtcttactctgtcacacaggctggagtgcagtggcacgatcatagctcgctgcacctcgacctcccaggttcaagagatcctcctgcttcagcacctgggagtagctgagactacaggcatgcgccaccacgcctggctaatttttttgaattttagtagagacaaggctggtctcagattcctcaaacaatccttccacctcagcattccaaagttttggaacgccatggaacacataagccactgctcccggccttgttaaattcttagcagagttatggggtcaaagcaattgtttggatcccttttgaaattttctcacttggaagccccaggagaggaaagcagccattctctaaaggaaatggtgagcaagtaaaacaaatccctaattgcagaagtccaaagggtgaaaaaatggcagtttccatgtattttcagaatcccaggctgtgtgcagtactcacgcctgt

SEQ ID NO: 16057 - DNA, 1140 bp, Homo sapiens; identical to SEQ ID NO: 16056

SEQ ID NO: 16058 - DNA, 1140 bp, Homo sapiens; identical to SEQ ID NO: 16056

SEQ ID NO: 16059 - DNA, 1140 bp, Homo sapiens; identical to SEQ ID NO: 16056

SEQ ID NO: 16060 - DNA, 1031 bp, Homo sapiens
ccaggcacggtggcccatgcctgtaatcctgcactttgggaggctgaggtgggtggatcacttgaggtcaggagtttgagaccagcctgaccaacatggcgaaaacctgtctctactaaaaatacaaaaattggccaggcatggtggtgggctgtaatccagctactcgggaggctgaggcagaagaatcgattgaacccacaaggcgaggtggaggttgcagtgagccaagatcatgccactgcactccagcctgggtgacaaagcaagactccgtctcaaaaaaaaaaaaaaaaaagaacatgctactggaataaggatagacatacagaccagtgaaatagaattgagaatctagaagtaaacccatacgcttatggccacccaaaacactgggattacaggcacaagccacagtgctttgtccatgtcaccattataatttcaataaaggttcatgaccattcgatgaagaagaaatagtctcttgagcatatggtgtgagacagttggatatctacttgcaaaagaatgaagttggactcctatattcaaaaatatgttatatgtgtatcatatacaaaaaaataaaatggttcaactatataagagctaaaaccataagactctcagaagaaaacaggtaaatcttcatgaacttggatttggcagtggattcttagatatgacaacaaaatcgtgaggaacaatgacaagaaacacatgttagaattcactaacattaaaaacttttgtgcatcaaagaacataaagtgaaaaagcaacctacagaatgggagaaaatgtttgcagattgtatatctgatatgggtctcttatccagaatacatgaagaactgtctaccactgagcaacaaaaagacaggctgagcactgggcccatatccctcatgctcgtctgccactgagggcgcatgcagcctctagaccacaaccaaacagtgacccagactgctacagccaccttctgggcaccatatcacagagcagggaccccaggctgtagggaa

SEQ ID NO: 16061 - DNA, 1023 bp, Homo sapiens
cccccccaattataacagtatctacaaagtaggtgctgttatttttcccctttcacaggtgagatagactcaaagaagtgaacttgcccaaggaacagaactaatgagtggggaaaatggaactggaaaccatgtctgtttactccaaaacctgtgtttcttgccctctttctctgatgccagccccctacacttcaaggcctgtgttgtccagacccacactcgggcctgccagtgtgtgcctggcagggatgctccatggccacaccatatccatcctacacatcccccctcagactgtgacctccatttgctctgggatccccacaagcttcagctgcttgagcaagacactgcttagaaggcagagcaagccaaggcctctggggcctgctgggagccaaagctggggagccgtttccacgggtctatctgcttgagctgtcctagatgagcagcatggaagggcagtggtgcatgagtccaggcgggctgcttttctgctccgagaggctctgcctgcccagttgttctctgcattgcagcctcaatccccacagccttgccttcccccggctttccctacaggtgcaccgcatccacagtgttggcaccatgcagcagccgctctccgtccttttcatatccttgtcacttgcacgagcatgtcttgaaaatatcccttgtttgtgtagcatcttaaatgtttttgcagtatgattttgcattcagtatctcatttgatccccacaagagccctatgaggagggaaagcagattttaccattaaaggatgagtaaactgaggccagagaggatatttttggttttttttgagacagtctcactctgtcacccagcctggagtgcagtggcttgatcttggctcactgcaagctccacctcccatgttcacaccattttcctgcctcagcctcccaagtagctgggactacaggcacccaccaccacacccagctaatttttttgtatctttagtagagatggggtttcacccagtta

SEQ ID NO: 16062 - DNA, 1063 bp, Homo sapiens
cctttagttggaatggtcaggcctgggatggtggagggggctcttgcaggtggggactggggtggcggggaggaggctgtatggccgccatatctcctttggctgggggcgtcagggctggagaggtgtgaagagtccctgaggcctcgatgcatctcactccagctcaccaggtctgcatttgcccgtccccagctcctgctgccacctccggccgttttaggcacttggctcccttggcccagaggagcttgcctcacaggcctgtgcacctctgacccctgtgaaccagttttcctttgtgcctccacagccacagcctggcagctctgatcaggaaagtgaggaacagcaacaattccggaacattttcaagcagatagcaggagatgtgagtacctccaagcccaggacgcccacaggtgcttccttctctcctggattaactgctcagattaccaattatttcattattgtttggtagaggtcactttggactttggtggagccaggggatgtgtgcgtagcacacaaatccacaagcccttgagttttggactgccacgtctgctggggggctcagaggcctttttgctctgagctgcccacggtggtcctgatagctgaggtgcagtatctggccccctgtcttcctcagaaaagccccagcttcccatgacataatagcaccgacagggattttacaaacacagccaggtggaatttgttttgcaaagtgtccgcgccaggagctgctgtactcctgaaccatgaccctcctctcccttcctcctcaggacatggagatctgtgcagatgagctcaagaaggtccttaacacagtcgtgaacaaacgtgagttgctcaaaccaaatgggggtggggtgggtggggagtcccgttgtctcaaagcagctcctcactcttctccatccccccagacaaggacctgaagacacacgggttcacactggagtcctgccgtagcatgattgcgctcatggatgtatccttcctgccgccccttcccgaccctctgtcatcagcccacgggggccaaggc

SEQ ID NO: 16063 - DNA, 1043 bp, Homo sapiens
ttttaggaaagaatatcatcacccaaaattctgaggaaaaatgaaatgtgctctggtttaaatagttttcttatttttctttttatctagattctcagatgttggttgtttctatgaaaccaggcaggaaattgaatgcattatgtttttaaaactttaaacctgcttctgttctgtttgactggcatttactattttctgcatttcattctctcacctaatctcttcctttctaatctgcttactaaaaatgaagatttaacatcagaagccgggctcagtaactgatcaaagggaactttaagatgcagtcttgtggcgcagtttgggctgctaacctgctatctaaaggtgatgcttcaaatggcttttctgtgcatgtgcatggattttgtgaatggtgaaaactgtctctaaactgtgtggtggtgtgtagtgtaaagtgaatttgttcttgatgggtgctatctcacaaaagatggacttgacaaaaggaccttaatttataataccatcctttgacaaatgtctctgataactaagtttttgctaaataacatttaagattaccaaaataacaatactcctggagtttcttaagaaatttaaaataggttgatctttgagacagctgctgcagtctagttctgataaaaggtaagggaagtcatgctaaatgcttctctgtcttcatagactttgattttagcatcctgtcttccattaagtttccctacttttttctggttcttgagtcaagatttcctctattaaagttttgcttctaatgattaggattacccatgatttaggccactaccaaattaaggaatcaattgccagtctagtcgtctcaaatcctatttggaacaaggtgggatataaaattttaaatgctaccatatctggtatcttctttccttaaataagggtttcccctctacatatgttataaactattctataattcctgttacatcatgtgttaacttgctgtgatttcatgttgaattaatacaaaactaactaatattaatttttca

SEQ ID NO: 16064 - DNA, 1076 bp, Homo sapiens
cctgttccacaatccgaaattctaataaaagccccacttctgttacttctgttaatatttgtggttattaactttctgataaactaatatattgcttttgttttatttactagcacttactctgctctagaattttgcctgggacctttcttattattaacaaagaatacatgtgaatatttattttaaaaatatatatcctaccttgttccaagaaaaatttaacatggcttcttaataaataaatgggttaattaataaaaacagcatagaaacataattatgataacttaaagtggtaccatgaaacacacttggagaactagctcttcagtgttcataaatttgcctttgcaatgcctctcacaaaaaaaaattagtagtatcctttctgtaatgttaatgataaagtctaagattcaattctaggtttgccgaaaatgaatcctcacatgcctattaaggaagaagtcacttttttcataaaatctcttccctacctttttaatttttgcaattttaaaacttccttattaatgtaaaatgtagaataaatcagagatcaatatttgagcaacatactatttcgtttttgtttatagaaaagtgaaaactaaaattgaatgaaagcttgactttagccaaataatcaagaaaagttttgtgtcacttttccgtaacagccatttttttttccctgtaatagccactttttctttctttttaagacacttagacttatgatttttttttttttttgagatggagtgtctcgctctgttgcccaggctggagtgcagtggtgtgatcttggctccttgcaacctccgcctcctgggttcaagcgattctcctgcctcagcctccccagtagctgggattataggcacgtggtgccacacccagctaatttttgtatttttagtagagatggggtttcaccatgttgcccaggctggtcttgaactcctgacctcaggtgatccacccaccttggcctcccaaagtgctgggattaccggtgtgagctactgtgcccggccttgatcgtttttttaaagaggaaactcttaaat

SEQ ID NO: 16065 - DNA, 1024 bp, Homo sapiens
ccctggctgatcttaaactcctgagctcaagcgatccacccgccttggcctcccaaagtgctgggagtacaggcgtgagccactgcacccagcatcagccttcttattctgtcatcccttgtcaacctctgagatgccttcaaggaacctcttaaggtatcccagaacaccttttctaagggacctttttttaagtaatgtgcattaacctcttttctagatagtgctggatacactaggaagagaaaagcaaaacgatagtgccagaggctaagggaacctgaaaaatcaaatagttgccttttgctacttgctaacagcctagtgaagatttggtagaagtagtatttggacctttttaaaattttttttagtgtcaatgggtttacataattcatctatttcctattccatattgccatggagcatagtgtagatcatctagacttagctgtatgcagcttttctactagagttattagtgtcatcctcaaggtaacaggcactaataattagaactctccgtcttcttttttttggtatctccctacactcctgactcttatatagaacaaagaactttgagtctggcaaggcttataagacaacatggggagatggtggagaaaactcaccttgcaatgtagtatctaaacagccaggcccggtgacaaatggtcagcttcagcaaccaacaacgggagcagccagtggtggatacattaaacggtatgccaactcctcctgatattcctgtacctttcttaatgaatggttcacttaggagatgagtttagcagtacatgacccctaataaaacaaataaaaattgtatttattccatttttaaaatgcatttaaaaatctgcccactgacaaaatgtgggttttttttatttgttgttttgttttgagacagagtcttgctgtgttgcccaggctggagtgcagtggcgtgatctcagctcactgcaacctctgcctcccaggttcaagttattctcctgcctcagccttccgagta

SEQ ID NO: 16066 - DNA, 1119 bp, Homo sapiens
tgagggagctatttacagacttgtaggttggttttactttaagcaaactttatacataaaaacttttgtctctttttttttgttttttttgtttttttccctgagacagagtctcactctgttgcccaggctggagtacagtggcacaatcttggctcactgcaacctccgcctccttggttcaagcaattctcctgcctcagcttcctgagtacctgagattacaggcgcgcaccaccacgcccggctaatttttttaatttttagtagagatggggtttcaccatattggtcaggctggtctcgaactcctgacctcaaatgatccacccgcctcggcctcccaaagtgccgggattacaggcatgagccactacacccagccaaaaaccttttcctattagaaggatttagcattgattctttcaaaatgatttgtcacgtcatcccttcaaacagcccatccctttaatgcacatcattttttgtgcattaaaaattaagactattgagttcctgctggcaaggattttttaaaaattgagtgattcctaaaattgtgatttgatacaactcttctagaaaacatagcttgtttgaagttttgtttcaatctgttagagagtgatttggtgaaagaaaggtagggctatctgtaggataatggggtattgctttagtttattcccctagggactgctttagtggccttacattctagatatttttccagcaagtgtgagtgagtcatggagtcttgaccaaagcttgatcattgcttattggcaattaataagatcagggtctggatctaccaaaaaacccacagaatctactaattctgttttcttaacttgtgtcctactctcctctatacctcttctcccatttgagagcctctgctcttaaattctctgctatactacctcccttttaatgtccctcagctagaattcagtatgaaaaggaagggataggaaaaagaagaaagagtgcccaccaattacaagtttatacatacatatatggtatataatgttaccaggattttttttttttttttttgagatggagtttcgctcttactgcccagggtggagtgcaatggcacgatctcag

SEQ ID NO: 16067 - DNA, 1078 bp, Homo sapiens
gctctttctgagattacagaaaagttgcatttgtgtctcaagtgcctatttattcagtaggactagagttgacgctcaattttttttttttttttcttttggagatggagtctcactctgtcacccaggctggagtgcaatggcgcgatctcagctcactgaaacctccgcctcctgggttcaagcgattctcctgccccagcctcctgagtaactgggattataggcgcctgccaccatacctagctgatttttgtatttttagtagagacggggtttcaccatgttggccaggctggtctcaaactcctgacctcacctgccatggcctcccaaagtgctgagattataggcatgagccaccacgcccagcctgaccctcaataaaatgatactgctgtataggaaatggttttgatgtcctcccctctacctcacagtttcccataatcagaaattgcatatctcattatgaaattgctgccctttgtctactccaattaaccattatgagaacacatctgatctgccaatactgtaggctctagaagactatttgccctgtcaaaacttactctttacccactgtatagctttgtttttttttttttttaaagtttttccaagaatatgtaaaatgagatttggagtttaattaaagtcagaacagggatacattaaacaaacagaagatacttttctgattatcagtttttgagactcaaagcatccccaaaacattggagatccagcttattcctgagagacatcaatcatcacaaaaggttttcactctgaactattcacatttttgtagcagaaaacagaacaaagttctgcagacatccttcctttcttctttctaaaatgtgttcacaaacagggtcttttcatagttcaaaaggaaaacaaacaggtttctttcttggccaaatggcttattactctcaccctgggatctgatttcttactaagaaagttcagggcaccaaatccaaccagaaattcccaggacaccaatggctacttaactatgaggggatggatgctttaatctttctatgaggggagtcattct

SEQ ID NO: 16068 - DNA, 1050 bp, Homo sapiens
ccccatttctgtagtcctctgtttgggggagccagtgtagctgaccaacaaaaggctccttctaaatacaacattcagaaaagggttcagagaaagttttgggaaaaaatggtttctatttctgtgctcagcagaaagcagataacggcataaatgaaaatgtcagctaattgattagcttattaaaatattttgcttaaaggcaatgtaagataattgcaaaatattcgaacagtacagaagactataatggtaaaactagaaaagccttccctttctatacctcccactcatcttattctctaaacgtaaccattgtttacaattcttttggtatccttctagatagcatctatttcttatttttcaaaggagttagcatattaaggaaattgattcatctgtcatagatactacaaacattttccctgtttatacttttgttttgattctgtttacgattgtgtgtgtgtgtatatatattttgtttgtttgagacaaggtctcgttctgtttctcagcctggagtgtagtgtcgtgatcatggctcactttagcctcaacttccccagcctaagcagtcctcttacctcagtctcccatgtagctgggaccttaagtgtgtactactactcttggataattttgtaatgccaagctggtcttgaactcctgggctccaccttggcctcccaaagtattgggattataggcataagccaccgcacctggtgcatgcatatatatgtatatttattttttttttgagatggattctcgctgtgtcacccaggctggagtgcagtggtgcggtctcagctcactgcaacctctgcctcctgtgttcaagcgattctcgtgccccagcctcccaggtagctgggattacaggtgcctgccaccatgcctggctaatttttgtttgtttgtttttttaaatagagtctcgctctgttgcccagactggagcacagtggcacgatctcggctcactgcagcctccacctcctgagttcaagcaattctccgcctcagcctcccaactagctg

SEQ ID NO: 16069 - DNA, 1087 bp, Homo sapiens
tccaggctggagtgcagtgacgcaatcttggctcgctgcaacctccgcctcccaggttcaagtgattcttctgcccaagcctcccaagtagctgggactacaggcatgcgccaccacgcccagctaatttttgtatttttcatatagacagggtttcgccatgttggccagactggtctcgaactcctgacctcaggtgattcacctgccctggcctccctaagttctgggtttacaggcatgagagaataattttcatagtgaatacacaaatactgacttgtcaataaagatgttatctgttactgcatttagtagcaatttttctaaaaaggaataaagttttctaatataattcttttattttaacaatggagttacagacccatagagataagtaatatttaaaattcatttaaacagaatacatcatagacatttaaagctattttctttttgatacagtctcattctgtcacccaggctggagtatggtggcacagtcttggcccactgcaacctctgcctcccaggttcaaacgattctcctgcctcagcctcccaagtagctgggattacagatgtgtaccaccacacccggctaatttttgtatttttagtagagatggggtttcaccatgttggccaggctagtctcatatttctgatctcaagtggtccacccacctcagccccccaaagtgctgggattacaggcatgagccaccacccccagccttaaagctattttctgtttttggagacagagtctgactctgtcgcccagactagagtgcagtggcgcgatctcggctcactgcaacctctgcctcccgggctcaagcagttctcttgtctcagccttccaagtagctgggattacagacacacgccaccactcccggctaatttttatattttagtagagatggggtttcaccatgttggccaggctggtctcgaactcctgacctcaggtgatccacccaccttggcctcccaaagtgctgggtttacaggcatgagccaccatgcctggctgctattttcttcttcctatttttttttttttttaggtagattaaga

SEQ ID NO: 16070 - DNA, 1038 bp, Homo sapiens
gaaaatagctcaaaaatacaattttaaaaatcaacatttcttctgcctcctctgggcagaaaaaacaacagaaattaaaatggtacatattaataaaaatacctaacagttaaaggcagtggaggaagaacagaggaacaaaggagatatgagacacagaaaaaagaaaaatcagacatggatggttctgagcacatcaataattattaaatacattaagtgtgaattgcctaaggtacaaattttcagattgcataaaagcaagacccaactacatgctgtctataagaaacacaccttagaatcacagacacaggttgaaagtaaaaggatggaaaaagatataccataataatagtaaccataagtcctagctagagtaatgagacaagagaaagaaataaagggcatccagatcagtaaagaggaagtcaaactgttgctgttcgctgacaacatgattgtatacctagaaaaccctaaagacttatccaaagagctcctggaactggtaaatgaattcagcgaagtttcaagatacaaaattaatgtacatgaatcagtagctgtgctatacaccagcagcagacaagctgagaatcaaatcaagaactcaacattttttacaatagctgaaaaaaaaaaatacttaggcatacacttaaccaaggaggtgaaagacctgtacaagaagaactacaaaacaccgctgaaagaaatcatatatgacacaaacaaatggaaacatatctcatgctcatggatgggtagaatcagtattgtgaaaatggccatactgcctaaagcagtctacaaattcaatgcaatccccatcaaaataccaccatcattcttcacagaactagaaaagacagtcctaaaattcatatggaaccaaaaaagagcccacatagccaaagcaagactaagcaaaaagaacaaatctgggccaggcgcagtggctcatgcctgtaatcccagcactttgggaggccgaggcaggcggatcacttgaggtcaggagtttgagaccagcct

SEQ ID NO: 16071 - DNA, 1031 bp, Homo sapiens
tcaaactatactataaggccaatagttaccaaaacagcatggtactgggacaaaaacaggcatatagaccaatggaacagaatagaaaatgcagaaataaagccaaatacttgcagtcaaccgatctttgacaaagcaaacaaaaacgtaaagtggggaaaggacaccctattcaacaaatggtgctgggataattggcaagccacatgtaagagaatgacactggatcctcatctcccacattatacaaaaatcaactcaagatagatgaaagacttacatataagacctgaaaccataaaaattctagaagataacattggaaaaatccttctagacattggcttaggcaaagacttcatgagcaagaatccaaaagcaaatgcaacaaaaacaaagagaaatagatgggacttaaataaaacaaaaatcttctgcacagcaaaagaaataatcagcaaacagcccacagagtgggagaaaatatttgcaatctatgcatcctacgaaggactaatatccagactctacaaggaactcaaacaaatcagcaagaaaaaaacagtcccatcaaaaagtgggctaaggacatgaataaacagttctcaaaagaagatatacaaatggcaacaaacataggaaaaaaatgctcaacatcactgattatcagggaaatgcaaatcaaaatcacaatgcaataccaccttactcctgcaagaatggccataataaaaaaatccaaaaagaggctgggtcagtggctcacgcctgtaatcccagcactttgggagtctgaggcaggtggatcacctgaggtcaggtgttcaagaccagcctggcccacatggcgaaatgctgtatctactaaaaataaaaaaatttgctgttgcgctcctgtagtcccagctactcacgaggctgaagctggagaattgcttgaacctgggaggcagaggttgcagtgagccgagatcatgccactgcactccagccatctcctaaaaaaaaaaaaaaaaaaaaaaaaaaaaaaa

SEQ ID NO: 16072 - DNA, 1149 bp, Homo sapiens
atcacacgtctagaagtttctctaaaaaattcctccttcagtcatgtattctgattttttgttcagaaaatatcatccctctatactaagagatgaagtagtggagccaaaatcattccaaactcattagcattcttgcattatgcaggccagctgagctggacttgaacctgccccttgttggctgtatgatcttaggcagtgtaggagtaggtggtgaaagctggccagaggggcagctgtgccaggttggctgaactgtaagccagagtgtcctgccactcaccaatgccaggggtccctatccaacccagccctttacaggtaccctgtagtttcctggtttccaaacttcaactcaatgattattaaaataatgtttctagggtacataaagcacttgtacctaaacctggcataattttttttaactattccctttatgagagaagcacttagctaaatctaatttttttttttttttctgagcttcctcagttcttccattcccaggataagctcaatgcttaggcatcggtttccactaaaagaagaaaaagtaccctacatttatcactgtgcatgtccctaaagtggtcttagcttaaggcctctaaggctgggtacatttacttttaaaaactctgttcctggtacacagtaagaactcagtattctactgttattattgtttttattgtcttattacatgatcttccagacaagttccatatagtcttagttccacctggggagattcctctcagtgctttgtggttctgtgagccgtgtgcaagcttatattataactcaaagtactgtactttgggaaagaagtgtgtaggtcataaaagggttcccaagtatggatcatgtaaaactggggtggggaaagggaaattataaacatagatgtctaacatcccaattaatttttaaagaataacttgaaaataacatgtttttttctaattataaaaacaatacatgttcattgcagaaaactttaaaaataacatttattgagggggcttctgtttatacaagtaacacttgcttattgaagaaaacttggaaaacacagcttgcagttggaggaggtacaagggcttctgtggggctttgaatagtatctgggaggatcataag

SEQ ID NO: 16073 - DNA, 1048 bp, Homo sapiens
atcatcaaaaagcagaggctgctggaggcccagaagagactggagaagctcacgacattgtgctggctccaggatgacagcacccaggagcccccataccaggtcctcagccctgatgccacagtcccacggcctccatgtagaagcaaattgacgagttgcagttctttgagcccccaaagactctgcagcaagcacatgccccagctacacaggtacagccagtagttgtcactgggaagcactcggttaaagtttacaaccttcttgcccaggtagttttctgtttttccccatgcctcatttcctcagtctgtgaaatggaagaatgtgtatatttctctcttcctcatgactttttccatcttctggttactcttctttctgtgtatatcgttttagattcaggcctttcccatcttccttaccccctgagtagcaattcttgcttctttggtaacatcttaggagtaaggatctcggcctcacttttcgtctgttccttagacctgggctatccatatacgtttccttgtatgtcacacctcaatcttgtcatgcctgtaaccagacttcttgactcctacaccacctccctccctctccctcctcgacctgccacatcaagtgagctttctcaccccacctcccacctggtgactgagctatctttttgactcccaggttcaagttgggaccttccttgtttcttttctccattacttcttacatgccatcaaggcagggctgtattatctcccagactccttggagcaagggtttgtgtcttatacctctttgtatcctcaggacctagcacaggttcttgtccataggacgttcacaattaacgtctgttagtgttgtgtttgctcacctctctggtcttcaaagtaccaggtgggctttttaaaaaaactttattatgaaaaaattttaaacatatgccaagttggaagaatagtacatgtatcactgatattattcagcaattattaggttttacacacttgcctaccttcccattttctgaagttttttaaagcaa

SEQ ID NO: 16074 - DNA, 1078 bp, Homo sapiens
tgatcctttttgtatatggtaagagataggggtctagtttcttgcttctgtatgtggatatccagttttctcagcatcatttatcacagagattgtgctttctcccttgtgtgttcttagtgtgtttgtcaaaaatcagttggctatgaatgtgtggatttctgtgttctttgttctgttcctttagtctgtgtgtcagtttttatgccagtaccatgctgttttgattactatagcttggtagtattttttgaagtcaggtactgtgatgcctccagctttgttttgctcagaatttctttggctgtttggggtcttttgtgggtccatatgaattttaggattattttttctatgaagaatgttattcgtattttgatagagcttgcattgaatctgtagattgctttgggtgatatggacattttaacaatattcttccaatccatgaacatgggatatatttccactgattcatgtcatctttaatttctttcatccgtgttttacggttttcgttgtagagatctttcacctctttggttaaatttattcctagggactttatttttttgtagctattgtaaatgggattgtgttcttgctttccttttcagatagtttgcttttggtctatagaaacactactgatttttgtatgttgattgataaataaaagtaaaattctaagcctccaactgactgaacagacctcctctcagccagggagaccccagagaaaccttaaaagttgagtgcatgaccaacagaagatgttgaaataaatgccctggccaggcacggtggctcacgcctgtaatcccagcactttgggaggctgaggcaggctgatcacaaagtcaggagttcgagaccagcctggccaacatagtgaaaccccatctctactaaaaatacaaaaaattagccaggcgtggcagcatgcacctgtaatcctagcttcctgggaggctgaggcaggagaattgcttgaacccgggagggtggaggttgcagtgacccgagatcatcattgcactccagtgcaggtgacagtgtgagactctgactcaaaaaa

SEQ ID NO: 16075 - DNA, 1046 bp, Homo sapiens
gtaggggattagttatttgaaaaacttcttcaatggaagatggtctgttaagatcaggggttagcaaactatggccctttggccagatctggcctgcttcctgtttttgtaaataaagttttaccggaatacagtcatgcccattcatgtacatgtcttctatggttgtgttcccactacagtggcagagagttgagtagctgcagctactcaaatggcccacaaagccttaaatattcagtatctagctccccacagaaaaagttttgccagcctttggtttagatatttcatctctcctggagccccttttgattctaacttattcatttctgtgtatgttgttatcagtttctttttcctattgtgatagtttctcagtcttttcttgcttcgtggttagtaattttttggaatgtatttatctgctgtttcttgctttttttcttttttttttcatgtaagacaggtaatgtgctgacgtaacaaggtttgagagaggcacttctgagacatgtatgtgaaaacccgatcgtcatgcttacgaactacaaaaggatcgtgtctgtggttttcttatggttggattgaagttatgcgtttttggcaaaaaaaataccatagaagtgatttgcccttctgaaggttgacagattaggcaaagaaaaatacaggatgctagttaaattcaaattttagacaacaaatagttttatagtataagtatgtctcatgcaataccttattctcggtgcattgtatcagaggttaccggataccgacatgtcctgtttctggtgatgtgaactttgatgttaaggtggtggttgggggtctctccactgaatgttgctatattgtcctttatgattaatgaacatggctgaatgtggtggctgacgcctgtaatcccagtgctttggaaagctgaggcaggaggatcacttgagtccagtattttgagatcagcctaggcaacatagtgatacgccatctctacacacacacacacaaaagctatgttggtggtgcatgcctgtggtccc

SEQ ID NO: 16076 - DNA, 1027 bp, Homo sapiens
aatcttttctccctcttgagtttttgcaaaatactttattattgatttttgctttttttctccctttccctcccaggagaagacatttgggtcttggcctgaggcaggggtgttgagcgatgatgctctgatatggagctgtcactctagagctcggtcagatggaagacactatagaaccaggttggacagatttggggtcagggttggaggctgagttcttttgaggactggttggagtggcagccagatggtggctgctgacaaggcaagaggaatttcagagattaaacattgtcctttgaggaagggagaggaggtgaatgaactcccagaggaggtgagtggcttgttgggaggaagctcagttccagaacttacctcagtgcacttgggaggggtggagtcctgagcattccatgatttctgccctggccccacctatcctaggatggggtgggatggagagtgggttcagttttcttgtactttagcctggctgaacatgaactttgtgtttacctggaagtggtaggggtgggagagattctcatctttagttctggtgcccaaaatctttggtagatggagggaactggggattcagaagatgtggtaaaggtctatttctgtagtgtggcagagatgtgtttttctaaagtgtttgcagggcatttttccctcttacctcagattaagttatttatatattgttgattgaaggttttttaaaattgcttttaaacttctatttctcgggtaaattttttggtgacatgatatatttaacaccctatttatatactcctacctcttttcatataaatctcttactaagactactgaccaaaaaagaacattttaaaattaaaagtcctctgtgtactttatctagtgaagagtagatgaaatcctgcaccgggatagcctaagtgtgtgattcgagcttggcagattagctggagatcaccctggcaatacccactcatagctgtttcaaagattcagtttacatgtatgtacagtt

SEQ ID NO: 16077 - DNA, 1045 bp, Homo sapiens
tcaccatgttagccaggatggtctcgatctcctgacctcgtgatccgcctacctcggccttccaaagtgctgggattacaggcgggagccaccgcgcctggccctgaaatggaaatttaaaaaataccaagaagaaaggcagtagaactaattgacattgtttaaattgggtttgactaatttctgagtattagttgtaatgtctatatcatatatttactcgggttacattatatttgatggttgttgtggcccactagcatattaaatttcaggagtttatttgtatttttaaatatatgctgttaggtaaaaatcatgtaagacacttagataaatgataataccaacttttcttataatgttctgacatttgaataatataggtatgccctccaataaaatctatactttccttcttatttattcaacacatacttaatgagtgcctgccctgtactgtgttactcatcctttcttcctggtcttcactctgcagttttatggacacctgaacactgttgacgcttaaggtggtaaactttcattagtggatatagaccctgtgtatgttatcaatatatctttaggaactgaaaaagatttaacaacccagacctagactaatattttttctccttgcttgaagacttcatctttgcaagtctttcttgtgaattaagcctctgtagtcctgtttcaagaagtagacagcttttttatctcactacaccaagaattctaggtacttagtatgccctcactaaatctgcaaatgattgataaatactgttccactggattttgatttctttttgaacatttaatggactccctaaaagagccgtcttacttctgaacttggtgaacttgtatttggttattgaatgagtttgcatgagtctttggggacaatgggagaaaaactttgaaatttcatcagtttatccattgtggatctagtttagtatatttctgtcagatcagcaaatctcgttttcaaaggaaggtaaaatctagcgtattagggaaggaattttaaagc

SEQ ID NO: 16078 - DNA, 1066 bp, Homo sapiens
ccaaagtgctgggattacaggcatgagccactgtgcccagctggtctgtatttttttaaagaagagaaggatgactattgaaatcaataagtttattttcaagtattttgacaaggctaggtgattgctggatttaaactgtgtggaaagtctcatttgagaacctcttattatttcttggtacagtaaatgccaactcattatttaataagcatatgcccctaagtaagacatatgtgctcatatgaaagaatacaaaagtgataagatcaagttcttagactcttagagtatttaatctagtggtgaggtataagaccagtatagaaataaatataataaagagcagaatttgctaaattagaagtaagaggttcagagttatacgagagttcgaaagaatgtgaaatcaagtgaacagaatattgtcaaatgcattgtgttactttaggcattttatttaattaggttctattttgtttcttatctatcaagtgtctttagtcagggttgatgaacttatattaaatcccattccttagtatagtgttttttaaaggtagaattcaaggatcatgtacatgaaaaccaactggagtgttacaaaatacagattcccttgccttgccccagacttatcaaattaaaaaccctgagggtagatcccagaaatgtattgctgtaagcaccttacatataatattaatgcatatttacataggtaccagttattttttgaaatcaacttttgaggtatgatttgagtactataaaataccctcattttaaatgtttgaagagttttgacaaatgtatatattggtataactgtcaccacagttaagacatagaacatttccatcatcctaaagtcttgtcatccttgtacagtctgtcttcacttcctagggaattactgattggttttctatcagtatagattcattttgtttgttctaaaattttgtataaatgaaatcatacagtatgtactcttgggtctggcttcttttgctcagtataatgtttctgagatccatccgtatgattgtgtgtatcagtagtt

SEQ ID NO: 16079 - DNA, 1009 bp, Homo sapiens
ctgaagacttaaatgtccctgtctgacagctttgaagagagcagtggttctcccagcacgcagctggagatctgagaatgggcagactgcctcctcaagtgggtccctgacccctgacccccgagcagcccaactgggaggcacccccagtaggggcagactgacatctcacacggccgggtactcctctgagacaaaagttccagaggaacgatcagacagcagcattcgcggttcacgaaaatccgctgttctgcagccaccactgatgatacccaggcaaacagggtctggagtggacctctagcaaactccaacagacctgcagctgagggtcctgtctgttagaaggaaaactaacaaacagaaaggacatccacaccaaaaacccatctgtacatcaccatcatcaaagaccaaaagtagataaaaccacaaagatggggaaaaaaacagagcagaaaaactggaaaactctaaaaagcagagcgcctctcctcctccaaaggaacacagttcctcaccagcaatggaacaaagctggacggagaatgactttgacaagttgagagaagaaggcttcagacgatcaaactactccgagctacaggaggaaattcaaaccaaaggcaaagaagttaaaaactttgaaaaaaatttagacaaatgtgtaactagaataaccaatacagagaagtgcttaaaggagctgatggagctgaaagccaaggctcgagaactacgtgaagaatgtagaagcctcaggagccgatgcgatcaactggaagaaagggtatcagcgatggaagatgaaatgaatgaaatgaagcgagaagggaagtttagagaaaaaagaataaaaagaaacgagcaaagcctccaagaaatatgggactatgtgaaaagaccaaatctgctatgtgaaaagaagacacttatgcagccaaaaaacacatgaaaaaatactcaccgtcactggccatcagagaaatggaaatcaaaaccacaa

SEQ ID NO: 16080 - DNA, 1047 bp, Homo sapiens
ggaaaagacagtctgggacagtgccctgaggagcaccagcagagaagacatagagagaagacctggaaaacaaaaaagaccacctctttcatcgtacaagtaaggaagctggtcgactgtgcaagtttttactcagtagtaaaggcagagtgagggcccaaatcccagtatttaagccactcttatttccaccatgccactctgctgcctgaagatgaaatacatctctccaaaatgggtggtttgagaactgtgcaacaccagatttgaagtccctgcgtctttattttaaatcatgggttgggagagttactaggtattttcttgttttccttttcttgcttcacactgcatctcgatgtgtactctttccttgactagcgcctgattgaggaagagaacatgctggcaccatctctgaagcagttttccctacgagtggagattttgccatcctacattccagtgagggttgctgaaaaaatcctatttgttggagaatctgtccagatgtttgagaatcaaaatgtgaacctgactagaaaaggtagaaatctccttgtccaatgtaccacaccctcaaaatctcttcttccttaatactatgtggccccacagcatgcctggtcagagcgagtggtcgataatattcctatcctgagattgtagcagaatcatgacgtttgtctgagaagcaggtgaagttgctgccccactgagattagccctccccagaaaaccctaactgtcctgggtattctccgtcctcctttgacggtgtcttcctattttgcaggatccattttgaaaaaccaggaagacacttttgctgcagagctgcaccgtctcaagcagcagccactcttcagcttggtggactttgaacaggtggtggatcgcattcgcagcactgtggctgaggtttgtgtttcatcgtatatatatatatatatatatatatatatatatttttttttttttttttttttttcttaggcaaaattggactagtttcctagaaattgagttacttggtcgggcgcagtg

SEQ ID NO: 16081 - DNA, 1177 bp, Homo sapiens
aatggaggttattttctagtagaagtcatcatcatcataaaatactaaaaaacctgacagtgagataggtgttaagtcctttgctaggttatgtattgctatgctgggaggcagtgggccttccactcccaattctgatatgaactagctgtgcagccgtgggcaccccgccttgctggtccctagcttccgcatctgtgaaaggaggcgaccaccccttctaactctaaactttaaaaaaaactgataccgagattcagtggtagctggcttcccagaggtctgtcattcccattcagaaaatcacttcattgtcctttctctctaaaatgtctgcaagcagatttttttctaagctattgtagcagaagagtcaaaagaaactcttcagttttaagatgacattatttagatcacaggttatcctgattcatatttctttgaaggtagtcttgggaaagcatgacacttaataaggctctttttctcttttgtagtttcgggatgtgaaaatttctggctcataaattgaaataacagccacgttcccaaggttgtaacagaagattcaaaacatcccattctagccacacacaaataaatatctgcggcttagtgataggactctaccttttctcctagaagcagttactgaacatccaggagtacaactccttcccatcattcccatgtggaagggtctctcccatcaaggagaacatgtggcatctctgatcctttacattgagaacatttgttggatatgttcatttattcaatagtcatttattgagcacctactacgtaccttggtactgttcaagctgtgggagatacagcggtaaacaaacaatatagagcagaaagttaaatattttatggttcatatgtgaaaaagtaattatgtttataaatagactaactgctggatgttaccaccaagtaagaaagcaacaggtaagataggctttctctctccctataccaagtaatttatacctacacagattgggcaattctagctaatgaaaatatacttaaaagtatttcttaggccgggcatggtggctcacacctgtaatcccagcactttgggaggccgaggcgggcggatcacctgaagtcaggagtttgagaccagcctgaccaacatgatgaaacctcgattctactaaaa

SEQ ID NO: 16082 - DNA, 1022 bp, Homo sapiens
aacagatgaagaaatcccagttactacaaccaaagagattcaacatttattttatcataaaagttcagcaaataaaactatatacaagatccatgcaaggaatccagttacacacaagacacatttaaaacctggttaaaacacaatctccacgatagcagggaataaaaccagtaagaccaagtatctttagtgagaaacataatcgtgtttatattttggatgctgcttgaatccaattctctccccaacaatgaggcactggatcacccactcttgtgacaccacaggcagctgcaatgcttcagcacacttcagcaccgaggctgggcatgaggggtccgtcaccaccacatcaaatacccctaaagcaatatctgcaaggagcaagggaaagtgaagaaggaaaggacactcaacttagccctccattagaaagagagatttgattctaaccaatacatcccactctgcacaaaccaaagccctattatgtcaaacacactgctactgatcatgaccaaaggcagagttataatcactatgtgctgaccttgtagaaatatttaacaaatatacgtccagtgcttcacttatgttgactcacctcttgaaggtggtacttttcttctctaagaaacatggatacggtcaacctattaggcctgagccttggaccacaaggcctaacacctacaggtctaaggagatccctggaacaaagacactacacacactctttcaggtacctttgttatgggcacttgaatggtgctgcttcacagaggctgcaccaccagtcatgaggatctcagaccagagctccaggaagttctgctgttggtctgataccaagagtaccttcagattctggaaaggattttcacggggttgcctatgaaggagacaggaaaggaccttagcatgacaagtaatatccaacaaactgcctttctgcaaagggactcatgtacatctgaatgctttcaaaaataaatgccccatcagacatagtgtctcaa

SEQ ID NO: 16083 - DNA, 1075 bp, Homo sapiens
acgcttccacctccagctcaggcgccccctgagcccggctacccctacgcaggacgagctcagggccggctcccagcctcactgcgccccatttcccgccccgcccgacccccaggtttcggctcaccccgggacccggccctagcccctgcccccagcccaggaccgggcccagccacgctcgcccagacactcgccgcctcggccccgccccgcgctccggccactcggcggtaacgagttggtcccgcccgcccgacgaaggcgacgcgcagccaatcagcggctgccacacagcggcccaagccgggtttgggggttgggacctccggctgcaggtccgcctgggccagacgcgcgagcgcaagcagcgggttagtggtcgcgcgcccgacctccgcagtcccagccgagccgcgacccttccggccgtccccaccccacctcgccgccatgcgcctccgccgcctagcgctgttcccgggtgtggcgctgcttcttgccgcggcccgcctcgccgctgcctccgacgtgctagaactcacggacgacaacttcgagagtcgcatctccgacacgggctctgcgggcctcatgctcgtcgagttcttcgccccctggtgagtccattctgccgaggcgggggaagaaaggcggggctgggccgggggcgagagcgcggggaactgttgggcctacgcagcgccggggcccttcattcctgtgggcccctgctgcggcgggcacatttctcattcccgggagctggaggcgcctcgccgagagcgggggagtcggtgctgatcggcccaaggaaaacccgaaggctgcgctcacgcagggcctcatccttatctcggtgctcttgtggcacttcctatttgcagagggttttgccaccccttcccccagtccaatatgtagctatatcttttctgcgtgagtcagtattaatgctcctccagtctacagactaggcatcccaaagccttgtagtggaagcggacgtttcaccaaatgcagaagtcctggatccctagggtatttcctttcatcttacctcacgccgcacagc

SEQ ID NO: 16084 - DNA, 1084 bp, Homo sapiens
acgtgtacaggtgttggtacctttgataatagctctagatgatttgcaaaatcaaattacattacacctaaaggatatgtaccaccatcgatatatccccttggtgatagtcgtaatcaaagtaagccactgttaataatttaagtgatttatccctcatgtgttctgaggcagaaaaaagatgaagaccaccgctttagctaatagagactacaagggcagaatttaaacaggaactttgcattttatgtgaggcctaggaatctcaattttaaagaattccttaggcagttctgatgtagttaggcaagctccagtctgcctttaaaatctaatgttctgtggcatatatgccaagaattccttgatccccttaggatttgaccaatcctagtattttgagaatataggaagaacctgcagcagaaacttggataagaaaatagtttgtgtattttgatctttaggttgattgcactgccaacactaacacctgtaataaatatggagtcagtggatatccaaccctgaagatatttagagatggtgaagaagcaggtgcttatgatggacctaggactgctggtaaggatcctgaattacattctggaaactgatgttaagtaccttattctttgtagtggaaacataaaaatgtgtttttctacacagtatactttcagtcttaaaacttcctcatctaagaggtcagtttggtggtaacaaaagacctctctaaatgaacagattatataagtaatatagaaaatacacaaacttgatttataaggtcagctcgacattttttcattttacaaatatttattgagtaattactgtgtgccagatattctaaatatactaggtcgttggcatttattgataaaatagacaaggtccctactcttgtgaagcttacattctgggggatgagggggagaaggcaacaaacaagttttaaaaatatagatgagctgggtgcagtggcacgtacctatagttttagctactcgggaggctgaggtgagagactgtcttgagcacagcctgggcaatataagtttgtccccatctccaataaaaa

SEQ ID NO: 16085 - DNA, 1048 bp, Homo sapiens
ggttcctttaaaaattaaaaatagggccaggcctggtggctcatgcctataatcccagcactttgggaggccaaggcaggcagatcatttgagatcaggagtttgaggccagccaggacaatgtggtgaaaccgtctctctactaaaaatacaaaaattagctgggtgtgatgcgcatacctgtaatcccagctacctgggaggctgaggcaggaggatcacttgagcccgggaggcagaggttgtagtgagtcgagatcgggccactgcactccagcctggggaacaacgcaagactccgtctcaaaaaaaaaaaaagattgaaaaaattaaaaatagaaggccaggcacggtagctcatgactgtaatcccagctctttgggaggccaaggtaggctgatcacttgaggtcaggagttctagaccagcctggccaacatggtgaaaccatgtctccaccaaaaaatacaaaaattagctgggcgtggtggtgcacacgtgtagtcctagctacttgagaggctaaggcaggagactcgcttgaacctggaaggtggaggttgcagcgagctgagatcacaccactgcactccagcctgggtgacagtgagaccctgtctcaaaaaaaaaaataaaaatgaaaataaaattactaggccaggcgtggtggctcacgtctgtaatcccagcactttgggaggctgaggcaggcggatcacaaggtcaggagagcgagaccatcctggctaacacattgaaaccccgtctctactaaaaatacaaaaaattagccgggtgcagtggcgggtgcctgtagttccagctactcgggaggctgaggcaggagaatggcgtgaaccctggaggcggagcttgcagtaagcggagatagcaccactgcagtctggcctgggcgaaagagtgagactctgtctcaaaaataagtaaataaataaataaaattaccatatatatgatccagcttctgtatgcccacttctgagtatacatttagttctcacttaatgttgtctatagattcttgga

SEQ ID NO: 16086 - DNA, 1035 bp, Homo sapiens
attccacttacatgaggtagcacaaatagtatacaaaattgtatgtttaaaaatggttaacaagggccaggcatggtggctcacgcctgtaatcccagcactttgggaggtcgaggtgggcagatcacgaggtcaggagttcaagaccagcctgaccagccaacatagtgaaaccccgtctgtactaaaaatacaaaaaattagccgggcgtggtggcaggagcctgtaattccagctactcgggaggctgaggcaggagaattgcttgaacccaggaggcggatgttgcagtgagccaatgttgcaatcgcgccattgcactccagcctgggtgacaagagtgaaactccatctcaaacaaacaaaaaaatggtttaacaaggctcatgcctgaaatcccagcactttgggaagctgaggcaggtggtttgcttgagcctaggagttggaggccatcctgggcaacatagtgagaccccgtctttataaaaatacaaaaaactagccaggtgggatggtgcatgcctgtagacccagctactcaggagactgaggcgagaggtctgattgaccctgggaggtcgaggctgcagtgagcaatgatcatgccgctggaccccagcctgggtgacagaaggagaccctgtctcaaaaaaaaaataaagaaaagaaaaaaaagattggaaacaaatgtccatcagttttgcaattgtgtctgcttaaataaactgtggcacatttatagtgaaacactatgcattgtaaacaatgtttctgttaaaaaaaaaacttttttttttttttttgagacagagtctcactctgtcacccaggctggagtgcagtggcacgacctcggctcactgcaagctccgcctcccgggttcacaccattctcctgcctcagcctcccgagtagctcgggaccacaggcgcccgccaccatgcccggctaatttttttggtatttttagtggagacggggtttcaccgtgttagccaggatggtctcgatctcctgacctcgtgatctg

SEQ ID NO: 16087 - DNA, 1042 bp, Homo sapiens
ttttaataataataaaaaacgctatgccactgtaataaaaggttgaggtagctatgtatatataattgcctgtttatgcagaaaatgtctggaaggatatacaagcaactgaaatcttggctgggtgtggtggctcacgcctgtaatcccagcactttgggaggccaaggtaggtggatcaaaggtcaggagatcgagaccatcctgtctaacatggtgaaaccccgtctctactaaaaaaatacaaaaaaaagtagccgggcatggtggtgggcacctgtagtcccagctactcaggaggctgaggtaggagaatggcatgaacacaggaggcagagcttgcagtgagctgagattgtgccactgcactccagcctgggcgacagagcgagactctgtctcaaaaaaaaaaaaaaaaaaacctgaaatcttacaaggaggaaactgggtgactagggacaagggtggcaagaagatttcatcttatacccttttgtaccttctgaattgtgaatgatgaataattgccttctcaaaaattataaataagttgtgttgtcataacttttattttgacttctaagatggaattgtcagccacttgaagaagcaggcaggaccagcttcagtgcctctcaggactgaggaagaatttaagaaattcattagtgataaagatgcctctatagtaggtaagtagcaaatattaaaccgtgccacagaattgtcagtttggtttccaaaaccctccatgtctgggaaaaccacagaattaaagcagttaaggaaaccttggggcagttgagaaggcaactgacagaattgggtcagcaattactataatgtactatatagtacattatataattactatataatgtaattataatgtggggggcaattggtgttttatttgagtgggtttgtgttctcatagatgtaaaggtttaatttcaattaaagggactggaaggggtgggtgtggggaaaaaaataaaggactaggataggaatatcttcagcgttttctaatgcttcttaa

SEQ ID NO: 16088 - DNA, 1050 bp, Homo sapiens
caaatatatacacagacgtaaacacacaaccttaaacatagttctttaattgggtttatttatttatttaattattttttgagacggagtttcgctcttgttgcctgggctggagtgcaatggcgtgatctcggctcaccgttcaagcgattctcctgcctcagcctcccgagtagctgggattacaggcatgcgccaccaccccggctaattttgtatttttagtagagatggggtttctccatgttggttgggctggtcttgaactcctaacctcaggtgatcagcctgccttggcctcccaaagtgctgggattacaggcgtgagccaccgtgctaggctaattgggtttatttaactaaaatctctttaaactctcatgggcagtatatgtggctgctaatatgcttttacaaactcagaagtcttcctgtttgggtggggcagatcagggttctttaaaaagttacacttttaagctgatctttctgttttcagggtggccgtgaattaagtgattttattagctatctacaaagagaagctacaaacccccctgtaattcaagaagaaaaacccaagaagaagaagaaggcacaggaggatctctaaagcagtagccaaacaccactttgtaaaaggactcttccatcagagatgggaaaaccattggggaggactaggacccatatgggaattattacctctcagggccgagaggacagaatggatataatctgaatcctgttaaattttctctaaactgtttcttagctgcactgtttatggaaataccaggaccagtttatgtttgtggttttgggaaaaattatttgtgttgggggaaatgttgtgggggtggggttgagttgggggtattttctaattttttttgtacatttggaacagtgacaataaatgagacccctttaaactgtcttattttccaccagattgagaaccagatgttctctacacactatcactgttcaatagagctttcttcagtgatggaaatgctctgtaatctacactgttcagtacaggta

SEQ ID NO: 16089 - DNA, 1045 bp, Homo sapiens
ctacgggcgttctttcagggcgactttgtcagtaccccaaactgtccccgcatgaggtcactctgcacggtcacgtgctcgagcccgcgggagcgccacatcgccagccgcacccctccacccccaacctgcccacgtgacccggcctagtttctccaggcccgtccctacgtctcactcgggaagccccgccccacgctgagcgctccgcctgcgaccctccgccacttacccaccccggctcaagcacgacccgtggatccacgtgctttttcttgtccaatgggagccggctcccgggcgcgaaggggcggggaggaaaggaacgactgtgctacgttgccagaaggggcgggacctgcaacgtccgacagaacgaggggacgtaacggaggcaggttggagccgctgccgtcgccatgacccgtgagcaccgagcccccttctccttgcccttttctttccgttcaccctaaacaccaccggcgaggcgccggctttgaccttccgtagcttccctagcaaggcgtttctctgggcgcgctctgtggccaccctcacactcggtgcccggaaatcgagccctttgcccacggctacttcacgggaccaccctcccgggttaggcataggccctcccggatcttccgcggtgtaaggagaaggccagcgcccctgtgataggcccagagcccccactccacaagccagcccatcccccacggagacccaaaccgtccacacacaccttgccagctgtttgggccccacgccgccccaaaacacgcctccagctggccccttgggacctcccttctctagtccgtattttgacctggcccgtggcagattcgccactcccccctaccccaagcagcctgggcctcgatgggccgttgtcggggcccggagattgaagtggtgttggatcctgctgctggccgcgctggggtagaagggtcgccggtgtgtgggcagagcggcccccgcgtctcacctttaattttctttccttaggcggtaaccagcgtgagctcgcccgcca

SEQ ID NO: 16090 - DNA, 1019 bp, Homo sapiens
ttatggttcctcacttggcactcacctttgtctgcctccactgtttcagggcagcagaaacacagtgagggcttctgcaaaacagaacgcaggttttggaatggtcttaaaagatgtgagggtgttaatctaggaaacttcccccgtgaaaagattggtctagtattaaaaagtggaggcacacctgggttcaaattctagctccagcatataagtggctgtgcagactttggtaagatgtttaatcttttgtgcctcgatttctccatttgtaaaatggagcaaatacctacctcacagggttgttgtgagggttaaattaaatgagattatgtaaaagtatctagcacagttgcctagcacattgtgggtactcaataaaaggtaacagcagctataatctgagcattctgggtagaggttggtaggatgtgtgtgtgtctttgtgtgggggagggagggtgttggggatatggagctctttatcctcacctgaaactcatagctgtaaaccttgacaatccacaggggtccaaatacctcagccaggtaggaggcctcattgctgagaaagaatagagttcttaagctggtttagttaaatagggattatctgggggcatttactaccaattggtccatactggtaatcctcaaaagggtaccatactccctgtgcccttttccaccaaagatttagaattctattcatgtgagagccctaaggtctttggacatattttaaattctcaagtcattccccccacccccttcatctcatacagatcatctgacaaagtactattcttagaatttgtccctgtttgtggggagcttttctcactctagtcttgctctaaactttaaataatggtcccagacattgtcctgaccatccttccctgtcttgggcaccctcctttcatacctccacccttgacacctttacgcaccaagcaaaaagcacacaagcatacatgatgctagcactcagcattgctagagagatatctggtgtt

SEQ ID NO: 16091 - DNA, 1024 bp, Homo sapiens
gtaacaagctacaacccaagagaacggcagatgcgatgaatctcagtgttgatgtggaaagtagtcaggatggagacagtgatgaagataccacaccatccctggtaagaacttaattagtagcttgttctggtttctcttttttgaaatttgaagttctgataaatcgaagtttttcgaggatctctctggtacaaacaagttatttcatcatctaatgtaagtataaatgtaataatacatttttattatttttaaggtttaacaaataacttccttgggttatttttgctcttgctgttgatgtgtcaatgaaaggattgacttaatctttactctgcttccttttttctttctctaaactaactgcatatatttttgggtttagtcatactttatggtgcctttctcacctttacatgtttatgtacagtatatcagaagtcatcagtttgtgggacatggtattgactgacctttgatatcagggtagggaaacataaattgattctatggttgtgttgaataatatttcctttaaatgcaaaacgagacaaatgacagagtaggtaagatacatgagaaacacatttgttctgtgtaattccaatcaatttaaggaatttggtgtgtaatttttttcttttttttttttttggagacagagtctcgctctgtcgcccaggccagagtgcagtgacgctatctcggctcactgcaacctcggcctcccagttttaatagattgtcctgcttcagcctcctgagtagctgggattacaggcgcgtgccaccacacctggttaattttgtgtttttagtagagacggggtttcaccatgtttgtcaggctggtctctaactcctgaccttgtgatccacccgcctcagcctcccaaagtgctgggattacaggggtgagccactgcgcccagcctggtctgtaattcttttggcttctgctgcctaccaggagcgccgtgctccattcaaagtgacaaattttaactggacaagataaaac

SEQ ID NO: 16092 - DNA, 1075 bp, Homo sapiens
gccgaggcaggagaatctcttgaacctggaaggtggaggttgcggtgagccgagatcgtgctgttgcactccagcctgggcaacaagagtgaaactccgtctcaaaaaaaaaaaaaaaaaaagattctgaagaatacaaggtaaatataaagcagattttagtttgatgtaatgaaataggtccattaatagagttgctcctaaagaaaaaaaaaaggaggtggacagatcacctgagatgaggagttccagaccagcctgcccaaaatggtgaaaccctatttctactaaaaatacaaaaattaggccggccatggtggttcatgcctgcactcccggcactttgggaggccacggtgggtggatcacttgaggtcaggagttggagaccagcctggccaacatggtgaaagcctgtctctcctaaatataacaaatattagccaggcatggtggtgggcacctgtagtcccagctactcaggaggctgagtcaggataattgcttgaactgaggaggtagaggttgcagtgagccgagatcataccactgcacaccagcctgggcgacagagcgagactctgtccccacttccccaccaaaaaaaaagaaaatataaaaattagccaggcgtggtggcaggtgcctgtaatctgagctactcgggaggctgagatgggagaatcgcttgaacctaggtggtggaggttgcagtgagctgagatcaggccactgcactccagcctgggtgacagagcaagactcttgttttaaaaaagtaaaaaataaagcctcccaaatagctgggactacaggcatgtgccaccttgccaggctaattttgactttttattttgtagagatgtgggtgtgccatatttattgcccaggctggtctaaaactcctgggctcaagcaggctgcccacctcggcctcccaaagtgctgggattacagatgtgagccactgagcccagccaagatactttttttttttgagacagggtctcactctattacccaggatggagtgcagaggcacgatctcagctcactgcaaccttcacctcccagg

SEQ ID NO: 16093 - DNA, 1028 bp, Homo sapiens
aaactagactaaaagttcattaaattatgtttaattttatatttcattaatacttgaatgttgtatggttttgttttgtttttttgagatggagtctcactctgtcgcccagactggagtgcagtggcatgatcttgcctcactgcaaccccctcctcccgtgttcaagcgattctcctgcctcagcctcccgaatagctgggattacaggcacatgccaccatacctggctgattttttttatttttggtagagacggggtttcaccatgctggccaggctggtcttgaactcctgacctgaagtggtctgcctgcctcggcctcccaaagtgctgggattacaggtgtgagccactgtgcccggcccatttgtacgctttaatgagtaagatttcgaagtcgtaaagactgtattggattctgtatttctgcaggacttacctgcttaggattgtgggtgagttaattaacctttctgattgtttctccattaaaaaaaagtcagcaataatagaaccctcagtaaatatgtacaattttatgtcagtttaaaaaaaaaacctcaaagagctactgtaaagataaatgaaatcatatctataaagtttctcacatattaggggcttagtaatcaatagaatatagttattaatgttaataaatacgtgataatgtgtagttttagtgagtagagttttatttagcaaacattttctaaatattttttattcaagaacacctatttttaatactttatatgtaagtgtttaattgtaaataggaagatagcactaattaggctggtgttttgggagcaaattgcaaatctaggtgttatgggaagcagcatagaagagtagcttcaaatttttttgaagcctcagcccacaagaaatatatttgtggccaggtgtagtggttcatgcctgtaatcccagcactttgggaggctgaggcaggaggatcgcttgaacccagaagtttgagaccagcctaggcaacatcaagagaccctgttcttacaaa

SEQ ID NO: 16094 - DNA, 1021 bp, Homo sapiens
taaggaagtatgggggtaatgaaagaactggagaagcattggatagagacttttttttttttttcccgcccctgagatacggtcccactctgttgcccaggctggagtgcagtggcatgatcatagctcactgcagcctcaacttcccacggtcaagcaattctccacctcagcttcctgcgtagctgggactacggtcatgtgccaccacacctggctaattttttaactttttgtagagatgggtctcactatgttgcctaggctcatctcaaactcctgagctcaagcactccacctgcttcagcctcccaaagtgctgggattacaggtgtgagccaccacacccatctgagactactttttgaagaattttgcaaaggaaaaattgaaaattagcatgattaaatgaaggtttttttttggatgagttgatctgtatagatttaagacatacataaaaatccttttttcatatctttcatgatgactccaaaaatctgtattacagccggacgcggtggctcacacctgtgatcccagcactttgggatgccaaggtttggcggatcacctgaggtctggagttcaagaccagcctgaacaacatgatgaaatcccatctctactaaagatacaaaattagccgggcatggtggcacatgcctgtaatcccagctacttgggaggctgaggcaggagatttgcttgaacacaggagacggaggttgcagtgagccgagatggcgccattgcactccagcctgggaaacaagagcaaaacaccacctcaaaaaaaaaaaaaaaaaaaaaaaatctgtattactaggtctctgtagtccagtatctccatcaacctaattttccaggacatttggcaatctcattaacagatttaacaagtctaaaagcaatattaccttgtctatcctgtgctcacaatttccccagtttttttaaaaaatggcttcattgaggtaataatttacctatcataaaatcctatttaaaaaatgtaaaa

SEQ ID NO: 16095 - DNA, 1029 bp, Homo sapiens
tcttctttatactaatggcttcatactaatatacatagccttttgcaactcttttcacttaatagtatatcttggacagttaatactataaaactaccttattctttttagcattgcatggtatttcaaaatagaggtggatcatcatttatttaaccagatctctcttggtggatatttatgttgcttcttattgctattataagcaatcttgcagcagacatttttatagatctcttagtgaaattactgggtcaaaaagtataagcattaaacattttgatagatgtagcctgattaactgtcaaaaatgtatatatttactcttctactgagagtaggtgagcattcagctgtgtgtcttggacttggttggcaaagttactttgcatattaaaatataatttcaattgggtagaattcacattcagttcttttctgttaagtttcacagggtagatctggaactgaggtttattggattgagagatttgggatgtagccctgacatgggtagatgggccatttaattgtagacacagctgatcagtgcctttgtttcttttttgttttgttttgtttcttttttttttttttaattttcagttagaaggaataagttctaatgttcagtagcagaatagggtaactatagttaacaacagtgtattgtatattttaaaatagccagaagagaggacttgaaatgttcccaacacatagaaatgataaatattgaaggtaatggaaccccaaataccctgactgtgtttccattatgtcctgtgcatctgatggggatgatgagaggataaatgaggttatttgggtaaagtgttttataacccttttaccaaagaatttatgctttggctttctttacaagaagagtgtgatataagctgattgttacttatattcttaggtgtatagaaatgaaagaagtagcttttcctccttcgacttcttggcagaagatgcctccactttaatagtaggacactgggatggaaatatgtcactggtgga

SEQ ID NO: 16096 - DNA, 1051 bp, Homo sapiens
gtatttttatttttttttttgagacagaatctcactctgttgcccaggctggaatgcagtggtgcaatctcggctcactgtagcctccatctcctgggttcaagcaattctcctgcctcagcctccccagtagctgggattacaggcaagcaccaccatgcctggctactttttgtatttttatttttattttttttgagacagagtctcactctgttgcccaggctggaatgcagtggtgcaatcttggctcactgtagcctccatctcctgggttcaagtgattctccggcctcagcctccctaggagctgggattacaggcacccgccaccatggccagctaattttcctatttttagtagagacggggtttcaccatgttggccaggctgtctcgaactcctgaccttgaatgatccaccctcttggcctcccaaagtgctgggattacaggtgtgagccactgtacctggccaatttttgtgtttttagtagactgggtttcgccgtgttggacaggctggtctcgaactcctgacctcaggtgttccacctgcctcggcctcccaaagtgctgggatgacaggcttgggccactgtgcctggccatattatgtatatttttaaaaaatttatgtagggtgactattctagggggtaagaattttcattaatgatggggtcatttaagtggcagtgggaaatgtgtagtccatactttaatgaaaaaggattgttagtgatattaaggcaaaaagactaaaagggcagtacttctgtttttgcttttgggaactataaagggctccatatgttttattttgggagatttttagatgaggaggatatcgtctctgtccagaggttcagtcctgtaaggatgaggtaaggttggtggtaactcagtaacttaatgagaagaaacttggcagagaaaactagcatttaggagcaatgccgtctttaccctctgcccaatgctaccttatttaaccttacttcatttaaaaaatatattgttttcctcactaggcacaacactttcactg

SEQ ID NO: 16097 - DNA, 1545 bp, Homo sapiens
agtataagattgcctcagacctgtgtttttcagactgggtttttgctcttcacatgaaatcaagttagatgacaatgactggtgttgaaaaaaatgaaaaggaaagaatttgtaaagaacagaaaatatatttgagtaagtattgtttggtaaaacttagttacatatgcatatatatttgttaggtatatatgtttatgtgtattctgatgtaaaatatatatatatatatattttattactatagtaccatgggtaatggataaagaagttaaagctactgcttagaatgaagaaggccccaggcttacctgtcccgatctttaaactgtccgaaggaaattcaatagcctgttaagtgaataccttcattcttacttgtatttgggggaatattatgaaatactcaccacttttggtattttatgaaaatgttttcttttcagaagttatggtaatttcaatgtgtttgttgttgggaggggagctgccaaatcagttactaatattactgtgtgacatctatccaacttttttcattattcttcattgccaaatactgaaagacttgtaaatggctttggcaatatgtttgaattctaagaggaaatattttcccataattgtatatcagagaaatatagtgatatacaatttccttgaaaaccaatttctaaataattttcttctctgtaatctaagtgtaaaaaggtttagttttttaataggtttaggtgtttataagcaatagttctctattttctagttgatataagtagaagaattgacaagtgagatggaaatgttaatttataaagggaaagaaaagctaggtgaggttgagttataattaaactgttcaggaaacatcgtaaaggctttaggctccctttttcatttctataccaattaatctcatgggttctagagtggttagttctacgggaattgtttttgtttttgtttttaaagatgctgaaaactactctcaatcaaattagtaccatcatttaagctttgaatacttggcagtaattgcctgggctcgtcaataaatgttagcaaattcttgatgttcctcacttttgtggtttcttttgccattgtggcttcataaacagtgctatttatattcagttatactttatagagttatatcttcaggcagtgcaggaaggaaggagaatgagtagggacttttttttttttttattggtgataagctttctaatggagtaattgtttaaatctagacagcacataaaagaaaattgtctcccttgggacattcttacactgtaatctgtagtgaaaggtacttctcccacagacttgcctacagctgtgtggcttctgtaattatgtgtgtattatgattgcctccttcgggataagccttttctgtaagtttggcctttatgatatctcttaagctctgaattccgcttgagtttttttttttttttttttttaagatacccaggcttttgttatgtaacttttaaggaaggagcagacaattctcatttttggttgtcagagact

SEQ ID NO: 16098 - DNA, 1065 bp, Homo sapiens
tttttctttgctttttgcttacggttttggcctagtttgtgtgtgttttgagatggagtcttactctgtcgcccaggttggaatgcagtggtgcaatctcagctcactacaacttctgcctcccgggttccagcgattcttgtgtctcagccttctgagtagctgggaatacaggtgtctgccaccacacccagctaatttttttattttgagtagagacggggttttgccattttggccaggctggtctagaactcctggcctcccaaagtgctgggattataggtgtgagccaccgcacccagcccctaatttgttaaagattctgcctttcttgcctttggtgtcctgggcctagtttttttttttttttttttttttctttcagtctttcatatgattttattttcttccttcaaccataataatatgatatccaaattttgtcttaactgctgggtctgtaaacacaggcttatccatcacacttataggcaaggcaaatgctgcttcttgaaatggtcccaccatggaccctctggtcatccaacccaagacgcccccttgcctggctttatcttcactatattgtgtggccacttcattgaatctcatcccagactttaacttttccatggcttccatgattttgccatgtttttcccatagaatgtgtctgacctttactgcattgccaccacctttgggaccttgagccttcttgtcagcactgtcactcccagaggctgcaccccctttccccgcttttccagaaccactttttcctttgggcggcatcttggaagcttgttgttgaactctgaactctgggcctggtttttaccccagtttgaaagaatctgaattccaaactacccctgatgcagagctgggaccacggtttgagtctcaagtctgcctgttgggtggagggctttaagaggcaggaatgggccagacacgatggctcccatctgtaatcccagcactttgggaggccaaggcaggtggatcacttgagccaaagggttcaagaccaggctgggcaacatagacactgtaact

SEQ ID NO: 16099 - DNA, 1052 bp, Homo sapiens
gcaatctcggctcaccacaacctccacctcccgggttcaagtgattctcctgcctcagcttcctgagtagcagggattacaggcacgtgccaccacgcctggccaattttttgtagttttagtagagacagggtttcaccattttggccaggctggtctcaaactcctgatctcaggtgatccgcccacctcagcctcccaaagtgctgggattacaggcgtgagccactgcgcccagcctgtgactaccattttaatccttgtttaatggatgaagagactgagtgcttagagatactgttcttgccttgtcacagagctagttaaagaacaacctgggatttgaagccagctctctgatttcttagcccaggggttggcaaactacagcccactgccatagtttccaatggaataaaattttactggaacacagccttgctcattcatttatgtatcgtctatggctgctttcacactacaatgacagaattgagtagttgcgacagagaccatatggcccgacaagccaaaaatacttactatttggccctttacagaaaaagtttgccaatccatcttagcctaagctaggctcaagcgatgttcactgaaggcacagtggcctggtgactccgttcgttcatgtatgtcttgattcatcctgttaacgttttttggagcacctgttgtgtgtcagacattttgcttccttggacggcggggccccatttgcagtcagtttccttctcctacttgatctttccaaagagttcatacacctgcaatccctgttaaaagccaaatctggtacctgaatttcccattttctttgccttgtctctagcctagacaagaaaatctgtttattactttaaaaatgacaaaagaaattaatcaggatttggcaactaaatttatcatctgggaagaagccaagagataaactgaagcaagttctgtactccctacttcacccccttctctcagcctggctttatgggaatggctgagacagcagtgaaatttaggaccaatattgcctggaaaaa

SEQ ID NO: 16100 - DNA, 1012 bp, Homo sapiens
ggggcggggagggacctgcggcttgcggccccgcccccttctccggctcgcagccgaccggtaagcccgcctcctccctcggccggccctggggccgtgtccgccgggcaactccagccgaggcctgggcttctgcctgcaggtgtctgcggcgaggcccctagggtacagcccgatttggccccatggtgggtttcggggccaaccggcgggctggccgcctgccctctctcgtgctggtggtgctgctggtggtgatcgtcgtcctcgccttcaactactggagcatctcctcccgccacgtcctgcttcaggaggaggtggccgagctgcagggccaggtccagcgcaccgaagtggcccgcgggcggctggaaaagcgcaattcggacctcttgctgttggtggacacgcacaagaaacagatcgaccagaaggaggccgactacggccgcctcagcagccggctgcaggccagagagggcctcgggaagagatgcgaggatgacaaggtaaggacgacccttttctcttcaaaccccatggtttcttttctccccggggtctggggcgggatgttaatccgctagctgttgtcttatgccttccagtatttcagtcctgaaggctcctttcacccccaacaaccctgtttctgtcagacttttcccagtttatcagtgccacgttctctggtccctgccagaaaaaaatgactgtaaattctggttctcaagagtggactgtgtgcagatgctgcctattctctaagctcagctggtgagttggcagtagtaatcatctggcctgtgtggcccccttaccttcaaagacacacaaatctggcgactgccaggtttggtgtggttattgtctcatttttattccgtgcacactgatcaatattaatttcgttatttaaagaacgaagccgcctctgactcctctacttatggtagtcatcatatattttttaagctgtgtgacttttaaaatctctatagggtgatgt

SEQ ID NO: 16101 - DNA, 1073 bp, Homo sapiens
ccgggtttaagcgactctcctgcctcagcctcctgagtagctgggattacaggcacgcaccaccaggcctggctaaatttttttgtatttttaatagagatggggtttcaccatgttggccaagctggtctcgaactcctgaccttgtgaaccgtccaccttgacctcccaaagtgctgggattacaggcatgagccaccacacctggcctattctaccaatcttttatccagcttctgatccatgtccactatgaagccccctgggacttctgacctggaatatgcttttccttcttttctttttctttttttttttttttgagatggagttttgctcttgtcgcccaggttggagtgcaatggcgcgatctcagcttactgcaacctccgcctcccaggttcaagtgattctctagcctcagcctcccaagtagctgggattataggcacccaccaccatggccggctaatttttttttttttttttgtatttttagtaaagatggggttttaccacattggccaggctggtctcgaactcctaacctcaggtgatccacccacctgggcctcccaaagtgctgggattacaggtgtgagccactgctcccagccatgcttttccttctttatacaccatttacatttattgtttgagcttcattaacttattttgttcattttttactaatagcttattgtttgtgaacttcgttttctcaacgaaattttaagttccttgaggaaggactatgttttaaattttttcctgcgggaaaaattgttcttagtgctgttacaaaatgtacgaggttgatttgtatcccctaaaaggatatattgaagtctaaatcacctgtgaatgttatcttagtttgggaatagggtctttgcagatgtaatcaagttaaaatgaggtcatactggattagggtggcccctattccattataactggtatccttataagaaaaaaaaatagaattagggagaacaccaggtgcatgaatacacagagacacacagacacattgcagagaccgcatggcagataaaggcagagattggagt

SEQ ID NO: 16102 - DNA, 1051 bp, Homo sapiens
aaacctcctgtaggtatatgactgaggacacagtttcctcatttgtgaaatggggaaaaataactatgcccactttcatagggaggttgtgagaattaaatgagataatgcttgtaaagcacttagcctaggacctggcacaaaaataatcatttaatacccgcttgttattattaatgctattccattttgatccagctggtataggtgttaaccatgctatagatgaataattgccaaacctggctgcttatcagaatcacgtaagatttttaaaattaaaattcctgggcctttcccagactactgaatcagactggaagtagaatatgtcttttttaaagctccccaggtgattctgagcatcagccaggtttggcagttatgttacagaagatagacttgtctctagaaatcatctgagtatgaaatataatcaagaaaaatatttctggtgtggagaaaaaggagtcaagaatgacatctgtagtaagccaattgtatataacctttggaataaatggtcatagttgtgctgattgcccaagaacagaccgtaatgaaaggaaagcaggcacagctgagccattttcaaggttcccccaaatggaaagagaagcagagcaactgagctgttaagagctgccaaaattaatttagagaagccacgtaggatggggaaacatgaaaagaacttcagaagagagctggtagaaaaataaaaatgaagtttttgatattgcaggaagaaagattaagggaaaataaatgaagtagctggggatgaacaagaagtactatagggaagtatcaggaaaaaagaattcttgctgaggaaaacaaataaagagcataaacaaagaacataaaactcaggagagaggtctcaggaaggacagtaaacacattttaagagattcacagggaaaaggccaaacagagcaaggataattggcctattatagatggactcaaaatcccaaagaaacaagtattacaaaaagagagggataaggtaaagcctaaaggcaatgacggcgataacaagggg

SEQ ID NO: 16103 - DNA, 1027 bp, Homo sapiens
ttttagtgatattttagttacattttacaattagaacaaacttgtctaaagcaataactgagacagagtggttagttccctgtctacgaggtcctggcttatccaaggtcttattttaatttttaagttgactggtaagcctttgagtcatgttttcgtatacttttaagttcttagtattcttatgtactggctcctagaagacagtgaccatagctctgagttttagaaaaaaatcattatgtgatgttcagttcaaactttaaaacttttaaagttgttacattgtttatcaattgaaatgaattttcttgtgcaaatttaaagtaagcattacaagatcagaattattgctgattttttttggaaagaggtagagtataaataaataaccagagttttttgtttgcatttatgatcaagctcaaagtgaatatgaaccaaaaaaatgaacaaaactacatattttttagtaaaatgagaacttaattttttttcaggttaaactacagaacaacatatcgtatcagatggcagacatacatcatttaaagggtaagaaccttaattccagattaaagataaaccaaggtcactaaatgcctaaaattgtgaagaattaagaaatagtaaattagcctagtgaaatacaattttctgaacaaactcctctgatggtaaaacatttatccttttgccttaagatataataaattatttaatgatgctttatatatgataaatccaagttaaaatttgagatctgtgtcttaaccttgagctacagacagggttatgcaatgaaatgttcttaagagaatactcaaaaaaaaattgagctgtagcttcagaagccatcaaatttctagggaaaaggtgagaagtgttccctctgtactgtgtccaatctgctaaattaattcattcaggtctagggatgctttggatagagcctccaagcttaaggttttagataccctgggaacagaaagaaacctggaaaatagataaatatataataaataaa

SEQ ID NO: 16104 - DNA, 1105 bp, Homo sapiens
tggatggtaggttaacaggattttaacattagggaaaactgagtaaggggtgattacttttctgtaaatctagaattatttcagaataagaagtttattttaaaaacaatcaggaggcccactaaccaaatcacaaacattacatctagaaaagcatcttattttattaatattaatattgtccattcatagaaaggtactgtcaatagtacattaaagatacaacatctttgttaactattttcaatggaaaagtatttttgaacagtagcttgttgacttttaattttgttcaatatttttcttatccatatctggaaaagagtgaagagtactatagcaatagccttatgagatagcattatagtgaagatgcacagacatgcaagctggctgctcaggttgtacctcatggattttctcacccttggtgtttatattgacatgttcaaaaatttcagtttatcatttcattcatcaatgattaaactatcagaattgattatagcttaccaacttacaggaaatgtgggatttggagtcagaaagactgtggttagaattccttcttcacaattctctagttttgtgactttggacaaactgcttttttttttttttttttttctgagacagagtcttgctttgtcacccaggctggagtacagtggcccgatctcggctcactgcaacctctgcctcccgggttcaagcgattctcctgcctcagccttctgagtagctgggattacaagcatgcgccaccatgcccgactaatttttgtatttttagtagagacggggtttcgccatgttggtccggctgattttgaactcctgacttcatgatccacccgcctctgcctcccaaagtggtgggattacaggcatgaaccaccgtgcctggcccaaactacttaactttttctatttaatggagtgttgcactgttgcccaggctggagtgcagtggtgccatcttggctcactgcaagctccgcctcccgggtttacgccattctcctgcctcaggctcccaagtaactaggactacaggcacccgccaccacacccggctaattttttgtattttttagtagagtcg

SEQ ID NO: 16105 - DNA, 1030 bp, Homo sapiens
gtttgagaccagcctgaccaacatggagaaaccccgtctctactaaaaatacaaaattagtgggacgtggtggtgcatgcctgtaatcccagctactcgggaggctgaggcaggagaatcgcttgaacccgggatgcagaggttgcggtgagctgagatcgcgccattgcactacagcctgggcaacaagagtgaaactccgtctcaaaaaaaaaaaaaaaaaccacacaaagactgaaaataaagggatgagaaaagatgttccatgcaagtagaaaccaaaaaaaagagcagaagtagctatgcttaaacaaaatggatttcaggacaaaaactaagagacaaagaaggtcattatatataaaagggtcaattcagcaatgggatataacagttatacatatatatgcacccagcattggaacaccctgatacataaagcaaatattagagctaaagagaaagataaatttcaatacaataatagctgaagacttcaacaccccactttcagcattggacagatcatccagacagaaaatcaacaaagaaacatcagacttcatctacactatagaccaaatggacctaatagatatttacagaacatttcatccagtggctgcagaatacacattcttctcctcagtacatgcatcattctcaagggtagaggccatatgttagaccaccaaacaagtcttaaaacattcaaaaaattgacgttatatcaagtatcttctctgaaccacaatggaataaaattataaatcaataacaagaggcattttgggaactatacaaacacatggaaattaaacaatatgctcctgagtcactagtgggtcgatgaagagattaagaaggaaattgaaaaatatcttgaaacaaacataatggaaacacaatataccaaatcctgtgggatacagcgaaagcagaactaagagggaagtttatagctataagctcctacatcaaaaaagaagaaaaacttcaaataaacaacctaacaatgcatcctaaagaa

SEQ ID NO: 16106 - DNA, 1062 bp, Homo sapiens
cacacacaaaaaggaaagatattccatgttcatagattggaagaatcaatattgttaaaatgttcatactacccaaagcagtcacagattcaatgcaatccctatcaaaatatgacattcttcccagaaatggaaaaaacaatcctaaaatttatatgaaatcataaaaggcctagaatagccaaagctatcctgagaaaaaagaacaaaataggaggaatcacataacctgacttcaaattatactacagagccgtagtaaccaaaacagcatggtactggcataaaaacagacacatagaccaatgaaacagaatagagaacctagaaacagttcatacatctacagtgaactcatttttgacaaaggtgccaagaatatgcactggggaaaggacagtctcttcattagatggtgctggggaagctgaatatccatacacagaagatcgaaactagctccctgtctctcaccacatacaaaagccatatcaaaatgaatttacgactcaaatctaagacctgaactatgaaactactaaaaacaacattggggaaactccctgggacatcagactgggcaaagatttcttgagtaaaaccccacaaacacaggcaaccaaagaaaagatggacggatgggatgacatcaagttaaaaaagctctgcacaacagaggaaacaatcagaaaagtgaagagtagccaggtgcagtggctgacacctttaatcctagtactttgggaggccggcagatcacctgaggtcagaagttcgagaccagcctggccaacatggtgaaaccccgtctctactaaaaatacaaaaattacctgggcatagtggcaggcacctgtaatcccaactactcaggaggctgaggcaggagaatcgcttggacctgggaggcagaggttgcagtgagcccagatcgcgccattttagtccagcctgggcaataagagcaaaactccatctcaaaaaaaaaaaaagaaaagaaaagaaaagtgaagaggcaacccacagaatgggagaagatatttgcaaactatctatctgaca

SEQ ID NO: 16107 - DNA, 1029 bp, Homo sapiens
gagaaaacctggattaccttgggtatggcaatgactttttggatacaacaccaaagtagcgatccatgaaagaaataattgatgagctggacttcattaagatttagaaacttctggccgggcacggtggctcacgcctgtaatgccagcactttgggaggctgaggcaggcagatcacgaggtcaggagatcgagaccatcctggctaacatggtgaaaccccatcgccactaaaaatacaaaaaaattagctgggcgtggtgccgggcgcctcagctactagggaggctgaggcaggagaatggcgtgaaccagggaggcggaggttgcagtgagctgagatcgcgccaatgcactccagcctgggtgacagagcgagactctgtctcaaaaaataataataataataaagaaaaagatttagaaacttctgtgagtgaaaatgtcaagagaagacaagactgggagaaaaattttgtaaaagacatatctgataaaagatctatgcaaaatatacaaagaactcttaaaacttaacaattagaggccaggcgcagtggctcatgcctgtaatcccagcactttgggaggctgaggtgggcggatcacgagttcaggagatcgagaccatcctggccaacacagtgaaaccccgtctctactaaaaatacaaaaaaattagccaggcatggtggcaggcacctgtagtctcagctacttgggaggctgaggcaggagaatgggttgaacccgggaggcagagcttgcagtgagctgagattgcaccactgcactccagcctgggcaacagagcgagactccgtctcaaaaacaaacaaacaaacaaacaaacaagcaaaacactctgcaggatattatccaggagaacttccccaatctggcaaggcaggccaacattcagattcaggaaatacagagaatgccacaaagatactcctcgagaagagcaactccaagacacataattgtcagattcaccaaagttgaaatgaaggaaaaaatattaa

SEQ ID NO: 16108 - DNA, 1069 bp, Homo sapiens
tccagcacactgaaaacaccaaatgctggcaaggacgtggaacaaaagcaatttttatgtgttgctggtgagaatgcaaaattgtcaactacttgggaaggtagttgggcagtttcttacaaaattaaacttactttgaccgtatgatcctgaaatcttactccttggtatctatcaaaaagagttaaaaacttgtatccacacagtagcctgcacataaatgtttatagaagctttattcgtaattgccaaaacttgaaaacaaccaagatattcttcagtaggtgagtggataaactgtggtacctttggacaatggaatattatttaccactgaaaggaaatgagatattaagacatgaaaagacttggagaaagctgggtgtggtaattcacacctgcagtcccagcacattgggaggccaaagttgacagatcgcttgagcccaggagttcaagatcagccttggcaacacagtgaaaccccatctctacagagaatacaaaaattagctgggtgtggtggtgtgtgactgtaatctcagctacccaggacgctgaggtgagataatcacctgagcctgggaagttgaggctgcagtgagctgtgactgcactccagcctggacaatggagtaagaacctgtgtcaaaaacaaaaaagacttgaaaaaaattaaatgcatattactaaatgaaaaaagccaatctgaaaaggctacatactgtataattacaactatagatattccggaataggaaaaactgtggagacactaaaatgcaattaaaaaattagtagttgcaaggggatggggtagagagagagaggatgaataggcagagcacagaggatttttagggcagtgaaatgctctgatactataatggggagacatgtcattatacatttgtccaaacccatagaatgtacaacaccaagaatgaaccctaatgtaaactagggaccttgggtgattacagtgtgccagtgtaagttcatcagttttaacaaatgtaccactttggtaggggatgttaataatcggggaggctatccatggccatgt

SEQ ID NO: 16109 - DNA, 1078 bp, Homo sapiens
tttagggccgggtgcggtggctaatgcctgtaattctagcactttgggaggccaaggcgggcgaatcacaaggtcaaaagatcaagaccatcctggccaacatgatgaaaccccgtctctcctaaaaatgcaaaaatcagctgggtgtggtggtacgcgcctgtagtcccacctactcaggaggctgaggcaggagaatcgcttgaacccaggaggcagaagttgcagtgagctgagatcacgctactgcactccagcctggcgatagaacaagactccgtctcaaaaatataataaaataaaataaaaaataaagctatctttatttaccaaagattgccaaattcatatgaacttgaaaagcatgcaggctagttatttaatttataagtgttcatttatttataggtcagtgataccatgtagacaatatacaaacatacatgtatacctgtacacataatacagacagacaaaagtaaagactttataactttattttaaaattttagccatgaggccaggtgtggtggctcatgactgtaatcccagcactttgggaggccgaggtgggcagatcatttgaagtcaggagttcgagaccagcctggccaacatggcgaaaccccgtctctactaaaaatgcaaaaaaaattacatgggtgttgtggtaaacccctgtaatcccagctactggagaggctgaggcagaagaatcacttgaacccaggaaatggaggttgtggtgagccgagattgcaacactgcactccagcctgggcaacagagtgagactccatcaaaaaaaaaaatttttttttaataaaacataaaattttagccacgagaaatggctacatttgctttctcatttaacatttgctttctcataccttcccaataaaactcactagtttaaaaggatagttgtattcaaactatgcctttgtaaatggaaaaggttaaagtttatctattccacatgaccaaagcccttactcatttttttctctactagtttctgaagtttgtagtctgatatttgagatgtcttacagaatgtctagcattctgtttg

SEQ ID NO: 16110 - DNA, 1694 bp, Homo sapiens
ataacaagcaggaaactaccttaaggctatgaaaaactgagacattaattggatttctgcagtgatttaaaaaataatatgttgatacaaaattattttacttacagatgatgaagaacgagagcttcaaatggatcctgcagactatggaaagcaacatttcaatgatgtcctttaagtcctaaaggaatgcttcagaaaacctaaagtgctgtaaaatgaaatcattctactttgtcctttctgacttttgttgtaaagacgaattgtatcagttgtaaagatacattgagatagaattaaggaaaaactttaatgaaggaatgtacccatgtacatatgtgaactttttcatattgtattatcaaggtatagacttttttggttatgatacagttaagccaaaaacagctaatctttgcatctaaagcaaactaatgtatatttcacattttattgagccgacttatttccacaaatagataaacaggacaaaatagttgtacaggttatatgtggcatagcataaccacagtaagaacagaacagatattcagcagaaaactttttatactctaattctttttttttttttttttgagacagagttttagtcttgtttcccaggctggagtgcaatggcacaatcttggctcactgcaacctccgcctcctgggttcaggcaattttcctgcctcagcctcccaagtagctgggattacaggcacccaccaccatgcccagctaatttttgtatttttaatagagagctaataattgtatatttaataaagacgggtttcaccatgttggccaggctggtcttgaactcctgacctcaggtgatcctcctgcattggcctcccaaagtgctggaattccaggcatgagccactgcgcccagtctacacactaattcttgttagcccaacagctgttctgttctatctacccctcatttcacgctcaaggagtcatacctagaatagttacacacaagagggaaactggaagccaaacactgtacagtattgtgtagaaagtcacctccctactccttttattttacatgagtgctgatgtgttttggcagatgagctttcagctgaggcctgatggaaattgagataacctgcaaagacataacagtatttatgagttatatcttagttcttgaaattgtggaatgcatgattgacaatatatttttaatttttattttttcaagtaataccagtactgtttaactatagccagaactggctaaaatttttatattttcagagttgaagttggtgaagacattcatgatttaaacaccagatcctgaaaggggttaaatctactttgaaatgaatctgcaatcagtatttcaaagcttttctggtaattttagtgatcttatttgattagactttttcagaagtactaaataaggaattttaacaggtttttattaatgcacagataaatagaagtacagtgaggtctatagccattttattaaaatagcttaaaagtttgtaaaaaaatgaatctttgtaattacttaatatgttagttaagaacccgtcaagcttatatttgctagacttacaaattattttaaatgcatttatcttttttgacactattcagtggaatgtgtaagctagctaattcttgttttctgatttaaagcacttttaaatct

SEQ ID NO: 16111 - DNA, 1073 bp, Homo sapiens
ttgggagggtgaggcaggagaattgcttgaacccaggaggtggaggttgcagtgagctgagattacgttgctgcactcttgcctgggtgacagagcgagtctgtctcaaaaaaaaaaaaaattaatatttttttacgtttgcattatgaaataatgatccttatgtctccttaagcattccgttagattctacattacttttcttcaggaatgctacctgaggtgtttttgctgtggttggagaggttgaattaagagcatttttcaattttagtgttttagatttttagaaaaaagagggaattggaggtaacctataaatataatttaaattacttagttttactgtttttttaacttaaaattaggaaacatttaaatattaaaaataaattctaatttggaagatttagtcatatagacactccttatacactgctagttcaaaccacttttccagaaagcagtttgttagtatttctagagatactaccaaatgttaacaatctttgaacttgtaagttcacttctaagaaactgtcttaaggaaagaatcagaaatgtagactgaaatttatgtggttatttcatttgaggtgatgttagtaattatgaaacagtttattttccaacaagtcagtgatcaaataatgaaacgtttatctgtatattggaatatgacatgaccattaaaagttatattcttaatttttttttttttttttttttttttgagactgagtctcactttgtcacgcagattggagtatagcggtgcaaccttggctcactgcaacctccgcctctggggttcaggtgattctcctgcctcagcctccaagtagctgagattacaggcgcctgccaccatgtccggctaatttttgtattttttgtagagaaggggcgtttcaccatgttggccaggctggtctcgaactcctgacctgagatgatctgcctgccttggcctcccaaagtgctgggattacaggcgtgagccactgcatctggccaatattctcaaatttttaaaacaacattggtaaaatatagtataaaaggggaaaaaa

SEQ ID NO: 16112 - DNA, 1081 bp, Homo sapiens
atggtgtattctactacttatctaggctatgtggtatagctttttgctcctaggctacaaacctgtacagaatgttactgtactgattggccgggcgcggtggctcatgcctataatcccagcactttgggaggccgaggcgggcggatcatgaggtcaggagatcgagaccacagtgaaaccccgtctctactaaaaatacaaaaaaaaaaaaattagctgggcatggtggcgggcgcctgtagtcccagctactcaggaggctgaggcaggagaatggcgtgaacctgggagatggagcttgcagtgagctgagattgcaccactgcactccagcctgggtgacacagcgcgactccgtctcaaaaaacaaaacaaaacaaaacataatgttactgtactgattatcatgggcagttgtaacacaatgttaagtatttatgtttctcagcatagctaaacatagaaaagaaacagtaaaaatagagtattataatcttacgagaccactgttctatatgtggtctgctgttgactgaaacattgtatggcacatgattctattgccttgctctgtctgctgaactgtgtgcacatagcacccagatcttggtttctaaatactgttctccactaaaggaactagggttctgtcttgttttatgcatatataattatgtcatatgccaaataatgagagttttgcttaccctttgtcatcactgggacttatttttttcttcacttattacattggttaggatctgtattaccatgttcagtagcagtggtgagaacaacacccttgccttgtccttaggggaagagaatttgttttaccattaggtatgatgttagctagatgtttttcttagttatcttttattagttggtggaagttcttttctattcctgtttgtaaaatgtttttattttgttgttgagttttctcaaaggctttttggcttcagatttctcttattcttttcttatttatttatttattttattttttttgagacggagtctcactctctcgcccaggctggagtacagtggtgcgatctcagctcaccacaac

SEQ ID NO: 16113 - DNA, 1028 bp, Homo sapiens
cactccagcttgggtaacaaagtgagactctgtcgtctttgttttaaaaaagaagaaagaactttcttgagaggaactggctctcccaacttgctaaacgtggctataaagaatgcaatgggccaggcttggtggctcacgcctgtaattccagcactttgggaggctgaggcaggcggatcacctgaggtcaagagttcgagaccagcctggccaacatagtgaaactccatctctactaaaaatataaaaattaaccgggcatggtgacacatgcctgtcatcccagctactcgggaggctgaggcaggagaattgcttgaacccgggaggcagaggttgcagtgagccaaaatcactccattgcactctagcctgggtgactccatctcaaaagaaaagaatacaatgactgttgggtttcagtgcgttgatttgtcttaaggtaccagttactatatacaccgttgctcttgcatagctagcacaaatgttaacacaagttgttctagaatggactgaaagacaataaataaataataaataaataaatggattcaccacttttgtttgttaccatgcattcacagtaacaaaactctttgctaattagttggtgctggtatcaaataaatacatgtaggcaaaataccaagtccggccacattaataaggcacagaagtacaattctctacatactagatattacttctttttttatgtttgcagataaatctttcattcagtgatttaacttagcattggaaagtgggagggcatgcttcttttactgactttttatctagcagactttcagcactatctactatgcaaagatttatctctctgatattgtttaccccttttcaaccaatgcagtgtgataactttaagattcttcaggccgggcgtggtggctcacgcctataatcccagcactctgggaggccgaggcaggtggatcacctgaggtcaggagttcgaaaccagtctggccaatatggtgaaaccccatctctactaaaaa

SEQ ID NO: 16114 - DNA, 1041 bp, Homo sapiens
caaggctgcagtgagctgtgttcatgccactgcactctagcctaggcaacaaagtgagacctgtctcaaaaaataataataaaataaaaatattctttcatctgagattaataggaacttgaaatggtaaagttgttggagatttttttttgtgctgattattggaagcataatgtcagagatgaaaaaaaattctgctttacatctgatgtcatccattggacatacacaccacgttgactctgtctcaaaaggtgttaatacatgataattgcacaaaagattaatttttgtcttgaaagactattatctaccatttcatttctatagaaagactatagaaatttttattgggttctactttaaatttttatatctgagacgttacctatttggcttgtaagttacctttgtcttcttacatttaagttataattattgtcttggaaaattcccagcataatttctaaagcactatcaaaagataagctcttagctcaaactgggaatgaactatggcatgcaatatagaattacttcttgatcatttttaagtgtttataaattagaagtaaaatagtaagtcttctaagcagtgattttgatcaggtacagtggctcaccagcacttgaggaggcctaggaaggaggatctgttcagcccaggagttcaagaccagcctgggcagcataacaagatacttttttgtctccacaaaaaaatttttaaaaataatccaggtgtggtggtacatctgtagtcccacctacttgggaggctgaggaggattgctggagcccaggtcgagtccacagtgtttgctccactgtgctccagcctgggcaacagagcaggaccctgtctcaaaaaaaaaaaggttaaaagaataatttctggctggatgcagtggctcatgcctgtagtccctgcactttgcgaggccgggtcacctgatgtggatcacctgaggtcaggagttcgagaccagcctagccaacatgatgaaaccccatctctactaaaaatacaaaaaattagcc

SEQ ID NO: 16115 - DNA, 1027 bp, Homo sapiens
tgttcttaccagacagtacgtagtgcttcttgacttatatatttctgttcacgcttacctatatccaaataacttagacgctgctggccttatgtctcatctctacttctgtttctgagattttcctttgcatcacatggcacaaccccatgtggccctaaccccagcccagtacctttctacgtttcttcccactttcctccctcattctctgcctgtgtcttttaatactgaaacaccttcttgttcacatggtgaatctgttctgaggataggaactattattttcaacagttactctttccattctcatagtaaagaaacactctagcaatatattcctttatcttcagtgccacctcttatccccagtaaacaaacacattttgaaagcaatgtcaaattttaagatgcatgttatatttaagtatagttaaagtagtagtatgcacaatgaagttatagctttgacctaatctggaagtcactgtatgagaagttggaaaatgtcacctttgaacaatgttccacttactatggctggaaaatattgttaactagacatattcttgtgcagtggaattgtgtcgtgttcagaggcaataaatctcaaagaggccctgcttatcttagtttactgcaggttgaatatccctaattcaaaaaatgcgaaatctgaaatgcctcaaaatctgtaatttatcaccaggtgtggtggctgatgcctgtaatacctcccctgggaggccgaggcggggagatcacctgagttcgagagtttgagaccagcctggtcaacacggtgaaaaccgtctctattaaaaatacaaaaatgagccggatgtggtggcacacgcctataaccccagctactggggaggctgaggcatgagaattgcttgaacctgggaggcagaggttgcagtaagccaagatcatgttactgcactccagcctgggcagcagaatgagacggtctcgcaaaaaaaaaaaaaaaaaaaaaaaaagaaaatctgaaacttagtcg

SEQ ID NO: 16116 - DNA, 1025 bp, Homo sapiens
atttagttactgctgcctttggttttctccaggaatgaagtattcagcacagtgactcagtatttttagttattttgcatgggctggtagtacctctgttatgctctcagttacaatcaatttaaaactgtataacagtcttggtacctaacagtagctatgcataatcctgtggcacagtacactcccaagccaccaatgcagttaatatgctctcatagtggtttttctatgctatatgaaaatagtcttcaagccttggttctctaatgcagctaccacaagaggttgatatttttatagtggcgtgtaatctccttttcgggaggctttttatggaaggtagaatttgtaaaagttcgtatgctttgcctctcaactgcattaacatgccacaggctcagactgtttttgtgtaaaggatgtcaaagaacggcactttttctaaagagaagtttgatattttgtatgcttgttaagaaagtacagtattggaaattaaaggtggacaactgataattgaggagtatgtcaattaattttttatgtatattacctgtttacttgtacaacttactgtacaaattacatgcagcttcattttcaaatgaatccttaaaataaggaaatctttttaggaaaacatttaatttttgtatttttgattttaaaggcatgagttatgtcaattttcagtgtattaatgaagattttaacttttcatcaggttgagtgttttcttactatattatctgttgtgtatgtagttagcatattgtgtcactgaactgtttaaaaatctagcatgtagagcaagcctgttttgtggaaaatccttattcattaaaaaaataatcatggcagattttctgcaaaaaaaaaacaaaagcatttgcaattcagaatactgatttttttaattttatttaaagaaaggtattttgcttgcaggaaaaaaatactacagattcattttaatgagaatctttgaaatgtatttatctttagggcatctgggcatcttt

SEQ ID NO: 16117 - DNA, 1032 bp, Homo sapiens
ccggagcctctcgcaggaatgagaccgggaagttgggaattgagccttgtagcttatccatatggaaagccttgagactcgcctgtcttttcgagctcaagtcagcccagggccagtaactcatttatgaccctgaggtctacttatacagtttgttcgagggattagatgagtgaaatattgtagttgaatttcaacctttttttcccacacgagacagctagaaacagtaaagggaaataacttttggctctcccttcccccaccctgtggtaaaaagaatgaactgaccactgagatagcccgcagttagtggacagaaacccaggtagttcacaccgtgacctgagaaatggagagacgacagttactcaactacacacatacgacacctaaggaaatattgaagatttggtggtggttgtagatgacgggcccgtggttttttgttgttgttgttgttttgtctgtgccttgtagataatcatttttacctcagtcgtttgattttgaaaactccgaagggttcattatacagctgtaagtgacatttacttctacatggtttttttttttttttacagtagttacagaagtctcaaatccaaaatgttaagactcttattaacaaagttctcaaaatcttgttatatttgtgcagataaagttttgtgtgaaatggaaaatgatttttttttgtggttttgcctaatttagtgaatttctcctaatttataaacacaaacggagaaccctataaatcctgcctgggctgaaaagtttaagctagataatcactatgaacttaataggaatgttgttttgagtttttctgttctctccccagtccgatgaggttggatgtgtggatgtccgatttactgacagcctgaggttcaagaatgttgtgagctttgcacacattgaagttaataaatcgactggttattgtttgaagacactcagatgctttatttacatgttgtagaaacatgggactagattttgttaccagccgcattacaagatatt

SEQ ID NO: 16118 - DNA, 1072 bp, Homo sapiens
agaggtggagtttcgccaagttgcccaggctggtctcaaactcctgaggttaaagcgatcttcccgccttggcctcccagagtgctgagattacaggtgtgagccactgcacctggcctatttattttgagacagatttgtgagactggctaatttttgtgtttttggtagagatagagtttcgccaagttgcccaggctggtctcgaactcttggagtcaagtgatctatcctcctcagcctcctaaaatgctgggattatgggcgtgagccagcagactcagccatatcaccaaatttctgaattcttatgtttttgtactttttatgaggagttgcagacaaggcttagtttccgtgaggtcttctgttcatgtcagcatctagtacttaacctttaaaaatacaggtttaatgtcatttgtaatgtcctgggaaatgaaaggaaaactgatgtttttgttattataatttgctccagcactttactctcatttagtagacttagtattttgctgtccttgacttttcaaatagctgtctggcagtggcagaagtggacttaggtgaaactgtacaaccgttaatatatatggcaagaaaagactatgcttttccccagttaaaaagatgagaactcgggagcatagtttcccatcaccctggctttatttaccttttttactatcctgatagttgtgcagaggtagtgggaagaattgttcacttggcatatatgactccttcctcattgctggtatgatatgtaggatgtgttgactgagaaggcagtgagtacctactggacacaaggacaacataacttttgctccattttactagtctcctagcatttcagtagaacagtttagaagctagatttattcaaagggtacagagtttgcagaaacttatagctgtgttcagccatctcacgcatttgcctctgtaaccatatagcatttcttttaaaagatcctgaagaggctgaggcaagaggattgcgtgagcctaggagtttgaagccagcctgggcaacatagcaagaccccaacacatttaaagagagagc

SEQ ID NO: 16119 - DNA, 1035 bp, Homo sapiens
aattgtttaccagactgtgaattttgtaagcaagtgtttaaaacatgctttttaaagaccttccttaacattgtgtttaaagccttaaatgaagctgtttacatgtatacatttaaaggatgtatctcagcatgttactctaaagatgtgttgtaagctgctttattacagtgaattgaactctactaaaccgtgaactttgtaagcaagtgtttaaaacatgctttttaaaaaagtaaatcattttattttcaataaaaaggtcagtcaaatgtttagttatttaaaacttttttaaaattagtttttataattggcaaataatgtacatatttatggggtatattgtgatgtttcaatgcatgtatacattgtaattaccatttcatcactttaaacatttatcatttctttgtggtgttaacattcaaaattttcttatggaactatcttgaaatatataacattgttattagctataatcaccgtactgtgtaatagaacaccagaacttattcttctaactgtaactttatacctatgacactttaaagaactttggtccattcagagcaggtcccttagtttttcactgagattgtgggttggctatgtctgggcctgggtttccttttctttaaaatgggggaataacactaccttcttacaggactgttgtgagaattaaccttgttactacacctgtttctcagaagggttttaaatatgcatcttctggaagtaagcaaatggtcctcctatctgaaacactgccccctatcactcacagatccagccttcctgtgttctgtgaagatttaaacaacaaaaaatgcctagtaattcacttttatttttagctctttggttccttttgtactgtgatgtatagcacttagcaaactaacggcgaaatacaaacgtttgatctctaatttctaactctagtatcacagttactcaaataatgactagctggtttgctttcaatctgttaaaactgcgagctgtgggttaaattgctgaagtaagatg

SEQ ID NO: 16120 - DNA, 1044 bp, Homo sapiens
ctccaaatcagagatctaaataaaaaaaaaaatgaaaccctatacattctagaagaaattgtgggtgaattcttaggtgtaagaaaagactttctggctgggcgaagtggctcatgcctgtactcccagcacttcgggaggctgaggtgggcggatcacctgaggttgggagttcgagatcagcctgaccaacatggacaaaccccatctctactaaaaatacaaagttagccaggcatggtggtgcatgtctaatcccagctgcttgggaggctgaggcaggagaattgcttgaacccgggaggtggaggttgtagtgagcctagatcatgccattgcactccagcttgggcaaccagagcaaaactccaactcaaaaacaaaacaaaacaaaacaaaacaacaaaaaaacaagaaaagactttctaattgacttgaaatccatccagaggcaatgaaagaaaagactggggctaggcacggtggctcacgcctgtaattccagcacttcgggaagccgaggcgggcggatcatgagatcaggagttcgagaccagtgtgaccaacatggtgaaatcctgtctatactaaaaatacaaaattagccaggcatggtggcatgtgctggtaatcccagctactcgggaggctgaggcaggagaatcacttgaacctgggaggcagaggttgcagtgagctgagatcgtccctgtattccagcctgggcgacagaacgagactccgtctcaaaaaaaaaaaaaaaaaaaaaaaaaaccatttctactaaaaataaatgagccaggcatggtggtgtatgcctgtaatcctagttactggggaggctgaggcaggagaatcgcttgaacctaggaggtggaggttgcagtgagctgagatcgtgacattgcactccagcctgggcaagaaactccgtctcaaaaaaaaaaaaaaagtctggtaaattttattgcataaatttgttgggatgcatagcaattcatggggaaacaatagaggcatttccatcaagaaagcaaggatgcc

SEQ ID NO: 16121 - DNA, 1042 bp, Homo sapiens
atgttgtggaatctctcgagtgcaaagactgtctagttatttatcaggctatttctactgatgaactgcttcaggtgggggagggaaacttatttttatttgcctgatttaagtgtctgagaaacaaatctttgttctcttaggctgcaatggaacaactttaccagggttttggcatttcctttcctttcctttataaaacatgctcagcaaactgcaccagttaactacagtttggtaaattgttatgttaacaattatgacatctgcaatgttttataaagcaactaatttaataaaatcactgttgtgaggacttaaattttgtgttacctcccaagagatactttttgagagtatagaacacagctcttgggagtacagttctctacgttctctactaaatcttaataaatgcttgacatagttacagctttaaaacatgagtgatttgccaggtccttatgttgtcaccatagagcaacaaaggtatagggctgccttcctcttatttatttggggacattattttgttatttagataccaaggcctaattaattaagtacctataagaactatttatttggagtaactgagcctgtaactcaggtttatggctgttaagtatagattggggaatctttattatgtcttctcctaagcagtttaaccaaatgtgtggttagtgtttttttattcccctaagacagaaagaacaaaaaatgttttaaatttctcttatataggaaataataggaacgtcaaagctctgtatacctactaagtggaaaacaagaccatcatctaagtgatttgagaaattaacaaaagtagtgactacacagcaataattacagtaaattaaataaagattcctttaaggcagacaagggctaagatttccttagcagtaataatgacatacactgaattgaaaatctattttattacagaaagatcagtttctaacaaatgaaaatgtatcacctgttccttaactgtgtaaataataattaaatttctttgaaactggaatctgca

SEQ ID NO: 16122 - DNA, 1026 bp, Homo sapiens
tctctaacctggcactgcgtcgctggcttggagacaggtgacggtccctgcgggccttgtcctgattggctgggcacgcgtttaatataagtggaggcgtcgcgctggcgggcattcctgaagctgacagcattcgggccgagatgtctcgctccgtggccttagctgtgctcgcgctactctctctttctggcctggaggctatccagcgtgagtctctcctaccctcccgctctggtccttcctctcccgctctgcaccctctgtggccctcgctgtgctctctcgctccgtgacttcccttctccaagttctccttggtggcccgccgtggggctagtccagggctggatctcggggaagcggcggggtggcctgggagtggggaagggggtgcgcacccgggacgcgcgctacttgcccctttcggcggggagcaggggagacctttggcctacggcgacgggagggtcgggacaaagtttagggcgtcgataagcgtcagagcgccgaggttgggggagggtttctcttccgctctttcgcggggcctctggctcccccagcgcagctggagtgggggacgggtaggctcgtcccaaaggcgcggcgctgaggtttgtgaacgcgtggaggggcgcttggggtctgggggaggcgtcgcccgggtaagcctgtctgctgcggctctgcttcccttagactggagagctgtggacttcgtctaggcgcccgctaagttcgcatgtcctagcacctctgggtctatgtggggccacaccgtggggaggaaacagcacgcgacgtttgtagaatgcttggctgtgatacaaagcggtttcgaataattaacttatttgttcccatcacatgtcacttttaaaaaattataagaactacccgttattgacatctttctgtgtgccaaggactttatgtgctttgcgtcatttaattttgaaaacagttatcttccgccatagataactactatggttatcttctgcctctcacagatgaagaaac

SEQ ID NO: 16123 - DNA, 1207 bp, Homo sapiens
tgaactgagaaatgaactttgaaaagtatcttggggccaaatcatgtagactcttgagtgatgtgttaaggaatgctatgagtgctgagagggcatcagaagtccttgagagcctccagagaaaggctcttaaaaatgcagcgcaatctccagtgacagaagatactgctagaaatctgctagaaaaaaaacaaaaaaggcatgtatagaggaattatgagggaaagataccaagtcacggtttattcttcaaaatggaggtggcttgttgggaaggtggaagctcatttggccagagtggaaatggaattgggagaaatcgatgaccaaatgtaaacacttggtgcctgatatagcttgacaccaagttagccccaagtgaaataccctggcaatattaatgtgtcttttcccgatattcctcaggtactccaaagattcaggtttactcacgtcatccagcagagaatggaaagtcaaatttcctgaattgctatgtgtctgggtttcatccatccgacattgaagttgacttactgaagaatggagagagaattgaaaaagtggagcattcagacttgtctttcagcaaggactggtctttctatctcttgtactacactgaattcacccccactgaaaaagatgagtatgcctgccgtgtgaaccatgtgactttgtcacagcccaagatagttaagtggggtaagtcttacattcttttgtaagctgctgaaagttgtgtatgagtagtcatatcataaagctgctttgatataaaaaaggtctatggccatactaccctgaatgagtcccatcccatctgatataaacaatctgcatattgggattgtcagggaatgttcttaaagatcagattagtggcacctgctgagatactgatgcacagcatggtttctgaaccagtagtttccctgcagttgagcagggagcagcagcagcacttgcacaaatacatatacactcttaacacttcttacctactggcttcctctagcttttgtggcagcttcaggtatatttagcactgaacgaacatctcaagaaggtataggcctttgtttgtaagtcctgctgtcctagcatcctataatcctggacttctccagtactttctggctggattggtatctgaggctagtaggaagggcttgttcctgctgggtagctctaaacaatgtattca

SEQ ID NO: 16124 - DNA, 1066 bp, Homo sapiens
gcctccagggttcaagcaattctcctgcctcagcctcctgggtacctgagattacaggcacctgccaccacccccagttaattttttgtatttttagtagagactgtgtttcctcatattggccaggctggtctcgaactcctgacctcaggtgatccacctgcctcggcctcccaacgtgttgggattacaggcgtgagccaccgcgcccagcctaattgttctatttttagtagagacgaggtttcactatgttggccaggcagatctcaaactcctggcctcaagtgatccacccacttcagcctcccaaagtgctgggattacaggcatgagctaccacacctggctgttttagagattcttaatctagattttctgagtgggttttagggagtttgggaggccttaaacttatgtgcaaaattttgaggacatgtatattttctgggataagtcttttagctttcatcgtattctcaaattggattgactcaaattaggttaaaaacaacaacattgtcaggagagctcatcttaaaggtccagcccctagcttctacttgagttgaattgtagggcaaactcctatttatccagcgttttttttttgagaccgagtctcactctgttgcccaggctggagtgcagtggcgcgatctcagctcactgcaagctccgcctcctgggttcacgccattctcctgcctcagcctccccagcagctgggactacaagcgcacgccgccacgcccagctaattttttgtatttttagtagagacgcggtttcaccgtgttagccaggatggtcccgatttcctgacctcgtgatccgcccacctcggcctcccaaagtgctgggattacaggcgtgagccaccgcgcccggcctatccagtgtttatgaatgttgtatttttataacagtccccatgtattaccaaatttcaagttacaaaaaatacaataaaaagtcacatgaaacgtcattttcctctgaagattgaaatggcactttagaatcttgtatgcctcagatgcaagaaatcaactcctttaaatat

SEQ ID NO: 16125 - DNA, 1020 bp, Homo sapiens
cgtccggggccagacgacgatatcagcgcggggtccccacaacgccatggggcagagccaactctcgagcgcgtgatcgaagcccgcagttttttcgcccccgtcacttccgggtgcgacaatctcttctgtccggccagccgctggagtcgttaggtgccgccttgcttctgacgagccacacgtttgcttcttccctgtgttcccagctggagggacatgagtgtccctgggccgtcgtctccggacggggccctgacacggccaccctactgcctggaggccggggagccgacgcctggtacgtactatcgggtgggaagcgcggcccgggctgggtgtgaggggcggggacctgagtgagtagaactccggagaaaccctgggggagtaagcggtttttggcggctgcggcccccgggccctgccccgagtgcagaaatggggaaccgcgccggcccctctgcccagcgcaatgggcggaactgaagtcccgaggggaagctttgtattgggggtgcaattgaaggcggttgatggtgaagccattctgagtttatgtgttgactccggtacgtcattggttatttgtcatacggcagtggtgggggatggatttaccagaaagatgatcagcttataattcagagaggtgacgtatcctataatattgaccactcatgaaatgcttggtcagctcggtgatattacttcatccctattcctgcagcagtcttctcgaccgagttccaggagggatttaagctctaatgccctaaggcatccattgaatggaatgaattaacttgctgtgcacccaaaatggtactatttatgtaccatccttgggagaactgagaaaatggtcactcagagcattttctgtgttctgtggtttagatgaggccttagatgagaaaggctgcagggctccttggatatgctttttcttttacctcctgtttcagaaatataggggttacccccaaatagtgctctcagcactttcctgttcatgct

SEQ ID NO: 16126 - DNA, 1029 bp, Homo sapiens
ttttcaaatgtgttatttgggtcctttggacagtagaggcagggaagaaattataggagtgaaaaagatgtattgggcagtcatgcccatgaaaggaaaagggaagagataggattgggcagaggaagcccaattctatcatccatttatcttggaccaagatgaatctctgacagtctttgcaagcccaatggtgagcttctgagcaaagtttgcccattagaagagtcctctgttggatagaggaggttcttttaccatagtcttgttcagtcactggccggggctaacacctgagaagagcctgatctcagctcaaaatctgaggtggatgtgaaggaggctgtcagctagccacacttctcacatctggctagagtaagttcctgaagaaaaatatgcacagcacagccacatttcacatttatgccatagagttacttctccatgcctatttggagtaacttttccagggttccagtgaaccactcacactgagaaaaaaggttggtggaccgtagtataactcctgttactgcagtttggtctcaggattgcaactgatactcattttctcactcctcaaccagccatcctaaattttcttcaactttagttatctctgctgggattggtgattgttatgtttggatatgatttgtttatccctaccaagtctcatgttgaaatttaatcctcaatgtgatggtgttgggaggtatttgggtcatgggaacagattcctcatgaatggcgtggagcccttctggcagtagtgagtgagttcttgttctggctagatggattaattccctaggaatggactagttcccaagagagagagttgttataaaaccaggttgccctttgagtctggtccctcttcatgtagtgcctattttccctttgaccgtctcagcacaaaagttctcaccagaagccaaggaggtgctgataccatgctgcttatatagcctgcagaattgtgagctaaataaacctttttctttataaacttcccagcctcag

SEQ ID NO: 16127 - DNA, 1045 bp, Homo sapiens
caggtgagatatatcttctctatttagtcctctatattaaataaagcattaaaaacctgctgatacaagagaccttctaaatactaggtgatttttgaatcgtgtttcagaagaggcttgtaggctgttttgtgttttctgtgttcagcagatggtagtaactagccactaccctcatcattacactatactgctatacattctattgctttccatttcttcaatataaagatctcaggaacaatgaaaattataaagcatagaagaacattaaacagtttttaaatcccattaattgtccatttctcatcatggtcttaagtgagccccaaagtaataatgttcaattatatttgagtcaatcaaaaatattaatatttcttcttatcattgggcagaagttggtattctcattccaggacggtttctgactaccagattggtcttgggcatgtcctataacatctttgggcttagtattttcactgataaataagattgggttgacctcttgggataactagagtccctcatactgcctgtggtttctttcactctgctgtttgtccaaatgtgagtaacaataaaggaagaattttcactaataagaaggagtccagtttcaggatgtcagctggaccacatgcatagcttgtagatctctcctttttactctttgagatattctttgttttctgcaatagctagacccaaggccattccattatttctaataggtaggataatctcatgtttcaaaagtatcaactatatatagtatagttcaataaaataatacatggggaataaaatattcaataaaatattagtacatggggaaatatttccatgataataaaagattgagacatgccatgttaaatttaaactggttctttttttatctacttagaatctgcaacacgtgaatgtacactgaattaccaataagagaatatagtataaaatgcttccaaaatattttggtcatggaaccctaactttcaagaaatattccatgggatcaacatttcaaagagtacag

SEQ ID NO: 16128 - DNA, 1065 bp, Homo sapiens
tcataaattaatcaatggggacagtttataaagctactttatacacaaaatgaggatatattttcctggtcttgttttagtccattgctaatacaaagcagtatatttccaataatgtatttccttttattaaagtacaaatatatcctttagatgcatgatcctaaactgacagttttttgaaatgtctgtagcctgagtatcctgtggcataaataataattagacactatctgaaagtcagaagtgtcagttattctccaaggccatatttatataagatttggaatcaaaaatttaaaattctgtcatgaccttttatcaaagaggaaaacatttggccaaatttacttataatcacaacttaatattgtaatcttactgtcaagaaggttagactaggaaaggaaagaaaagaaacagataattattaagtgggttttatgtgccaaggattgggttagatggtaacatacgttacctttaattaaaggagtatcattattgattatttaataattagctctcctgaagttatttccaaccaccgtgacataaatactgcagacagtcaagtctttattactcccttaaatgtcctcctattgtaacaattctgcccttatgaatgataatgaaaactgctaagaaggagataatgttaaggaggccaggatggactgagattctttctgatattaacaataaactgacaggtcacccacaaaaatgtaaaaggtacattaaaattaagtaattcacccaatccccagcaaatttcagtgatagccttgagaataattgtggtcaccagctacaaagcttaggaaaaatttaggacatatgcaaggataattaagaaataggcaaattaaaattgaaatgatgacttatgacaatggcagtgcatctcttcactgactgctattgggtggtatctattccctcatcactttgttgtgtatacctgtgagaaacctttgagaaatttcacttcagacagtaagaaagaggttaatgagtcagacctttctgcttttcccaactgctattttatctctgacg

SEQ ID NO: 16129 - DNA, 1049 bp, Homo sapiens
aataggtggtggctaatcttgagaaacatgatgaataaaggtccttagcaaaaggaagcatggggaaaaatattctgtgagcagaagggttcttgccttttctaggactgtttgaatttggttaataagcctctcagctacaagctcaaaggagtaaaaacagagaccacttcccacatttccagacagtctaacatcttgggactatcaaacaattctgggtcagtgacagtctcggcaggcacctagtaaggatttggaagaagatttaatttgaatttaaaacacaaaataaggtggtatttcatctacctcagagttatgaaacagatttatattcattacaagtgaccaggtcatggatcctgttctagaggagcttgtggtctacaaggatcatttctacaaaataaaactaatcactttgtcagatttttactggcaggttttctaaccttcgcaaaaatcctgaaacacaggaatgattgtctatattttgtaactaaaggaacatccactatgatatatctattaacggaaatggatacaagtcacagaagtagcacagaacaagacacgacatactgtgccatggagcaacctaactctctgggatgtctaaacttagagcattaaaagagagagagagagagaaagagagggagagggagagagggagggagagagaaagagaaaaagagaaagagaaagaaagagagaaagaaggaaagaacctttagcaaatcctgaagaaagaaagaaagaaagaaagaaggaaagaacctttagcaaatcctgaaagaaaacacctttgattgctattgtggaggaatggctctattatgtatatttgtttaaaaactttctttacgtaatttttcaaacatttggaaattgtataaaatgagtgacagctcctttaaatagcaattgctatcactagccctcagtttaactgaatgttatctttaagaagtgaaaggagtaaacagtttctgctgtgactgaaagatgtgccgtagaaagtggaatgagccaccccagattga

SEQ ID NO: 16130 - DNA, 1120 bp, Homo sapiens
ttttggtctttctgtgtctgacttatttcacttaacattatgtcctctgggtttatccatgttatcacaaatgacaggatttcacacccttttatagctgaatagtattccattgtgtatatatgccacattttctttatccattcattcattcatggacacttgttgatttcatctcttggtgttgtgaaaagtgctgcaataaatatgggaatgcaggtatctttctgacacactgatttcagatcctttggatatatatgcagtagcagaattactgggtcatatagtagttctatttttaattttttttttaggaatctccatactgttttccataatggctgtattaatctacattcccacaccaacagtcaaggattcctctttctccacattctcaccagcatccattattccctgactttatgataatacccattctaactggggtgaggtgatatttcactgttttgatttgtatttacctaatgattagtgatttgtatttgtatttacctaatgattagtgatttacctaatgattatttacctagcgatcagtgattttgctattgagctttttgaggtcgttatacatgctgcatgttaaactctgtcagatgcatagtttgcaaatattttctcccattttgcaggttgtctctttgctttgtttattgtttcctttgctatgcagaagctttttgctttgatgtaatcccatttgtctatttttgcttttattgcctgtgcttttgtggttctattcaaaacaatactcacccaaggaaatgccatgaagcgtttcccaagtgttttctttcagtagttttatagtttcaagtcttacatttaaatatgtaattgattttgagttgatttttgtataaggtaagaaataagggtctagtttcctacctctgcatatggatatccagttttcccagcaccatttattgaaaagactgtcttttccccaacatatgttcttggcaccattgtgaaaaataatttggctgtggatttgtttctgagttctctattctatcccattggtctatgtgtctgattttttgtgccagtactatgctgtttgggttactgttgctttctagta

SEQ ID NO: 16131 - DNA, 1044 bp, Homo sapiens
tctcaaagtttatattgtgcttatctctaaaagtgttataattttgttttacatacatgtctgtaatctatttcaagttaatttttctgtaaagtttgaggttttgattgaggttcaaaatgaacctgttaccaatggatatccagttgctccagcagccatttattgaaaaggctatctttgctctcttgaattgctttttcaccactctaaaatatgagtggagcattttttgtgtaggtctatttctgagtttcttagtctgttccattaatctatgtgtctgtttctctactaacaacataatgtcttgattactgtagctatataacaagccttaatattgggtagagttattcttttcatattattcctctctgtcaaaattgttttagctattttagggctggggtcttaccatataaattttaaaataaccttgtctcttaataaaagaaaaaaaatttcaaaaatgtactgagattttgatagaagttgcgttaaacctgtagatcaacttagggagtatggacatactatgttgagctttccaatccatgaatatggtatgcctttcagtttattcatgttctctttctttcattatcattttgtaattttctgcatacaggtcgcataacagttttgttaagtgtatacttatgtactatatattctttggagcagttacaatttttcaaaaattacagtttccatgtgcacatttttagatatagaaattgtgttgattgatgtgctgatcttgtattttgtgaccttactgaaagcacttaataattctaggccaggtgtggtggctcacacctgtaatctcagcacttcgggaggccgaggcgggcagatcatgaagtcaggagttcgagaccagcctgaccaacatggtgaaaccctgtctgtactaaaaatacaaaaattagccgggcttggtggtgcacgcctataatcccagctactcaggaggctgaggcaggagaatcacttgaacccgggaggtggaggttgcagtgagctgagattgtgcca

SEQ ID NO: 16132 - DNA, 1033 bp, Homo sapiens
tgttgcgtgtcagatgaagttataacctttatttcagtcatcaaatctgatttacaaaaaataatgaaagaaggatagtctattggatgtacccatacttctgctcttcccattgttcattcttccttcccaatgctgcaagatacctttatttatgattacctttttgtttaaagaagttattttagcgagtctttaaggatatgtctgctcatgacaaattgacagatttttttacacttctttaatgtctgaggaggtcattgtttcctttacatttctgaaggataattttaccagatataaaatttatagttgagagttcttttttttttttccagcacttgaaaaatgtggtgccactttcttctggcctctctggtttctgatgagaaatccaactgtcattcaaatggttttcccccaataggtagtgtgtcatttctctgtggctgctttcaaaatttgttctttgtcttagagttttcagaagtttaatgatgatatttcttggtatgcatttctctggatttatcttatttggcattaccagagtcttgaatctgtacattgggttttttacccaaatttgggaagttttcagctgcaatatgtgcaaatattctttcaactccattctgattctccttttcgtagacattgatgatatgagtgttggattttttgtcattgtcccataggtcccaaaggctgtgatttttttttcttttttgtttttaaatagattattttctctttgttgttcagatggggtaaactgagtaaattatattgatctgtcctcaagttcattgattctctcctgtcatctctattgtattgagcccatttagcatgtttttttttttccattttggttattgtatttccagttctataatttctatttggttctttttataaaatttatatttctttgctgatattttctactttatatttgtttcaagagagtttataattgattttttaaaaatattataccttcaaaatccatctcagataatttcaa

SEQ ID NO: 16133 - DNA, 1026 bp, Homo sapiens
ctcagaagagtgtgctatatatagatggttcatagttttgcattgtagtacaacacttctctacagtcaccctgcttttgatcaaaagtaatctcaaagaaaaatcattcttgatcacagaataaggcttatcacattacatttggcttgattatttacatagatgcaacaagaatggtaatttacagatgtgagggtgatctggctgcgacatctgtcacctcattgattgccagagttgattcggctgatctggctggctaggcggctgttcccttcttccctcattgctccatgtgcatccctcccaaagctgtgcattgggtggaggaggacgaacatccccaatagaggaagaccaatagagagtatacaagtagctgtgctcccctgctagaacctccaaacaagctctcaagaatggtgatttaccaggcagaccttaaatttgctttgctggaaatttttgtgaggaatttcagattggacttttaaaagcctcttaaggataggaggacaagccaaagatttgtcatctaatttcacctgtaatacctgtaagtttgcaggaatttcttcccaagatcccctcaatttcctaagtttccagagcctcctaggacatgaccttctttactcgcctgtaaggttgggaaccctgtaagtttattctatttgtgctattgtttgtttcactactttgtggctacaccatttgttgtggatcttttagggaattctaaggcaagatgtgctcttagttttgccttttatttctaatgttgatgccccaagagtgagatatcccttctgaagtgggagccttcttttgtcttgccttaaaaaaaaaaagcaccacagaagtcttttgtacttacagtgcccaagccagttgcccagacaacaacatctctactcttccccaacaacattaattttaatagagactacctgggtttgggtacttaaaacttgtgttaagaggacctgagaaaggatagaaatcaatagtctctgctgtccctg

SEQ ID NO: 16134 - DNA, 1059 bp, Homo sapiens
tctactctgccctacatatgccactgtgttgtcccactattatctataatgctttgatttttctctctgaacctccttctagcactcatatcttcaacattattacagaaagttatttttatcatcataatgttttgataataccataacactgtgatagaccttttgttgtgtttggttatgtctatctaatctatatctgtctttagctgttctttatttctctgtctctgtctctctctctcaagtcagagtgtacaacagtaagcaaagtttggcctctgttctcgcgtgaaatcaagttaacatgctccacctgttgatatgtttgtaagagaaatctcatgtatatgcacatatgcagaatttctgctctttgcttctcaggaaatctcttttctccaatgtaggaagaacacattaaaatgaataagtcatgttatttttagaaaacagaaaagcaaataaatgtgtgaatagaatatgcactgtttctgtgcttgaaacattgaacattgaatattgattgaaaggccaccatgaactttgaaagaccactgtgttcagagaactgtgatagaaactaaaagagtataaaaagatgtgatactttcatttttgagaggtttacagtgggatgcagaaaaaaagaaacctgtaaatgtgaatggcagtgtgtttggttagtacctactggctatataaaattgcttttggatgtgtttcatgattccttataaaacgaagacttaataagtttacttggcagctgatgggcaaagttttaaaaaaaatcaaatgagttttttgttttcctttaagcagttcctggcaatgctttctttttttttatttcaaacagatgagtttttaaaacaatgattgcatttagaaccttcaagaaagcttgttaaccatggatttgatgagccgggtcctgagatctgaactgggagctagcttggtgcacacatggcagggccaaggaggtcttggatttccatgtaagggatacacagacaaataaacgtgataagggcaaacgttagccttgcaccc

SEQ ID NO: 16135 - DNA, 1078 bp, Homo sapiens
aaaatggaaaaccttgaaggaagcatttatttactcattcgttgaatacttaattcatgtttactcaattccagacactggcccaggtgctgtggccacagcagggacttataggtttctctccgcaaataactacggttattacaaaataaggaaataaatacacaaaatgagtgtccattgtgataaacactctaaggctgactaaaatactgatgaggtagagttactaagagtgttagctaagggttcctttgtgtgatcaagggagctgctctatgaaggggtcatttaaggtgaatacaaggagccggggatggggcaatggggtgatagtttcatgcagagaggaaagccaacacaaatgagaaaagaaggaggttggcatgtttcaaggacagaaggtaaatcattgtggggctgaaatgagggatagaggagttgtggatgagtttggagatgtgaggaaggaccagaacattctgatccttatagcctgcagtaagagtttcggattttactctaaagtgtaacgtaagtaaaatgacatgatctgatttatactctaacaggatcactttaaaagggaacagttaatgactaaggcagtattggtaagtaatgggaatgatgtggtgagaagaaactcatggagatgtgaccagaagccctcctgggttagggcggagctcgcactgggaataggactgtacctgccctgccatctcctagccctgtggagctcccaggtgtggttgtcagtgaccgacttgtaacttcctaagctcagctcaatatagacaaaacaggtttgttgtcttttttttttttcttttctcattgagcatacacacctatattctaaacatcaataagggggaagtcaaaaataccaaaaacatttaggacagcttgcagcatgagtctacctacaggaaacaactgtttgatatggaataaaatggcatatagagttcccagcagtgtgacttaatgactgaattgtgtccactggatagaacattcaccccaagcctttcatagaagtcattgtgttcttattcgcccagtggtaaaa

SEQ ID NO: 16136 - DNA, 1050 bp, Homo sapiens
gtgggaaggctttaagtttctcacaattaagtatgatgttagctgtaggatttttttggggggggttttgtagattttcattatcaagttgaggaagttctctattccaggtttattgagaggttttttttttttttatcataaatggttattggatgttgccaatttttttttctctatctgctgatatggtcattgatttcttttttagcttggtgatgtgtaggtcacattgattgattttcagatgttgaaattggaccaaccttgcatagttaggataaatctcacttggttgtggttggtttttatacattgttggattctatttgttaatattttgttgaagtttttgcattcatgtttataagagatattagtctgtatttttcttttcttgtaacatcttcggtttggggacaaaggataatgctggcctcatataacatgtttaggaagtagaccctctgctctaagttttgaaagagattgcagagaattggtatgaattctttcttaaacacttggtagaattcactagtgaatctgtctgggctgggtgctttctgttttgcaaggttattagttaatcaatttctttatagatataggcctgtatgattgtctattttttcttgtgcaagttttggcgaattgtgtctttcaaagaactggcccattttatctaagttaccaaatttgtgggcatgaagttgttcatagtattcctttattattcttttaatgtctttgggactggagttatggcccctctttcatttttgatatagtaatttatgatgtctctctccctctattttcttttccagtttgtctggctggaagcttgtcttttttactgatcttttcaaagaactagcattttgttttgttttctgttgcctgttagatcaattaagaataagaaaaataatgtttttaattctactttcacttatccttctctagtggtcttcctttctttatgtagattcacattttcaatctatatcattttgttttactctgaagaacttttagcatttctta

SEQ ID NO: 16137 - DNA, 1031 bp, Homo sapiens
tcaactaaggtcatacgttaccttcttcctgaagaattctatgatttcatccagacgaattgacctcctcatcctctaaactttaataccatgttacatctccttgtaacccttatcataatattttaaattttaatatctgatcttcccagcttgaagataaactgctggagcctggggaatatattaatcttatctttgagtccaccacagctcctggggcaatgcctaaaaatggtagtgagtaaacatttatctagaaagaatgaatgcactgtccttttcctaaaggcaacagtgaagctgaatttgtatcatttgtataaaacactgggtaaggttttaaagactgttacatgcagaatcttttccttttttattgaaagcattgacttagagacgagatgtgcaggcaattatgaagaatatatcttaagatgagtttcaagattttgaaagatatgtttcctaaaaaaacagaactcaaaatattatttagttcttttctgtggaattcttaagtcatccccacttataagctctctcattctctctctctctctacatatatatatgtatagaatgagagtgtatatgtatacatatatatatggaatgagagagtgtgtatatatatatggaatgaaagagcttatatatatggaatgagaaagcctctctctctctctctctctctctatatatatatatatatatatatacacacatacatatatatggaattagagcttataagtggagatgacaagaattatatatatatatggaatgagagagagcttatatatatatatatacacacatgcatatatatggaatgaaagagcttatatatggaatgtgaaagcttatatatatatatatggaatatatatatatggaatgagagagcatatacatatacctatatatatggaacaagagacagtttttaagtagaggtgacttaagaattccacagaaaaagaactaagttatatatatatatggatattatttatatatatata

SEQ ID NO: 16138 - DNA, 1044 bp, Homo sapiens
gtgccctcacagtccagttttctgccaggtaaggatgacacatgtttaactcctatcttcatggcttacacataggcagaaaattctgttgaataacataaatgaactattatgtgatagattaatcaaacaaatgaatcaaactaatgtgtctgctaaccatcatgcttatgaaatattacatgtgttgatcactctcttctcccaattaagattccactccaaattaatgaaatgatataccttcttaagaaaactcttttaaaagtggtgcaaatgccagaaactccaggaagggtagaaggaagacactgttcatgtgtaggagcctcaggtacccttcagtgctatcacatatgcactatttctgtccctgcatatgtggtactgagcaacttgttgaccctcgcgtgccatgtttccgagatgagaatatccccatacaacttgtgagccattaaaaaaaatctggtcatcttaagcatctagagataatgctttaggtcactttttctgcttcttgctctgttttgcatttgatgatgatgatcatcatagaaaatatttattgagtgcttagttgcttgtcaggcctatgctgaatgctttacaaatattttctcattgatgacaaccatgcaatgacacagcagttatactttccccgtttatagatgaggaaatagaagcttagccaggtccagtaacgtgtttaaggtcacacaacgtgttagtagttgaagtcaatgttgaagcccacattgccagtccccatgcaggcactgccaaccactacaatgtagtgtatttgcctgtagcaattctacctttttcagtttcatccccagtcctcagctcttcactgattgcttggacttggtgaaagctttggctgcaatggttttgaccttagaactcttgcttcagatggcacccagcctctagcttcatctgtttatagttcttcttagtagccatatactgctagaatcaaattcagacctggaaccccaggtcatttggttggcaccactcccaagcctc

SEQ ID NO: 16139 - DNA, 1045 bp, Homo sapiens
ccccctgcacaaactgacttctgcttttacaaaaccagataccaaactggtttcacaatggagatgttgaacataaaagttggctccatcataatgtccacccggtggttatgtgaatggttgtttataacttgtgttcagctttctagccgagcactagtgtcgcctaaaattgctactgtgagaaaaccaaaatgctattttgtaaacccagactgttcatctaagttttggaaaactgctcttctttctgcagagcttgctaaagaaagataaacaactctacccagacaatgggaagctggggagcactggctctttattaggttacacgttactgtagggatggccagaaatgtgtgcttaaaaggcatttgccttcttgtggggtaaaatatgttaagtacccccaatctcctcaaacccctcagttgaccctttgtaaatttgttactgagaaattgttcagccccttatttttcccatgatcacatcagaagtacaatttggatattaaggcatctagtgttcttctactgtaactgtagtttaaacaacctatttgacttaaattaatcccaaactgatgcctgataattaatgatcagtggccccatattcacctataattacttgccaggcagccccttgacttctaaagaagctgtatacgatgagtaattgcatacctgaagatatgctggatttgtgtctcagggcagaatacaattgtaaataatttatttgacccaccttgaattattaaattttaaatgagcaaattaataataaaatctatgcaggatgatagtaataatctaatttttccatttagcatggattttgaatcaaatatataatttacatggtgataataaatttgtgtcttaacgaatgaaatgatttcagggattggctgtcatctttggaaacatcagaaaataggtacaagtggccacatggggaaattcagtaattcctagcaattcaatgagatggaaatagtaaccttttgtagctgcttgtaagcacctcctgagctaca

SEQ ID NO: 16140 - DNA, 1058 bp, Homo sapiens
atggcacttggttcttaaagggatgaataagttccataaatactttatttttatgacttagattaatgtgatattaataccttgctagaattaaccaagtacattataacctaatttatgagatgaaaatctgggtgtataataggtattcacaagtgccaccttctgaatgaatgccaacatgtaaagcttcaaatttccttcagttttcagtggtgcccatgaaaccaccttttcaattacacatgctgttgttggagctcctgctttgcaattaagtgttcatcttttttcagagcagctttggggagaattgtgaaggaggtggagttggtttggggcaattcctcatacttgttgggaattccttcagcatcagtttaatctgtgtccttgttctgtttgaagatcaccaccttggcacttcatgcagaaaaagcttcaactttccagatttatagtttgcaattttaacagtggcaagtgctcacaaatcatctaacctaattccttcatctttacagttgaaagggcagacacctagagatgtagcatgacttgaccgggattggacagttggccagcagtataacctctattggatcccacatctcctgcttctcagatcagttttcactacccccctcctgccacatgtgttaggttgctcctatatcttgacactattgtctctcccttccctcctccatagagttggcctgtaatatatcccttcagaaacttacatgtgactcattaagacaataatggtgatttgtgttaaaatgaatacctaataggtttccaagataacagtttttttggaggggtagagaggaaatcaagggagctgagtaggattccaattaatcctaaaatttgactttaatggtgaggagtctaggatctctggcagatgggaggaggagatcattgaaagcaagaagggcttttggcacccctcaggccacacatgtgctgtgtgagccattgcagtctgaaatgtgcactgcatcgtttaggattttgccacctctcctgggaaagcagcttgcctg

SEQ ID NO: 16141 - DNA, 1050 bp, Homo sapiens
aggcatgggtagaatggagccatgtattccaggaaaacagaccagtcgaaagcaatctaaactcctattaacagggtagcagttacagaaaagaagggtaccaaagggataaatctgcaacagaagcttggccagatggaatgagcaggtttgagaagttgatccaagatagattcccaagggcaatagatgatgacgataatgtgcgtgtgtctgtggtttgtttttcttgaagcatatcaagcgaagctcagcagttcaggataccgaaccagtcatatgggtgagattcataggtgattcttctctataacttttaaattgtttaggcaagtacttacacattgtaatgcagattgttgaatgcattaataaatgtttgttctgccacctcaaatggatgtttgcgctggacctgtttcaacaaatcatatagggactccaagtcgttgaccattcgcaggataatccttgaagagggatgcagctccgccatagaaactgagattctagagggtggaaaactgtacctttacacccactctgcattggttcacaagtcattgctaaacggacagtgtggtctcattacttgcatgagtgagatgtggtatgggagacttggaggagaacccaaacactcagtccagaggaactgcttccagcaaaatttgagaaagaattccctttcaagtcttcctctatgttttttcctgggggcaagagactctcttagaacaccaggaaatgaaccagttggagtgccacagggccacgattggtctattcttttctatgtgcattcactccctgggtgatctcatccagtttcatggtttcaaatatcttatgtcaaccactcccacattcatatctccagttcagctctctcttccaagttccaaattttgcctccttaacatcaccagaggtattatggacaaatgaaaactcctaacctacctcccaaaccatgtctcacttgcagcattccccatttcagttgattaccactccttttttcagcggctttagtcaaatactttagca

SEQ ID NO: 16142 - DNA, 1046 bp, Homo sapiens
ttattgttgattcagtctccttacttattattcatctttttagattttaattttttttcttgattcagtgttgctaagttatatgtgtctatggtttgcccatttcttctagttatccaatttattggcatgttattcttaggatcaggaacaacatgaagatgcccactttaaccacttctattcaatgtaatataatattagaggtccttgccagagtaattaagcaagagaaagaaataaaaggcatctaagtaagaaagtagtgaaattgttgctgtttgctgacaacatgatcctatgtatagaaaaccctaaacaccctatcaaaaaaaccattagaactgaaaaacaaatacagtaaagttgcaggatacaaaatcaacaaacaaaaagcagtagtatttctatacactaacaacaaattatccaaaaaagaaatttaaaaattttattcacaatagctacaaaaactaaaatacctaggaatacatttaaccaaagaggtgaaagatctctacaatgaaaacgtagaacatcgataaaagaaactgaagacacaaatacatggaaatatattctgtcttcatgccttggaaaaattaatattgccaaaatgtgcatactactcaaagcaatatatagatttgaagaaattcctataaaaatttcaatgccatttattcacagaaatagaataaaatcttaaaatttatatagtattgcaaaagacaccaaatagccaaagcaatcttgagcaggaaaaacaaagctggaggcatcacactatttgactttaaactatattacaaagctatagtacatagaacaacatcatattggcataaaaatagatacatcaaccaatagaacagaattgggaacccagaaatgaactcacacatcaatggtctattaatttttaacaaaagtgccaagaacacaatcagtaaaggacagtggctttaacaaagagtgttgggaaaactggatatccatatgcagaagaatgaaactagacccatatctctctccacatacaaaaa

SEQ ID NO: 16143 - DNA, 1023 bp, Homo sapiens
tgaattaattgggtcacttttgtgtgatgtagctttagggatttttgtgtgtttttcccattatagaaatagtagagttaatctccagtctgtatttagcttcacgtttgacctttgccacctctctgtgttggaaagggcaaaaagaggaacataatggaataagaataatctcagaaataagtgtatggtgcagccagagttgaatgactgctacaatacagaataacttcataggtaacattgaacatgttaactgagtgtaaatatcagattcttcatctatacagtagggctataatagtaacttcttagggaggttttgaagattcagagagatgatatgtgtgattaggctttgtgaaatatgtagtagtcagatattataaaaggagctgctctttatccatctgggtcactttccagagggaggtaaagctggcatttctggagttgaacctatgggccagaagggctgtgaactggtgcacttttgggtaaaggataattgaggaggaactcagccgacgttgcaggattcaagcacaggcagttgtgcaggccaggtagtttccaaggcagtagcaccctggcagaaagagccaaaccactaagggaagacctgtgctagtcatcatttaggctagacaaaaacgacttgcttgccttcttgtttcctttcctctcctttggagggaattaggctcctcacttgtgtgtgtgttggttgagtggtggaggagagcattatattcatcttcaaacctttagttaaagcaacgcaagagggtggggttctccacacccatagctgacatctgctttgacaagcagtggaatggatggtggcattagatgacaagtcgcacttggccagtgggcctgcaggccagagcccaggtatgaggacgtgttccttggtcctagataaaataagtggaataagtacaaagtagtgagctttagccaagctaaatttcttttctttttagcagtgttccttaaagtgtggcctacagacca

SEQ ID NO: 16144 - DNA, 1049 bp, Homo sapiens
ggcagctatactgtcctctcagtcagcactgtcctagcgtccaagggaagaaggcagtatattggcttttgtcctgtggcaacactactgtagaaccagggcctgcaatacagaagggccctagaaccctacccgatgcatgtaaatattaatctcatatcagtgtttctttctgttctctccttgttagaggatcgctaaagattttttcaccaggccaaagtgtgctcatggctgccctaggctgggctatgtgaacacacttagtaggttagtaatttgatacctgatgaaatttgtgtttttgaaatagtgctgaagcacttatgtggacataagtgtgatgctgatgaaaaaaaggcagagaaggggcccaggagtgccagacttagaccacatatttggctctgagcaactcagctctggacagaatttttgtacatcttctcagcaaaataaaatgtctgctttgatctgaacacattctcttcaaagccagtgtagctatcgcttattgttactggaacacgctccaggagacctcaacttatactccaagaagctaataaaatatttctttccaccccaaacagtgctttccctaagacagcttctggtaaatgtgggttttgaattgtattacttttctacccatgtttcgttcatcaccccttctgggttagaagtcagggcaactgcttggctggtccatccactaatctgactatgtccttagagcaagattagggctccaaggtaagtcacttggctgatagaggatacactttttttctagcgtatcaatcaatagcagagagcccatgggctttcctcaatgctcaggagattggggaacatttcacactaaccttctgtgctcagcatcgtgtcagtttttcaatgagaatgattttcatgctgggaatcacagaccaggtagtaaataggtgtgatgctataataagcttttggaagtagttattttcaggaaggcttttacactctttcaaatcatgtaaataaagtagtggcccaatacaagtacaagt

SEQ ID NO: 16145 - DNA, 1021 bp, Homo sapiens
tgagtggaaagtatttttgaggagctctcaatccagctgcaataaagctagggttaaatcaaatcatttttcagtgacagcaaccaagattatataaattttgaaacatacaagagcctagcactcctcgtacctgagcttatggtgccaagaacttaagaatgttgatggacttactctccatgcgtacttatcactcccagttctccttggctaggaaagggtatgataaaaatagttctgtcttcttagcaggtaaacatgcccatacacctggcaaggtataattgagagaagatcagtttgcaaggaaaatgcaagataatgagaaattttcttaaatcaaggctgaatcactctttacatagaaaaacttcaaatagaactttaacctgaagctattcgcatgtaagcatgcttaatgtgtgatggaatctgcacataaaaagaaacttgactctgcgggaaataatagagactcttcaaatatgcaatgaaaataaaaatcacaaaaagcagagaaaatcgactgctggtgctcattccctaatactcacgcattcttctcaaacccagagaaaatgccaactctttcatagcaagacctttagagaacagagctgatgcctctagtgtttccttcatttgttgaatgttcttttgattgacttgctcctttctggctaagcagagcttagtggttctctaggagccacttagagacccagagccattgcaaagctttgcctaaacaattgcccaatacttattatctttgtgattcagtgaggtgcttttaaaataattatttaacatggattactaatatttcatatgccttgcccatgcaacaataatgtacttcttagtagtaaaaatgtatcttatatttctcttgtatgccgcatagtaaacagccacccagagggcatatatgtacacagaaggcatgcttgtcatatccacgaatgaacgaatggaaaattaatcagggattaaaggcccttgccgtcattcattt

SEQ ID NO: 16146 - DNA, 1030 bp, Homo sapiens
gaagagccccttgatgatcaatactaagcttgccttttgcaaacagctacaaaacatgcacaagagaggatggtgatcagcatggtggcatcagttagaagcagagacaggagtggaaaccagtatacactcggatagtggaaaataatgagtgacaaaagtgacagaaagagaacagctacatactattaagaggcagagaataccctgtgtaatgtctataaccccagaaagcatcaggctgtgttgttgaaattgtatcgaatgccagattcacctgaaatatgctactctgtataatgggatgtatgcaatctctgtagtggatcagagcattgaagaaattgtacagtttgattcattttcctttagtgaaaagcaaaaagcagaaattaaaaagtaatgctaacatttatagaaaaaagtgattgagcacagacagatgataaagagtgaactgagcagtaagtttttaagtcttactgttaaaattaagaagagaaagctgttaaatatttgtaggttctgagtgccttaatacttaagagttctgtataaagaaacaatatgattctccacgtgtatatgctttatgtatttgagcagaatttcatgattttcttcaactcgtttctactcatttttagctttttcctatgtttttaatattattaattttgtcatgaacagaattttcttccattttaactttgaactagggattacaggtatataaggaagttactaatttttgcatttcctaatattcttattacatgtattttacaatttaattcagaaagaaagagaatatatctaaaaattataatgcatgttctcctttttctcaacatgtataccttttttaatcataggatcaaaacttttttatctaaatgtaggctaggattcatacaaaaatttaatccatttagtgacagagggcttcatttcttttttttttttttttttttttttttttttttttttttttgagacagagtcttgctctgtcacccaggctggagtg

SEQ ID NO: 16147 - DNA, 1076 bp, Homo sapiens
caaacactattttttcaacatttgactgaataaaagtataaatttgtcccatctctactcttggattgctgttatacatagcactaaattacagttttaatgaagtcagtttaaaagatgaggaaaaaatcctttgtagtttattcctgcatttcattttctcttaatttaatcataaactaaagagattcataaatgtttatggagggtaataaagtgatatttttaatacaaaggttgcttatgtaattaagcatacattctatgacattctatgtaagttgaaatggtttgcatgaaattgacaaatacttatatctgttttatttctctctgcattaatgacaaatcataaaacaaaaagaaaagaaaagtaagttcctggcaatgtaagtacctacagttcgcaaattgaaactgcagatgctgctaaagactgtatctttttcttggaaatgttccattaaatttaattagatttctcatttgctttccttttcactctgtctctggacctctctctctctctttctctctatttttctctctctctctctcctctagatattaggagaacactatataagttgttttaaaatggcccacataatatgaatgaaggaacaaatcaccataagaaaaaaaagtgcccattttgtaatcctataactattacatgataaattgtcctgaacgtactgctacctcaaagcaccctgaccattaactaataccgtgatgctcacgatatccatactcactcttcataagctttcctttttgaaataaaatggaaaactctgcttaaagaattaaaattatatcctatacatttcaggggtttttttgtaaagagaattggaagtgatctaatcttttattgttatagcattttatcatctggctgtcaagaggtgattctttttcctctgaaatgatccactctcttttatgtttcatgttagcatttcaaatcaagtaaaatgacatgttcatgatgtccaagaaaattgagaggagctactgaattgtgtttccctaagttcatttacactttagcagcaaatcttgatgat

SEQ ID NO: 16148 - DNA, 1026 bp, Homo sapiens
tcctaagtattccttttcaaagtacagataagcacaatttagtgactgactgagttgccagctttttgtatgacccacccttcaaaaagttcgttttgcttctgtttgttcaaatatctttgataaaatgatagtcttcatatctcttgtctgtttgcaaaagagctagtgttattaaaggctgtttgctgttcatctttcttatggaaaaacaatatttttttaaagccttattcttatttcgcttgggcactcagtgtccttccacacagtgacacctacagagtcattagcaaaattagataagtaactgatttattagttccataaatgcatggtgtattccctttcctcagagtgtagagcaaaaattattcatgctgaggtagaataatcaaaatgactttaaaaagcacatttttatcattctaaacataagcactgctgtggtggtatactatcatactacataataatagaaatgaattatgtcagtaaaatcttgaggcttaagatttactgtgataaatatttttcattaaagtgaaatatcttggcagagtcactttcatatgcagactgttgacacaaggaggccagctgtgcctatgcagatgccgagatttgggtctatattattaatgatttatcatgtcatggagagcttagattagttttgaaagcaatcccttgccacaaaagcactttctataatgtgcgaacgcaaggaatactatatgtgcattccaaatcaaagtaatcacagaagctgcagcaacctttgaaatttcaatacctctttttattttgaaacatgaaattctacgtcctaaattttattattcattaaaattcatacaaaatgttatttcatatcaactggatagtgagtggtgtgtgtatcagaattaatagacatatacacatagataagaaaatgaaggagatggaatggaacaaacatttattgcaaacctattgtgtagcatggacttttgcccttaatctcacatttaatgtgaggtt

SEQ ID NO: 16149 - DNA, 1062 bp, Homo sapiens
taaaccaattagaactgttcctggcacacagtaaaggcttaatcaatgatagctagtattattagtagtatttggccttttttctttgttctttcttcatttttttccttttcaaactatggttgtaaagcatccaccttttgaaagtttgcctttctgccctttcacgctgataagtacctcagtttccaataaacttttgttcaggggcaaacatttacaatgttgacatctcttcacaccaccaaaaatattcatggagaattattttatctaaagctgtctttttaataataaaatagccacctctaccttcttcataaacttttaagatgaattggtaattcatcatagcaaggttgattttagaaactaaagttgcattaattcattaaatacactgaaagtaattttgtatgcttggtcacaaagaaaatataaaaacaattttataaatagatttgcagttattttctttcaatattttcttagtgcctatgattacacaataccacctatggagaaagctgttgtgaaaacggacattcagatagcgctcccttctgggtgttatggaagagtgggtaagtcatttaagaaacaggtaactatttgtcaagttctcctttgtgatagattcttcatgtttcatttggggtaataagcaggcaatattgcttgggctgtgtcctaaaagaagcaccatttgtgatagcaaatgcactctttgaaaggctttatttacatctctgctttgcctctttttgacccttttatttttctccttcctcactggagcttttaggctcacactggcctagaaggctgttctcagaacatggcattttatattatgagagtaaaacttctgacctgttggtcccagaatgtgtaagcctacttaaccttttcttgtttggccatggggttagggtaagggatactcttcagtgttgtagaggcactgggaggagctaggacaaaatggagtacacgtcaacaggtttgatttttctggagcggatcagttgttaccagacagttctttgcaagagcgtaagt

SEQ ID NO: 16150 - DNA, 1035 bp, Homo sapiens
ggagagaaaatacgtattaatattattacttaaagatagttttatttgtgtctatattgaacatctcttgtttagaaggcaaaataatcatctgcctgccacattttacttcgtaggcatagagtatcaccttttttttttttttttgagacagagtcttgctctgttgcccaggctggagtgcagtggcacgatttcggttcactgcaacttctgcttcctgggttcaagagattctcctgcctcagcctcctgagtagttgagattacaggtgtccgccaccatgcctggctaatttttgtatttttagtagaggcggggtttcaccatgttggcgagactggtctcaaatccctggcctcaagtgatccacccgcctcggcctcccaagtgctgggattacaggcgtgagccaccgcgcccagccagagtatcatcttttaaactgctttgttctaatataattatctgtgtccaaattttagaattgattttcataacttaaattagaatacaaataataaaaggaagagagctaacattttttaagtgctatatacaccaggtgctattctagttgtgttccttttacctgaatgaggtattgtaaacctaggggcagaatttactcttagggtgaaaactggtctctttatttttagggagtcagcaagccattctgatgggctactcaaatgttagagtaggatctcagagctcaagggcttgtttgggcaggctgagaaggagaggcagagagatgtgagggactcaggagttggtggcaggggtggttagcagggggcaggaacgccaaaatatggtaggaggctaatcagagaaaggaccagtgagaaatttcctgcatcaaggagtgccaagacacttcttctaaatttatattatggaaatttctagcatatacaaaagcagaatgagaagtataatgaaccccgtgtaatcatcactcagctttaacaatgatcctctcatagctgattttgtttcttccgtatccctacctacttgcccac

SEQ ID NO: 16151 - DNA, 1649 bp, Homo sapiens
cgagggcgaggaatttgatgactgggaggacgactacgactatcccgaagaggagcagctcagtggtgccggctacagagtatcagccgctcttgaagaagccgacaagatgtttctgagaacaagagaaccagccctggatggcgggtttcagatgcattatgagaagaccccgtttgatcagttagcttttatcgaagagcttttttcactgatggttgtcaatcgtctgaccgaagaactcggctgtgatgagattattgatagagagtagttagatgctgttaaaagaggaggaaactacttgaggagggacccaactttccgctatcttttgggttcattccaaatagttttgtgccattgaaaaacttgaccttcaaaaaaatttgtttttcagaatagaacacaataggacagtgactgcacagttgtgaaaaaggaagagaatcattaaagaaaaagaaaaaagattttaagaccgttgaaatcaattatcaagaacgtcctaaaacacctatggctttgactttgttattgatccagattattttccttgcattggggaaaatatctttcatatttgtttgctgtaaagatggttttgcaagaataagtcatgaccaagacaaactgccaatacaaaagcccactgatactaattatataatgagaaaaaaatgtatccaactaggacacatatcttttgagttatttggactgaaagcttaagaaaacttggaaaattctattttgtgatctagtcaagccacagttatcaaaggctacattttcagtgtaagataaatggatgagtaaactcaaatatgtatcacgtgtgctttgtatcttaagatgtgtttccaagagcatctgaaattttgtttgtacatgtatcttgatcatttataaagccactgtgatctataaatcaagaaaatccattgtcataaccatttttaaaagtcaaaaattaagacatccttaattaaaaagtttcaaatctagacactaaatgtgtgtgaatgtacaaagaaaacaaaccattgcttatgctgttatatactagagaaattttgttttgcttgctgttttaacttgacagatgaaggactttagttgaacttcatattgtaagaactgttaataaaagttgtcaagtaaaaagcgctatatctaaaaagactttatgaacagttattctatcaacttttaaaggttttaaacctgcccagaaattaccttggtatctgaagtttccctctgtctcctcctctaattaagcttgttatttgtcatgcaccagcattggagataataaaatttcttgttctgtgtattttgtttggctaatagtattgcatacatactttctctgtatactactttctattgtatgtgttaaccagtattaagggaaaatgatccagcttcagctatctaattcacaaattaatttctggaaattaaactttgtaaattaagtttttgcctataagaatttgctggtctgggaaaacctgccctatcaatgagtatgttgccgtggttaccttactaagatgctgaagttctaggagagtaatgattacatcagaaggctaggttcagcaaaataagtgtatcagcaggttttatcatgatcagta

SEQ ID NO: 16152 - DNA, 1161 bp, Homo sapiens
ttgtattatttctactttatggaatttactaatgtttcattgtaaccaaatatatgatcagtatttgtgaatgttccatgtactcttgagaagttttattgcctattatcagggtaaaatgtttgatatatgtatacatccataaaatttactttatcaagtttattgagtcttttctctgtgtttttggactcattgatctactaaggtgtcttataatctcttattattaatgtatttctacctttatttccttacattgccttatagttttgccttatacaagtaattactgtttcatttgggatatttcttaactgccatgtcttcattttgatttgtggctctcagcattaagaaatatccttctggtaggctgaggcaggaggatcacttgaagccagaagtttgagaccagcctgggcaacatagtgagactatgcctctacaaaaaattaaaaaatattttagctaggcatggcagcatgcctctgtagttctgctgaggctgagaccacaggattgcctgagcccaggagttctaggctgcagcgagccgtgatcatgccactgcccattgaactttagcctgggcaacagagcgagtccctgtctctcactctctaaagaaaggtatccttctatgcacatttaatgtgtaagcttaaattctacaattttgatcaggattactacttgttttcttattgttttcatttgcctataatacctttgcccatttcttgatatttagtctttcggaatcaccttgttttagttatgtgtctagtattcagcataatacattcagtcctattttaggagcaaaattgcacatctttatgttttaatagttgaggctcattcacatttattaatgtgactaatatgtttgatttcagttctgtcatattattttatacaggttgagtatcccttatccaaaatgtttgagactagaagtttttcagatttcagatttattggattttggaatatttaaagatacataatgagatatcttggggatagcacccaaatctaaacatgaaatttatttgtttcatatacgctttattcacatagcatgaaggtagttttatacaatattttaaataattttatttatgaaagtttgtgttaaatacttaaatgtggaat

SEQ ID NO: 16153 - DNA, 1028 bp, Homo sapiens
aacctggctcatggtcagttttttcctgtatgtaaactttcttgaggtgcttttgttttatatattagcaatgattaaaaaagctttctcttttttctaggagagcatatagattattgtggatattctgttcttcctatggctgtagaacaagatgtgctaatagctgtagaacctgtgaaaacgtacgctctccaactggccaatacaaatcccttgtatccgtgagtatttaaaattgttagtgtgtgtgtatgtatggttctgtttgtacccaaatgaactctttaggagacatcaaatttgtaacaggtcatttaacttattgatattttgtgtctgacattaaaaaaattctaaggccattatttattgttcattttgttcatttgtcaattcatttaaggaatatttatcaaagacttatcatgtgctagacatagtcttagataccaggtgatacaaagataaataactctgtccttgtccgataggtacttatcatctattgatctaattatctccagcaaagtcaggtctgatgttttcctatgttactatggcaccttctaagtatcttgtcatagcatattattatgctgtattattattatctgtttatttacctgtgtcacccagtagactgtaaactctgtgacttcaggcattgttgcctctcttcttcaatgccctagcatataaaacagagtctggtgcctaatagaggtaagtttctagtacatatgctttatcaagttaacaaagtctttaaaaaaaatcttagtttgctaagattaaaaaagtttactaatgggtattgaatttaattaaatgtctatttagaattgaagatcagtttttttaaaaatatggtgaattagtctgacgaattttctaatgttgagccctttttgcatttctgggataaactctacttgcttctaatgtattataatggatttgacttgataattacagaaaaagattttggcttgtatttggcatattatatgtttggcttgttcatt

SEQ ID NO: 16154 - DNA, 1049 bp, Homo sapiens
gggaggcggagcttgcagtgagccgagatcgcaccactgtactccagcccgggcgacagagctagacactgactcaaaaaaacaaaaacaaaaataaaacacaattggacatatattttcctgtttgcctcaggcttcattactccttaatgttgaattggctgttttagaggaatccagattctttaaattctctttccctgaacacttaaaaaatggtcttgtattctatagtaattataacttgtctttacatttggcttgggacttggctgcttttttatgtaaatcagatgattccttattcatcatgtaaagataacaccaactgtgtagtactttagagcactataaggtgcttttatttgaagttttaaactttagtttcttggatcattacaataatcctgtggctagggaggtgggtatttttctccttattatggataggaggtaatatatggtggtggttaagattatgggtgctggagtcagatcatttgagtttggattatatctttaataattactagcctagtctcagctaataaacccactcagtttcctaatctgtaagccacagagacctattttataggtgtattagtccgttatcacactgctgtgaagaaatacttgatactgggtaatttttaaaggaaagagatgtaattgactcacagttccacattgctggggcagcctcaggaaacttacaatcatggcagaaggcaaaggagaagcaggtactttcttcacagggcggcagggcggagtgagtgcaggcaggggaaatgccagacacttataaaatcatcagatctcccgagactcactcactatcatgagaacagcatgagggaaaccaaccctgtgatccaattacctccacctggtcctgcccttgacacgtagggattatggggattacaattcaagatgagcttttgggtggggacacagccaaaccatatcagtagggttgtgtgagaaataaataattcaggcaaagcaattagaacactacctagcacataataagtgctcaa

SEQ ID NO: 16155 - DNA, 1033 bp, Homo sapiens
ggaaaggtatttgtctgtctactagactgtctttcccacttgattgcgggctctatgagaggaatgacagtgtctttcctgttcactgttgtatttccagtgcctagtacagcgcctggaggtcaataagtaatatttgaatgaatgaatgcatttttgacaaaacactttaagataaatacataaacacttgaacattttctgcattctaataaattatatttctcctttcatttttcttctaacaggccaagttgatagaatttagtcctctgagggcaaccgatgtaaaactcccaagtggagcagtgtttgtgattgccaacagttgtgtggagatgaataaggcagcaacttcccatttcaatatcagggtgatggagtgtcggctggctgcgaaggtatgaacttggcaggctagtgaaacttgaagtagggtttttcttgtctttattttcattgttctctattactttatctctttccccaaattttagggcaacattctgactgcacagcattccaactgaaggtctttgggtacagagaaatctgatttctaactcagaagacagatgaaccagttgagtcttctggggtggcactgggaagaaaagggcagcttatatatgtgaagcagaattataggttaggtctatgggtggagaaagatagttggggacaattgatgggaatgaccacagctggtcttgtttcctcaacaaaagtgatggcagcctcacccctcctggtcctctaagatgcagtttttttattgggttatcattcgttactccaaaaatacaggattggtgaagtccccccagaccccgtacccagaaagaagatttttacatgtctactagggaaacacaaaccagcagggagtcttggaagtctctctttagaaaactgccacagttaaaccttaaatctatttaggtagtattcattgactagctattgtagttctagcggcatgaagatatacaaagggacataggacatgggactagagagagtggacagtaga

SEQ ID NO: 16156 - DNA, 1068 bp, Homo sapiens
cggaggctgggcagaaggaatttagccaatataatttattatacaagccaaaattattagcaacaaaatgaaatatttattttgcagtttaagtatatatagccatgaacatttagatttcagaatttgtgccatgatttcatgactagattcagtaattatttaagattcacattggagaaaatcagtgttctgaagactatgacgtatatcccgctttgaagttttggatttttcttgaataggataggccattaacaatattggaggaaaatatcatctagtgttatattcttaaattgaatttgccttggaagtaatcatgcatgcaatgaacatagtaagaaacagcttctttcatcctttaatgtaataattgctcccaaggattacaagagcttatagacagctggaacatccagctataatgttagctggacagggaagaaagttgttatggataaagcttcagattttcttggattttttggtatctgtataacagagacctgatgagttgccagcacataacaagccagaaccctggatccagagagcatttgtgacattcagccaacacagaactgctttcccacccaaagggtggtctccaaatctgttgtagcttttggcaagatttttatatcacaattgaaaacagatgccctttctgccctttcccttgttgtctgagttactaccgttcaagagattgcaagccatggcaatctctcatgcaccttcagaatgcccagcaagagtcctcgttagacattcctattcagaagtcctgctgtgacacacttcctctgcaagaagagaacagattcaggaaggtgccaggattgtgaggttctggtagtctgcagggtgtactgtgaatgctttttgtcaaaatcaaagcaccagtcctgggtttaatagaaaacatctctctggatagtttctattttaaaatatttaatcctaaaataaaatatttaatcctaaagaaatatgtaatcctaaaggaaaaccaaagtgtactctccctgatggactatattgagttttattacaggatatggc

SEQ ID NO: 16157 - DNA, 1170 bp, Homo sapiens
acaaaggagtgataaggagactgaaagagaatatttctgggtgcacctaaggaggtaaagaactgggaaaggaaaatttcctggtaaaggtgcatttgcttgaaggaaggattggttggaggatttcatagagggtaaagagcttttttaaagaagagaacaaaatgtgaaaaaaaggtgcagatgcattaggacaacagtgaggaatggggatctctgtcctgtctagctggagaatatgatgcaaagaaagtggtaacacagacctagtgaacagataaaatgcttcaaaacatattttaacttcatattataaaaagagaagatagcacaaaacaaggataaatgggagagacagaattaaaggaaggatgttaggaagtaaatggagaaagatacaagcagggggagaagtgaggaaggagtgctcactaaagagaaggaaaagcaatacacagatatatcaagaaatcaggagagataaaaggcagagaaatactccagaagttctgaagtttctagagattttgacaggtataaccagaacactcactggaatttgggggtgcgggaactcatcctgaataaatggactgtgattctactaacattaccctaaacactgaataaaatcatgttaaaggtcaaatatgcaagcctgtggtttcctacactgatataaggctttcaaaaagtatttcttgtaataataatttaggtggacaaagtgttattatataatccaccaggcccattgtaaataatcttgcactatattgttatttcttttgatacttgtaagagcttgagaatattaactaagaaactctgtaacatggctggcaaaatactctcttatcactttgaactttacttagaggtaaatacattttgagcttctgtgaggttaagaagaagtaagcaaagatcacagagctagttagtgatagagtcagatttggaacatatgtttctagatacccagatgtgcattacaagagtcaaatatggcagctagtatagaaatcatgctagaataagagattctcaatcttaatgtgatttaattactaagtcttggtagcatatgcgttgatgtattgtttgtcaggtttaaaatacatgttcaccatcagtggtgtatttgcttggggtgaattttctggtaaa

SEQ ID NO: 16158 - DNA, 1048 bp, Homo sapiens
agtagtatttcgttgtatggatatgctacaattagtgttatctatttatctgttgatggacatttacactggttgtttcccattttctactatttcaaataaagttgctatgacacttgtgtaaaaaaaaaaaaaaaggatgttctcctgtataataaatacagtaccattatcactcctaagaaaattaatgaaaattacataatatcatctaatatactgtccatattcaaatttccctaactgacccaaaaataccttttgtagcttccccccatatagcatttaaactcgtcacggtttatttcattattatgtatctttagtctcttttaatctagagtagtcctgtttttatttttcatgacttagacttttgtgaagaggacaggtcaattgtctgaatgtttcattgtgattagtttcagtctaaatatgttgcctaggatacttacaggtaaggataaatccagggttgtctatgtctagtttatatctatcgtttgggtataattattaataacatgtaattttactctcagaaatgaaccttttagctgataaattgtatggctaaccaattcataggtgaattcatactttattgttgcatcaaattaggaggcacataatgcaaattgtctatcatttgtgataactttcattacttgattaaagtggtgattaccccatctctccattataaaggtttattttttctctttgtaagtagtggtaatctatggggtgatgttttcagactgtggactgtttcccaaaaacttttcaccagtgattttagtattcattgatgatccctgcataaattgaataattacattgagaattgaaaaatagtgaaattttaattacatgatttcttcctacattagttagccagtattcttatgtaaagaagagcttttcctttttctcctgttctttatttctttctctttccacccctttttgagatcattatgatcttatggattttctttttaattcaatatgctataataaattatagtgtagcatcaataaagat

SEQ ID NO: 16159 - DNA, 1035 bp, Homo sapiens
agacatatgatctctggacttaacgggagcttggtaattataaagcggggtagagtcagtgacctagggaccagaagagaatagattctggctgggcacagtggctcatgcctgtaattccagcattttagggggccgaggcaggaggatagcttgaggccaggagttcaaaatgagcctgggcaacatagtgagaacttcatctctacaaaattaataaataaattagccaggtatggtagcacgcacctgtagtcccagccactcatgaggctgaggcaggaggatcgcttgagcctgggagttaaggctgcagtaagccataattgcaccagcctaggcaatggagcaagaccctgtctcgaaaaaaaaaagagagagagaaaatagattcctactcagtctgaatgtctaggtctcatgcaggttcaaaaggcttctcaggcagctcccccagacaccctgggtaagagccactggcggtggggtgggggtgggctggtctctcttgacacatttcctcctcagaatgactgctcaaggggcccattttcaccagtgaccagcatcagtccacctctctgggtgggactcctcaaaaagccgcatatgttctggccaagctacttaaagattaaatgtttattttctgcttccctggcgccttagctcctcctgcatggaaaccaattcagagtttgccttggtgtggtttttaattgccatgccaaagtcccgtacccttatagtgcttttcaaagagtaattcttattccaaaaccacttcacagtgatttcacagtgtaagaaataatatagaaaaagctctaaccaattgctgttttatcaaagaaattaacagttgatgtgagaggacagccctaatgacctagcactgttaccccatttcattctgtatcctgatagaataaaggtcatagagtaacagaatttacaacgtaaaattatacctatttatttgtctcttccaccaacctgtgatttcctggaggacataaattacattattaacat

SEQ ID NO: 16160 - DNA, 1045 bp, Homo sapiens
aaaaacccatttgtgatacatccaccaaaagacacaagaatgttcataacagctttatttataataggccaaaactagaaataatccaaatacccattaacaggaaaatagataaataaatcgtggtatgtttatacaagggaaaattgcatggcaataaaaaacaccaacatggatggatgaatattatagacatatttagtgaaagaagcagacacagaagcatacatttatttcatttatttgatatttaagattaattgacagcagtataagtcagaatagtagttaacttcacagaaaagggcaggaggaaactttctaggtgaaatgaaagttttctctgtctctctctgggtggcagttttaagggtatatgcaaatgcaaaatttcttcaacctgtacgcctaagatatactttgtgttataccacaattaaaaagggaaaaattataaaagatttatactcaaaattattttaatcttgctagaaaatcataacttatgacctgattaaatatgatgtggagaaagatgaacctgtccgtgatgaaaatggatattgcgtcagagttcccaaaggtacagtggacttttgttcaatcaacctgtgccccttcttatcttgatcaagtgacttttaaggactaacatattattgccacatggtaaaatttatcagagtggggaaaaggggggtttatttaagtaccctccaatatacaggaattccaaaggtgctaatttaccgctgcatgtaacataattctagttttaaacatagcttaacaacttcttgcttatgaggtaatgttttgtgggaagggatatgtaattgtggttgcaaaactatagttttaggtggcctttacctttaagctttaacaactgtgcgtttgtgtaagtgtgcataaatcattattcagtaaaaaattagcagtaaaagaattacaggccaggtgtggtggctcacgcctgtaatcccaacactttgggaggttgaggaaggctgatcatttgagataaggagttcgagaccagcct

SEQ ID NO: 16161 - DNA, 1073 bp, Homo sapiens
tccagttttaaagaacacagaaatccacagaagttctacacctttctgtggtgtgaaatttaattggacattagccagctggaattgcctaagacttaactatcaccgctaggaggattttttttcttcctccaacattaaccctttggttggtttaatactctcacttttagactttgagctctgtgattctgtagctgaagacttgacaaaggaggtcttaagattccagatattgtgtgtataggattattcctgttgatgttcatagggcaccaacatttgctttgcaaccagatggtaaagtggcatgaaaatgaaatatcctcagatattttgattaacacataattgaaggaaaaatcagtcttcaatctaatctaatagacaagcagactgagaaaacagagttgtctgtaaatgatccctccttctaatcccaccatgaatcaggatatcctagcggtacctgaagccttaccaagaaataggcaccacccctctgctcagaaatctatgcacaggtatctcatccttggcaggtcctccctccccacaggtgatcctaaagctttaagggaataaaaaatacctcacaaagggctccctaatggagatcctgcaaacagaatgtatgggtatcatataaaactttcacttcgctagaaaatgtaaagagtggatgttacttgcccctaccacaaaaatgatatctatatgaagtaatccatttgctaactagccaaactattccacgatgtatatgtacttcagcacatcatattgtacatgagaaaaacacacaatgttatctgtccatttaaaaataaattaaaatggaaaactttattttaactttcacttcccagctctcacatgagccagggatgctaatgatttgctagatccccatgccccacccctaccccttgctctgcatcctaatctattgcaaaatgcaaccaaaatgtggattatttgatgtttttcaggacaccattgagatcactggaacttttaaacaccgcaaaatgaccctggtggaggagggctttaaccctgctgtcatcaaa

SEQ ID NO: 16162 - DNA, 1023 bp, Homo sapiens
ttcataaactcaacagtcaggttcatgacgaagatatagatatttctgtagattttttccccaacattctaattatgcctcatgtttcgtagatcctagtaactgcttggattactgccacctcagaggtagagatctgtttttccgtggctggaatgccaaaaattttgttgtattttattaagaaagtagcaaaagtttggagatttgcaaagttaaaaaaaaaaaaagcattatgaacttaatctagatgtgatttgctaaggaacttaatatattgatatgtttttcacaggggcgtctgggcatggctttcccaacctagtaactgcaacttttagcatcctacatgtaggacttgggaatatgtgagacagcgccaagaatttaatccaggagaattgacaagcttaaatgaaatccatattgcccactgattttgtgcagcttcagataagtaatctttctccacttagccttttgtaacaattgatgtaataaaggtttgtagtctttgtgtaatttattaaagcattgtgcctaaaatagaaaaaaagcataggaaccataggctgtgttttcttttgatttaatattttcatttcttcagttaatagaaatttgccaaattctgatgtttttctgtagcattatttgaatgagcattgtttatttgagtgaacattcagctaattgttacagaatcgttgcccccattaatcttaggctgtagaatgtagacaagtaaataggcatcatcagtatgatgagagtgaagctacttaatactgtggaatcaaataaaggaggaaccccttactaaaccaagagggaggaataaaatggaatgggactagagaagcaattagctttaataagggtattatggaagactttctagatgagaagcagtaagtacagatgtttggaggcaaacactagagagattgttgggtaaagaagacaatgctggaggtctacttgtgaaggccttgaatgctatgtgcagaagtcagcttctga

SEQ ID NO: 16163 - DNA, 1175 bp, Homo sapiens
tgaggaaagggaggaatcaatagtgatgcctaggtttggggcatgttgtctaggtggaattaattttaattacacttttaacccctagcatatccaaatattatttcacatgtgatcaacataaaaaattactaaatattaaaaatattttacattatctttctcataactaagcatttgaaatctggtgtgtattttatacttatagcatatctcagtacttgatttcataaaatttccagctgaaaaaatagattcacgtacccaagtcgttccaagcatacttaaaagttttacggtaatcgaatcgtgtatatttttaaattttattttaaattaaagttaggattatgaattcagttcctaaattagcctcatttcacttctgcatttcaagtgggacaagttattaccatattggacaatgcagtctagtgaagtagaggatagtggaaagtcagacttaaaaagttgtttagaaccagctctggaaggccttggatgtcagattaaaggactgagattttacccttgagtcaggcagaataatggatggtttttgaactaaggagtgacacaaggttgtgcttatgactagaaggaggccactaggtggccagctggtgagtcaggacacccttcagttgctttgacttcagccctgtggattcaaagtctgatttttgtcagcgctctagagcagtctcaccaaaagtgtggtccacaaggcagtgccagtctgtaagccctttgttacacatccatgtcaaggcatttacagaaagtaagaatttagaaacttatagcagtttaacagactaattttatttctgtgggtctaataaaaatttgagggattgtactttgcatattctttatttccctttttttgtttgttttttgtgttcgagatgggagtctttttctgtcgccaggctggagtgcagtggtgcagtctcggctcactgcaacctctgcctcctgggttcaagcgattctcctgcctcagcctcccaaatagctgggattacaggtgtgcaccaccacatccagctaatttttgtattttcagtagagacggggtttcaccatgttggccaggatggtcttcattgcctgaccttgtgatccgcctgcctcagcctcccaaagtgctgggattacaggcgtaagcc

SEQ ID NO: 16164 - DNA, 1651 bp, Homo sapiens
caccccagcattgctgatggattagagtgctgccaagtttttggatttttacctaccagcttttgaagggcagattatttcaagtcttaattaatattttcaggaacagtaacaatatcatttggttaaattgagagaaatggggttcagttgacagaatttgttcaggatatagaatttttctgctgctgctcctgcagctacacacctacaactagtaaaaacatggttgcttaggttgtcaaatgaccagcaaacctggagaggaacctggaatgactataaacagctccacccacactttttttgggcaaatgtgcaagcttagtagaatctaaaaggatacttcagcctttgtttgagttgcagaaaattaacatggtaaggaggaaaaaatcactaatttttttaaaaagttccctgatacaggaactgaaaatgatttttgaccaacctgggcaatagagcaaaatcccatctctacaaaaaaatacaaaaattagtcgggcatggtggtgctgcctgtagtgacggctactcatcctgaggtgggaagattgcttgaggccaggaggttgaggctgcagtgagccaggatcacaccactgcaccagcctgggctacagagtaagactcaagaaaaaaaaaagatgtttaattaatcttgcttcagtgctgaggtggtacagggagggagaaagggatattgggctatgaattccatctaaactggggatttttatcagggtgtgaagaaagattttcaggaataattatctgagttacttggagtaaaagtagcaggaggaggaaaagagatatggcctgtgggtctctgacttgccaaacttcttattcattttacaaatcatgatttctagagcatcttaatctttgaggcccagctgcttggaagttgcataatctctatacttcagttcccccctataaaatggggaatatgatagaatctaccttgtatttgagaggactaaataaatataaagtgcttagaaaagtaaggactcaactactagtaataattattttgacatgtttaagtaatcagtactatctggaaaactgtgctaatagtgcctgatctacacaaatttaagtgactataccccttttttgagtcagagtctcactacgttacccaggctggagtacagtggtacgatctctgctcagtgcagcctccgcctcctgggttcaagagattctccagcctcagcctcccaagtagctgggattacaggcgcctaccaccacacctggctaatttttgtatttttagtagagatggggttttaccatgttggccaggctggcctcaaactctggacttcaagtgatcacctgcctcagccttctaaggtgctaggattataggcttgagccactgcagccaccactctgtatatctcttttgaaagtcataagcaatatctttggaaaaaacacttaaggttatttatttagaggtagtgtctctctgtaccccagctggagtacagtggcacagtatcacagcttgctgcagcatcaaattcctaggctcaagccatccttccaccggacatgttggcgtgcacctcctgagtagctgggactacagttgtgctctaccacaccgggctaatttttg

SEQ ID NO: 16165 - DNA, 1171 bp, Homo sapiens
gtggaggttgcagtgagccaagatcacgccactgcactccaacctggggcaacagagtgagactctgtctcaaaaaaaaaaaaaagaaatcagagataatataaatgcaggtgtaaactcatacacttaatgggctataagttttggaactggctgtgataatataacaaaagtaataatgggctgtaagtggtattaaatgtgggattaactggatatttaatgataccaaggaatcattaattttgtttggctgtgatgttttattattagaatgatgttatgattaaattttatttttgtctggatacagtggctcacacctgtaatcccagtgctttgggaggccgaggcagatggatcacttgaggccaggagttccagaccagcctggccaacacggcgaaaccccatctctactaaaaatacaaaaaattagccaggcctggtggtgcacgcttgtaatcccaggtacttgggaggctaaggcaggaggatcacttgaacccaggggaggctgcagtgagctgagatcgtgccactgcactccagcttgggcaacagagcaagactccatcttaaaaagaagaaagaaagaacttctattttttaaatgttttttcctttcattgaactccatttatagcctttccattcagagcataaagattaaattttaaaacaaggcttggcaccctggcttatgcctgtaatcccagcactttgtgaggccaaggtgggcggatcacctgagctcagaagtttgagtccagcctggctaacatggtgaaaccccatctctaaaagagtacacagtcctagagcagtggtgtgcgcctgtagtcctagctacctgggaggctgaaccaggagaattgcttgagcctgggaggcagaggttgcagtgagccaagatcgcaccattacactccagcctgggtgacagagagagaccctgtgcccctcaaaaaaatgttttttttaaacaagaatctctcaggcatactgaaatgttgaagaggaaattatattaatatctgggacttgtttccaaatttggaattggggcagggtgtaaattgttggcaatatcaaagaaacgaggagttggaatgataattgtagaagctgcatgatagatacacattctttatacttctgtatatgttga

SEQ ID NO: 16166 - DNA, 1037 bp, Homo sapiens
tagagctcaggtccagtttttctaagttatttataataatatttgtaaatgtctggcagttttctttagaaaaatttaattcttcatatgctccaggttgtattgtgctactggacgctggtcttatgggaatgaattatttactgttagtttttgttgttgttttcaaacggagtcttgctctgttgcccagactggagttcagtggcactgtctctgctcactgcaacctccacttcttgggttcaagcaattctcttgcctcagccttccaagttgctgggactacaggcacgtgcctccacgcctggctaattttcatatttttagtagaaacgggggtttgccatgttggccaggctggtcttgaactcctgacctcaggtgatccacccacctcagcctcccaatgtgctgggattacatgtgtgagcccctgcacccagcctactgttagttttttttttcttttctttttttcccctccgagacagagtttgactcttgttgcccggggtagagtacaatggcgtgatctcagctcactgcaacctctgcctcccgggttcaggtgattctcctgcctcagcctcccgagtagctgggattacaggcgcacgccaccatgcctggctaatttttgcatttttacgcttatttttttttttgtcttttttttttcttcctttttgtggggaacggggtctcactatatgcccaggcaggtctcaaactcctgggctcaagctatcctcctgcctctgcctccctgagagctgggattacaggcgtgagctaccgtgcccagcctaatttttgcatttttagtggagacagggtttcaccatgttgctcaggctggtgtcaaactcctgacatcagatagatgatccacccaccccagcctcccaaagtgctgggattacagatgtgagccaccgcacatggcctactgttagttttgatctgcctagttacagaagttatgtttgtttatttgtatcatcagtaatctagaagttatatatatttatatg

SEQ ID NO: 16167 - DNA, 1133 bp, Homo sapiens
actcttatcccccaggctggagtgcagtggcgctatcttggctcactgcaacctccgcctctcgggttcaagcgattctcttgcctcagcctcccaagtagctgggattataggcgcctgccaccacgcctggctaatttttgtatgtttagtagagacggggtttcaccatgttggtcaggctggtctcgaactcctgacctcaggtgatcctcccgcctcggccttccaaagtgctgggattacaggcatgagccaccgtgcccgaccaatatatttatatatatttttaagtgatcatttctaagattagcaatatattgaaaaccttaaaatgttcgtgtaccttagcttaagcaactccctttctgggagttttccttaaggaggtgactaggtatgtgcatgtataaggatcttttgtgtttatttcagcattgcttataattaaatggggaaaaaacccaaatgttcaaacgattgactcagttttggggtctgtgtataaagtagaataggccatgtgcagcggctcacgcctataaatcccagcactttgggctgagccaggtcgatcacttaagcccaggagttcgagaccagcctgggcaacatggcgaaaccccagctcacgaaaagtacaaaaattagctggccgtgttggcgcgtgcttgtaagtcccagctactgggaaggctgaggtgggaggatcaatagagcccaagaggtcaaggctgcagtgagtcgtgattatgccgttgcattccaacttgggtgatagagtgagaccttgtcaatcagtcaaccagtagtcgaatattacctagcattgcaaatgatgatatagctctatagtgatgaaagatgttcatagaaaagcaacatcataaaggttttattgaaaactctctataagagtaaactccagaatgtaaagtggtattggggtggtgaggttatgggtcatttttgttttatatttagtaatttattttctaatttttcttctaagatcattgattatttgtatggtttttaaaacctcacctatataaccatttcatttaatgttgaattttgaattcagttctcattttgtcattatttagaagataaattttgtccttaaggga

SEQ ID NO: 16168 - DNA, 1024 bp, Homo sapiens
aggatgtaagttccagtgatgtttgaatatctaccattcaagttctgttttatgagaaatcttgacactgagtaattaacaaatagatgtgctgatagatgttgtctccacaaagtgacacttcttttatcacaacttgatctcaagaactgaggttatttcctgatttttgacaaaaatgttttgctctggttttgttgctctagattgatcgtactaaaaaaccagcagtcaaattgcctgaagagcatagaataaaatctgaaagtacaaaccatgagcagcaatctcctcagagtggaaaagttattcctgatcgttccaccaagccagtagttttttctccaactctcatgttaacagatgaagaaaaggctcgtattcatgcagaaactgctcttctaatggaaaaaaacaaacaagaaaaagaacttcgggaaaggcagcaagaggaacagaaagagaaactgaggaaggaagaacaagaacaaaaagccaaaaagaaacaagaagctgaagaaaatgaaattacagagaagcaacaaaaagcaaaagaagaaatggagaagaaagaaagtgaacaggccaagaaagaagataaagaaacctcagcaaagaggggcaaagaaataacaggagtaaaaagacaaagtaaaagtgaacatgaaacttctgatgccaagaaatctgtagaagatagggggaaaaggtgtccaaccccagaaatacagaaaaagtcaacaggagatgtgccccatacatctgtgacaggggattcaggttcaggcaaggtaagcagaaacagtacaaattgccaacgaagtgaaagaaaatgtatatgaaaatgtgaaaacaccagtggcattccataaaagggcaggcatttcaaatagtcttttcaggggtgatagaatgtactgatctatccacatttgctcatctattctcctttgaggccagtgccatacatttatgaaatgattggttgggaatgaaattgctttttgtatattacatctataaa

SEQ ID NO: 16169 - DNA, 1050 bp, Homo sapiens
tttaaaaagttttataagttaatttggaaagttgtctgttgactaacttaggcctacttttcataagcatttgctttacatggggatatcaaataaatatcctgttttccatgtatcaacaatgtttcttatataaaagcttgttgatacctttagtcttaaagtacctccagaatgtcatttcctccaacagggtttctctgattgaccaggttaggggctttcctgtgtcctgtcacaacacactgtaggtagcactcaccacactctgtgctgtcattgttcacttgtctatgcttctcactagatcacaagctttgggaaggcaggaactcttttgtgtagattgctgttgaatcactggtgcctgcagagtgactaactaaataggtgctctctgacattattgaagaatcgaattaacgagtatctgctacttgtttttttctgccaggattgccttagattattttccaaagaagaaaaactcacagataacaacagattttactgcagtcattgcagagctcgacgggattctctaaaaaagatagaaatctggaagttaccacctgtgcttttagtgcatctgaaacggtaaaggggaaagtttgtcctcctgttcagtgaaattaaatgagggaattttaagttctgtgtaatttatacttgttgtactgcctgccatgggcacataacaaagggcgattatctggttacagtagatctagggaaataaagcagaaatgagactgttagttcacctcagtgttttcagtaccacagcaaaatgacaataccactatttcatgtaattccttataattttaaataattacaaagcatcaagtgaaaatgtataaaaatattacagtataattcaaacaaattagcacatgaaatgtaacattcaaacagcagactaaagcataacagacttagttatgtgttaaataaaatttataatttttaaagtattttaatgataaaatatgttaacgataccattaagtgcagaaataatttcatccagatttttccaattgatgg

SEQ ID NO: 16170 - DNA, 1033 bp, Homo sapiens
atataggacagtaaaaccatagattttatatacacacgtgctatataataacacccagagtcattctttcaagactagtattctcacatattgagaatattcattctaaatattaaagtaaaaatgccgggagtcaggcatgattgcaaagtgaactgcattataaactacatctttacagagtgatgtattaagagggttaaaggagcttataatttatttaaccgagggactcagttgctatatatatagtcagtaaaacactccatataaaaataagattctaaaagtgcttcagaaagagaccaccattagcaggctctcagggagaagatgaaaggatggggttcaaattgtgaagctgacaacttttcatgttttacaattagtctaagagaccacttcttggctaaattattatatcaaatatattcaaatcatattcttaaactcatcgagccatttgaacaaaaattatttttgtttagcttcatgagtatctttggaaaataatttgttgaatatatatgattatgagatattttctgataaacactgaattttgaaacctgaactcactatataattgcagtgttttgaaggcctgcatccattagcattgcattatattcacactgccttttttagtgaaccaagacccatcttctggacgacagatttatcttaagatgaaaggttgtataacatgcccacaaggcataaaaatgttaatgatgcaagtaagttctaagagtttaatgaccaagcaaaactctaccaccagatgctgactgcttgttttgcagtgttcaggaaacaccattttcctggctcttaacgcttttgtattggtatggaaaagggctggcagctatagaacaggagatccatagcattttgaacagaagtatctggaatctcactgactcgtgtgttatcaaagctatatcaggcctgggtgactgaattcttgcagaaagcagtgtagtggccaccatccaaatcaccaaaatggttctatgggagaaaggaa

SEQ ID NO: 16171 - DNA, 1029 bp, Homo sapiens
taaagcaaatattattaaagctcaagagagaggtagaaccccatacagtcatagttggaaaccttgacacatcactttcggaataagacagatcatctagaccgaaaatcaacaaagaagcatcaaacttaattttcagtctagaccaaatggacctaacagatatttacagaacattttattcaacagctgcagaatacacattcttctcatcaacacatggaacattctccaggacagaccatatgttaggccacaaaaaagtctcaacaaatttgaaaaaattaaaatcatagcaagtaccttctcaggctgcatgtgataaaactagaaattaataataaaaggtactttggaaactgaacaaataatatgaaaatcaaaacagcatatttctgagtgatgattaggtcagtgaagaaattaagaagaaaatgaaaaaatttcttgaatctaataaaaatggaaattcagacacaacttaccaaaacctatgtaatatggcaaaaacagtgctaagagggaagtttatagcaataagcacatacatcagaaaagtagaaggatttcaaacaaacaaccttatgatgcacctcaagcgactagaaaggaagaacaaaccaaactcaacattagtagaaggaaataaatagtaaagatcagaccagaaataaacaaaatggagacgtaaaaaagatacaaaaaaaaaagagacaaaaagttggttattttgaacaataaacaaaattgataaactgctagctacactaatcaagaaagagagaagattcaaataagtaaaaccagaaacaaaaaagtagacattataatggctaccatagaaatataaatgattattagagacaattataaacaactgtacactaacaaactggaaaacctgatggaaacgaataaattcctggacacatctaccaagattgcacaaggaagaaatagaaaacctgaatgaataatgacattgaatcagtaatagtaagtctcccaacagagaaaagcttacaagat

SEQ ID NO: 16172 - DNA, 1043 bp, Homo sapiens
ttaaaggtatttttgaaaagtcagtggaggaaagaaactgatttacagtagttctatttttgtataacttaagcagttaagtgaaaattaaatgctctgaaatttttaactaagtctggagttctgcagccttaaatcaaatcctttgactggagggtagagggatgttggctataactaaaataaaatctagagatcaaggttttacttctggtatatagaatataatgtgacagttgtttttaaaaggccatgggcattgatatgttttgaaagaatgcctcaagaaagtaactattagcagttatttaagttgacttgattttattatcaacctccttaggacaaatagcttgaagctggaaggtataaagaaattgtgggggaaagaaggctatcttcccaagaaggaaagcaaaactggtgatgaaagtggagctctgcctgttcctcaagagagtataatggagaatgtagatcaagctataactaaaaaggatcaatctcaagttcttacccaatctaaagaggagaaagaaaagcagctgctggcatcatcattatttgttggtctaggatcagaaagtacaatcaacctggtaagtaatcggttctattcctgtaagaatctttgtcatctgtctgtacaaaaaaaactggctctataaaagctcctggctgtcgtctatatgtatagtgaaaagtggcttccccagttcttactcaccatcatttcccagctccagaaccactaatgacacagctttttatattcctgaaagagaaaatgcagttggctcaacttgagtcaggtgttctctgtagcccagtcagtggacaagggtcaggctccaaataaggttacaggtatgaccacagccactctcacccctgtgggtggacggggcagttctcaaagggaagggggatgaataataatcgttcaacagtattgatatatctttgtaaaaagtactcctcaaaattgtattacataaattctattctcccagaacattattcagctctaagaatgatcaata

SEQ ID NO: 16173 - DNA, 1028 bp, Homo sapiens
gcttataaagaaagaactgctgcaagaggtgtaggtactcatgctagatattcagggaggcttgaaggctgaaggtgagatacagtgagcttacggaacatggtggaactcaaagaagggtttctgagataaacacccttattcaaatgccagagacacactgtttctctaaacagaaactcttaaggcccggcagtttttatgttggagcaaaagatttgggtcagaaccaaagttttaaagactttttattgaagaagttcaaagattccttggccagcagccaagtgtggtctgatttgtttgcatttcctctgggaactcacacacaagtgaggaattggccagccaccactgtgagggtcacccacacccctgtgggccttttctccctgagcagttccaaggtgggggagggaagccagggggaatcagatccctacaaaggccgagagttcagcagcctggccaagctgcagttctttcctgggtgaagaagtatctctcccaatagctgcagtatctcttccaatacaccaagatggtattgattagtccacaaatgagacccctatgactcaggaggtaagtgagaggcatcaaggggagaggtgggaagtgaaatatcacctcttcttccctcctcccagtgatggtagaaggacttgctccaggctgggaggcatcaagcatgtgtgctaatgggccagttctgcacattcaagatcccggagatgttaagtttatccaaaaatctttcaagcaatcctgtcgtttgcaattaactcagagggagttttgagaaatttgtcaactggatttaattttaaaaagggaaaatatatcttttactatggttttggaagtttgaaaaggagttgcttgtgtaaccacacacgtgtgcacacacaaacagcatgaaggtctctcctctccttgggattttgatcacagaggtagaaaattaggcaaagtgtaaaaggatatgtgattgtcaaaaggtgaggagttagagggactgaaagaaa

SEQ ID NO: 16174 - DNA, 1064 bp, Homo sapiens
agagattccaaaagtatgaacatacatcatctcatctggtcctcacaacagccctgtgaggcaggcaggcaggcatcatggttccagaatgcagaggacagagtcctaactggttaagctggaaaccaaatccatgtcctctgtctcctggtttagtgctcctcccactccatgagatgaacagcactcactgtaatgaacaaaacagcctttctgcttagaatagatgaaatgtcctttgggcttgcacacaggtgattttaagtagaaaccttgctagaaagcttggaagaaaaacacacctgagctcagttcagcatcagaatcagcatcagagggatgaacaggaaagaacatggacatctttgacaagggtttctgcttatgttcttgattctcacccagatcatggttgagtgctgtaactttaaagcagcaaagtccagtaggagggaaggcatttaaaggactttctcatctagcaacttattgattccttcacaaatcctcttgaggttgggcctacagtctccatccagactatagagggtggagaggaactccacatcggcaaagtggttaaagacgtggttgatgcgcccgtgggtcctgggcgtcaggtgccgctgcaccagttcatgcaccaggtccttgcactcatgcaggagattggagagcacgttcctatcgaaggtgtattccacctcatagaagctgacaatggtcatggcggtctggttcagcttcttccggaacttctccacaataaccagctcctcttggctaaactggttgttccggtagaggatcccgattttgatcgccaccttgattaagtctttcatgatcttgtgggcttccttcttgttgtgtgtgtgctctttggtgactttgtagagctcatcaaagatctcgctgctggtgtcatcaatcaacatgttggccacagttttgctggctattttgctcagaatcttcttctgggcttgaagcgcaagactctttgaactaaaaacatcaggacctatggtaaaaaaaatatatataaaagttttagaaatata

SEQ ID NO: 16175 - DNA, 1987 bp, Homo sapiens
atgatttaagggagagagagggcactgagggagcagtcccatttgcaagactttctgcacatggaaatcttggccttgctttcaaccatccttctgcctcagccttctgcacagggtgcctattggtgacccaccaaggaggaatactgcaggctgaaagaaacagcatgagctaagctttgggagtcaaggtcacaagtgtgcttgggatatttgggaaacaggcctaactagtggaccgtgtttattaatggggaaacactaaaagatggaggataggtcttggtaaaaacttctccttctgtatacaagtcctaggaaagctcttttggccagagataattcttttaaccatgtttgaacaaaagttcccattttccaggcatgaaaggtaatggattgtttatagtacttcggaatctctgagaatagacataaaaatgtgattatgtagcgatagcaaattcatcctggtagaaagacagggggcttccttaaaccaagattgatagaagagctcaatcaaagataatatgaagtctctgagaataaggacccttcgatcatttacaagaaaggaaacacaccaggactatgttgggagaatggtgtgacaatggcagtgagctagtttggagagagaaagcaaaagataatttaaggggggaacttcactgcatggaaaagtgctggggtcagtctgagctgctgcttttataaatgatgttcagccagagtacaagtgatgtttccatgtttctagaaaacactaagctctcccagatggtgaaatgccaagctaatggtgataaacaacaggaagatctttaccaagctgggtgagtgggcagaatagcttcagcatggtaagaacaaggtaataaattttgggaaaaataaagtaaatgatggttataaaacatgacaggctctgagctctcagctacagcccagaaaagggcctctgagcatcactctaggatgtgggagtggacagggtgaggggacagctattctcccctctttttcacaggacttggaaacttctctaaggagtgtgtggaaaacttgaatgtaagtgtggatagctgtgtcaaaattataaaatgggaaattatttgtaatagtcagtacacatcagaattacttcatttctctaaatagcttgagataatggcagggaagagaattagctaaaaatgttaagcagaagttaagagtgaagatggttcccagaagaaaacaatctggagtgcttaatgggcatcatttgtcaaggcaggggacccaaaagacagggaaggtgggaggaaaggcccaaggggtggggtaagagccctgggcagagggagattcctggtagtccaagtttctggcactcaatcacttacacttaattgttagggggaaaaaaaaaaacaaaaaatggaagaacttcaagcaagtctccttaagacggagcaggctcacaaactgctttgaacttgaactttctttccttttttttttttttttgagacagagtctcactttgtcgcccaggctggagggcagtggcacagtctcagctcactgaaacctctgcctcctggattcaagcgattctcctgcctccgcctcccgagtagctgggactacaggtacacaccaccatgcctggctaatttttgtatttttagtagagacggggtttcaacatgttggccaggctggtctacgaactcctgacctcgtgatccacccgcctcggcctcccaaagtgctggaattacaggcattgagccacagcgtctggcctgaacttgaactttcatgatgagcaaccatccttctgctcagtttatgcagccagaaaagctgactgaacctgtcacgtctctcatgctccatctttcactactgataagtggtcaggagcgagtggtgagagtgatggcctccccaccccttcccgtctccttttctgttctgtgggtgaatgatgagg

SEQ ID NO: 16176 - DNA, 1068 bp, Homo sapiens
gaatgattttagcgtgtttgttcttgttctttgaggctcagattccatcagttcaggacccacacctggaaggaggtgcatattcacaatgtgcaggtggaactgaatgtactcaaatgccttctgaactaagcacaaggtccaccctttgcctttcatacggagctatctgcttggcccacttgggttctgcctgtctttgacccaacaacagcagcatcacctgggggccagagggattgcccaccatgctctcagtgttcagttccagcagtaaaccctttctccatggcagaagcacccctccttcctgccacccctggagcctccccatttacgccccttcacactcatgagctattttaatatactcaggagctgtcgggcttggaatagcacagtccacgttctgtctctctgggcaatcctctctctctctgctggcagctcccaaactttctctaccacggcaggcacccaagaactcaggctcagaacaccagactgctaacaaggacaccagtaggatgccacattcagagccatgggagcatgccaacaccgtaatatgtgaaattagtaaacagtctaatgcaataaaaatgtcagtctttggaatgctgtaatttttggaggatggatgcagaacctaaaatgtgcaaaacaataaaatggaacaaactcgtctatcttggaaaaaagaaacaaaacatggcctgtgacagtggactgaggctactggaaggtgctctaattaattaatgtagtaacatgtaaaccctcagcttagtgagcttaacaacaactagacaaactgttagctgtacttgagaggtcagaacacacgagggagaagaaaccagaaggtacttctgtatgggagatgatttggcagacagcattatggcttcctcagtgttctacttgattttttttttagtgaaatatgaatcctgaacaatgacatttttggatttcagtcaatctgaatgcggaacagcaggaaagggacatgtaatatattgcttataatctcccttacatatactctgtagtaaaactggtttt

SEQ ID NO: 16177 - DNA, 1060 bp, Homo sapiens
ggacagtagccctaacttgcacactgactctttaggaggtctggtcgtttcccattacttgaggtaagactagcaagtcagttttcatctctagggagtttacctaacactacctgccatttagtggactcttactttgcttcaaaaattaattagattggactttctgaatgaccaaaaaaatttttttaactgccagttgaataatagcacctttaaaaaatatgatcaagaaccagggagaaatcagaaagtaaagacccctaagctatcagaaaaggtatcttttactcaggagagagtcctgcaggctctcactcatagtctagttttctttctttaccccaaaattctatcaggtatgggaataggagggcagggtagagaggtgctcctgtccacacccactttacctcttactcacctgatgacttcctactgcaaacagctgaaggcttttgacagttcctgggtgttaaggggagtggttcttagagaacgatgggcaagatttggagatgaaatctaggttcctgccccttgtgtgggacacttctgcatagtcttatagaagttccggcaggattgaagcccagctgtccacaggggttaaataaataacctctcaggaatgcacctggatgggcttcctggtacttcctgggatcgcctcccaaacaactagctctcaagtccttaactcagggtcagcttctgaagaaacttatcctaaggcatgctgcaagaacgaaaagccaagaaatgatggaaagagaaaatagcagaactctgaaaaaatacaaacaactaaagtattttggggtcctggagccctttaacaaggaccattgggacacaaggatatgtggcatagtttctctacacactgagggctggagtattgtgatctgggtggagtgtattctttttaagaggccccaggaataagtacgatatttgagaaaaggttctatatgaaaagtgaacataggttgtgatacttaaaggaatgatttgttggctatctagaatcttgagtttccgaatgcccctttccctg

SEQ ID NO: 16178 - DNA, 1027 bp, Homo sapiens
ttcctacagcttcttgaatctatggcttgataattttttttggtcagttttgaaaaattctcagtgattgtgtttttaattattccttctgcctcacactcttcattctgttatttgggcatttcaattacacgcatgtaataccttcaagaattatacaacctccaggtggggatcagaggtaggcaagtatattatttaagaaataggcttagctgcatgttacagagacacagaataacagttgcttaaataaagtggtttctttctcttttacttaacgactacagctaggcttccagggaatagtatggaagctcttctccattggatgttgccctcagctgcttgaaccaacatggttcaccaccacctctctggtctcctcacaaggatggagagagtgaaaagataataagcttccccttcaaagtttctccctagaagttgtatacctcaccttctttctattcacatccgattgaatgaaagttgatcacatggccacagtgaactagaagggagactggaaaattgaatctttcttttttttttagagatggcctcactctgttgcccaggctgcagtacagtggtgcaatcacagcttatcacagccttgaacttttgggctcaagtgattttctcacctcagcctccagaggagctgggtctacaggcacaagccacaatacctaactcatttttaaaaaattttgtagagatggggtctcactattttgcccaggctggggaaatgtagtctttttttttttttttttttgagacggagtctctgtctcccaggctggagtgcagtggcgggatcactgcaagctccgcctcccgggttcacgccattctcctgcctcagcctcccgagtagctgggactacaggcacccaccaccacacccagctaatttttttgtatttttagtagagacggggtttcaccatgttagcctggatggtctcgatctcctgacctcgtgatccacccacctcagcctcccaaagtgctggga

SEQ ID NO: 16179 - DNA, 1050 bp, Homo sapiens
catggttaccacaatgcttattgagtcattccttttggtgatggttgttcaatttgtgaaaatatttttaattgagttggtacatagtcattgaaaaatgcaaacaatataaaggtttatacatgaaataaagtccctatcaagccccccttcttccactcctcatccccaagtgaaacccttaatggcatttcagtgtgccttttccatcttctcctatgtgtatgaggtcagctagaatagattgtccaacagggccaccaccaacagatatgtctggatggagggtgtctggatgctagacttattttgagaaccttctgtgctgagtatccagagtcttcatggttatcacactccagggcactgtgagcttcattggtgttggcctacactgttaatgttctttgggaagtttgccttttgagctgaatacaacttagtacaagcttaatccttggcaatttggggagataaaaatataatgaagtgtgtttatgaccattttgttactgtaggacttctggctattatccagattgaaataaaccatgaaaggagaggatctgacaccaagtcatcaagtctgacaaaacaggccatcattgcaaggcaattttaaaagagatgttcaaataatatttcagcaggcactaaaagtgctagaataatatgaacatgcaaaggtaaatacattgaagaatattaacaatgtaattaccgattattaaataaaatgtatttaattcactactccctaaatgctttgatctcattttgggtatatgtggatttatacataatgttctgcaactttctgttttcactcaagaatatccatattcaaaacagtcctatctcatttattgatagaaagcatagtatcacataatatgaatattctgtactgtatataaccattcctctattggtagacattaaagatgcctctaactgtgcactattatcaataatgctgcaagaaatatctatgtacaaatatccttgaatgtgtgtgtattcccaaagggtagattcctaaaagtgagt

SEQ ID NO: 16180 - DNA, 1009 bp, Homo sapiens
tttggcacggacatagagtcaagccatatcagtaccctagtttagcaatggaatactatataacaatgagggtgaagaactacaactgcaagaaacaggatgggtgaaattcacaagcataatgttgagtgcaagccaggaacaaatgaattctcactgtatgactcctctgaagtacagcataaaacaggctaatgaatcggtgctgttagaagtcaggatagcactccccgttggtgggaagatagtgcctggaaaaggccatggtggacttctggaagttactcacactctatttcttgacctgggagcttgtttcacaagggcgttcactttgtgaaagttcactgagctgaacacatgtgatatatatacttttctggatgtcagttattcttcattaaaaagttttaaagaatgttattattataaaaaataagcccttttcactatatgtgggcacagctccttttggtgacagcaaaatggggaaggattatcctctcaagtcataaaagggagaggaaaatggattgggaaaaagtgggggatggtgaagagcagggcacagaggagacagctgaggggcccgcctggtttgggacttgctcttaggaggggtttccctcatggctctggcagacagcaaggtctaggggtccccgtgaaacggaagtgtgactgtttttcatggaactggtgcctgccatggttcctcctcaccttcctcctcattcctgcggtcccactttctcaaggaggattgagatccaggtgcaccagccaggaatttaaaggtcagtgagtcagagtccaaacaccagaagctcaagtgaaattgctgtggcagagtggaaattggcccacattggatttccagggagcctctgggttaattcttcctatgagatttgaaagaatattcgtggctgctctaggcatctgctttgttagttatttttgctgttgtctctgtggtctggcagcgctgagaagcctgagggctccc

SEQ ID NO: 16181 - DNA, 1080 bp, Homo sapiens
tgctagtttctgacctatttacactagagggtctcaaggttcagttctctctactcaatcatcccactcagatgtcaactgggcatgtcaaatctaacatgtctggaatggaaccctaatctctccccttcccaaacttgctccacctatctcaggacacgatgtccccattcaatgcaaaactggacagcactttgactctttttttttctctcacaccctacatccaatctgtcagcaagtctgttggctttgccttcaaaatatgtccagaattttccctcatctcttatcatctctactgctaccacctggaccagccaccatcacctcttgcctaactggtctgtctgtccccatcccttgtcctcttgcacctattctcaacagagcagccagaatgattctgctgaaacataaatgagtcatatgtgtcagtcctctctcaaattcttcagtggcttcctttcttgcagggggtaaaagccggaattgttacaatggcctgcaaggcctgacgtgatttggtaccctattgcttctctcatctcctgtattcttccactcaggttcttgccttagaatattggcacttgctgttccttctgtctagaatgctttcccgccaggtctctgcatgggctacttgctcatttcctttaggtctttatttaaatgctgtcttctcagtgagggctgcctgaaccacctgtttacaatcacacctgcgtctctacaactggtcctcccccatcctccttccctattctttttctatgtaacacctatctgcctgataagtgtgaccaactatcctggtttgcccgggactatgccagtttcagcactgaaagtcccacatcctgggaaaggccctggtcccaggcaaactgaaacaattggtcactctactgatacactatatattttacttgtttattgttgacctagtgacgacatattgctccatgaggtaaaggaattttggctggtttgtccactgctgtattcccagagtttagaacaatacctgctgctatacatagtaagttttcaagaaatatttaatggatgaagagc

SEQ ID NO: 16182 - DNA, 1031 bp, Homo sapiens
ttctggttgtagccacattaagctgatcgttgcttctcagatttgggaatgcttatctaggcatgcaatgatggtgggagcctctttcacaccctaaaagaagcagtgaatactttgctgcatttttgtacagagacagcctccttggagccaacagctgggacctctccccagctgtcctaatcaacaagctgttgctttccacgccttacagatgtacaccatagagaaacctgtgtgcacatatacattcagaacagccctgttcacaatagccccaaactaaagacacctcaagtgtccctcaacagtggaactggcaattaaaccatgagatatttatataactcaataccctatggcaatgaaaatgaactacacctgcatgccacgatgtggatggatcttagaaacatactattgagcaaaagaagcaagatagaagaatacataatgtatgaattgactgctaaaacctttaaaacaaggcaaaattaacctgtattctctgggatgtgaaattatgtggtaaaatgataaaaaaaaaaagcaagggagtgactgtcacaaaatcaaagacagtgttttgctctggagtgagagagagagagtgattacaaaggcacacgaggagcttctggaacaagggtaacatccgctttgtcaggctgcattgtgatggcaaatttgtcaccgcactgtccagttttctgtgaaatattatcttaagaaaaagaggaatgtcagttgccatgcttttctcccccctagttccctgctctgggatgtggtaccccgggcagagcatggcatctggagggagaggacccttgtttagagctggggatggctatacgtcctgggggaagggagagcagccagtgccaggtgactgtgagtcctgacccagatcagtggtctgggagcaatttttcagaactgaagcttccaaccccgcccccctcccccggccactcccccttctccgcagaatgaccctttcctcaggactttcatagcccctacctggc

SEQ ID NO: 16183 - DNA, 1026 bp, Homo sapiens
tatattttaaaagcacatgaaacagcagcaaaacttcggcatagcaaacaacaacaaaaatgaaaacaccacaaacaaaagcaaaagataaataacaaactaggaggccgggtgtggtcgctcacgcctgtaatcccagcactttgggaggctgaggcaggtgcataacctgagatcaggagttcaagaccagcctggccaacatggtgaaaccctgtctctactaaaaatacaaaaattagccaggcatgatggtgagtgcctgtaatcccagctactcgggaggctgaggcgggagaaccgcttgaacccaggagatggaggttgcagtgagccgaggtggcactactgtactccagctgggcgacagaggaggactccatctcaaaaaaaacaaaacaagcaaaacaaactggaaaactcatatcatatcatagatacataatctttctaatacacttaatgttcctaaaagttgattaaaaaaatttaataggaaaatcagcaacagaaatgagaatccaacaggaaaatgagacagttctcaggcaaagaaatacaaatgtctcataagcacatgggaaaagatctcttcatttaaaaatgtagatttcaactaccccaaaatataattttcacctaacacaagcttgtgcaatctgtggcccaggatggctttgaatgtggcccaactcaaattcataaactttcttaaaacattataagatttttttgcgattttttttccttttagctcatccgttattgctagcattagtgtattttatgtgtggcccaagacaattcttcttcttccattgtggcccagggaagccaaaagattggacacccctaacctaacagaaagacaaaactacaaaagtttgacaacacactgtattagggaagctgaagagaaacagacatgctcttgcattgctgttcggagtgcggaatgatggaacccatacagaaggcactttggcaaaatctggaaaaaattacaaatactctttgacccagcaa

SEQ ID NO: 16184 - DNA, 1048 bp, Homo sapiens
ggggtggtgtgaaaaatgttgtgcaataaggacctgcaggaggtgctgaccggctggactcagaaaaaaaagtgggagagtctgaagctggtctgagtgttgggagtgtctgactggtagattaatctagacggcaactctgtttagagaaaaattgggagtttaggtttagttagagaatccagcaatagaaatccaaatagaggctgggcactgtggctcatgcctgtaattccagcactttgggaggctgaggcaggaggattgcttgagcccaggaattcaagaccagcctgggcaatatagtaagacctcatctctgcaaaaaagaaaaaaaaatttaattagctgggcatggtgatacacacctgtagacccagctactcgagggactgaagcaggaagatcatttgagcccaggaattggaggctgcagttagctatgatcaagccagcctgggcaacagaatgagaccctgtctttaaaaaaaaaaaaaaattcaaatagaatcttataaactctaagataccattgattgtaaaactctccagtattttatgtatcactaagaaaaaaaggctggcaatcaaaatataacatgttttcttaaaaatacaaatttttggccgggcacggtggctcatgcctgtaatcccagcactttgggaggccgaaacaggcagatcacgaggtcaggagatcgagaccatcctggctaacactgtgaaaccctgtctctactaaaaatacaaaaaaaattatccgggcgtggtggcgggcacctgtagtcccagctactcaggaggctgaggcaggagaatggcatgaacccgggaggtggagcttgcagtgagccgagattgcgccactgcactccagcctgggtgtgagtgtgagactctgcctcaaaaaaaaaaaaaaatacaaatttttggctgggcacagtggctcatacctgtaattccagcactgtggtaggccaggctgggaggattgtttgaagactggagttggagaccagcctggacaacatagtgagatcctgta

SEQ ID NO: 16185 - DNA, 1034 bp, Homo sapiens
gcggggcatcacctcacccgggaaggggttggggttgggggatttccctttcctagccaagagaagccatgagtgactgtatctggaggagcagtaaactcctgcccaaataccgcgctttttccacagtcttcacaaccagcggaccaggagattccctcctgtgcctggcttggcaggtcccacgcccacagagccttccttgctcactgctagcacagcagtctgagatccacctgggatgctagagcttggcggggggaggggcatctgccattgctgaggcttgagttggcatttctatgctcacagtgtaaacaaagcggcatggaagctcgaactgggcggggcccaccacagctcaggaaggcctactgcctctctagattccacctctgggggcagggcatatctgaacaaaaggcagcagacagcttctccagacttaaatgtccctgcctgacagctctgaagagagcagtgcttctcccagcatggcgttcgagctccgataacggacagactgcctctgcaagtgggtccctgacccccgtgtagcctgactgggagacacctcccagtaggggccgacagacacctcatacaggtgggtgtccctctgggacaaagcttccagaggagggatcagacagcaatatttgctcttctgcagcctctgctggtgatacccaggaaaacagggtctggagtggacctccagcaaactccagcagacgtgcagctgagaggcctgtctgttagaaggaaaactaacagaacggaatagcatcaacatcaacagtaagcacatccacaccaaaaccccatccataggtcaccaacatcaaagaccaaaggtagctaaaaccacaaagacggggagaaaccagagcagaaaggcggaaaattcccaaaaccagaacgcctcttctccaaaggaacacaactgctcaccagcaagggaacaaaactggacagagaatgagtttgacgagttgacagaagtaagcttcagaaggtcggtaataacaaac

SEQ ID NO: 16186 - DNA, 1049 bp, Homo sapiens
tccactgcctcgggtatatatgttcaacacctgcacccactcactaaggaaggaacacaaacacactaagacaaacttacaaactaaggtaacatatacagtgatgataaccccctacaaataaacagtttcatatctgggcataactaagcatgaacatcatgataagtacatacaagtgaacacagttcctgaagtgtctgtgagaaagtgaataaaaacatggtaaactagaagaaaatgagggctgggtttgatatatatatatatagacttgtaggtaagaagattgttgtatttccttaaccatagcatagcaattcttttgagcaggatattattagtgatacttatacagtaggggatttccatccatgtggaaaattacagccaacaaaatattttcattccctgggtgtggtggtaaaactttgatgaggagttaaggaatattcagaagaagcccctcaaatgtatatgagtctggcttatattcaggcagcccttaccctgaggcaaacgtgacaagatatgatacaacccccaagatttattttcattcatggtgggctataattaacccaggttaatactcttagggaactattcttttttttttttttcctctttaatgtgcccacttgagtgctagaccagctgaggagttgggggtctaatttcactggaaatagcaataaatatgtgatgatttcaaagtcatgcccaccccacttttgtttttctcctgttgtccctaagatttacagtttcttggtgaaaaattacagaaccctacacagaaatggaccaaggcagatgtgtaggatttcacctctgcaaggccttcggggcaggtgggctcttctgttagtcctcagcacaccctctgtgcttgcctttcctctgccacttttcttgaacccccattattattccttgtcaagtcatctcacttcctgctttccttagacattggccagcattccaagtgatatagtgtgccctccaccagagaatagctggcactgctttaagccccttagccttcc

SEQ ID NO: 16187 - DNA, 1079 bp, Homo sapiens
cattggtagaatagatctaagtaacttcttggcaatacagcagtccactgtggagcagacatgaatatatgtatgtaagctttaacttgcaaggtggatgttgtttgtcttataaattacacaaggctaagatagacacccatgacccttgaattgttattccctgatatgttggaggacgggcagtgaaggaagagcctgaaggtcgtgaaggtaatggttgtttgctaggcttcttttctttaccacatttctttatgccaagacgttgattttaagtatcctctaaggactgagatggagttcattttataacgttgttgttactggatgatgtatctataccatagatcaaatcccttaaccataattactattataaggaaaagttcccagtacatctgattggagggggattactcaggataatgatgctgtttttatcacatcacaacagtatcttctgtaggcagttcaatctattagacctatttgaatcaaatgttttagaactggaaaaagtggctgggtgctcacgcctataatcgcagcactttgggaggccgaggcgggtggatcacttgaggccaggagttcgagaccagcctggccaacatagtgaaccccgtctctactaaatatacaaaaattagctgggcatggtggtgcacgcatgtagccccaggctacttgggaagtggaggtatgagaattgcttgagccagagaggtggaagttgcagtgagccgaaattgcaccactgtactccagcttgggtgacagagcaagacttatctcaaaaaaaaaaaaaaaaaaactggaaaaagcataagactttatctagtccctaggccaggttcctcaatcttgacagtatttacttttgaggttggataatttgttgtaggggggccgttctgtgccttggagggatgtttaacaacatccctgaccagtagcacactcctcctgttttaaaatgttcctaggatgttgttttaatcaggtttggtaatggatgacacacactgaaactactgccttgaaagaagagtttattacttacagttccaagagta

SEQ ID NO: 16188 - DNA, 1028 bp, Homo sapiens
acacatgcatcagagcacagtgatctctttaaagggctcaaggatttcaggtcctctgtcgttcacatctgaagcatcatattcctgtgtgggtagctgaggtaaagattagggagtgagagtgagggagggcagtaaattttggagcctctgtctcagtagctcttctgtgtacctttacctcctctccctctctgctccttattcctaccctctttcctattccttctttctcgcaggaagttctccccactttcccactgcagagtactcctcgtgggaggaagaggtaatgtgccctcccatcaccttattcttctcatttaggctatatttctttaagtctgtgattcttactgcctttatgccaattatcagtcaaatttcagagaaatgatgagatgctagattttatcatactattattttatcttaaattttgccaaaaacaaatggcatcatcaacttgtgctatcaaatatatttgagtggtaaaaatatcttgtaatatactaagacaatgaaaatattcatttttgaagactgatacatggcaaacaaattaaatgttgaatatgtttggtatttatattcagtaaaattttatttgggtgctttaaatatgtgtcaaggccaagcgcagtggctcctgcctgtaatcccagcactttgggaggccaaggcaggcagagcacttgaggccaggagttcaagaccaacctggccaacatgacgaaacccatctctactaaaaatacaaaaattagccaggcatggtgacacacgcctgtattcccagctacttgggaggctgaggcaggagagttgcttgaacgtgggaggaggaggtcgcagtgagccaagatcttgctactgcactccagcctgggtggtagagtaagactccatctcaaaaaaaaaaaaaaaaaaaaaaaaaaaaattaaataaataaatatgtgtcaacacataaaggatcttttcggaattgtggggatggaacttttaaatctgtccccttgaataaata

SEQ ID NO: 16189 - DNA, 1034 bp, Homo sapiens
gcacctgggccctcacccaggttttatagtctggtatgtaggtgtttgctcgtcttcctaaaaggactgttgtggaactgtcttctcactgcatacatctaggtcagtaatctctcattctcctatggttcctatttaattgcttgaggcttgtggcttctgtttgaaatagactttccagccaaggctgaattaaagaatatggtacttagaattttatttctacatgtttccaaaagttgactcttttaaattaggatgtttgccattgaagtatttttaaagatgcatcttagacaagaagtaaaacaagacttctcaaaaggagtgacatttcaacgtgttgccattctcttaagcttcagccatatttgagttcccattctgtaaaagtttctggagcaggaaaaaatagcacttcatttctttaatccagatcacgtggaaaatattagctcaaactctttctgtcctttttatgactgtggtttcccagaagagatgttagctgcttgcttttgaaaatagaaaattggtgtgttttggtgtattgttgattccaaatgtagtttgcaaagtcatgctaattgttttagtattgcttcactagttagcttctattttttccttcaggcgtttaatttggcttcttagagtagcgttttaagagaacttcataaagaagttctagctggacttcataaataattggaaagctttaaaaacacatagattattggcttaaaatggctttcttcaccccaaaaagatggttgaccagagcctcacgaccatcacataaccctactttgatagataatgaagccaagtgctctattgaatgtttactatgttctcattagtgcgctacacagccacgagctacagatactgttgttctcctgttatgcaggataagctgaggctcaaagaagttaactaacttgccaaaaaacacactacagaaaagtgacagagcgagtttccttagaagttctgatttagtctgtgatgggatttgggttgtaggcatt

SEQ ID NO: 16190 - DNA, 1028 bp, Homo sapiens
ataggcactctgatttgtatgcatctgctgataaagtaatcatttatataaagtaactgttaccttttaaggaaatttttaaattttttcttgggctccataagatgaaatttccctaaagaatccagtgaagattttacttccttgactgcagtttatttccttactcaatgaggaaatgacaggcaggattaattcctttctttaaatgggtgtgacattttaggttaatcatgattcatagtgatgtatggataagtttaactttcagatgtgcaaacacacatgtacacactttttatctgctacttaacacaaaatcaaaatttgggtaggaaaatgggttagaatcctgggcctaaaatgtcagaaagaagtaactaataggaaaacagccaaaaaatatcccagggtcataaatttctatttgcaaaaacaatattaacctttagaatttttttttaggttgggcgtggtgcctcatgcctgtaatcccagcactttgggaggccaaggtgggcagatcacctgaggtcgggagttcgagaccagcctgaccaacatggagaaaccccgtatgtactaaaaatacaaaattagctggaagtggtggcctgtaatcccagctactcagaggctgaggcaggagaatcacttggacccaggaggcggaggatgcagtgagcagagatcacgccattgcactccagcctgggcaacaacagcgaaactccgtctcaaaacaagcaaacaaaaaacgacaacaacaaaaaaaaacaggacaacagggctgatgtggtggctcttgcttggaatcccagcactttgggaggcctaggtgggtggattgcttgagcccagcagttggagaccagcctgggcaacataccaagacactgtctctataaaaaaatttaaaaattagctggcatggcacatgcctgtagtcccagctactttggaggttgaggtgggaggatcacttgagcctgggaggttgaggatgcagtgagccatgatcatgccac

SEQ ID NO: 16191 - DNA, 1065 bp, Homo sapiens
acggagtctcgctgtcgtccaggttggagtgcagtggcgcaatattggctcactgcaacctccatctactgggttcaagtgattatcctgcctcagcctccccagtagctgggattacaggcgcacaccaccacgcctggctaatttttgtatttttagtagagatggggtttcaccatgttggtcaggctggtctcggaactcctgacctcagcctccttattacaggcataagccactgcacctagctttgtttttttttaattattaaacaggcttctctcctttacctgcctctaagtattggcatacctaagacaggataaaactcctgggtttttttttcaccctctttttctaaattcttccctagatggtctcattcaactcattgttttaaatgccatctgtatgtgaataattctcatatttatgtttctggtttagacttcttgcctgagctccagacatattatccaactgccttgctagacattaccacttagtaacctagtaggcagttgtctaaatatacctaacatgtccaaaatagaactctcttccataatattcttccagtctttctctcttctgtaactggcacctaggatttatccttgaatcctgtttttcccttatccccatagctaatccatcatcaagttcttttggtctccaaaatatcacttaaatctgtttattcaattatctgttttacatctttatttctgccaccttagtctcagccaccattatgtcacctggcttactgaaatagctcttaactggtctttgcttttactcagctaccttcttcagacattcttctcccagtaacaagaatcttctttcagaaatgtaaatgaaataatgtagattgcctgcttaaaatggtttcatagtttttctttggtcttagttatgagattcagaatcctgcctcatgtgttccttccttcctcattgctacctcctttcctttgccctttgctgtggatgctgtggctacactggcatttcttttgctccaaaatgccaagttttatcctgccttaggtttgttca

SEQ ID NO: 16192 - DNA, 1055 bp, Homo sapiens
cctgccgggaggaagataagaaatgggatcaagcgttattataattatttaaaaatttccagccgtaagtttgtagaagggattatatttgtttagtatacagcaatttgaataacatctctcccattctgagcataccaccacagggcttgggaataaaactaaagaaatataagacttgtaaatcatagacttaaaattggaagagtctatagggatgttattactagtttatctggtctatgaatttttgaatttctaatatgaatgggttacagtaaatctgtaactaggagatggagtctccctctgtccctcaggctgaagtgcagtggcacgatcttggctcactgcaacctccacctcccaggttcaagcgattctcctgcctcagctcctgagtagctgattacagcagtgcaccaccatgccaagctaatttttgtatttttagtagagatggagtttgaccatgttggtcaggctggtcgcaggtgatccacccgccttggcctcccaaagtgcatgagccaccacgcctggctgtaactagacttactagttgtaatctggttacagatttactgtaagtcatccatactggaaaataacaactagagataagcaacaaaataaacataatggcatgtgctttacaatggctttttaaatggccaaaggcaaatgaaagcccctaatgttaaaatgcatgtaggcaagggcttaaacaatttaagaacacaaattggtagtagtaggtgagtgttttgtctttttttttttttttttttttttgaagacagggtctcactctgttgcccaagctggagtgcagtggtgtgatctcagctcactgcagcgtccgcctcccaggttcaagcgattctccaacctcagcctcctgagtagctgggattacaggtgtgagccacgacacctggctagtttttgtattgttagtagagacaggggttttaccatgttggccaggctggtctccaactcctggcctcaggtgttctgcccaccttggactcccaaagtgctaggattac

SEQ ID NO: 16193 - DNA, 1041 bp, Homo sapiens
tagtggaattacagtttgttttataaatactaccttctcttgttacaatgtatagtcttcatcatctgagcacatagtgatgactctgcagttctcagtgtaggcaaagctcctaccttccctagtatcactttttacccactcttacctcgttaagtgctgaccagtcactgagaattctgaaaaggcactcgcatccttgaagtttctagtttgtgaggcttggtctcaataaaatttaaggggggcagatgtggatgggggtcttgagtaaggatctctcattttcatggctttcctaatctggctacaactcctactatagtgctattctgtcagataacagtggtgtaatttttgacaaagcattatttgtgcttgactagattgctgtgaactagaagtttgagagagaacttggagatcttactgttctcatttcatttgtctatagaactgactttacagtgtacatttatcagaaatgtaaaacatgactgagctttaaggaattgtctacgttaaggcaagaaggtaagcgtgaacaagcattctatttcaggtagagactagagatgtaaaatttaggaaataatggagcctttgagaaatactggttttcttgaccagcctgggaaacatagtgaaaccccgtctcttcaaaaaatacaaaaattagccaggtgtggtgactcctgcctgtagtcccagctacttggggggctgaggggctgaggtgggaggattgcttgagcccagaatgcagaggttgcagtgagtggtgatcacgccactacactctggcctggatgacagagcaataccctgtctcaaaaaacaaacaaactggttttcctagggtatttagtggggagcgagcaggaagaatcaagatgtgtacaaacagaaaaaacttggtgggagggagacatgcagtattaaagccctttttaaaaatctgaaacttttttaccaatacaaaaattatttttattttttatttattcattttttttgagacggaatcttgctcttttgccc

SEQ ID NO: 16194 - DNA, 1029 bp, Homo sapiens
tacaggtgcccgccaccacgcccggctaatgtttttttgtatttttagtagagatggggtttcactgggttagccagaatggtctcgatctcctgacctcgtgagccacccgccttggcctcccaaagtgctgggattataggtgtgagccaccgcacctggcctaaaaaatatattttaaatatccttgagaaatatcccccccatcatttgctcatttcctatcaaccaaatcacagactgttcagttggctaataagcatagtacatcatttcacttgagtcaattagtatttttttctgcatctataagaggattatattgtgcttctcctttaatctgctaatttggtaaacaacattattaggttctccttgcattcctgatacaaaccctatttgatctagggtaacttataatcatttgtaatcactctcataacacacatctattctattaaatctcttagcagatcctattggctcttccttccttcaaaatatactctgcatctgacaacttctaaccatctctgctacctgaatttaagtcatcatcctctgttgcctggattgagtcactgatcccttcccagtctctctgcttccacacttgcctctctatagttgattctcaaattgcaactgtaatgatcctttaaaaatgtaagtctgattatgccccttctctacctaaaaccttcagaaaaattcccatcttcctccaagtaaacactacagtcctttcaagggcccacatctcctatagctcttcctgctcctgctcactccaggcacactcccacctcagggcctttgcacttgttcattcctctgcctctgcctgggtagttctttctcacagatgtcgacgtatatccctatgttgacatagttttgtctacatatgtactaatagatctccacatatatacatgtctacatgtagattttatgaatatacgtatctacatataaacacatctatatatgtaaacctacacacatatgtctacatatacccctcaa

SEQ ID NO: 16195 - DNA, 1048 bp, Homo sapiens
gatgacattttaagtgatttaaacataaatatgactagagtatacctgtatgaaatatgcttgaaaagctgtgtggaaaacaaaattttgtttttaaatcttcattctcctaatacatcagggtatttctatggagagaagggagggaaaaggattcaagtaatttggaggaaaattacaaactacaggtaaatctaaaagcaataaaaatgaaaaagaattgttgacatataaggatgggaggttaaataaagaactccacaaaaatcaaactcaattctaaatttaaaaccagaatgaaaatttcaaagaagcaaccagatcatacaactgcagtaggtacactgtgaacacatatcttaagtatagcataatggtatgaagtgggatttgaaattaagataatcctggctcttcctgttattatgttacctccaccagttaatctctgaagtaaaattttctcacctgaaaaataatactcgctaaaaattgttacaatgaggacatgagaatatatgcaaactaacactgggtctaatgcaaagaaatactctatataccacagtaatatcactctcatgatatattttatttatatgactctcttctcctctccaagaattaagtacttcttaaaaatcaaatcttgaaaaatgtagtctttttgttttgttcttttttctaagcagattatagcaacaagactggcatacatatttttaaaatttcagatgatgcaatattaataagtgatcccatccataaatttataactttaattatttaaaaattcatttataacaatgcatgtcaaaataaatctgtacttcagatttaacaaaataaaaagtttggtcttttcttatgctgtaggagctgaggcaacttgcatttgtgatactcaataatacctgatttttcagctcatagggggaaggcaagataccagttaacagttagcaccagtaaacttagttcggcagatttcaaattcttattttttcttctacatagtgtagtatacatactgttggcacttaacaaa

SEQ ID NO: 16196 - DNA, 1035 bp, Homo sapiens
gattacaggtgctaaatttcttctttatacatttataactatttgcccaaactttcatgatgaatatacattttataattagaaaaacagtataaaaatcaatgcactaataattttcctgaagacatgaatattagaattcaaaaatttcaacaaataaaaaagctcaaaatcatttgtaaactaaactgtttttgcatactgaaagctccttaaagctttttatttctattaatatcttaatttagcatgaaaacacagttaaaagaagccagtctttactgtctgagattacaacttcatttttttcctcaaagggattttgcttttaatgactattaaagggattttgacacaaatacatctaaatacactgaaatgaattataaaagggtccatacacaacaggaataacttaaaaggatacttcatattaataacaccatttctttcattgagtattgagaacacagaatgatcagtcttaaactgatcctgttaagtttttgttcgggaaatttcatttaggcactctaaacaggataatgagtgcctaatgattgtgtgtctaactgaaatctctcctgtgatttaaaactcttgttcttaaaatatatagctatattctatttagttttctttagacaacataattgtaaaacttttaactgttttctaatactttgatctacattttgcctttctgtagtgtttctaccttttttatctctttcaaattatttaaacccaaatggcaaattatggttttaggcaatgtacaatcaaataacagaacaacttgaagcttctacatgctgtaattctatggaaacaccaacattctttcttcctagcacatgtcatgttgttatgctgtgtctcttacaataaccatattatttgtatgcacgtatactaaccatatgtaaactaattcatactctgagctgcttatttatctacaccaagtggaagtcctggccaaataatattagcagtatttctaactacttgtccaatgttttctacccactc

SEQ ID NO: 16197 - DNA, 1014 bp, Homo sapiens
gtagtatgatgaaacaaatgctagatcccgctttgatttcacttagaaattttccactgttggtaccatatacatgtttatgttgtaactttcaattcttttacattaaagaaggttcaagttaatatcatctacatacattttaaaggaagtgtttactttaacttgggccaaaaagtcccaagtagaaatttgatatcttagaaattcaggaaaggagtggctgtgaacagaagcagataaagaaaaacactaaattgtgacactaaaagtgttttagttatttacttaacactaaaagtgacaatgaaaagacaccagagccaatcccacagtgaggaagtcagtgccagtgcagtctgaacaggtggggcctaaccaataattcacaaggtcgatcattcctccattcctttcaaggcacattcgagaacctgctatgtacaagttactatattgggaccttagaaagattaaaaaataagtagtaaaatattgttctcattttcaagaagctcataatctaattggaacactacacatgtcagcccatacatatttttaaaagtgaaataaaaacacaaaaaacaaacaaaaggtgtgtgacaggataatttattgagctatttatttgggttttatgctccttatattttccctcccttccattccaagcaggcttcaagggaactttgtgttactaggcagaaagttgtctgacaagagctctctcttaggcaactccagggggcaccattcacattttaaatgaagcctcctggaacaggactccttagaatgcagtgtcaatgttatttctggaattggacccagcaatctgtctttcaagtttgttgctccttgaggagatgttgctagggggttaaaaaggtaagcacatctggggagagagagagagggagggagggagggaagaaaggagggagggagggaaggaaggaaggggcgctgagacaggtggatcacaaggtcaggaattcaagaccagcctgg

SEQ ID NO: 16198 - DNA, 1065 bp, Homo sapiens
taaaataattttttgttctagaaaagtgttcatatcatgtatgttttaaaatacattagcataaactgagtctatggtggtatgtttgaaatcttgactgtatccataaccatgtacacccctccttttggtagctttccaatattgtttatttttgtctttttctttttctatcaagcttcctgggagatttatctgttttattggtcttttcagagaaccagctttggttttcttgctaatctgtgctattttaaaatttcattaatctttacagaaataaagacaaatgatctcttctaactggggtggattaattttttgttttttagtttatttacctcatttattgtttttcttatttcttaataaatatatttagtctttaaatttctctccaactgtaggttaactatattccaggacttgttttgatgtatatttcttttatggttatttagttctaaatattatacgattttcatagtaattatttagaagtgtgttttttagtttgcaagcacatagggttgtttgtttactgttgtctagtttttatttttctgagtatgtatgtgacaaggtcttgctctgatgtccaggctggagtgcagtggtgtgattatggctcattgcagcttccacctcctgggctcaagagttctcccaccccagcctcccgaggagctgggactacaggcgcatggcaccatgccatgctaatttttttttttttttgagacagggtctcaccctgttgcccagactggagtgcaatggtgtgatctcagcccactgcaaccttcatctcccaggctcctgagtagctgggactacaggcatgtgctaacatgcctggctaatttttgtattatattttttgtagtgatggggtttcgtcatgttgcccaggctggtctttaactcctggtctcaaatgatccaccttcctcggcttcccaaagtgctggtattacaggcccagcctagtttattttaaattgcattatgattagagaattgatgtgatattaagtttttaaatgtattgagacttatttgtgg

SEQ ID NO: 16199 - DNA, 1048 bp, Homo sapiens
atgttgccaaagggtgacattgattatacttttccctttgtagggggagaatttttttttccctttgtatggggataattttttgagtgccatatgccagacaaaatgcattttatagaaacggaaactgactggccaggcatggtggttgatgcctgtaatcccagcactttgggaggccaaggcaggtggatcatgaggtcaggagatcgagaccatcctggctaacatggtgaaaccctgtctctactaaaaatacaaaacagtgcccttctaagatggccaaataggaacagctctggtctgtagctcccagtgtgatcaacgcagaagacaggtgatttctgcatttccaactgaggtacctggttcatctcactgggactgattggacagtgggtgcagcccacggagggtgaactgaagcagagtggggtgtcgccttacccgggaagtgcaaggggttgggggatttccctttgctagccaagggaagccatgacagactgtacctggaaaaatgggacacttctgcccaaatactgcgcttttcccaaggtcttagcaaccggcagacaaggagattctctcccgtgcctggcttggcgggtcacacacccacggagccttgctcactgctagtgcagcagtctgagatcgaactgcgaggtggcagcttggctgtgggaggggcatctgccattgctgaggcttgagcaggtaaacaaagcggccgggaagcttggactgggcagagcccaccacagctcagcaaggcctactgcctctatagactccacctctgtaggcagggcgtagctgagcaaaaggcagcagacaacttctgcagacttaaacgtccctgtctgacaggtctgaagggagcagtggttctcccagcatggcgtttgagctctgagaatggacagactgcctcctcaagtgggtccctgacccctgtgtatcctaactgtgacacacctcccagtaggggccaacagacacctcatgtaggtgggtacccctctgggacgaagctcccggagga

SEQ ID NO: 16200 - DNA, 1035 bp, Homo sapiens
tgtggtggcccacccagcacttggggaggctgaggcagatggatcacctgaggccaagagttcaagaccagcctggccaacatagcaaaatcctgtccttaccaaaaatacaaaaattagctgggtgtggtggcaaacgcctgtaatcccagctactcaggaggctgaagcaggagaatcaccgggaggcagaggttgcagtaagctgacatcttgccactgcactccagcctgggcgataaataaggtacaaattcagtaaatcaagctcatacatctaataatgtgctaagaccaatcattttagatatactgaaatgggcccagagaggttcagtgcctggacaggaggatcccattgctgcttcataaccgagcaagaagtgagcaaaaccaaggcactctaaaatccaaataccatgtttttttcactattacaggtcatgaagattacaacttgagataaatctcacttactttagggagatagcctagtaagtttgtagcatgctctttaagaagttttagcctttcttcttcaataattgcattaataaatccttgccgcctttgctgcaactgccactcttctagttcacgttgctggaaatgcagatcaaattttgttatcacaaagtacattaatcttatacgaagttttcaaataaaactactcatgcaatgaattagataaaattgatgaactatttatgacactaagttcaaaagattctagataatatatatttttaaaatatatattttatgtctgtacacatatctatgtattttttactgtcattattcctttaaaattacaaggaggcaaacaaatattttcaggaaagtgtcttcattaccaagggaaaaaatattcaaaggagtgactgcctaatacagtaaatatttactgaatgcttaccatataccagatgctgaagagtttacagtgtaaaacaaaaaatagtgaataaagaagatcagaaatatctaaaggatattttcatatatatatatataaagatgatatgaagc

SEQ ID NO: 16201 - DNA, 1039 bp, Homo sapiens
ggtagacacaggctcattaatttttaaccattcttttttctaatatatgcatttaaagatataaactttcctctaagcactgcattaactgcacgtcacatattttggaatgctgttttttgaatcatttagtttgaaatatttttctaatttccaatattatttattccccttttctcattgcttatttagaaatatattgtttaattataatatatttaaggagtctgcaggtatattttcattactgatttttaatttaattccactgtagtcagaaaacatatctggtattatttaaaaccttgaaaatttattgagacttcctttatgtcctagaatatgatctatctcggtgaaggttccatgtttgaatggaatttgtgttctgctgttgttgggtggagtattctctaaatgtcaggtcaagtttattgatattgctttcaatacgatatcctgcggttctgactacctagtctatagattaatgagaactgtgcattgaaataccattctggacataggacctggcaaagatttcatgatgaagactcaaaaagcaattgtaacaaaaacaaaaattgacaagtgggacctagttaaactaaagagtttcttcacaggaaatgaagttatcaacagaataaacagacaacctacagaatgggagaaaatatttgcaaactatgcatctgacaaaggtctaatatccataatatctaaggaacgtaaacaaattaacaaccctatttaaaaaatagactggccaggcacggtggctcacacctctaatcccagcactttgggaggccaaggcaggtggatcatgaggtcaggagatcgagaccatcctggctaacacggtgaaaccccatctctactaaaaatacaaaagaaaaaaattagccgggcatggtggcgggtgcctgtagtcccagctacttgggaggctgaggcaggagaatggcgtgaacccgggaggcatagcttgcagtgagccgagatcacgccactgcactccaacctgggcgacaga

SEQ ID NO: 16202 - DNA, 1039 bp, Homo sapiens
ttccatatttttgcaattgtgaattgctataaacgtgtgtgcaagtatttttttcatataatgacttcttttcctatgggtagatacccaataatgggattgctggatcaaatggtagttctacttttagttctttaaggaatcaccacactgttttctgtagtggttgtactagtttacattcccacaagcaatgtagaagtgttccatttttaccgcatctattatctttttatttttttattatggccattcttgtgagagtaaggtggtattgcattgtggtttggatttgcatttccctgatcattagcgatgttgagcattttttcatatgtttgttggccatttgtatatcttcttttgagaattgtctattcatgtccttagcctactttttgatggggttgtttgttttttcttgctaatttgtttgagttccttgtagattctggatattagtcctttgtcagatgtatagattgagatgattttcttgcactctgtgtgttgtctgtttactctgctaactgttcttttgctgtgcagaagctcttcagtttaattaagagctacctctttatctttgtttttgtcacattgcttttgggttcttggtcatgaagtctttgcctaagccaatgtctagatgggtttttctgatgttatcttctggaatttttaaagtttcaggtcttagatttaagtttttgatccatcttgagttgatttttgtataaggtatgagatgaggatccaatttcgttctcttacatgtggttttccaattatcccagcaccatttgttgaatggggtgtcctttccccactttagtttttgtttgctttgttgaagatcggctttaagtatttgggtttatttctgggttctgtattctgttccattggtctgtgtgcttatttttatactagtaccatgctgttatggtgactatggccttacagtctagtttgaagtcaggtaatgtgatgccagatttgatctttttgctcagtcttgttttggctgtgatggctc

SEQ ID NO: 16203 - DNA, 1049 bp, Homo sapiens
ttttttcttgctctgttgccaggctgcagtgcagtggcgcgaccttggcttactgcaacctctgactccctggttcaagtgattgtcttgcctcagcctcccaagtagctgggatcacaggcacgtgccaccatgcccagctaatttttgtatttttcatagagacggggtttcaccatgttggccaggatggtcttgatctcctgaccttgtgatccccctgcctcagcctcccaaagtgttgggattacaggcgtgagccaccgtgtctggcctgtagtttgctttttctgttgtgtcctttcctggttttggtattacagtgatactggcatcatagaatgatttagggaggattccctctttctctgtcttatggaatagtgtgaataggattggtactaattcttctttgaacgtctgttagaattctgctgtgaatctgtctggtccgagacttttttttttttttttttagtggtaatttttttattaccatttcagtgtcgctgcttgtttctttgattagggccccccttcatgacatcatctagcctaaactaactttcaaaggccctatctccattggggatccatcacattcagggttaaagcttccacatatgaattttgagaggatgcaaacattcagtccataacacagtccatttcatacacttaaaacctcttcttctgtgatttgtctcaggacctactttgttccctgctgggtatcaaaacaattaaaagtgtcaccttagcatttatgttctttaataatctgatggagacttaccttagccagtcttatattcactgcttttcaatctgaattgtgtggttctgtgacactggtctctcctcacctgacctcctacttccagttattcttcactctcaacctgcaatactgtttgccattcttgtgcggtttgaattttctttcatttacgaaatcttccccagccttttcaggtgataattttgtaaaaatgtattccattaaataaaactgtctttgtatttgtatacattgtatacaaatgtat

SEQ ID NO: 16204 - DNA, 1032 bp, Homo sapiens
aatggcatgatcatgtctcactgcagcctcgaccatccaggctcaagcaatcctcccacctcagcttcctgagtagctgggactacaggaatgagcctggctaatttttattttcttatttattgtagagatggggtcttgccatgttgcccagactggtcttgaactcctgggctcagaggattctcccaccatgggcttccaaagtgctgggattacgggtgccagccactgcacacggccttacttttagaacttttaagattttctttcacatgtaggtctgtgatccattttgagttaattttgtaatatggtgtgacgtatggattgaagtttttttgtgtgtgtgtgtatgatgagccactgttccaacaccatttgttgaatagattccataaattactctttctcaagtgaattcctttgcatgtttgtgaacaaaaatagtttattgtttataaaaaaggcttttttgtgtatatacacacacacacacacacaaatacatgtgtatgtttttctgtattctataatttagtccattgatctcttgtttttatgtaatatcatactttcttgattcttgaagctttgtaatcttgaaatcagtttgtatagtcttccagatttgtttttttttttttcaaagttattttggctattctaggtcctctgcattttcatataaatgtcagtactgttgtgtcagtttctaccaaaagtctccagaatttttattgtaattccataaaatttatagatcaatttggggagaattgacatcgtaatagggttttctgatccatgtagatgctgtagcattccatttatttaggttgtttttagcctttctcagcagtgttttgtagttttcactgtataggtctcaacatatattgtcagatatatctctgtttcatacttgatactgttatatatggcattgttttaaaaattcaatttctgattaatttttagaatatagaaatacaattttatatagcgacattgtatactgtgcagactaaa

SEQ ID NO: 16205 - DNA, 1087 bp, Homo sapiens
aacttacgggttatttagaagtgtgttattcatgctccacatattttggggaaatattctttctagagatatttctcttactgatttctagtttaatttgattgtggttcacatctacaaggatctgatctttgacaaacctgacaaaaacaagaaatggggaaaggattccctgtttaataagtggtgctgggaaaactggctagccatatgtagaaaggtgaaaccggatctcttccttaacaccttgtccaaaaattaattcaagatggattaaagacttaaatattagacctaaaaccataaaaatcctagaagaaagcctaggcaatactattcaggagataggcatgggcaaggacttcatgactaaaacaccaaaagcaatggcaacaaaagccaaagtagacaaatgggacctaattaaactaaagagcttctgcacggcaaaagaaactaccatcagagtgaacaggcagcctacaaaatgggagaagatttttgcaatctacctatctgacaaagggctaatatccagaatctacaaggaactcaaacaaatttacaagattaaaaacaaccccatcaaaaagttggcaaaggatgtgaacagacacttctcaaaataagatatctgtgcagctaacagacacatgaaaaaatgctcatcatcactagtcatcagagaactgagataccatctcacgccagttagaatggcaatcattaaaaagttaggaaacaacaggtgctggagaggatgtggagaaacaggaacgcttttacactgttggtgggaccgtaaactagttcaaccattgtggaagacagtgtggcgatccctcaaggatctagaactagaaataccgtatgacccagccatcccattactgggtatatacccaaaggattataagtcacactactataaagacacatgcacacgtatgtttattgtggcactattcacaatagcacatacttggaagcaatccagatgtccatcaatgatagactggattaagaaaatgtgggacatatacaccatggaatactatgcagccataaaaaatgatgagttcatgtc

SEQ ID NO: 16206 - DNA, 1022 bp, Homo sapiens
aaagaaaaggttgttactagatcatctcttaagttactttctgatacagaattgcaactcctgagacatctttatgtctctttaagctgtggaatcctaccagatatttagaatgataatgtgaacagctcgactttcaagaattcagttcggtgagaacacctaatgaagtggaaattagtgtgttatgtgtgcatttaatgactttattgtagcctgtgtctagactgttgatttgatgaagtttatacagaagaattaaatgctcatgatttatatatttaaaaaatctatgagttttcctggaagtgagtgtttctttgaagcagatttaatgtgttaaggtcttttttttttttttttttttttaccttctgtacaatcattttctgaaattgtaataaaaatcaagtacaaaagataatccagcatttaaatactctttattctagccttttctattatagtacttgtttttgtttttttattgtcgtggtattttgtgttaacttgaagactaattgagcatacagaaaattttttcaacttgggaatgtggggcaatataacttgaaaagagatgaaaaaacaatttctttgggtcagaagtattttacatctggaaacacacccttgaactctggctgtggtttttccacatgtgccatttattagcagatacgttctttatgaaattttgacagtatatgctgctttttgtctgaggaaagcttagttctaggcagaatttagctttgttgtttttgattcaggagttaaatctttagtcaagtgaaaatataaggatggggacattcttaactaaagtgccaggcttctatggtttttatctttgctttattttttaggaagagtgttttgagatatgtgaaaagagggagctctttgattaagtttgatttggactcagtgttttatttcattggctttcatactttagggcatctgctttgtaatatgaaaggaggttcctacccacaaccttctctcacccttttgga

SEQ ID NO: 16207 - DNA, 1025 bp, Homo sapiens
aaggttgcattcttttgagtccttggttagccttccactgaatagacactttagtctggctcagttaatctgcattcataaacaatagggcagaggaagcagttatatgtatttgtctcaggtgagcctcagagggatgactgtgttctgtttgtcctttgtcaacaaggaatttccttgtgggcaaattgtgagggagatatgtagctttttatgtttgtaactatcttatttaggaataaaatgggaggcaggtttgcctgacacagctcccagcctgacttttcccttggcttagtgattttggggtcctgagatctattttcgtttcataaacttcagtaggatcactctggctgctgtgtagagaatagggtagaaagaagagaccagttaggagactacagaagatgtgattaaaatttggatatatatcggaggtagaactgaggatcttgggcccgtgctacagaaagagaatagagctgttattaattgagaatgaagaaaactggaggaacaggttttggtttcttttttgagacatatgattcggaaaccacgtttagatacactatactattagacatccagttggagattttttttttttttttttttgagacgagatttcattctgtcacccggactggagggcagtgatgtgatcttggctcactgcagcctccacctcctggcttcaagcaatcctcccacctcggcctctagaagtgttgagattacagatgtgaaccactgcacctcgcccatttggagatattagtggagaattggtctggtcttgatctctgggtagagatgtgagtgggagttatcaatttgggagtcatctgaatagataatgcaaatttaatctgtgggattggagtgagtgttgagagtataggatgaagacgagatcagaagactgtgtatgcagttcagcatttagaagttggggtgatgagcaaaagacacttgagaaggcatatccagacatataggcaacctaattaatggtggct

SEQ ID NO: 16208 - DNA, 1033 bp, Homo sapiens
catgctgcgcctgctgttcatagtctttatctgacaccttagacttagcatttcctcaactcccatgttttactcccactactgtgacagccagatcagttgtcatgtcatctgtgcacacagcctccaatttcagttgtcttctcttttcctgtaggattttgttcattctgctagtcatgtttggctgtttactcatgtggctctcttctctcagatttgtgctttccgtgaagatagatattatttgtatgtttatttgggatgcctagcataacactggacatgcagtagatagttgttggataaattattgaatcacctaaattctcaatactcaagactagaggttgatatttgacatttatggaagattaggtaatcactttcatagatttatttaggtttagagcaggaagcctcatatttctgcattttcaataataaattccggactaatgatgatttatctaacaacatgaacttgtaatagtcatgtgggggacactacatttatcagaggctactgaaataataatcttgcttcaggagagtctttactgaaagtttactatatatcttggtttgttatgtgctgctataacagaataccggagactgggtaatttatgaagaacagaaatgtattctttcacagttctggcggctgccaagtccaagatcaaggtatcagtaggtttgatctctggttctaagagatgtcttgatgaagccatgcattgatgcctctttgctgtgtcctctggagagaacggatgttgtgtctttatatgatggaagagcagaagcaagagaacaaaaccacttctgcaagccctttttatagtggtgttaatctgttcatgagggtggaactcttaagacataaacatctcctgttaggcctcacttctcaacactgtggcattggggattaagtttcaacatgagttttggaggggccaaaaacactcaaaccataacacttatatacaattggtctttgaacaacatgggggttagaggctctgac

SEQ ID NO: 16209 - DNA, 1110 bp, Homo sapiens
ttaaaagggatgcctcagagaattggaaagtactgagaccacgtgtaaagagaagcttggaaaagcaataccataaagttctttatgaattccctgaactatacatacttggaaataaaggctgtcacccaggctaaccattcgatgatacaaaagtgggacaaattcagatggcacagcataagcctttgaaagttgaactgatgctggaaccatggctatagaagccatgttagagctcatggcctaatcctaaccaaatgaatcacttgttaaaacaaatatattaccagtgtccacaggatttaaacaggaaccagagtttcatagcaatatgttaaaattcccaggttataatccaaaattagctaacatatgaagaacaaggaagatttcaactcacatgagaagaggtgatcaacatataccatcatgataataacgttggaattatctgacagagattttatggtagctattataaaatgtttcaacagacaattgtgaacactcttgaaatgtatgaaaaagtctcagcagagaaatagaagatacaaagaaatggaaatgttagaactgaaaaatacaataagttaggggaaaaagaccactggatgggtcaatagcagaatgtaatggcaggaaaaaaatcagtgaacttgaagataaatcaatagaaatttttaaatctgaacattagagaagaaagaattttaaaaaattgaacagagccttaggatattatgggaaaataacaaagtgttagacatttaaacaagaaccaaaatttcataacaatatttttagacatccaggttgtaatccaaaatctaacatatgaagaaccaggaagatttcaactcacaatggaagaggtagtcaacatatagaaagaatgtagttttgagaaaatatttgaagaattaaatggctaaagacctcacaaatttattgaaagacacaaacatacagattcagagaatcagaaatggaataaatccaaataaatttatgcccagatatgtcataattaatctgaaaactaaaaacaagaaaaaaactattgaaagcagccagaggaaaatgacattgctccttggggggagcaat

SEQ ID NO: 16210 - DNA, 1032 bp, Homo sapiens
tctagaccagcctggacaacatggtgaaaccccctctttactaaaaatacaaaaattagttgggtgtggtagcacgtggttgtagtcccagctactagggaagctgaggcacgagaattgcttgaacccaggaggtggagactgcagtgagccaagattgtgccactgcactccagccttggtgacaggggtgaaactctgtctcaaaaaaaaaaaaaaaaaaaatgcttgaaggagactatcaaccagataaatctaattgacatttgtagtatgctttacccaataatagcagaatatacattctttccaagtacagaaggaactcagcatttataattgaagacttcaaaattcttttcttaggaatagatagaactagtagacagaatcaccgggggtacagaatgtccgaacaacattatcaactagatagatctaattgacctttatggaatactttacccaacagcagcagaatatacattctttccaagggaacaatgctctaagacagactgtatctcggtcttaatacaaaccttaacaaatttaaaagaattgaacttacaaaaaatatattctcagatcataatggaaatatattagaaatcagtaacagaaagataacacagaaatctccaagtacttagaaattagacatggctgggcgcggtggctcatgcctgtaatcctagcactttgggaggccgagacgggcggatcatgaggtcaggagatcgagaccatcctggttaacgtggtgaaaccccatctctactaaatatacaaaaaattagctgggcgtggtggcgggcgcctgtagtcccagctaatcgggaggctgaggcaggagaatggcgtgaacccgggaagcggagcttgcagtgagctgagatcgcgccactgcactccagcctgggtgacagagtgagactccatctcaaaaaaaaaaaagggaggggggagcggggagaaactagtcaaagaacaaataaaccccagtaacaggagaatcaatgaattaaaagc

SEQ ID NO: 16211 - DNA, 1031 bp, Homo sapiens
tggttcatgcctgtaatcccagcactttgggagggcaacacgaggggatcacttgaggtcaggagttccagaccagcctggccaatgtggtgagaccccgtctttactaaaaatacaaaaattagctgggcgtggtggtgcatgcctgtagtcccagcgcctcaggaggctgaggctggagaatcccttaagtctgggaggcagtggttgcactgagacaagatggagccactgcactccagcctgggtgacagagtgagactctgtctcaatcaaaaagaagagtttaattcataattaataaaaaaagaaatattaaactcctgagctcaagtgatccacccacctcagcctcccaaagtgttgggattgcaggcatgagccactgtgcctggcctaaatttcatttcttaatcaaatgctaaactttctcatttttctcttgttcataactaggagtattcattcacttgtgcagtaatatttgaaagacagaacacatttcctatacttaaaatctgtgagcaactttctttttgaccttttgtaatctacttcatctcttgaaatctgttttgtttaaattttaaagacaggatctctctctatcaccagggatggagtgcagtggcaccatcatagttcgttacagcctccgtctcctgggctgaagcgatcctctcgccttggcttcccaaagtggtgggattacaggcatgagccactgcacctggccagaagtctgttttttttttttttaaacatataaaataagggatgatattacttttctaaataacacatgggtcaatgaagaaatctcaaaagaaagtgttttaaactaaatgaaaatgaaaagtttatcaaaatttgtgatgcaacaaaagcagtgcttggaaggaagtttgtagcattgaatgtagaaactagacaaaagattgaaaattaatcatctgagcttccaccttaggaagctaatgaagtacaaattaaatccagtataagcaaaagaaaacatgataaaaattaaa

SEQ ID NO: 16212 - DNA, 1058 bp, Homo sapiens
ctagcttcgagggccaacctgaggccattgtgtcatgctgaaatgggaaggcatgggtaagctctggagctagcaggttaaactagtgatgggacagaaaacattggcatcgggcgcggtggctcacgcctgtaatcccagcactttgggaggcccaggagggcggatcacaaggtcagaaaacattggcatcaacagtggcttagcatacagatgtgggtcaggattcttgccaatcataaggaaacagtttgagaatgctattcagaatgagctacatgcctcagaatctgtcttaggaaaacaggcttatatagggcagcaccaaggataaaatgttctttacacagaagtgacttgtttggtctttctacgattttaccacagtgactgaaacctaacagataggagttcttatatttaggacagttgactgttgaacaacatgggtttgaactgtatgggtccatttatacttagattttttttttttcaaccaagcgtgaatcgaaaatacagtgttaatgggatgtgaagtctgaatatatatggagggccgacttttcctataggcgggttccacagggacatgagtatgtgctgattttggtatgtgcaggggtctttaatcagtccccggcttgtactgagggatgactgtatactgtatttattttgtgggtttgacctataatggtaggaagtgtgatttcaaatagtttaacttatttttttcttttaatcataaaccctggtgatcaatatttgtcaggcagatcttttcttttttttatgtatgtatgtatgtatgtatgtattatactttaaagttctagggtacatgtgcacaacgtgcaggtttgatacacaggtatacatgtgccatgttggtttgctgcacccctcaactcatcatttatattaagtatttctcttaatgctgtccctcccccagctccccaccccccgataggtcccggtgtgtgatgttccccatcctgtgtccaagtgttctcattgttcatttcccacctatgagtgagaacatgtggtgtttg

SEQ ID NO: 16213 - DNA, 1090 bp, Homo sapiens
caagacagaagggtcagagaattaaagtaagtgttttctatatattgcatctgtgttcccattaatctctgttttgttatgtaactgctccttctgaatgttctgaatgtgaagaaaactatgagtaagaaaaagggtgtgttttaaagttaggtttaaataaagccagaagagtaaaatgtttttactcttagttctgtttgaaacagcacctgcctataaattataacctaaatgtttttggataagaaaaaattgggttgtgatgatgtaagcacctttaaatctcttgctagcagatatttaaagtgaaagaaagcacatactgatcagattgcccatgtttccattttaagacaattaaagcttctgtttttttcagactagcctttcttcctggggacaacacttactgagaggctttgctgtggatctttttggaaataaccttcatgtcaatttctcaccttactgtgattaactttctaggcccatgaaataacatcttgatcaggactgatctaatctttatagttttcttttttaatcttctaactgttcagattttaaagttaacaagtaaaaatcaaagcatattaatctttgaatctttatgtccctttttgtaattgttgaggtctttcttgacagcctgtttaatattttttccctaagtttagagattgcttatttgtgggaataaaaagtagggtgacacttttttgtacccacttgggtttttaaattaataacaatgaaatcataaccagcacttgtcacaatttagtttacacactttcatgttacctgctttgatcttcacacgagctcaccaagaagccatttttaaaatcttctccattttagaggtgacagaattgaagctcagaaaaggtagataacttatcagatattaaatgcttaggactttatccaggctgtctctaaattactttccctttttactgtgttgcatttgccaaattataaaagagacccccagaacagttatttctacttgtgcaggacttgaaggacagagtcactagaagtttttttgtttgtttgtttgttttttgagacggagtct

SEQ ID NO: 16214 - DNA, 1030 bp, Homo sapiens
tatcacatgtctatcagtaattctgaagtatgtaaaaatgaaacaaagatttatttgggagttagcactccagaagattagtgttaaaacagaacagcagaaggagttgtgacatgcatctataaacaattgtaatgatttgacagttatttagccctctattcctagccctttcattgaactgacagcatgcctgcaaagatagtgaggcctgtttcagccacattaatgtcctcttaaatggtagcctgcagtctggggaatgataaatgttcagtgattgatgatttttttagtccccggggattctgggtggtttcaggtttctgtgagccagggtagttttttctcttacttgggcttcgtatacgtttttccggtctttaccatgttggttttagattggcagagatatatatgacctgcagttttaattaatagagttcaaagccttgtttagaaacaatatgattttggaggtaatgctgtacttaaagagtgcgtaaaagtctgagaaccaggacaggtttcatcacgtagtaattttgtaacacttgtttttgtttgtaaactttatcttttttcccctttgctttaaaaaaatatgttttaaactataaggagaaatgtaataacagctactgtgaaaagtaacattagctttattgtttttaatggtgtttgtaatttcattcttaagaatttaaatcagctatgtttaataattgttttactttttacatggctcagtttctgtaggagtatatattgttctactacagtagtattaaaatgagtataaacagaccttttttgttgaatatttgccatttaggaaaggattcatttctagcatattgattgtgaattagttttagtattttaagtcacttgtaattgcctaacgctttatttttagggtctgggggcagggagtgaataggaggataaagataagcatttccctaatttattacaactgagaaatatattttcttaatttattttaaaaaatccattgtactttccc

SEQ ID NO: 16215 - DNA, 1034 bp, Homo sapiens
ctgtatacattcggcacagatgcaaccatccatttttttcccctaaatattttcaaattgtggttgattgatttcacagatgtggaacccacagatagagggcagactgtatatattgttgtaacttattttaggcatgttaactcatttaacaggttgggtctaattgctcaagtatattactgtcaaacctctgcttataagcatttgacttataagcagaccaagtgtcttcccattgctgctggaatctctttgcttaactccactttctgtatctcagaacttaaagggcacctctggtaaagcttctgtgttttatttccatttcattgtagattgcataggtttcagtggatttgtctgggaatttaagcccaagtacactttttttctgtatatttggtacctcaaataaccaaatttcaaagaaaattcttctgtaaacttgatattgcttgcaatataacctatgaaaaattctgaaatctcctagagttacaaaatatgtagaatcaccattttcagactatcaaagggtaatacaaccctgccctcaaaagttaactcttttggcttagtggggtggctcacattcccagcactttgggaggtaggaggattgcttgagcccaggagtttaagaccagcctgagcaatatggtgaaaccctgtctctacaaaaaataaaaaaaattagccaggcatggtggcacatgcctatggtcccacctacctgggaggctgagagggaggattccttgagctggggaggtggagattgcagtgagccagatcacttcactgtattccagcctgggcaacagatccaaccctgtcttaaaaaaaataataaaaaataaaaaaagatatgtagtttgatatacttgaaatttcttcactagatgagatactgaaaatgattataaagtgtcgaagggaaatagtatctgatttgacagtgtttcataaggatgaggccttttactttttccagtgttttaataaccctaaatttcatgaaagaatatgat

SEQ ID NO: 16216 - DNA, 1029 bp, Homo sapiens
gttttgcagtgttgcccaggctggtctcaaaatcctgggctcaagtgatccacctgcctcggcctcccaaagtgctgggattacaggagtgagccactgaacccagcagtaaatattattatgtagtattttctaagtccagattttcttttaataattatttaaatgatatatgagagctataagatcttaccatctgggaggttacagtttatgtaataattgccattctcatgtcacttataatgcttcgttattttatttttctctatataatttaatagctgagaaggaagtattttggttaattgcagtagggtagctgagaagaagcttggggacagtataatgaagtaatttattaacagcttttattgactcccttttttgggtgtgagttgatttgaatactaaaggtttccagatttcatcattatttggcatcagtgtcactgctaaccatgtcatgtaggtttgttcttttaatgacacttttgtttatgaggaaaaacagagctaaagtagaaaaaaaaagccttatgttaaaattcaactgttaacacctttttttttttctttctttttcattttgagacagggttttgctctgcccacctctgcctcccaaggagctgtgactacaggtgtgcaccaccatacctggcctttttgttttgttttgtttttggtcaagacagagtttcactaggttgcccaggttgggctcaaacaatccccctgcctctgcctcccaaaatgcctctgattacaggcatgagccactgcacctggccttcttagcatctttaaaacccaataaaagaggtaggaaaaaaaggatcttaacatcttctttactagtaaaaattaggtctataattagatattattaactttgacagaaaatagcctcaagagttgctataattttaagctctgccatgaatgagcaaaacttctttgttactgtggattagagttactttcctacaagtatgatctgggttcaaattctggctcttgtttgta

SEQ ID NO: 16217 - DNA, 1050 bp, Homo sapiens
tgtttgttgaactgcttttaaactgtagatagattacatgatccctgccattgatgagctctcaggacttacagttctgtgtatgttttggcttttgttatagttgtttgaatgcatatctgtctctcctgttaggttgccagcttcttgaagaataaaattttatcagcatattttatttatattatatggacaattatatttctatatttttttgctatgccccaccatatctaattttacatatgggacctgtaagattttgatccttctcctaaaatgtttttggtaaatgctgatctcctgtgagagccacctgagtgaggaatctcagtgtgtaggaaagtgagacattctttaatgagagactggaagagtttggttgttaagtgggctcagaaaatgtctgttgtggcaagcctgtggccccatctactcaggatactgaggttggaggatcacttggacccaggagattgaggctatagtgagccatgattgcacctctgcactctagcctgggtgaaaaagtgagactgtctaaaaaaaagaaaagaaaggaaaggaaaatgcctgttgtctctcctctgcaaatgagctgatactgaaaggtaatctggaacaggagttttatggatatctgtttttgaaactgaaagaagtagcattttggcatgatctggagctgacatacattccagaggctatatagatgatgacatctaccagtgaggctacatgactgacgtagaaactgaggttctttcgctagtctaggacaaagatgaagcttaacttcgctgatggatagaaccagactttgtcactgtttaaataatacatttttggttgttttctaaatatgaattcggttcactctgaaattagagcagttccatgagttcactgaatttatttgaacaatagtgtttgccatggtttgaatgatggtatctgctccaaaattcatgttgaaatttaaccctcaatgcaacagtgttaaaaggtgtagttggcctgtgggaggttattaaattatgacagagcttc

SEQ ID NO: 16218 - DNA, 1064 bp, Homo sapiens
ttatattgtcggttttataaaatatgtaacagtaatctaaaagatgggaggaaggatttaacatctgttaaagatgtatattgtaaactgagggcaatcgctaagaaattaaaaagaaatgtaacttatctaccaatagtggctattaaatggaatgctcaatctaaaagcaggctgagagctgggcatagtggctcatacctgtaatcccaacacttggggaggtgggaggattgcttgagggcaggagttccagaccagctggggcaacatagcaagactctgtctctccaaaaaaaaaaccaggtatagtcttagctacttgggcagctgacatgggaggatctcagcccaagagttcaaggttgcagtgagctgtgatcacgccattgcattccaccctgggtgacagaagaagaccctgtgtctttaaaaaaaaaaaaagaaaagaaaaaagaagtttgagaaagataaaagaacaaacaacaaatgagataaatagtagacgtgtaagaaaatggcagacttaaatccagccatatcagtaatataatgcaaattttcaaaatgaaacagagataccaagagatagaggaagcaagcatttggcttttttcattctctgttttccagtggtttttgcacataattttaagaatagggtcttcgctagatgaaaacatttaaatagtgaactacttaacatctgtttacacactgctaaccctggcgctcctttttactgaataaaaatggtttgcccttctttcccccgtgagcttcaaacaacaaccaagctatcttggttgttactaaagttactaaacttgggaccatcagacccaaggtgctcccctaaaaccactttgcccaaaccttagggaacaaggaataggcaggctaaagattatattcaaacatatctaccctttttcctctatgttacaaaatctaaaactctgttgaaattcattttagactgttcttttatgtttcgacttctcagctctctctaccaccttttctggatcttgcatactttctttggtgaatctttgtttttt

SEQ ID NO: 16219 - DNA, 1054 bp, Homo sapiens
tagttaaaagctggaaacaactaaaatgtccatcagtgggtgaatggataaacagtttgtggtatagccatactaaatggaatattatcctaaaaaggaatgaggtactttgatacaagctgtaatatagatgaacttcaaaaacattctaaatgtgagaagtcagacacaaaaggccacatattgtatgagtccaattgtgtggaatatcctgaataggcaaatccagagagacagaaatggattagtggttgccatgggctaggggagggtggaatggagagtaagtgcttaatggatctggaatttcgttttggggtgatgagactgttctgaaacctagagaggtgatggttgaacaacattttgaatgtactaaatgccactgatttgaaatgaaatgaaaacattcagtgtttatgttatataaattccacctcaactttttaaaaagctcaaacaccaaagaaaagtcatttaaatgagagtttttcttgactgttagactggaggcagagattgggctattagggctactgttccaaagctctgctcctgctttttgaccagagctgaggttttatttctcagttcctttgtgatacttggtggctgaaacaactactttttaagagtatggtgatggcagtaaggggtattaaatatatgatgggggattcgtaaatgtaccagaggaatcacagttcttttcacttgagagtatcttctcaagtgtattcaaccccccttccttttgaggtcttctttccctctcctgtctttcaagtctctgtgatcctatttcatctcatctaccagaaatcttggtgcaaaattctgccaaactaacctcgtttgttttgtgagagggttactgcattagtaggttagagctgctgaatctctgaattataaatgaagcacttcacaaagtctcataatgtcactgtagcatacctcagagctctctcctcacccttgtcatcctgatgggttttctcttaatcatatttttgatgcctaagatattaaaaaggctagcatatacattggt

SEQ ID NO: 16220 - DNA, 1046 bp, Homo sapiens
attggttcatttgctgtcatcttcccaaatttatgggatatgtattttcagaatgtatcacttttttaggagaacctgtttttcactgggactagttaaaaggaatgaagccctcattactgtattttgctgcttactcccaaatattggaaaacaagaaagacgctaggggaaaagttattctgttaatttgaagtcttgatttttttctggtatattatgctgaagaaatgtattgttttccatctgcagatcccttgcaagcaaaaaaagtcagaaaggtgcctcctggtttgccttcttctgtaagtacctatctttttttaacttgatggtaaacaaactgatttcaagtgttccgtattaccttgctacaagggtacattcgattgatgcgagtgggcatactttacatagtaattgttcagtgcttaacaaaatcattgattgaggtaaatccacatttaatgtttggtttttagatttctctgcaatgatttgtagcttactcatatgctcttactccttgtccctgtcatttgaattcccctcttgggaagaggactaggccagtagctgtcaaagatgatctcctatgcaggtcttttgatgtttaattagtcattatgttgctgaacaggaggacagacagagattaatagctgaaaatcttagaaatttacatttgtaataatcccaatggagctaaagacattaagattcggagtacatgtttggctcagcttgcctcagtaggactgaggttattaatatgcataaatcaccaagtcagatgttcattgtgaagcccttgtgggttttaaagccttcattaagcctttcctaacttcagcctagcatcaggaaagctttcaagcaactagtttgttgatccctctttgctcaaaaatgtatcctttgagaataaagggctttgatgaagaaggttggaaaggtttggtggaacaatcattaatggccatgataatctaatactgtaggggcgactgtgctattaaatatactttattctttaaaggagtaaa

SEQ ID NO: 16221 - DNA, 1048 bp, Homo sapiens
aagccaagataacagagtgtgtttataggcaattatccggcccggccaggcgcagtggctctcacctataatcccaaaactttgggaggtggaggcgggcagatcacttgagcccaggagttcgagatctgcctagccaacataatggaaccccgcctctataaagaaatacaaaaattagctggcatggtgttgtgtgcctatagtcccagctactctgagagagcgttgcttgaaccctagaggttgagattgcagtgagccaggatcacgccactgcactccagcctgggtgacagactgagaccctgtcttaaaaaaaataaaaataaaaacaaacaattatccaaggcccttaagactagcaagaaatctactgattctggaataaatagtatttacataaagtaccagcttttgctgaacttcatgagtaaaccctccagatcttgaacatgagttagaataggtatttgcttagttccttgggcaaacagcatagagaacacacaacaactgtatatacttaagagtttcgggctgttagatgaggtatctctatttgaaggctactgtgatacaaaatttccaaagtggcttattcagtctctgaccttacaggtcagactagcagaaaaatctttgtatgtaaagtacgtaagtggattatcctttaatccattccaaacttatattcagtttagtcgttaagtgaaagatttttttcatacattaataagaagtagccactgtttatgctgacagtaaccactgttcagaacagtgtcagaattaatagcctttaatgtgtagttctaagatgttgatttttgtgagaagtcggtaatgtctttgatgtaatttcaaaccaaaaagcagaaggaaaagtaaccagtgagtgagtcctatggatccagttgtactgatatggctgtatacagtgatacttgttattgttattttctgacttctctattccttttaaaagaagaacatggctgcatttcatttacaggtagcttttaaggtttattgaactctttggctg

SEQ ID NO: 16222 - DNA, 1046 bp, Homo sapiens
gaaaaagttcattaagtcacttagcagactacaaatttagtgcagacctggatatagatgaggaataccagcatttttttgttggtgggagggggaaggtgttttatttttaacaattatgtactaactggtattgtcctctcccttggctgtccctgccacagttccagagttatcagtaggctagatagaaggtgacctctcctcataaggacttggacaactcagattatctgaagacacaaacctgacaggagggagaagaaaaaacaaaacacttgaaccaagaaactcaaatgtaatcctacgatcaaagcaactggtcaacacttccatcagaagtgaagataggaagctcatcagatagaacatcagcccatgagatgtttgcaacaaatcttttgttgcaagcagtgtgtcgcttctgcacaatcagagactgtctcgatctctccactcaccgtggaagttgccttgtgcctaaactgaattgacaaatgcattgtaactacaaattttatttattgttatgaaactgtaaggtctacatataaagggaaaaagttaatgtggaaagctgatctacactcagctgatgccagcatacattaaagcggttcacgtgcagagaacaaagcagtgacaaccattggcccttagcattcccggcatacctattagtgtcttaaaaaggaagggaaaagtcttttgttgccctctcctatcctcttgccatatgaatagcgttttccatgaaataggaaaatattacttggtatagcatttctcttgctctcattttttgatttatttttattttctctttgtgggtgttatatttgatctctaaatctgaacagtttatggtcacagtccagcctcctccgtgcagccctgtgtgctttgcacatttaccttacagtggtaagcagagaccatctgtgaccatagcctagctagcattttaaaaggggaaattttgttctctaggttttcccccaaataaacattgctttatttctaataataaccaagacttttcaagc

SEQ ID NO: 16223 - DNA, 1020 bp, Homo sapiens
atacaaagacgattttttcaggctgtgattatggtgaacataacaaaacccagtagtcaccaaggcaggtagtgtgataaatgaacacaccactctgaggctaattacctaatggaatacaagagcaatggtcacccgtatttccttatcctagcctttatttctctgtcatttggatggctggtcaatggggaagaattgagtgggtgatttaatcaactgcaaaccatctgcccctgtcccaaaatgatgagccagattagcattaaaccagtacttgtcagtccatcttaatactgttcattaaggcactctctgtctctaatccttaggagttgttttaaaagacataatcactttgaacttccatgaaacctgtcttccaccacaacaaccctgggagagaaaaacatgctaaaggaggtatcttggcttaataattccttatagccaatatcaacagtggcaatcagcacacagaggaaaggacccaaatcactatgtagcttaaagatttctgttaatttgaaagaacaaaaacaagacagaacttctggtactctaatcaggatgattcctaacaagtcagtcatttgtgaacttagtggactttttggttactttaatttgcatatattctccagttacatcggactctatctgtggccttgttcttcatttcagtgttaatcagctaaacagaagttgttgcttatgatgtgtgagtgaacatatgccactgcctggcctttttttcttcagagcttgttgtctttttcgctatattagactttgcagtatgcccagaagctttccttcataaaatagaaagaaaaaaacatttggcttatttttcactgtagctagtcttttatacaataatcttgtaagaaaatttcttgaattctaaatattactctttctagatttttgaaatcaaaaagttttcagtaaaaagtttcttactttattttattatattaggtagtaaaaaatgtagggttatttaccataacctgt

SEQ ID NO: 16224 - DNA, 1036 bp, Homo sapiens
ccaggatccaggcagagagctgattccagcatccacgttgtatccccctcccgctgtggccggggtctccaagagccgggcacccactgcagagcttccaagcccaggcccatttgaacacaggaggacttttgaggttcatttaaccccaaaatcagtgattctacatctcaagctcatattttgaagtgtttacgggtaagtcatatgatactggtcatttattttttaaatattctagccaaaagtacatggtagacaaagtgagaatgtcagaatgttgataattagtgaaactagacgaagatacatgaaagtttaattttgattctcacctactttcatgtgcattaggaaactttcataataagttaaagtaacaaaataggccagactcggctgctcatgcctgcaatcccagcactttgggcggctaaggcaggcggattacttgaggtcacgagtttgaaaccagcctggccaacgtggtgaaaccccatctcccctagaaaataaaacaaaaaaaaaaattgtagctgggcatggtggcaggcccctgtaatcccacctactcaggagggtgagggaggagaatcgcttgagcctcagaggcagaggttgcagtgagccaagattgcgccattgcactccagcctgggtgagagagcgagactccatctctgaataaataaagtaacaaaatacatttcagtctcgagctccagttccctgccaggaagagctgaagctgagctctggcaccccctgcttcttctccctcatccctaaaacatgtggggtactgggtgccaaaggagatctgaagatggccaccactcagaccagcagtagaggccaagaaggtggtgagaaattttaaggtattgtagcatatgctctccagggtgaggacacaggatgctgggacctaaggagggagaagttaacccagagagggcccaagtcagggaggacctgactgtggtgacagagccagtcatgctaataataggagcagtggttttgcaatcacaaa

SEQ ID NO: 16225 - DNA, 1026 bp, Homo sapiens
tgagtgaatcagggaggcccttcagacttccatgcattgttcggggctgctcttgtcatcagggtctgcagaatatattttctttgcagttgaggaccaaatacctggtaaggttcaagtccaccatccattttcctgtttaacatttaaatgcatgagctagtagaaagtagtttcaccttgggctgggtgaagtggctcacgcctataatgctagcagttttggagtctgaggcaggccgatcagttgggatcaggagttcaagaccagcctagccaacatggtgaaaccctgtccctgctaaaaatacaaaaaattagctgggcgtgggggcgcatgcctgcattcccagcttggcttgaacccaggaggcggagattgcagtgagctgagattgtgccactgcactccagcctgggtgacagagaaaaataaagtagtttcatctcctgtattttcattccttcttcacactgtggggcaaagaaaggtctcattcacttggattggaagctctatttgacgatcactaggagtgatggctctttggttcctcttccatttcaggtttgtttcctcctctgtaaaatagatgtaatgcctaccccatacagtcaagccatatctctttgacatagtacagtggttctcaaacagggtccccccaacctccccacccgggggtacatttgacaatatctgggggcattcttggtagttatgactggggtggtgatggctcctggcatctaatgggccaaggccaaggatgctgctaaatatcctttgattcaaaggacagtcccccacgggaattatctggcttaaaatgtcagtagagccaaggctaagaaaccctgacaaagtggaacctcaaacaacggtagctctttttaacatctctgatccaagggagctattggccagggacaaagatccctcctttcttaagtagggtggaaagaatggaatttaacgttttattgatgcctctgggtttccccacaggtgcccctgaggtggga

SEQ ID NO: 16226 - DNA, 1050 bp, Homo sapiens
ggattacttagaagtgtgttgtttaatttctaagtgcttgggtgtttgcctgttgtctagttcgagtccattttggttagaaaaccagtctgtatgatttcagtccttttacatttgttgaggtttgttttatggctcaggatatggtttatcttggtatatattcttgaaaagattgtatattttgctagaaagagatttcaaaaatagtaaatatgaatcaacctgaaggataaaaataaatgatttttctttcctttggcaatagaaatattgttactagttggacaagttatctttattcacagcctgagttatacaaaaaataggaatacatcctttttggtggtttacaaatctaattatattttcatgttaaaagtaagtggtggaggatatgtgaagtgtcatagtatttgccacagaggctttttcccattcaaattgtaattgtgtggaattttttattttgtagttgctttagtaaaaacaaatgatagaaaaagcttgctttaaattaaattgaacaatgcataagagtatagagtagaagaaaatatattttggatcatacttttgacaccacctttttcctctctcacaatacatttggaggatcttttcagatagacgtacatagaatgtcctgtatgccattctttgatggcagcagcacagctctccagatgctgatttaaaaggagtttagccacgtgccatttctttcttctggtgcccagtctcactaacctctcctaatagtctagcattggcccctagagaaattcaaaggtctgccaaggtaagtcagcaaaccagtcaagggccaggaagtcaggaatgtgtgagtagctgagtcaggggtctggaatcagaagtgagggtgagtcaggagcagggcccgggctgactcaggcaggctgaggtggtgacctgtggaatcagctgccttactggtgctccagggcaggggcaggctcaccatgctgaggcctgaaacttcacttctttcagggatcagctaatagatgtggtcaaggaatttggtcc

SEQ ID NO: 16227 - DNA, 1111 bp, Homo sapiens
cagcaatattagtgaatggccaacccctctcatagactgttagatctggcaaggacctcagagtccaactctccccacttcactgtaatggatgagagatttgaggcccagagtcacctggtgatttgaccacagtcatgcaggcaattgactgcagagctgggcttaggtctcaatttccaaggcagtgctctatctacccgtgcctgcaaaatatgatgaatacctgctgtgtgcatggcattgcagtaaagctccaagaggaccagaaatggtccctgaccttgagttgctacagtttgtttgaggagatgggtcagacctaaaaaattgataactaacaatagaaaacagtggatactaaatgccaagtaaaagattcaagcagctaatgagggaaagaccattgttgcaagagtgagtgtggaagaattactggaaagagggtggggacctggggtcagctctaaagaaagggtaagacgtgaataaaccaaggggattgggaatgggattctagatagaaggaatggtgtgaacaaagactgggaggtagggacctatacagcattttgaggagcaatgaatggatgaatggatgagtgtgggtcaatcagatttccagtttccataggaaatgaaaggagataagtttgaagaggcagactgagggtgttgaatggctctattgtgaaggcagtgggcagccatcgaaggcgattgagcacaatagtgaagcatacactgtgttctagaagactcatgcgccaggggtgggggtgaggactggagaaggggcgactgagaggaggcctcaactgtgctgttaccagggcagaggacaaggaaggctgtgtaagatggtgtatttgaccctttccatgcctccattctttctttctcttatgcatacatttggcactcactaaatgctggccatgttgtttataagttcccagcctgtattagttcgttctcacactgctataaggacatacctgagactggataatttatagaggaaagaggtttaatggactcacagttcagcatggctggggaggcctcacaatcatggcagaaggcaaaggaggagcaaaggcatgtctta

SEQ ID NO: 16228 - DNA, 1030 bp, Homo sapiens
tcgttctgactcacagcccctcaccttcctagaaggagcgtggtgtgccggcatttgacactttacattatctattgtgttagttggacttttggggagtcaggccagaacagcctggagtagacccaagacatctgcagtttgtgacttcttgccttacaaagtaaagctcagaaactccgggcaggtcgagccatggctcagccccttgctggctctgaagccttgggccagtcactccccttctcagagccccatttcctcacgtctctcacaagcagctttttctgctgtgaagttgtgtttccctgaccctaagccttgagctgaccaggcacccctggctggagcttcccctcctccacagcctaggctgggccccctgcagggatgggagtgagagggttcttggttctgtctcccctcttccagggatcgggccaatcttcagctcagcaaccggcggctggagcggaaagtgaaggagctggtgatgcaggtggatgatgagcacctgtcattgactgatcagaaggaccaggtggggagcctctgcgtgcatttgctcttagatgagattgcgtgtctcaggctgagggagcaagggaggcaaggcctccctgagcaggagtggagtgtgagtgggctgattcctccctttccacgcacccagtcacatcatcaaatgggggcttcttgcctacgtaattaggggatatcagcaaattctacaccctgagtttggctttaaagagtcaccctgtcttagtgcctgctctccatgtttcccaagagactggctgccccattgcccatgtcttggttgcctggggagatggtggctggacctggggtaagctgagcgctggggctgggccatcagccggcactcagcccacattctctcccggtgcagctgagcttgcgtttgaaagccatgaagcggcaggtggaggaggctgaggaggaaatcgacagactggaaagttctaaaaagaagctgcagagggagctggaggagcagatggac

SEQ ID NO: 16229 - DNA, 1033 bp, Homo sapiens
gagaagcctcagcccactcatacctagagacgctgctggggaaggtcagcacacccaagaactttgggagtgtgtgtctgttttggtttgtgagaaagtagctgcccctcattctggccagttctttccagtagccatggggctggctacaagaagcaaaactgcccatgcaaagagaacacaggtcacttttcaaaacacttgcatcattaccctaaaaataggctgttatgcgttttgacaattgcgctatcctacactctgagggagttggcaacgcatgcggtatagtggagtgggaagagttgagactgaaagttaagagaagggttttcaagtcccggctcatctcaccccagtgactttgacagtgtgctcactctcagagccatggattacctggaacaaagtgcagattagtgcccacggtcctttccaggtataacatgctatcgttctttaattttattatatatacatacttttcttctgttttttgctttaagaactaaccccgatcaagagtattttctttagctagcttaaaaagaaaacatatattttatgtaaaaacacatacatggccaaatgcaatactgaagagacaatcatcctgtatcttttatggtttttcctgcttctgagtgtcgttctacaatgcccgttgacttattccattgcgtctctgctttagggtatggtttggtcgctttggttgtcatgagaaagagacattctccttgcagctacctccatgtgagtgaattcctggataaagcaagatttcctttcaataaacgctgtcacccaatgggaattttgactctcctgtgattgtgacttctttgttttctccagagcttggctctgtgtcctttaagaaactgccaaggtgagtggctgggagctactgagggaagtggaacttggaggccttccagccctgggaccggtttctgaaacagaagggtggggactggtcagtggtgaatgctgagggaattaatggctctggattcttgtgatgttctga

SEQ ID NO: 16230 - DNA, 1060 bp, Homo sapiens
tcaagcgattcgcctgcctcagccttccacgaagctgggattacaagcgtgcgtcaccatgcctggctaatttttgtatttttagtagagatggagtttcaccacgttggccaggctggtctcgaactcttgacctcaggtgatccgaccgcctcggcctcccacagtgctgggattacaaaaacactcttgagaattgagtgagaccaaagcatattctctccatggtgactacaaagaacaaggtggctgcagaagttatttcaactgggttctagttctaggagcgccacttctgagctgtttgacagtgagcaaatcacataacttctctgattgttttcttccttacaaaggacaacattctgactcctgcacagtgttgttgagagggctaaatgagggtctgtgagtaaacactatccaaaggaaggtgattcttgcccttctctctggatcatgcagatgttgacttttaatttaaagctttactttagatattgttgaagtagatgtggcttctaacagaagaaagttccagcctaactgaagattgtcgtgaacgtgtagggattgattttgtgtgactgtctcctcgatctgtccaggtttcccatgctcagcaggagtatctggagaatcacatccaaacccagtcgtctgccctggatcgttttaatgccatgaactcagccttggcatcagattccattggcctgcaagtactcatctgcttactgctatgacagggcaacccagcttaatcaagagtggggactgtgcctttgcagaaaaataagtcacagaacatccttagctcatgattcagaattctttaagcagaaccactgtgaagactgtgcccagaagacagtgtaggaaactgaaggaagcatttccaagctgagactctaaggctttgtttttgctctctgaaaaggaaatttagaccccgagtttagtgtgagagatgttgcttgcttcaccagatacccgagtggtcctcagcatcagtgcctaaccccacacgtcagccctcttcctccagtcccagtgccac

SEQ ID NO: 16231 - DNA, 1028 bp, Homo sapiens
atttttttatttttagtagagatggcatttcaccatgttggccatgctggtctcgaactcctggcctcaagtgatccacctgtctggcattacaggcgtgagtcaacgtgccaactttttttttttttttttttttgagacagggtctcactctgtcactttgtctggtttgccgtggtgctatcgtggctcactgcagcctcaaactcctgggctcaagtgatctgctcacttcagcctcccaaagtgctgggattacagtcatgagccactgttaactggcctcttttaaccgttttattaatctttatgaagatatcaaatggtgttaacttagttgttttaatattaaataatggggaataattgtagcaaatatatgaaggtataagcatgagcccagagccattagaaatcatattgcccctaaaggaagttgggtggttgacaaacaagaatttacaaaaatagaggaaaatctggtggttgtaaaactataattcttagattgctcactgttgttactattttttcagattcatcattgctgtagatttaagaaaagttctaaaacacttaagggaaaaaatgtaagctggttgtttttaagcgtttaatttttgggaaggttgagaaaatatgttgtttggggggaacagtagaagagatgaaactgacaaaggtcaaagactgcagtataacaatgttatcctattataaatgcatcattcattaatttaaaacatttgaatgatttctgtttacagtctgtacagtctgttagaatggaattttatgaattatttcataaaacagaacttcatttttgtaacctaaatttgtctttttcaaatttcaaagagaatccgtagttttaatgtaagatttccttcattttcaccctttttattatcaaacccctctacaaactatagtctactgttcttattttgtgtctttagtatcttgtacagtgtctgattagcagtagggattcagtaaaagtgtgttaaattttatgtattggt

SEQ ID NO: 16232 - DNA, 1034 bp, Homo sapiens
tagagaattctcattccttgtgatgagagtggaaattggccatctacttttgaaaccagtttggtttatccattaaagttgatgctaagcattccttaagactcagcaatttggcaaggcatacactcttgatgagtgaaagaggataaacgtcctagaatttttcacagcagtgttatttgccatagtccgaaactgaaaacaacttgaatagccatcaaaagacaaatgagtaaccacattatggtatattctatggaatactgtactacagtgaaaacaaacatctgcataccactatatacaacaaccttacattatgtatttgttgatttggtttattatttgcttttactctagaatataagctttatgaaagcataaaccattttgctcactgttgtgtctgtagattctctagtggcaccttgcatgtagtagtatgtaataggcatccaaataaattggatgaatggaattctgggggtgggggaagacaagatcttactctgacacccaggctagagtgcagtggcgtgatcatagctcactgcaacctggtacttctgggcttaagcaatcctgtctcagcttcctgagtagctgggactataggcacacactcccatgcctggctagattttttattttttgtgaagacagggccttgttatgttgcctaggatggtctcaaattcctggactgaagccgtcctcccctgctagcctcctaaagtgctgggattatagacatgagccactacacctggccttgagtgaaatactaatgtacagattctgtctatgaatatttgacatctttttttattggtactctagagaaatagatttgatttttgtatattgattttttttttttttttttgagacagtgtttttgttcttgctacccaggtgtgatctcggctcactgcaacctccacctcccagtttcaagtgatcctcctgtctcagcctcccaagtagctgggattactggtgcccaccaccacgcctggctaattttttgtatt

SEQ ID NO: 16233 - DNA, 1030 bp, Homo sapiens
accagcagccagacttcaccatagctattcatttaattccagatgctctcaggaatggttcttttttgtctgtttgtttgtttgtgtggtgtttgtttgtttgtttgttttgagacagagtcttgctcagctgcccaggctggaggctggagtgcagtggtacaattttggctcactgcaacctctgcctcccaggttcaagcaattcttctgccttagcctcccaggtagctgggactacaggctcacgccaccacgctggctaattttttgtatttttaggtgagacagggtttcaccatgttgcccaggctggtctcaaactcctgacatcaggtgatcctcccacctcagcctcccaaagtgctgggattacaggcgtgagatgccatacccagcctaggaatgtttctttaacagttgttcctaggacaaaaatatgcttataaaaatatttctaggatatgtattcgttaattcaaatatttattgagcctttattatgtgccatagacactgaacattatagtttggcttattattatttttattaaataatattggtttccttttctttttctttcttcaacttttattttaaaaaatctcaaacctataaaaaaggttgtaatagcacagtgaacatttatatgctctttatgtaaatttaccaattgttgatatgttgaatgttttctttttttctgtattcacacaatctttttttttttttttttttttgagatggagttttgctcttgttgcccaggctggagtacaatggcgcaaccttggcttaccacaacctctgcctcccaggctcaagcgattctccttcctcggcctcccaagtagctgggatcacaggcatgcgccaccacacctggctaattttgtatttttagtagagatggggtttctctgtgttggtcaagctggtctcgaactcccaacctcaggtgatccgcccgccttggccttccaaagtgctggtattacagacatgagccactgcacctggccccacaca

SEQ ID NO: 16234 - DNA, 1065 bp, Homo sapiens
agcctctccagtagctgggactacaggtgcgtgctaccacacccagctaatttttttaaaattttttgtagagacagggttttgccgtgttgcccaggctggtcttgaactcctgagctcaagcgatctgcctgcctcagcctcccaaactgctggaattacaggtgtgagccactgcacgtggcgtattttcttaatagcacgtgtttcgctctaaaattatcttggttttttggtctcatttgcatgtaatttccatgagagcaaagactttctatgtcctgttcgtggctgatgccagtgcctaaaacaagtgcctagctcattataggctttcaataaatatttattgaatgagaaccataaatgaataagtgatagctaatgtattgtcagtgatactgtatcttctaaaatattaataagctactgtaaaattaatttctctttcctgattgacttttcttggttttgttctcattccagatgcttgggatggaagaagtttgagtgacctatcctgtgtttatcctccttgccgtagctgagttgatctttttgaaaccctcttcccagactcttggatttatttattttattccagtgtgaatgcatgttttttccctcatagatggcagttctggattagcagttttaaggtctcaactttgtttttagttatcttcctttaacaagcttcaatttaaaatactccttcttttctctcccaattatctttactgatccttagttgtctctttttattatctccaacagaaggaacttgctgtttaggtttactgaaactaaaattctgaagattgcaaaaaagtatataggtaaatgtgtgtagatgagacttaacgtgtacaagaattcacattaggattaaggttactatttttatctagaatatgaaatttgttaggaaagggtagcaccttactatctttttatcaccttgatcagtgacgtacagtaaaaattcaaaccataaaaggtttgttaaataaagtagctgacatcagtatgcaggataatgaattcttggtttccccaaaccag

SEQ ID NO: 16235 - DNA, 1043 bp, Homo sapiens
cctcactgcaaccttgcctcccaggttcaagcgatcctcccgcctcagcctcccgagtagctggaactacaggcgcgtgccaccatgcctggctaatttttgtatttttagttgagacggggtatcaccatgttggccaggctggactcgaactcctgacctaaagtgatctccccgccttggccgcccaaagtgctgggattacaagcatgagccaccacgcctggccaagcttcctataaaatattttggaaatattttataagactaattaaccttgaaattttcctcttagtggttttgtctgttagctagttctctaccctaagtgttttgaggtctttgtacttagaggcgacagagaattttacttcattcagagcaagccttagctgagatactaaaatcatgtgaaagtctgtctaaatgtaagggtggttccatctttgcttctcagttcctctttacctgtcagaggagatagttatcctagacagacctcccaaaagataactttgacttccagattctgacagttctaatctccatttaactgtattttctttcctttttatagcatgagcagtaatatccagaccaacatggaatggaggatgtcccttaatctcctcacatggctatcccttgtgcagtcctcttttaacaagtaattgtttctgtggatatctgttaaggttaaggagtatagtgaacgtctttgggtttaggttgtttaacctcttcacactccatataaatcattcttccaatgtcttttaaatgcaaccaaaagactcaccaaagtgacattggcagataataggaaacttctcattattaatatcagcatagacacatccagtaaggagattgcctgtccttcctgctctctacctagagggtgtctaggttttactttggatctgagaaaagtaaggagaaattctcagctggttaatgcagaagtatgaacagatctgcagtgttctggtggattccctggatgacagaggatctttgaaagtgaggaaattggctgggcg

SEQ ID NO: 16236 - DNA, 1026 bp, Homo sapiens
accaaatgttattagagagcttgtatttttaaagtttttttatttattaattataaacacattagcttacattaaaatataaccctttatctaatttgttttgaaatgctaagttgacattttgtattttgtagaacctactgtagtaccaaccacttctgcaagaatggaatcacaagctactagcgcttccattaacaattcaaatccatctacctctgagcaggcctctgatactgcttcagctgtcaccagtagccaaccttccacagtgtcagagacttcagctactcttacaagcaatagtaccactggcacttctataggaggtatgtaaaaaagtgggggaggggagactttttgtcattactttcgttaggaaaagtattattgtttttaagtctaagattttagctatgttaataagcgggtattcttacattataataaacttcatatgttatcaaggtagtctttattataattaggctgatttcatatttgagtttgtgtgctatatgtaaccagagtattatagctcaaataagagagcttggggagaagcaaatggctgacaccaaaagcatgagcaacaaaagcaaaagtagataagttggacttcatcaaaatttagaactttcgtgcattaaaggatattatcaagacagtgaaagacagcctacagaatggggggaagaaaaatattgcaaatcctttatctgataagcactttagaatccagaatctacaaagcactcttaaaactgcccaacaggccgggtgtgatggctcatgcttgtaattccagtactttgaggggttgagggtggaggatcacttgagaccaggagttcaagaccagcctgggcaacatggtgaaaccctatctctatttatatttaaaaaataaaaaagtaaaaagaaacaaacaaaaagccccaacccaacagaaagacaacccaattttaaaatgagaaaagatttgaatagatatttctgaagaagttatgcaaatgaccaagaagc

SEQ ID NO: 16237 - DNA, 1031 bp, Homo sapiens
tacagtgggaggtggggaaaggctgtgcttacaggatatttagcagcatccttggtttgtagcctctaaattccagtaacatcacctcccttccaattgtaacaaccaaaaatgtctgcaggcattgccagatactggggacagcattgctttatgctatgctagaacccagtgtttctgttctaatactggttgatttgtatcctaaattgtctccatgcttgatgatgagcttccttaagggccaaagagcaagtgtttctcttcttggcgcttagctacatgattgcatgctgcttttcccttgtgagttgaaattaaatatagaaagtgcttattgagccacctacattgtgcaagcatgtttctggttgctagagataaaaacagcaaaagcagaccataccgtaagttatgttaaaggccaggactttcattttcacctttgtattatccagtgccttttgtagatcttttaccacgactttattatgtgtaagactgttgaatgaatgagtaattcatgcctgcctctcgataatcctgctagagttactgaaggcactcctaggaggcactttaaccaaattattgtccctgggttgtggagttaatttccctaatgcaggttcatgattgtctcatttttagtgggccctctatgggttaattttaatagaaaaggaagtgttttatttactgaatcatatatctctgtatttcacctctaatttatgacagttttatttgggtagtaactctcgaatgagaggctaattggttgtctttagttttggatgcaagcctgtttgagaaacaaagaggttctggactatatatattcaaaatgctcgaaggcaaaagaggacaagctgtttctgaacagatacatgtcatatccatcactttagtgatggttacaaactcataccctgacttttagagtcaacgtaatcctcaaataacttggtttgtaaaattaaagtgtcagagttggaaggaaccatgaaggtaatttagcgtatcccagt

SEQ ID NO: 16238 - DNA, 1023 bp, Homo sapiens
caaattgttgtttagaataaacatgcaaaatctgcaattgtgttaaaaactaatataaaataattagactataaaaatgaatcttagctgggtatggtggcacacacctttagtcccagctactcaggtggctgaggtgggaggatcacttaagcccgggagttcagggttacactgagctatgattgtgccactgcacttgatcctggagcaagattctgccgcttaaaaaaaaaaagaagcaaaaaatgaatccctgaaactaagttgtttttagtgtcttctgttaactgactttaggaagagaaaatacagtaaactgggatgcaaaataaagagtatgaatggaggttgggcacattggctcatgtctgtaatcccagcactttgggaggccaaggtgggcagatcacaaggtcaagagattgagaccatcctggccaacatcctggcccatctcaaaatacaaaaattagctgggcgtggtggcatgcacctgtagtcccagccacttgagaggctgaggcaggagaattgcttgaatctgggaggcagaggttgcagtgagccaagattgccactgtactccagcctggtgacagagctagacttcctctccaaaaaaaaaaaaaagtatgaatcaagctaaatacacgtttcctaggtgtgttaacttgtattacatgtgttttgaaaaaaaatgcacagggttaacattgttttctcttaaactttcatccattaaaatggttgaatgtctttacagtataagagtaaatgaagcaaaattaaggtttcaatgtgtcctgctttaatgtttatatacaataatttatttgtgcctgcaacatttgcctggggtatttaatttttaaaaattttatttttatttaattcctattattctcctatttaaaatatcacttgtaaagaaggtgtacaagataatgttaaaattactttttccttgggtgatatttgaattggaagcattggaataaatgagcaattagaatttatgga

SEQ ID NO: 16239 - DNA, 1048 bp, Homo sapiens
gcatttctttgcacatattatgggcttgtgaccctaaacttgcaggcaaggttagctgctttagtaagtagaattttgtggtctttttgttttttacatagtaccaagccttgataattatgaattttttatccattactaacctttaatttaatcaatcatgtactttagtttaatgtataaagatcctctagaaaatgataatattgtgtattaagacattccttaattaggacaaaatggctgctgtatatttactatatggagttctgagttaaataccatccttaatactgggaacagaatacaacccatataaatcagatgcaggtggtagtcacatcaccagagtgatcagtataaattttcttggtgtatccttttcctttcaacacagtgcagataagagttgaatattgatatcatacatttagactgctgttctgattgcatttatctttttcctacatcatttagaattttatttccctgattcagtttttgctgctgtgaaacagctctgatgaacactaaatattaatttcaattagctagattgtacatacttgcagatttaacaaaattttagggaaattgaaaaagacatgtagaatttgttgtcttctgctaagcacgaaaagttaagatatctgcttacattgattttgtagacacattaagtcaagatttggaatttaagtcactggcaggtatctgtgcattcatagaacttataaaggtcccaggatcacttttaagggatttttattagtttaaaggtaaataaagtcagctgaatctacatgtctcttgttttatttctctctaaacttgaaaacagtaaatctgcagatactgtgaggcacaaattatactgtcaacctactgttgctatggttatatactcccacttcatacattaccaagagtcgatcactgatttaaaatttttaatttctatagttaagatttactgcataatatagaatataaagttaagttaacatactaacatttctcctttggaggaagttttaatctacttcag

SEQ ID NO: 16240 - DNA, 1049 bp, Homo sapiens
taaaaccaagttactaaatccagaaagaactgcaatcaatcagctaggccttgggagaaaagcaaaacagggaaagagggcagaattgcagaaaggctcctctggtctttcttttgatcacaaaagtgaggggtgccagaaacacagagttaaattgtctaccaaagacgcaccgttcatgctctgctcttgattgccctggaaaccagaatccagccctactgccagtgaaatcttaactgggacaacacctataaaagaaatggtagcaactagaggcacaggctgacttggtgtgaccagctccactcagggagggtctggggatgagttcaggagggagtcgcaaagagaaggaatttagattatgtaaaagccatgctctatggaagcccatggagtttgtaattcataaaggcacatccatattttctcttactcatttttgtgaacacttccacctggcaggagcccgctgtcactctggtgctctgggtaagctgctgagacagctctgtgcagagacctccagcccccttgagttgaggccacatgactaagctctggccagcagaatattggtggacatggtgtgcacacagggcaggtcctttaaggaggaaactgcacgatgcttttctaccttcattgggctggacttggtagtagtggggagtcaggtttgattacgatgggctgggaccacacgttgggaggtcagtgggttggcatccttcatggttggggagcaagcttattcaagaaggcttcaccctttgtcctctccacatgtctctgtattgtttcacaaaacactgtggaagagacggcccttttgcatgtctttaagccagttggccaggtacggtggctcttgcccataatcccagcactttgagaggctgaggcaggaggatcgtttgatcccaggagtttcagatcagcctctctctgtctcacagacggccatcagtagagtggataccacccttatacagacctctgtctctctctcttctacaactaaagcttgaacacctctaccctag

SEQ ID NO: 16241 - DNA, 1033 bp, Homo sapiens
cgtcgtcccgggtcccgtttcccgagcgcctggaggccgagggcaccgtggctctgggccgcgccggcgacgccctgcgcctggccgccgagtactgtccgggaaccgggcggctccgcctccggctgctccgcgccgagagcccggccggaggcgcccccgggccccgagccgtcagctgtcgcctcagcctcgtcctgcggccgccgggcaccgcgcttcggcaatgcagcactgtggtggggcgcagccgcaaggcctcctttgaccaggacttctgcttcgacggcctctcggaggacgaagtgcgccgcctggccgttcgagtcaaggcccgggacgagggccgcggccgggagcggggccgcctgctgggccagggtgagctgtccctgggcgccctcctgctgctctgagggcccagccctccccggggcgctctgcccgggggactccggacactgacagccgcgtggtacaaaataaacgtgtatttgttgttcttatcagtcccgtttcagtacaacactggcagagatgattctagattaactatcccagtaaaagatatgatattttccatagatacctccagaatttttttcagcaaatggaatggttctacagtgtttcccaatatagacagccatttgcataccatatgtaccacacacgcctaggaaataatgaatcacatgaagtgttagaactagaaagtgtcttggcgatctgtttgctccaatcacctcattttaaaattggtgctttccacaacatgcatggagaccatcttggagcatttacttttgaagcattttgtttaagaccccggataagaaaatgagggcaaaagaggtgaagtgacttgtccaagatcaacagtgaattattagttggaacgccagcctgatactcctagctatatctcactggaaaagcattggagaaaatgaaaccattttaatattctaagcttaaataatagttataataggctaggtgtggcggctcacgcctgtaatcctggcacttt

SEQ ID NO: 16242 - DNA, 1028 bp, Homo sapiens
gtgagcaggcagttcccagaacaagggatgcaaattattgtgtctcttctcaccttctctagtggacagagaaatacaaatttaaaaacagatattatttcctgtccatacaattgatacatcttttaaaaggttggtaatactctctgctcgatggggcagggtgggaattctcagaccattgatataagtgtgaattgctacaaccttttggaaaagcagatcatttctgtgaaagtttggagcacacgtgccatgtgagccagcaatcccacatttgcagccttgttttacattaggaaaaacattgacatgtaagaatctgtgtgtaagggtgtctgttgtaggatttttttcagtaaataaaccagaagcaacaaatgttcatcagtaaaatgaataaaataaggtacatccatagtatggattattttgtgagggtagtgcataacataattaaaaataatacataaaataaaagctagttgcagagtatcatatgtatgttgcatgaccgtatttctgattttttatttttatttttatttttttgagatggtgtctcagtcgcacagactggactgcagtggcttgatgtgggctcactgcaacctctgtctcctgggttcaagtgattctcctgcctaggcttcccgagtagctggaattacaggcacccgccaccacacctggctaatttttgtgtttttagtagagacagatttcaccatgttggccaggctggtctcgaacttctgacccaagtgatccacccgccttggcctcccaaagtgctatgattacaggcatgagccactgtgcctggccttatttctgattttaaaaaagaagccctatgtgtatgaccttggagaaagatgtgtaaggacacccaaaacttaaatattgtttaagattagcagtgaggagggagaggtaattaactttctccatgtacgcttcagttggttgacttgttcaaacacgcaggcttttctatatgaaaacaagttaaaaaatatttggtt

SEQ ID NO: 16243 - DNA, 1020 bp, Homo sapiens
cacatgtagcctgagactctggaattttgaaaccaaacattgacaagtggcttgtttgatttggtagtttaagtttggatgctgaaagaatctttatagctcagcaaacatggacttgtgcagctttctttagctttctccatttggaaaaacattcagaaagaagaaagggaaaatggcatcagtcgttcctcaaatatataaataaaataaaggaaatttctaaaaatggaagaccagaaacccatgtatatttaattctatgcctctgtgcagcttggtgtaaatattttgtggatttcatctctattggaacaaaatatcagggatacaaatgtagagtgggtgagctccaggccttgggccccgggcatggtcccaggcccatctcttgctctgggttaatgggacttctggaacgctccttggaaaggacgtgttgctcttttagctcctgaatgcagacaacaaattcacttgtgactcagaatcatagcaggcctcgtcctggtgtaatagcagttgggctgtattccttcagtgtctcagtgtgtgtatgtttaattaaatttttttactttttattagtgtatctttattagattttttatcgaattttttattaggtcctctggaaaagaaacactctgggaaagtaatcctctaattgaagacaaaatgaccattttagtctgtttcatgatgcaaaactaaatacctgaggctgggcaattttcaaagaacagacatttatttgtctcagagttcgggaggctgagaggtccaaaatcaaagtgctggcttctggtgagggccttcttgctgtgtcctcacatggtagaagggcaaaagagcaaatccactcctgcaagtgcttttatagtggcattaatccactcatgaggttggagctctcttgacctaaacacctctcaacactgttgcattggggattgtttctaacatatgaattttggatcgtacacagggtaccatattgagatgatgtatgtgaaggca

SEQ ID NO: 16244 - DNA, 1048 bp, Homo sapiens
tctattttttttttctttttttggagacagagtctcactctgtcgccaggctggagtatagtggcgcaatcttggctcactgcaacctccacctcctgggttcaagttattctcctgcctcagcctcctgagtagctgggactacaggttcctgccaccaagcctggctaattttttgtatttttagtagagacagggtttcaccatgttggccagggtggtctcgatctcttgacctcgtgatccacctaccttggcctcccaaagtgctgggattacaggtgtgagccaccacgctcggccttttttttttttttttttttaagtaaaatggagatcagtttgctgctctttctacctcacagggcagacatgtgaataggatgacaaaataagaatgcactttattttaaaaggggctgtgtcttataaatcagtaacgatacctgtatactattcctcaagccctgaatgtcctagtaagtaaaaaatttatgatagaggaaaatttactggagtttgaataggaaagtgtgtgcatgcctgtgtgtatgagtgtgtgaatgaacatgtgcaggtgtgctaggcaagtcaagtctgaacttctatttttcaggttgacaacatccaaccaacacttgtttgggccctttagtgcaaaagaatatgcaagcccttttgcttgctaactttgagttgagtcttagtaggtgtcctggggcaggctttagttgtttttctttcctcctgctgaatgtgatcctgttccaggggcttgttctttgggtcacagttggcctggggccacttagtgtctgaggtcctaagctttggggtgagccaaagcttagccaaagcgattgctttgttactcatgtagttttttccccctacctcagagaggattttccccttgaatgatcaattttcgtgaaataatttaaaaggaagaaattactagaaagaggcagcgggtgacccacgattgttactccccctctctgatgtgatccaggacctcagctctgtaggctctgagcagagttgc

SEQ ID NO: 16245 - DNA, 1079 bp, Homo sapiens
cagggattgaaaaatcatccatttcattagtatcgaggattcttatgatgtgcctaggagacaggaagcggggtagatgagcctgggcggtgggtgggggccttaatctttgggctaagcagcttgaacctgattttccatacatttcaaaatgctatgtgtccattaaagatcagctctaggcaaaatcataaagctgtgagaacataggcgtcggctcccctctctttcaggcggtccttttttcttactcccctgcttactgccctttctccactgtgccagagttctagtgtgttctgtagtgcactaccccttcctcagcagaatttcctcttaattaggcatcatctttaataaagggcagcactcagctcagttgcccggagggttctgaaacttaccatttctatgacagtgataggcagcaaatgcacatatccatttttatagcaaagtttaactggggacaaatctttatgaccaacaatatacttaatgatggaattccaggtgccagtgccaagaactacctggcaatgggagggtaggttggagggatcctgggaggactctaatgaaccgtgtgcataccctctctgttcactgtggcagtgtgagaaggtctggttgtgcttttctagcagtgtgaactttgggaaggtctcttgacttcaaggttttagtttcttcacctgaaaatggaaaatagtatcaaaggtcttttctcatcattcttgtattccatgttgtgggcactctctttggttcttggtggagggtagaaatgctgacttctccccaccccattcatgcattaaataaatatgtattgaacccttctctgtgtcaggtactttattgtgagcaatacacgtggtccttgcccttggggagcttccagttatttctgactgatgtggcattggttctttttttgagttgtgtatttgcccagatggagaacttcatcttgttagccatgaagttcagcatctgtggttcctggagcgggctgttgttgagtagacatagcttggtctgctggatgttggccctctgttcatcctttagttggg

SEQ ID NO: 16246 - DNA, 1057 bp, Homo sapiens
cacacatcacattgctgggatcatttattaaatatttacataattgtaattcccctcaaaaatgagtattccttgggggtaacaggcactttgtctcattcatctgtgagtgaccaggtaggttccagtgttggcagaatccacggatggatggacagacagatgggtactctctggctacagaacttgatgttataattggataatcaattgactcatggtctcacaaactgtaccttcatgtctattcttgccaggcccaaatggctgtttctaatgatataatgtatgttttgttcactctccaggcggcaggaaatgctgtgaaaagagcctcagacaatcttgtccgtgcagcccagaaggcagcttttggcaaagctgatgacgacgatgttgtagtgaaaaccaagtttgtggggggcattgctcaggtttgtaattaaatcaagaatagtatttacttcccgagagaggtgttgggttataacagagacaaaagaatagtgacttcaagatgaaagtttatttcttcctcgtgtaccagagatggtgtggtgtttccttcatgtctgagagccagatccatctgcctttctatttcaccatccctgagatgttacccttggccacgtggtccacgttggttcagtagccccctcaactttccatgtggcaggaagagggaaaggaggggaggccatgaccgtaagctgcaggcattacgtcctctcacataccattggtcagcacttaataatgtgcccaacccagctgcatgggaggctggacaatgtagtatatattttttgtgagtagcatttgcctagataaaaatcaaggattctattgtagaaaggaagaagagcaaaaatggaggacagcaacattatttaaataaaatgatgcatttggaggtactgcccactgcagacatttggccctacagagaatgctttccctctcccagaacttttataagagcaggtgggattctgacttacgcaggattgcattctcacgcatgggagtgaggagaaagctctaggaagtcagg

SEQ ID NO: 16247 - DNA, 1027 bp, Homo sapiens
acagcattgcccctcctttttattaccattattaccttcagattacactatgctcacaagttttgatctgcttcagaggctcccttcctctctctggttcttccactaaatacaaatttgattttgtcagttatctcaccaacttgtctcacgttagtgtctcttgtattcttccactgcagtaaggaggtagatgcacagatcagccatcaaattgatggagttcttaggtttactttgttttcctggcagcccccacctttttagtacatgtctcatcctactgctgtttttgagattgtgaatgtgtattttatccctccttccacattttggtctggctgccggttcacctaggtcagacttccaattgagactgcccaatcacagctaaccattctgagtcaaagcagaagcctctgatctcctctctgctggcactcctaatagagagttgcttctctctggtctaccagaaagaggatcatattgtttgtagacaaaacccttagggcctgatgggatctgatctctacccccatgcccttctgttacacaaagcttgcaagacccatggtgtgtgtgttgtgtcttcctgctgcaggtggcccgtaagctggtcatcattgagagcgacctggaacgtgcagaggagcgggctgagctctcagaagggtaagcgggcccggcgccaggaggccacgaatggggtgctgcagagcagtgactaaacagcatgaccttctggcagctgcacattacctgtttcagctccgggctccttttgtgctcatttgatgtggatgagccacgagtatggaacatggaggactcgtgtggggtgtcttatgtatgaatgcgtgtatcactgcatgccttacctgcacactgattttgtgaatggccttgtgcatttcctgtgtccactaacagccaagtccgacagctggaagaacaattaagaataatggatcagaccttgaaagcattaatggctgcagaggataaggtactgatggctcgtgtg

SEQ ID NO: 16248 - DNA, 1122 bp, Homo sapiens
cttatccctcccttaaaagtcttattttttactttgtccactggaatacatcatcgttggcctatcattccaaactccctacagtgtggcttcagctatatctctctctgttttttacaggaatcctaaactctaacccagggaccctcaacatctgtgctgggtggactgtggccacattttcagctggccagtgtaagggttttagaggcccttacatgagaagaaatacaatttttaagtctctgagttgatgtgcttcttacatttttggaattaaaatgcctctttacttataaaatgctggtagtaatagatggtcattatctcactgtcatttgtgaaagaaaaaacgattgtaatagaattcttgctattttttttctctaagggaggtaagttttctccctaagcaaactttatggaatgcacaatgcttggctttcaccttcttttattctcactaccaccaccttttattctcgcctgcacattttactaattcacaaaattaaaaagtgtaagattaactgctctactgctctgcccagaatggcaggttccaagaacacacctcatttcggcctgttgacatctgtctttcctgatgttcctcatatgtcactttctttatgaggccatgtcagaattgtctctcttcacccccaacccaaccaccaagatgctctttcctcagtgggactttgtactctgtagtactttgatctttcatgtggcacttaccatgttgttcctataagtagaaccgtcttcctttgcttccccaaccctccactcccacgataatttttttttttttttttgagggggagtctccctctgttgcccaggctggattgcagtgatggaatctcagctcactgcaacctccacctcctgggttcaagcgattctgcctcagcctcccgagtagctgggattataggtgcccgccaccacacacggctaattttttgtatttttagtagagacagagtttcgccatgttgcccaggctggttttgaactcctgagctcacgcaatctacctgcctcggcctcccaaagtgctgggacccacgatgaattcctttaggacagaaacatgttttgtctttgtgt

SEQ ID NO: 16249 - DNA, 1025 bp, Homo sapiens
ctctgcctcctgggttcaagcaattctcctgcctcagcctcccgggtagctgggactacaggcgggtgccaccacgcccggctaattttttgtatttttagtagaggcggggtttcatcatgttagcaaggagggtctcgatctcctgacctcgtgatccgtctgcctcggcctcccaaagtgcgtgagccaccatgcccggccttaaattatgtttgaaatggaagttgtgccatccttcttacgatgattaagttaaattattaaattctgaatacagtagaagaaagcaaagaaatttgagaaccacaggagttctgaaatagataccctacctttgagactttgaaaaacctaagaaatacaaatgcattatgtgttcaagtatcttttgctaaatttaaatatttctgtttacttttcagctagcaattgactatgggattaaattcttggagacaagcgcaaaatccagtgcaaatgtagaagaggtaagaaggaaacgtttggtgactgttacggagcagcaccagtgcttaggggcctgtgttcaaacagctctcagagctttggtattttctgacctaatgaatgccttttgttgacccaactctactttgtacacttttgtgcttctgatttttttttttttgagatggagtctcactctgtcgccaggctggaatgcagtggcatgatctcggctcactgcaacctctgcctcccaggttcaagcgattctcctgcctcagcctcccgagtagctggtactataggtgtgcatcaccacgcccagctaatttttgtatttttagtagaaacggggtttcaccatgttggccaggagggtctcgatctcttgacctcgtgatcccctctccttggcctcccaaagtgctggaattacaggcgtgagccaccatacccagctgcttctgatttttatgtagacgctggttgttgaatttctagcatctagcctccacctggattatattagcttgctcagttaagattcacagaat

SEQ ID NO: 16250 - DNA, 1046 bp, Homo sapiens
gcatctaacaaaatttagactctttgttttgttttgaactgaagacatcattgggaaaggtaggaaatattagtttaggatagagcatacatgtcatatccagtagcataaaaaaagtattatctccctgtctccattaataaatttagctgtgcaatataggtgcgtttttgcagaagtttctagtaagagattataactccattttacaggttctgaatgctcagagtctatattaaggcttataaagtttttcctgtgatcagtaagtgacacatttaagcagacattcttttcaagttcatgacttagattcctttacaaatttagttctcaatctttaaaaaccacatttcattatgttggttaattattataaattttaagcactcatttctgcaatcaggtttctcagaattttttttttttaaacagaagagacattcctttttccttgttacatccaaggggggcacaggggtgggtggaaaggaatgtctaaaaatgaaatcccttgatatagagggacctagacggacaggatatgctaaaataatttcaaattctagcacaattttagagtagaataagtcatttttttagactaataaaattaatggctgtcatgttcactctgaaaaaaatctaaatgactgaaatgtacagaaataaaaattagcaaacaattattctagggatattttcagattttacttcatttcttgaaatgcgtgtgccatatgcaattgcatttcttgtgccaagaaactaatagaacttatttcactttacctttttttaaaatgtgaatttagttattatagttcaattttatggccttacagatggcttttattttgtttgcagctgacactgcagttcctttcatgcaaaataccataaactgtttgatgaaaatcatgcccctaatggaaactctctagtttttccatataactatcctactgtacatgtttaaacatattttatttttgctccaatggcttaatgtgaaaagctcctgcagataagtggacctgtcatgt

SEQ ID NO: 16251 - DNA, 1059 bp, Homo sapiens
actgagggtgaccatgacgctggcttcaacaccacagcttggtgctgccttttggtatttctgtcaacagagtcacacaacgtttgctcttgtgtctggctcctattgctcagcatgtttgtgggattcatcttcacatcactatagatggctcactcattgctgtatagtattctaccatgtgtctataccataatttacccatttgacagcagagaggcattgatgttgtttctagtttgagatggagtcttgccctgttgcccaggctggagtgcggtggcacgatcacggctcattgcagcctcgacctcctgggctcaagtgattctcccaccacacccttccaagtagctgggactatgggcatgcgccgtcatgcctggctaacttttaaatttttttgtagagatgagctctatgttgctccggctggcttcgaactcctgggctcaagcgatcctcctctctcagcccctcaaagtgttgggattacaggcatgagccaccacccctggctttctcattcttatctattgtgaatggtactgctgtgaacgttctaatgtatatctcttggtgaacacacacacacacacacaacacacacacacacacacacacacacacacacacttcttttgggtatacgcctaggagtgggactgctgggtcatggggtgtacatgtgtcgactgttcataccactcaattttcagagtgatggtatcaccttacactctgccatcagtttacaagttgtggttcgtccacctcctcactgcattctctttattgttagtcgtcctgctggctatgtcatggtatcataaatacataaattgataaattatagtaaaagttttcatttacgtttccctgatgattaataggttgagccccatgttgtgtggctccgttgacagaaataccaaaaggcagcaccaggctgtggtgttgaagccagcgtcatggtcaccctcagtgggggcagggactggtggaacagggaggctcctgggggctgagaatgttttgattttcatctaggtgctagtt

SEQ ID NO: 16252 - DNA, 1033 bp, Homo sapiens
aaggaatagaaataactgcggtttcctggcgcgctcagacgtctgatgctttgcttgcctttgtaaagtcaggtatctttttctgcatgaagcctttgaaaattaacggttaattggtttcacagagcagtattgcagttcttttgtgaggatgcagaaacttgtgtaaattagcttttacctgtaaatctgtcgggatgttgagtatagaacaacaaataaggtgtatggcactgctttacaaattggttggtggtggtacattagctataactgtagccattgctgtggtgctataattgtaacttaatttttttcccaaaagaaatttgaagaaaaaaaaaaagaccaaagtaaacactaggagaagcctacctcacagggaatggtgggattgctcttgctcatctgtagtaaactacagaaagacaacatggacaattagcacacttctggcattttttaggtaaaatcacatcaaacttaaaaatggcttcactgggcacatacatctaaaaaatggaaaagaactgtgcaagtggcagatgccctcttgtgagtcagtcttgcctctgtcagtcagggagtccacttgactgtgaaaaagagatgcaggaaattgagcatctcttgaggaacttaataagttaaaatggagcataacgagatgtgctgataacaagaataaactagtatgtggggtgatttctgttcaaggggtaggatgacatctttgcatcttgcaacaaagtgtgtctgacatatagctttgcaagcctgggtctagtcacttacttggatttgtagaaccaataaagcgagtttcgcaactttgtgtgagtccacactctgaattgaacccattttatgtaggcctcccgtcttaacccgttggcatccatttgttgatataatctagcgttattgtattaagcttgatcttgttcttgcgtgcctgtcgtttcagtgattaaatgatgaatctgtgagtccttaactaactcattatcttggagtgttatatagtcgtatt

SEQ ID NO: 16253 - DNA, 1048 bp, Homo sapiens
aaaagttttaaataaaagggcattctctcaagctttttgttatgtgcacataccagatgttattttcagaagttggaggcttgggcattccttatttttgtgggtaaaagagtttaaccagtgggaaaaaacaaaaattgtttaaaaagatgccctgaatgcaagtgttttgataactaaggaaagccaaggaccaagcatttgaacttgagggtttgggttaaacagccagttaaattagagatatttagtaggataggcatgctaatttttccctgattaattcttcaatgagttgagagtgcctctttaagttttcagtacacacttgccttcatattactctacccaagaaaagtaagtgtagatcaagtaaatgttctgcaattttgcaccaaaaactgcagataattccacccaaaatactggagataaacccttttttaagagatccattcagtaggatgaggtgttgattattggttgtcagtggtaataaatttgtaatggactgatcaggttgtgataaagagaagaaatcaaccttgatggagtgatgggttattttgtatcgtatttctccacaacctacatttaacactcgtttgcccagtggactaaattttctaaatacaatcagtcatttccttgtcattaggtcaaatgcttttactgctttttagtaacattctatgatgtctttattaagtgcctaatacttaatagagcaattagtaaatatttgcctgataaataaaggaactatcacttagatgtgtctggcagggtctttatgttgaaaataaacgcagagtgaactttccccagaatgctttcactagcccgcactcccagtattttagtcagtaaacgttggctggattgtgagcaaatgaccatctgcagtgttgttatcacaatgaatttgtgttcttttggcagtctgtatttatagatgggcaggtggacaatttagttgtaaatgtggatggggtagttaaaaatcagtggacaggtgatacttttttcacattaattctaaaaagta

SEQ ID NO: 16254 - DNA, 1032 bp, Homo sapiens
acagctatttagaaaaactgaaatagttaatggttttggagtttgcaggtgcctgttttctgaaatattgattatctatccctcgggcagagtatacgtatttgccaagtttgtatttcttttttctatttcttcaaaataagtcccgttgattttaaaagaataaagagtttcccagtaagtacaagtgtggtactttttccccctccactttgtactttagtgttaacctttattacataaccacagagaatgaggaagagaattgtacaatgcagatattaagcctattgttctccaaggaaagtctttgatgttaagaggtccctaaacctcttaattattttatttacttgtgagagggggtgcttccttaaatatatacgagtcttttcttatattgcatacacttgcaactattattttgaaataatagttgagtggtgtttacatttatgacctgattcatgtcttttgaagtgccaccactgtttcaccatggacttgcttactcaggttgttggcaacagcatggaattgcatcagatcttgctgtattaaataaatgaagatattagatgtcagaatttttaagtagttcatggcttttgtttttattttctatatgatcagcttcatagggaaagttatttttgaaacaatttgagctcctaataattttttgaagctatttgtgtctggtcttccaaaggcaaaaatggcccattttgactctgatttagtaatctcctttggctttagtggtttttatccttcctcccactatcctttcccctcgtttagaggtaggaggagcccagttccagtatttaaaatgaagatcaagagtggcataatagcttcattaggtgtttttcaccaaaataggtctgaataagtctgaatttgtggtagaaggaaccataacaaatttgtttagtgcattacagtttttgagaatatgttgtttcacacacattgtttctatatgttgtttccatttcatggtgaaagcataaggaatccatttaa

SEQ ID NO: 16255 - DNA, 1028 bp, Homo sapiens
tttgccctatcagaaatggatcttattagttactcagagttaaatcattgaactgaaattttacattaatctatttgaataaaaatttatattcagatttaccttctctgataaatagaacaaaatattgttgctgttatcagagtcagcagagaaaataggcaagccagggggttcgaccttgcttggaaagtcagatcacaagccaggctttggataggtatatgcctgtgaaagaaagttgtaaggtcattgggactactgcagttaatgcattgtaatacttttattggactagctcatcattcattaatgaaggcaagttagtgccaggtttataggatttttggctctgtacattggtaatttaaccttctcccttgtgttttagtttttaaaaagtatgatcttaattggaagtaaaggacacagatttttaatctcagaatttaaaaagacttttgattttgatataattttatactcagagaaacactgctaagaatagtacatacaaagaacttccgtatacttagatttgccagtcgttcacattttgcctcatttgttttatcatgtatatatttactctctgtttatatatttccccttattaatttacagatataacactcctttatccatagttttgtttttccccaagaacaggtctcttttttttttgggacggagtcttgctccgttgcccaggctggagtgcagtggcgtgatctcggctcactgcaagctccgcctcccaggttcacagcattctcctgcctcagcctcctgagtagctgggactactggcactcaccaccacgcccggctaattttttgtatttttagtagatatggggtttcaccgtgttaaccaggatggtctggatctcttgacctcatgatctgcccgcctcagcatcccaaagtgctgggattacaagcgtgagccaccgcgcctggccgggtctttcttttcaatcagcagagaatattggtcaaatcaggacagttgatactgatagaat

SEQ ID NO: 16256 - DNA, 1046 bp, Homo sapiens
gaatttggctagttcagctaaaacaatgtggagcagagtttcctggtcactgtgccccttcctttttaggtcagttgtggaacaatttgctaggaattttgtgagaaaattgtgagtagttccagcttacaaaggcctgggatcaggcattgctgggcatgatggggatcaagtcatgctggctgaggaatatgtcagaactcttggggtaaagagaaatagaagcagaatgagtaatgttctcaagtcttgtaattatttagaagcatttttccaagttcaaccttcagtaaagcctggggtttcctagaatgcttattaagtaacataatccaaagaagcaaaaggaaggaaggataaggatttgtgccttttaatgaagacaaaaggaatttctgccactgtttatggcactttcttaagaatctttacctagaatttgggatttctatggaaatagtgcttttgaaaatttgaaggttttaaacttacttgttactgagttattgttaggaatgatgtttgtgctcaagaattaggttgtcctgagatagaggtggcacatctagatttgagttattaaaatattgatgtgatacacaaagatttagtccaaaggacagtggcagcttagttgaagataaatatcaagtctttactctcactacttctgttgtagagggagtagtatagtcattggatagctttgaatcctactgggtaaaaccttctgaagtttcttttgcatcctcacttttcctaaacaacaggtcagtcattccagtgagttgtttggtgggtgtggatgatgctgcatcactgatactgctccctctgttaagtggtggtctggttatctgttgctgcatgacaaacagccatacatcctagaagcctaaagcaaccatttcattttgcttataattttgtgggccaagaattcaggaagaacttgcctgggattgcatcaggtggagaacgtggactcacagagttaccagacgtgtgttaagaagacactttggaggaggatgttctggagtctt

SEQ ID NO: 16257 - DNA, 1060 bp, Homo sapiens
ggttttattgtgtgggtatcagtatgtgtgtgtatatgagtatttcagctatattatgtttcatttagggctttacagacgaccctggaaacctttaatactgtttccatgggaaatgtgtttatcctgcaggtaaacttttgaatctcatctatctataaattgaaactaccttttataataagatagtccccctaaaggtgattaaaataaatggttttaagattatctgtagtattcttttatttgtacaattacctgttctcttcttaacaataattgagagtttaatttaaagccagtgtttttcagtctattttatatttgtcctgggtacattaaaggttcttaatttggatgaagcatgtataaacagagtgaatattccccaaagcaatgccatttattggcttcagaatccctcataataccctatcctctgtatctttctagccttcaaatgtttatctggtgtgactgtattatgccctcagagagtactgtatgttgcccaggctggcctcgaactctaggctcaagtgattcttctgcctcagcctcccaagtagctgggactacagatgcaatcaccaccacacttggcaggtagtaaagtggtttttttttttttcttttttttgagatatattaaaaggcacagtccatagtcacttgtttccaatgattttggaagtcagtactttattcccttttactttctctccttatcattacgtatctgtctgtctaattgatgcacaattcacataacataaagttaaccatcttaaagtgaacaattcagtggcgtttagtacatccacaattgttttacaagtaccatctctatctagttccgaaacattttcataaccccaaaataaactctataccaattaaacagttacttcccattctcttgaccccctcagtcttagagttttttggttttttaaaatgtgttattgaattgagaaattaaaaaaaattaaagccttgtgagatagttgatattataagactagctttataataccctgttctaaatgcaggaacatga

SEQ ID NO: 16258 - DNA, 1039 bp, Homo sapiens
agccacgtaacatttttcctgcagacaacttaaatcatgatataggtgaactacttcatttccctcccaagatggacacccttgtagagcagtgcccctccaccttgatgtaaacaggagcccagagaggaagcatgcattaaccaggcagaacaatataaatcaggttactgttcattaagagagaaagcagtgcgaaaaggaatgattctgatttgacacaaacccacttcttaaggagataagcacattaacttgaaaatgaaaggtaaattaagatttcgatgaaaataaaaatcttcccaagatttcacacaagagctagtgtttagtttactgtttgttaggtaatatttcatttgctcccatcccaatttccctcccttaaccaatacaaatggaattgtatgtggtgtacattattgtgattgagaagaaacaaagattaaaattaggaactttggtttttttatggaggtagacctttgtatttaatagatttaaaatactgaaccaataatttttgacatctgacatagtcttgtcaacttcgatatccttatcaataatagctgaatttttgagaatgaagaattatgaaaggaatattaaaagtatattccttcagggcaggtaatgttttaaagcatcctttcaaatgaagaaatattgtgaaatatgaatcagttgtctagaaaagaggcttgaatttcagattttaaacacttgtaataaatggcaattttaattaaaatgaacataaagctttatttgtgagtttaaatagataatgaatcatttcctacagcagttgtgattaaaaattttaaaaaaggaaaatattttgttgatgttcttataaacgatttggacgcaaattttcaatgtaaaaaattagacaacagggagagttttgtttatttaaaaacaatattttgaagtttaagaagaaactttctaatagagataatcttaaaacataaaaggctcttccttaagataagctggtacttgtctgcttttaacaaaggatatgggt

SEQ ID NO: 16259 - DNA, 1041 bp, Homo sapiens
agttaaccatatggttacaaattagctttgtcagaattactgctacttttatgggtttttgagatgctcttatgtatctttcagactttcttcagaaaagaccaaatcctttttaagtgttcatttcctatatattaggcattttagatgggtggacgctgtgttgaaattgtagcctctcactaatctgagggcactgtcctttcctcttttgcaggtctttggtagaagagtttagaaagacactctgtgctttatggcaaggcagccagactgcatttagcccagagtccttattttatgttgtttggaagattatgccaaactttaggtaagtattatatgaagatatttttaaacattaatattagtgtttatactgttcctgaaataattcctaatgaagtggttgtattctaaatattctaaatacttaagactggtttggtgtttttttctttttaagaagaagagctgaaattgaatacatctgactaaacacatgtgtttatttaaataatagactatagaaatgtctttaacaagaggtggggtattttgttgctataaacataaagcccttataaataacttatgcgcactaggaaaacatactggacaaaatttccttaattctttcacaatgtagaataattaccatcacacactgtcttgttattccagctaaaaaaattaataagatcagtagaagtgcatggtattatatgaactgttcggagctgagttcggcagctctgggaaggctgtggtcaagcgcctgggatgcactctccagaaggcagctgtgccacatcccggtgtggccagagagctgctgtggtgcccatgctttctgtctcacctcgcttgagcaaaatacacctctgctgtacacctagctgtcagaggaatcctgccttttctcgtaggtctgtcatccctgtagggattcgggtgatagcagctttgaggcactacaggtgtttgacagcagccttggccaccttctgccgattttacccttctgaagcaagtcatggt

SEQ ID NO: 16260 - DNA, 1015 bp, Homo sapiens
cagacaggtgatgctgttggcttaagagatgaacacgtcttctctctgaatttgtttttattggttggttttacttgaacagaaacgtttgaatggtgtgaagattctttagaaaagtgattggatccatctcaattgtgcacttgaacagcagtgatgtaaatgtgcttatttgtgttttcatttttaactgtgcagccttaccacacctattttgaaagctgatcttttgtcctcttcagggcttttcccttgtgccatgttgtctccagcaatatatgtggcttctggctcagagcttctgctgaggcagggcctcgcgctgagtcacatggctccttggaacaagaaaactttctcagaagtccccacacgggtgggtgacagaaacagtttgtggcaacacaaatctctctccatggtggagaaacctttgcttatccactgtattctactcagtgtatagtgatgacagatgtactagaattaaaccagtcaagtgtactggcccggggtgagtgttaaatgtgtatctcgcctgtggaacctactcagcagcttggtttctggggttgggggcatatttatttcttaaagccaaacctctccttcattggtttagtgtacataagtctatttagatacacttatcccactttaatctccaccagcccctaaactctctcctgtaccctctgttgctgaagtggcctcttcacctgggccctggaaaagccgatggaaaaagtctgttcctgcagccaaggcctgggtcccaggtgactaggagtagccataggaaggtgaggaaggagaagtgggcatgtggtgtcatctgtagtccaaggtctctgcgtctcgtcagtgggtgcagtgccttccccctcaggtgtgagcgtgatggactctagactgccttccatgagtgttggtcatgctatgatgtcatcatttgccattaaaacccagtttgtatgatgccaagaggattaattgtgcaagtgactgattcatt

SEQ ID NO: 16261 - DNA, 1126 bp, Homo sapiens
tctccatcttcctccttctgtacctggttttactcctttccagccaccttcatggtgtctttccttccagatattctaacgagcatcaattaaactgaccgatgacttggggacaaaaaatagagttggcctctgcgttccagaagtttgcaatccaattggaggcgtaggagaagcacacaaacatacaagccatgaatgtgtcactaatgtaagaaattacggtatagacagacgagggagtgctttcccatggttaaattagatacatgtttgtgtgtcacatgaggcagtttagtccaagagttaggagccatgtgcttcactgtcagacactggtgggaattctggaatcccacttaccccaggtgtgtgaccttgggcaagttgcttgacctctctgaacctcagttccttatgtgtcaatttataatgccagttcttgttatcacaaggttcctctgaggagtaaaatatatgtaaagctcacatacggcacatattaagtactcattaaatgatgggtcttaggtgtgtagcttttaagtttctatgtataaaatgtgtatttctggtaaatgatgtaagggagtagctacatgaggagtgatgtcattgttgctagtgctttatgatctgggtattgtgtgtgaagcatactcaaaaacaacaagcaaaagctcctccttttaacttgttgatgtcatctacgtcactcacaaatatgatattctgtctttcttgaatttgtaaaattgtactggttttgcccactttttctttttcttttttttgagatggagttttgctcttgttgcccaggctagagtgcaatggcaccatcttggctcactgcaacctccgcctcccaggtttaagcgattctcctgcctcagcctcccaagtaggtgggattacaggtgtgtgccaccatgcctggctaatttttgtatttttagtagagatggggttccaccatattggccaggctggtctcgaactcctgaccttgtgatccgaccgccttggcctcccaaagtgctgggattacaggggtgagccaccgtgcccagcctggttttgcccattctatttcaagaaaaggactgcttactttaaagaccaa

SEQ ID NO: 16262 - DNA, 1124 bp, Homo sapiens
tatattcttttacatctacgttcataagataaacctgtagtttctttctcatgaaaattgtatggtttggggaattaagattatatggtaatttcttctattctttcgagaatgtttatactattggaatgatctgtttcttaaaaattggtggtacctataaaactgttcaggcttggtatttttgtttatgctttatggaaagattgttaactataaacagtttatttctctgagtggttatagagtttggtagttttattaaaaagccataagaaaaatgatggttaatctggctaatactttaattctctgttctgtgaaacatgcatggtggttgttcccaaagatataacacatcctcattaagtttcttgatattagcccttctctgatcttaatcagacttctgaaagtgaatctttataacagtatctttaaacaaaggtgtatcacttagtttgtttagttactagtttagtcatttatagctaatattggtaaaaattctagtgtgtagtgttttctacagggatattgcctcaaacacttgtttttggagttaacatacatcaagtggtcacatctggtcaaatgatcagaagttgaaattctaccttgtggtaaatatattcttgaaaaaagtgataggtatatgcaaagactcattttagtgctcagctcaaatagtaaagttttacttcgcataagtttagatttccctgaaatacataaactcattaatttcttgatcattgtattgtactagcaattaacttagctttcagaattatggaggaaaagctaataaaagtaattatagaacaccagttttggagtaaagggttttttttttttttttttgggacggagtctcgctgtgtcgccccagctggagtgcagtggcgcgattttggctcactgcaagctctgcctcccgggttcatgccattctcctgcctcagcctcccgagtagctgggactacaggcgcccgccaccacgcccggctaatttttttgtatttctagtagagacagggtttcaccgtgttagccaggatggtctcaatctcctgaccttgtgatccaccctccccagcctcccaaagtgctgggattacag

SEQ ID NO: 16263 - DNA, 1032 bp, Homo sapiens
gaaggtgctagccaaaacactcatttctcttcctcctcaggaagccacaaattcttcgaagccccagccaacctatgaggaggtgaggatctgtgctcttggtcttatcgcttttagatattgaggactgtgtacggccagtctgaagtgtagttgagtatgaaccttgagaaaatatttgttactcttgaaggagatctttatggttaatggacagccagaatccaatacaggagtctttcttgagcagagtatctattgcccagagagcacgaaggctttcagtggttactaaagatacttagtgtgcgaagcttccacattcaggagtatagtttctcctcactcccttcctagcctgcaagaggcaagtctttctaaatctggcagttattcattgtcatcaaaataagattttaaggggatacatgtaacaaagacttgtaagctggctcctaatttaaaattttgagagttggtacattgggattgttgggaatggacaaaagctgaacactgaaggatacatcttgattttattagattggtataaggttattacagggtaaaattgatagctttttttttcatatcaactctcatgatttgtcttttcttgaaaaagctagaggaagaagaacaggaggatcaatttgatttgacagtcggtataactgatcctgagaagataggtaagtggttcttaggactccttgtgatgttaggatgtggctgtggaaagcataggtagctaatttcaggatggctacccccagagttgaactagccaatgtgaagtacttcattagtatcttttctgtaaaagtagaccccttgctatgtttctaaggccagagactgctgttactcaatgcgttagtcagtcttttcttggcttcaggaagaaaaatcagagtcatcaaatactactagaatccctttttatttttattcttttggttttttgttttttagagacaaggcctcattttgtcacccagaatggagcacagtagcactatcatagctcac

SEQ ID NO: 16264 - DNA, 1044 bp, Homo sapiens
ttggtggtttttgcttaggctggggagcagttgggaatcaggtctggaatactcctaaccaagaagttgcccaggtatagtaagtttttctctaccgttcacaagttttgtgctgctgcttccctctggaaatggggtttctttctctccgcctacctcagctacctgttctgagggtctcaatctgtttcgtattcccacttctttagggaaggagttttaaaaacatctcttaaaataagaggagcaaaatctattaaaacctattctcctgcaaaggaggcagagactttctctctctcttttttttttttttttggtgtccctatcattaagcaagagcctttctcttttattcttcctgcttccctaagctgctcagggttctctgagtcttgccctctgatggcaagtcttatatataactaaacctatttttgtcacccatcaaaacacatcctcagtagactgtgtgaaggtgtgaaggtctgataatgacttgatgctttgtctccatagacatgaaagccatgccctctgcctctagatagggtgatccaagagctcctgaaccttaggaggttcaaagaagctctactgtctgtgcccaggaggtagcctgccagcaagagccctcaggagttgcacacacagccaaagggtgttcacacagatctctgccggtctagccaggggaggccagagtctcgtcagtcaaggatgggcttcccccttagctgtgtccacagctgctcaagctatactggtcagagtgggctttgaagctcctttgtgagctcgagctgctgactgccactatgggagccttgccacctccagcccctccatcccaaagacgctcctgccactggggccccaggtcctgctgtatcagttctctttggtggggggctaaggtttggggcgaggcaacctgagacaagaaaacgcagtaaacattctgattccctgtacacagatgcagcaccaggggaagggccagtggtgcaagtatttctttttaacaggtgaagtttttggaaa

SEQ ID NO: 16265 - DNA, 1050 bp, Homo sapiens
attgaagatgatatatagctatattcattgacaaggaaaactcatattttttagtgaaaaaagcaggttatagaattgcatgatattcacatttatataaaactttatatatgggaaggatgttgattgaattgttaataactatggtcacctctagagatggaagtttgcattacctttaatttttaataccattttgtattgcttaaaatttgtatgtattatcgttaaaataagaaaaatcaaataaagctattttcattatgggaaaacaatccagtgcatcctttgaggcccgcatcacatatctgttctttgggcagcttcccctgatccgccctctgccctaccccggactggagttgggccctgcgtctgtcgtcctcttcagcctctggtcttcctctcctgtgtggtgtcagctctgaggcggtctctgtagcctcctgagctctggactccctggggtcctgggctgcactgtctctgctcatcctggtgtcctccaccacctgcacaggagcctccggggcagtggctgctcctcggctcaagatcattgccatacaagcctgtgggtcactgaggccagatctggggatttttcaagagatccggaaatctggcctaatttgaggtttaataggcctcaccgtggttggtaagactggtgctcagtgtgctggggaagcctgcaggccccacaagtcttgcccagacaggcctttcacccctttggcccttgtctgttgtggaaatgctcctctggctctgatgaccagacctcggggcagaaaacttcacccacccaaggctgctcagaggaagccagctgctcgccttccacaggatgctctttgtctgggtccagaaaagaaacagaaaaaccctgtccaatccgagacaggacctttccataaagagatgtgactgtttccaaatgactgccccttcggggcttcagagctcgctgcttcctcttccattatgagctgcagtggcgatagccacaggggcccaacacgcaggtttcactggcagcctctcaag

SEQ ID NO: 16266 - DNA, 1056 bp, Homo sapiens
agctcccagcagcaccagcggcctgtcctgagcttccatgtggatccctatgtttgcaacccctccccaggtgaggaggtgcctagatatggggctacagggctgggttgtgggctttgcatttctcggctcctgggaccctcagacagcatctccttcctgctgcccacctctggagccactacctcctgctcctgtcccctggagcctgctttgtagacacaaggaaaacaagtttggcttccctggtctccatttcttcagcagcctgacttctttaccaagctgatgtgaaaagaatgtgacctgggaatgcggaggcttcatttggggtggacagctgctgtctgctgccttggcaggggctcctactcccaagtgggggctgagcccatgagcaggagctcaaggagctgcaggtctgaggccagacctgtttaattctatcccacagagtcgctgcccaacgtggtggtgaatggtgtgctccagggcctctacagcttcagcatcagcccagataaagcccagccaaaggcggcctgtcaccctgctcctctgccaccgatgccctgatcagtccagaggcctttggctgcctcctaagaaagtcatgtgcctctgtcctatgaactccatataaggctgggtcctcctttggcctggacccaggacttaattacccagtgcccagttgtgccacattcccactcaaggctcagaacttggctcgcattggtagctggaggtggtagaatttgtatgctcttagagcccaacagccaaggcagggtcaagaagataagtaataaaagaggaagtcagccaggcgcggtggctcatgcctgtaatcccagcactttgggaggccaagatgggtggatcacctgaagtcaggagttcgagaccagcctgaccaccatggagaaaccccgtctctactaaaaatacaaaattagccgggcattgtggtggtgcatgcctgtaatcccagctactcgggaagctgaggtaggagaatctcttttttttttttttttttttttttgagacgga

SEQ ID NO: 16267 - DNA, 1050 bp, Homo sapiens
ctcggcccaaggcaggagaatctcttgaagccaggaggcggaagttgtggtgagccgagatcgcgccactgcactccagcctgggcaacaagagtgaaactccgtctcaaaataaataaataataaaggaagaagtcagctgggtgcagaggctcatgcctgtaatcccaatactttaggaggccaaggcaggaggatgcttgggtctggaagtttgagaccagccagcgcaacatagtgagacctgtctctaccaaaaaaaaaaaaaaaaaaaaaaaatcaatttagaggtaggctatgaaaaagtacagatacatcccttaacatagactggagggtggtggcaaggggagcaaatgtggaggcccagtagctggcaaagtttagaagcagggggcaaaagctcctgcctgacttttcctgggtagctcctgggtcaaaatttcaggcaggatcccagggaaggggcaggcacccattgccacaggagagttgcaggcatgttgggatgtaggcctaggggaggtgctgcaggctcaagaaccaggcccacacattatatattaaaaaaaaaaaaacccacatttttttttattggtcagtgttggtaggagtttgttacaaaagtgagtccatgggcctgtggaatgtgaggggagtgggtccgctccaccagatgccagcaccggggccagtgcagctcagagccctgtggcggactacagggcctgcacagacggtcactcaaagaaagatgtccctgtgccctactccttggcgatggcaaagggcttctccacctcgatcttgccgcagtctgcgatgatcacatccttcaggggtttatcccggctgtctgtcttggtgctctccaccttccgcaccacctcctggaaaagaaaggtggaagcaggagggcatggtggatcaggaggtccaccgctcaggagaaaggccccagcgtatggctcaggagggctaagacccacaagtgatcaacagcacacaaaactggaggcaccaaaattctaacagactcctggccagagc

SEQ ID NO: 16268 - DNA, 1053 bp, Homo sapiens
gggataagagggatatattatcaaggtactttatttaatttggtgggaggggaaagagaaacatctttttgtaatccttggaaagtagcaattaaattctcctgaatacattctgttattctctttagaggttttttcaaactagtccacaagttgtttaataatcctcaaagaaaaccccaaatacaatttaaaaatgcaaatggagccgggcatggtggctcatgcctgtaatcccagcactttgggaggccgaggtgggcagatcacaaggtcaagagatcgagaccatcctaacatggtgaaaccccatctctactaaaaatacagaaattagctgggtgtggtggcacgtgcgtgtagtcccagctactcaagaggctgaggcaggagaatcgcttgaacccaggaggcggaggttgcagtgagccgaggtcgcgccactgctctccagtctggcaacagagcgagactccgtctcaaaaaaaaaaaaaaaaaaaaaaaaaagcaaatgggtgtggttctaattgaagagtaaagataagcgtttttatttacttaaattattttaaataaataaaaagtaacattcttgggagttgtgtgtagatgaggatttttctgtcaggttggagaacaaatcaactaatcttctagggaaaggttagcctttgactcaagggcaaggatttccatatctctaatatgatttatatgccttgaaaatataggatttgtattggagaagcaccaagactggtcagggttccaaatctgagttgtagggatcaggtgaaaagcagtcaagagttgagagagatgacttgtcgctattctgatggaggagaaattagtggacagagttcatcctcaagtgaaaagtattgtgagagaaaagtgtttttgacaaaagatactgctcttgagaaggcatcatctatagacctcttggttcaactggataatttgctataggatttgttatatattatgggatattccaggaaactagaatttatatccttcccactaaatttctatttgtttaagggt

SEQ ID NO: 16269 - DNA, 1032 bp, Homo sapiens
tcttcctgggatatgtatttgcgttctaaaagagaacccaggagcatctggcaatgtggatgatggtttttggcaagcggccttgctttattttctcatctattgatcaagcaaactaccacctgatacaaggtcaaatgatttcaatctctagatagccaatcttctttgtgccacaaatttgtgtagagaagggtaggaaactataatcctgatctatggaatactatgaaggttacaggaattagaaatctaattaaaacaagtcttgttgatttctgaaggatacctctttttcatgatacttctcctttaacttatattgtatctcatttcctgaggttgctttgaacagcatgtagaagtgcaggaatcctcccatatgtttccagctagaggtgctggcaactctctttatgaatgtctctgatatataacattaaaatataacagaagccactaggcttcatcagacatgggaatcccatacccattttccctatggttggcttttctgtaactttttcccactgtttcttttttcttttttttgagacggagtctcactctgttgcccaggctggaatgcagtggtgcaatcttggctcactgcaacctctgcctctcaggatcaagcgattctcttgcctcaccctcctgagtagctgggattacaggcacataccaccacacctggccatttttttttgtatttttagtagaagcagggtttcaccatgttggtcaggctggtctcgaactcctgacatcaggtgatacacccgcattgacctcccaaagtgctgggattacaggtgtgagccactgtgcctggcctccactgtttcttttctgtgtttaagggtagcatatgaatttatttagaattgatgttagccctatttttatcttatttattgagtaaagagtttatcagttttaaaagttgtagcttttgggttgggcgtggtggctcatgcctataatcccagcactttgggaggccgaggcgggtggatcacttgaggctag

SEQ ID NO: 16270 - DNA, 1046 bp, Homo sapiens
tgatcatttagtcctcttaaaaaaagaaaatcgaaaaggttttgttagtggttgttttaaaatcaagtgcactacactgttaaatggctttaaaaatatgtgctttctcctgagccatgaactagtcttcctttttatcttctaagattagtatggccaacatgactaatttgtgccagaaaaaattcctctagatcctcaaccctcctgagtaatggcagaggatcagcctagagaaggtagaagtgatatagaaaaggctatgggttcaactcagggtaaaaaggtagatgagagccatctcgttaaagcttctcctgtgattcccctggaaggagcccatgctgtttgccagcattttatctgccagcagcagatgtaagctctcaaaaacagcagggaggatgttgactgcaacaatgcatcaaggctgtggtttgtaacctcaatagtaaggcagttaaaactttttttttttaacaaagacattttgattgccaaatccataaccattagcagctgtggtttgaacagttctctagacctaacaagttttcaaacaaaaagttgagttggtggcttttgtttctacgtgtctgtgttgtgtttgtgctatttatatccctgccttcaatagaaaatctgatttgtctgaaatctccaaggtcattgattattctatttcttctgaactgaatccattcctttcctgccagcttactgaccctttagtctatttgatcttacagcttttacaatagccaagaccctatcttcaaggaattatgctgaagcagttatactgctgggtgcctgtttccaataattgacggcagtagacttgtagtcttccaatagggaagagaatattacttcttcctttttctagaaaagtatcttcaggatctaggagaatttgctggaagaaaagtaagcaatttttaaaactttaaaaaaaaaagagtatccaagcaacatagatcttcaggaagattccaagtatcacttcgtttgtggaaatcatcagcttctatcaccaatgaatt

SEQ ID NO: 16271 - DNA, 1062 bp, Homo sapiens
gtaaatgtccatgattgtctctaacagagaagcaaatggaacccattttctcacatagaggtgcagggactgattgggtggctgcccttcagattataattgggctgaaagatgcagtatgttcagctaagaatacatcctggtgccagggagttttgtcccttaataatgttgctttgccatataagctttgcctcccagggagactctgagaatggggcagcagaatgagaaagaaaagggaaagagactgtgcttcagtttttgaaagatagagaaaattgctggcaattacttttagaagcagaaaatttgctatacagtttcatgtaaccataagcaagaacctgctttctcaattccttcccctgttccctcaacccttttggacagtctggtcctgagggtgcctttccatattacctttggctattgaaataaataattatttaaataaatgtttggaagttgctaggagattaaaacatgctgtgcagggagagaacatttctggactgggaggagcagaagaggcaagttaaaggaaaggaagttaggaaccatgcagaggagcggtttttgagaaacaacaatctccggtttggggcataataggtgctcagtgagtatttgatgattagtactataatttataagcaaagtctttgaaaacttctttaaaattttctctctgagaaatgggcttgcctgtggtttgggacgtttctatgtagggataacaaacagaaccaaaatagcaaaacagatgttttgatataatctaagaattgcatcctctcaactgggaactgtcatgaagaggaagaactcataaaatttgggaagtttcttgactgaattctgtggtgcagagtagcagtgttgactactagccaatgaggaagatttgaatattgaaattactggctgggcctggtgattcatgcctgtaatcccagcactttgggaggcctaggtgggcagattgcttaagctcaggagtttgagaccagcctaggcaacatggtgaaaccctgtctctacaaaaattagccgggcatt

SEQ ID NO: 16272 - DNA, 1034 bp, Homo sapiens
tacaggtgtgtgccatcacgcccaactaatttttaaatttttttagagacggggtcttactatgttgttcaggctagtcttgaactcctaacttcaagcgatcctcctgccttggcctcccaaagtgttgggattacaggtgtaagccactgtgcccagctgagacccaacaatttgcgttttaacattagctgtcctgttgattgtgatacacactaaagtttgatatctactattgtagagcacccttccctcttaatagtgaaattgaaattaccaaaaactttaaaatgtaacgctgggcagtaggtatgatttttttcttttaaaaatatccttatatatctttaactctttgtggacaaactgacaggaacctaaaattggaatgaatatctaagggcttaggactttcagagcagaagagcagaaaagatattcaaaaaagacccacttttctcatctgaatggaggaagtaaataatagtactgacctcatagggttattgtgaggattaaatgagatgaaaagagttaagcattcagcacagtgcctagcattatagtaagtaaccaataaatgttagctgttgctgatgttactgttcttagctttgaggtgcaaggtcattgtgaaattaaggagaaaggatatccttagagactttgaagaattaatcccctgaaggctttggaaaacaatgaatttatgatagctaatattccagctcctactgatttccaagaaggcttcagggagagattgattcagagcatttggaggcattgaagtttggggttttgttgtttgattggtcagtttggaagtgtgtgttggacttcttttggcagagggctgatctcaggttgagaaccatggcttttgtttattctccattaaggtcagtttctttggtatataaccaacttcttctgaattattttcctaagaattgaaatgaagataacatgattgttttcatacaggaagtttctttcctctctctgctaatccttgtaaggtacagactagt

SEQ ID NO: 16273 - DNA, 1029 bp, Homo sapiens
tgagacggagtctcactctgtcatcccaggctagagtgcagtggcgcgatctggattcactgcaacctctgcctccccgattcaagcaattctcctgccttagccaccccagtagctggaattacaagtgtgcaccaccacacctggctagttgttgtattttttgtagagatgggtttcacccacacttgaggctggccccaaactcctagtctcaagtgatccttccgccttagcctcccaaagtgctgggattagaggtgtgagccactgcgcccacccttttttttaaaattttttaatcctgctttaattttttgttgttgttgttatttctgaaataacattttacatttgttgttggtcttgtcttaagcaaatgggattatatttagttatgcagatttaggaagggctcttccttccttctcaaataaaaataaccaggaaaaagcagtcgttttcatatgttctacctgggacattcattatagtctgggtacagcattgtatgtatcttgaaaactactgtactacctttgacagtgaggtgttttacccatagttcaaaattgctgttactgcctagagatgacactgctgtgaatagtataccttattcgaaggcttggtgcttttaggcatggactggtggcatctcttggacaaggcattgcaattgccctggaggactggccaaacaagttttcatgttgaaaagctgagtaaaaatgactctgggtgtaggccaatatagtatcactcgggaaaaagaaaagcacaatatgcctctccctgggaagcagtttggccagggcaaagctcccagaaatggaaatttaagcttgttgatttgggaaactcttggtatttgcccctcagcctttgtgaaatggatcttctttttaaaggggggaggggtaggatagaggagacttaaaggcttaaaataatgtcccctctgaaccatctaatcacctccttagaactaagcaggtaaggctgggcgcagtggctcacatctgtaat

SEQ ID NO: 16274 - DNA, 1424 bp, Homo sapiens
agtttttgaagaattactcttgatgtcatctgcagagtggattggagaacaagattggaggcatttaggaagctgttagcatagttagcaagacagctggaccagaatagtattaataggaaaggagcaaagtgggtagatttgagagaatagaagttcaattgatagcatcttggtaattgataccatgttgggaagagattgaagaagaagtcgagagtcatgtccagattttgggcatgaaccaagctgttcatggaaccacttactcataggagggaacactgaaaaggggcaagtttgcagggaatgataatgagtttaacttgggacatgttttgaggtgcttgcactgcctgtgctggggataatgtaagcaaaatagatttggtcctgctctttctagggcatacggtttagtaggggagatagaatggaatcaaacaatcatatgcacatctatcattttacactattaaaattataaaagtgaaagttataggatgctgagagcctataattaggaactgaaccattcttggcgggtgcagggcggggggcggggggcgggggcgggtcagggaaaatatccgtgaagaagtttgagtaaatatctgaaggataaatggtagttaatttggaagagggagttgaatgaatgaacaaccaagtagaaatgtctcttgaggactggatgtgtgagagagagaactggaaatctaaagatttaagagtttattaatgtgaacacataaatggtaattgatgccatagaagtgagtgcacttacccaggaagaatgtgtctgtattgaatgaaaggggctcagtatgggtcactgaggaacaccaagaaggtagctaccttagttggcatattgggaactgcttccttgtgtcctagagagaatacaaaacccacagctgggaacatatgtctatacaaacattttaaaatccactgaaagaggttatagaacttgcttggttctgtagttagaattggttttattggattgaggcacactttgaggaaaagttcgtttctcatgccacttatgaacaatggaagagtgatctttgctttttattttaaccatttgccatattttccctgcctggcatcatcactctcaacttttttagttttccttttttcttttttgacctaattttcagttatttaaactctcaacttctaatagtattaaagtgaaagcatagatattgtaatcaggcctatgtttgaatcccagcactgactgccatttaatatatataggatcttctgcaaattacctctccgtatctcattttccttagattttatatggttttaatttaaaagatctaaaagtacactgtaaatgcacagtatatggaggttatagtataatagttacaggtcagcaacaaatgtttgtt

SEQ ID NO: 16275 - DNA, 1066 bp, Homo sapiens
gttttgttccgttgatcaacatatctatccttatggcagtattacaatcttgattactcatctttgtagtaagtgttgagaattgtgagtctttcaactttattcttctttttgagatcgttttggctattctgagtcctttgcatttccatacaaattttaggatcagcttgtcaatttctgcaagaagcaggctaggattttgatggagattgtattgaatctgtcagtcagtttggagagttctgcaatcttaacaataaaaaatcttccaatccatgaacatgagatgtctttccatttatttataacttctttaatttccatcaatgatgttttgtggttttagtgtacaaatcttgccctttttcttttttttttttgagacagagtctcactctgtccaccaggcaggggtacagtggcacagtcttggcttggatcactgcaacctccacccaccagtttcaagcgattctcctgtttcagcctcccaaataactgggactacaggtgcacgccactaagcccagctaattttttgtatttttagtagagctcgggtttcaccatgttggccaggctggtttccaactcctggcctcgagtgatctgcctgcctaggcctcccaaagtgccgggattacaagcatgagctaccacgctcagccctgttttttcttttctttttttttttttttttaagccagtcaaatttaggggttgtacaccaaaatcttgcacttcttttgttaaatttattcctgaggattttattcttttagatgttattttaaatggaattgttttcttgatttcatatttggattattcattgctagagtacagaaatactattgttttatatgtactgatcttgtatctcaccaccttgtggaattcgtttgttggctctgatatgatttttgtgcattccttaggattttctatatatgagatcatgttatctgcaaattgagatccttttacttcttacttacaacctcgatgtcttttttctttatttcttgtctaatttttctagctataacctccagtacaatgt

SEQ ID NO: 16276 - DNA, 2075 bp, Homo sapiens
gaggcagaggttgcagtgagccgagatcatgccattgtactctgcacttcagcttgggcgacagagtgaaactccgtctccaaaaaaaaaaaactgttatttatataaatatgtaaagtgaaacagggtctctgtcacccaggcttgagtgcagtgatgtgatcatagtttacagtaaccttgaactcctagcctcaaactatcctcctgcctcaacctcccaagtagctaggcgcatgccaccacccctgattaatttttaaaattttttgtagatatgaggtcttgctatgttgcccgggctggtctggaactcctggcctcaaatgattatcctgcctctacctctcatagcactgggattacagtcatgagcctggacaaaaatgttatataaattgaatcgtaccatatgtaaccttctgggattggctttttcaatcagcataattttctggagattcatccaggttgttgcgtgtatcaatagttcattcctttttgttgctgaacggtagtattccatggtatagatataccacagtttgttttaccatatacgtgttggaggtgagctgggctgtttctagtttgggactattatgaaaaaaaatggctatgcacatttatatacagttttttgtgtgtgtgtgaacataagttttcatttctctgggacaagtgcccaagagtgcagttgctgggtcatatggtaattgtgtttagttttttaagaaactggttttcagagtgactataccattttacattaccaccagcaaatgtgtgagaaatctagtttctttgcatccttgccaatatttactgttatctctattttttattttagctatcctggcaggtatgtaatggtacctcaatgtggttttaatttgcatttctctaatgataacagtgttcaagttattttcgtgtgcttgtttatcacctgtgtattctcttcagtgaatcatctggatgtcttttgcccactttctttttttttcatttttattattttcattaatttttttctttggccactggaataaagactcaccattttctaactgagtgatgttttttaaatatatattttttagagacagggtctcactctgtggcacagagtgccattgtagctttgaactcctcagctcaagctgtcctcccgcctcagcctcatgagtagctagtactacaggcacatgccactacacctggctaatttttttatttgtttgtggagacagggtcttactatgttgctgaggctggtgtttaactcctggactgcagtgaccctctcatctcagcctcccaaagtgttgggattacaggcatgcgcccctgtgcccagcctatggcatgattttagaagtggtttatgactgtatagcctcttcctgttcttgcttgttttctgagcctgattctccagacttcctgggaattcagtgagtcacccactactaacctttcatcttttgcttgaatcaactagggttcgtttctgtatgcaactagggaccttgagttatatagtttctgaattttgagagtaaaaaccacaatacatattaaagaagtgcaccatctaaccagggagatgggacttaatgaaatactagaactggccgggctcagtggcacatgtctgtaatcccagcactttgggaggccgaggcaggaggatcactagagctaaggagttcgagatcagcctgggcaacctagcaagacctcgtctctactaaaattccacccccccccccaaaaaaaaaattagctggcaggcaaggtggcatgcaggcctgtcccatttactcagtgccagctactctgggggctgaggtgcaaggactgcttgagcctggaaggttgaggctgcagtgagccggaattgtgccactgcactccagcctgggcgacagagagagaccctgtctcaaaaaagaaaaaaaaaaaaaaaaaaaaaaaaggccgggcacggtggctcacacctgtaatcccagcactttgggaggccatggtgggcggatcacctgaggtcaggagtttgagaccagcctggc

SEQ ID NO: 16277 - DNA, 1028 bp, Homo sapiens
actggaaagtcatcataaaccaaatagcaggaaaaagtactaattcataattaattattcaatgatgaccctttgatgaggattatctcaagtttacatatgtattccccagtgattcttttctccaactgaattgtctaatttgcaaggaattttttagaagaaatggttccaagcaagctatgctgcgatccctcaaccacaaaagatctaattttcatagaaaaatatttgaattttttcaacagttacaaacacaaagtaggaaacaaaggtcctagccttaccaagttgcataatttctcattttaccatctcacttaggaatggtcaatattatgtttgagaacagtaaagcaaaggaaataaaaaaggtgccacttttgaataattttactcgtgtacactctaacaaaatgtgagatgccaaagaaacaacactacaccagatggctattaaatcaaatgcttttctttacaagtcgatgaatcaatagactctagtgaatgtgctcagttaatagaactgcttaggctgggctaggtggctcatgtctgtaatcctaacactttgggagcctctggtaggcagattgctggagcctaggaattcaagaccagcctggacaacatggcaaaacccatctctacaaaagacaaacaaaaacaaaaattacttgggcatagtagtatgtgcctatattcccagctacttgggaggctaaagtaggacttgagctcaggaggttgaggctgcagtgagctgtgatcttgtcactgcactttagcctgggcaacagaacaagatcctgtctttaaaaaaaagaaagaaagaataataaactgcttacagcccttgaagagaaattcttagagagttatttgttctgcatatatgtcaaaacaacctacttgagatgaaatattcaaaattataaatgaaatcttttaaaaaagatgatacagaaatctttcttctgttcatgtagtggtaatgctggtgcaaagatgggtatatggatataaag

SEQ ID NO: 16278 - DNA, 1080 bp, Homo sapiens
tgcattccagcctgggtgacagagcaagactctgtctcaaaaaaaaaaaaaaaaaaaaaaaaagaaaacctgaagattcagtgaagtatagaaaacagaaatcacccataatcctacatgtagcaataacgcaataactaccttttttttttttttagttggagacagggtctctctctgttgcccaggctgagtacagtggcatgatcacagctcactgcagcttcagcttcccaggctcaagtaatcctcctttcttagcctcccaagtagctgggaccacaggcacacacaccacacctggccaatttttttttttttattatttgtagagaaaatgtcttgctatgttgctcaggctggtctcaaactcctgggctcaaacagtcctcttgccttggtctcccaaagtgctgggagtacaggcgtgagccactactcttgggtaattttaaaatttttttatagagactggagcctggcaatgttgcccaggctggtctcgaacacctggtctcaagtgatcttcccgcctcagcttccccaagtgctaggattacaggcatgaaccactgctcctggccagcacttattttaaatgccagccattattctaaatgcttcatatatatatattagtttatttaaccctcatgacaatcagatattatctatttgcattttatagatgaagaaaccaaatgaaaggttaaataagtgatcagtttcccaaccctaattaaaaatttaacagaaattattgcccttccctcctagccactaaatacttagcactgctttactagtctttcacataatgccagtgtatttagtctgtttgtaatctgttaacaccatgttgaccagttcttggttgttatatacagtgtttaccttccgatttttagcctctgtaatacagttacagcattacctaggtttattgagtttttttatagttactagatttagtgtatacttagttatcagtatttgagggaatttcaaaatattatttatatcctatctgctttttaaaaggatttaatgccatttataataaataagtcatacaatgaa

SEQ ID NO: 16279 - DNA, 1034 bp, Homo sapiens
actaaactaaggaggacagtgagtacttactttacactgacctatacattcatttaaaagcattctttaattgaagtactttattttattttattttattttattttttgagatagagtctcgttctgtcacccaggctagagtgcagtgatacagtaatggctcactggagcctcaacctcctgggctcaagcaacccttccacatcaacctcttgagtagctggaactaaaggtgtgcaccaccatgcccggctaattttgtttattttttgtagaaacaaggtctcactgtgtgggccaggctggtctcaaactcctgggctcaagcagttctcccgcctcaacctcccaaagtgttgggattacaggcttgagccaccatgcctggcccaattgaggtattttattttagatgcatcttctagccaggcaaggtggctcacacctgaaatcccagtgtcttgggagactgaggcaggaggattgcttgagcccacgagtttaagactgtagtgagccatgatcatgtgactacactccagctggggccacagatcgagaccttgtctctaaaatgaatgaatgaatgtatgcatgagcctcctgagaagccatggagaaagaagcaagcatgaccagtcagtgactgacatttaaactgtaagaaaaattgacttcattttatatgaactttaaaggagacactctgtgtaggtaggtacttcaaaatatgtgtaagtgtaattgtatcagaataggtggccatgatgtgatttgatgagactgccaagagctagacattctagccatttcttaaaaggccagttagctaaacactagttaggattcatttatttaattgattcacagcttaaaattaagtgtagtaaaggaaacagatatagaagagatagggaaaggtttagagttggagtgtcttcagctgcttgtggagggcgtggtagagacagtgttaactacttcccagttttaccttgggtgacccttgttacagatcactgcttctgagct

SEQ ID NO: 16280 - DNA, 1125 bp, Homo sapiens
ggaggatctcttaagcccgggaagttgagactgcagtgagctgctgcgatcaaaccactacactccagcctgggcagtggagtgagaccttaaaaagaaggggaaggccgggtgcggtggctcacgcctgtaatcccagcactttgggaggccgaggcgggcggatcacgaggtcagaagattgagaccacggtgaaacccccgtctctactaaaaatacaaaaaaaaaaaacaaaaattagccgggcgtggtggcgggcacctgtagtcccagctacttggaggctgaggcaggagaatggcatgaacccaggaggcggagcttgcagtgagccaagattgccctactgcactccagcctgcgtaacagagcgacactctgtctaaaaaaaaaaaaaaaaaagaagaggaagactgtacagactactagagattatggcaacctctttctcaatcttgttttcttgttttttgtttgttatttgtggagatggtatctcactttgttgcccacgctggtctcaaactcctgggctcaggtggtcctcccacctcagcctcccatagtgctggaattacaggcatgaaccaccatgcctggtctgtagtctttttttttttttttgagatggagtttcgcccttgttgcccaggctggaatgcaatggcaaatggcaaactctgcctccagggttcaagcaattctcctgcctcagcttcccaagtagctgggattacaggcatgtgtcactacgtctggctaattttgtatttttaatagagatggggtttcaccatattggtcaggctggtctcgaactcctgacctcgggttcgggttatccacctgcctcagccttccaaagtggtgggattataggcatgagccaccatgcctgtctgtggccctcagtcttaatagtgcaaccaagaaaatgtctcagctacccaaataggggagatggtttacacatcagaatgttatctggggactttatctcctgaatttggtcctgggttgctcaaatgaacactagctagttccattttagctcttctgatggagcccagtgtagactggtacaggaattgtggaggatgtccctgccttgtgtggacatgttc

SEQ ID NO: 16281 - DNA, 1054 bp, Homo sapiens
ccattcccggccaaaaaattaaaaaaaaaaaaaaattagcctagcatggtggtgcacgtgtagtcccagctacttgggaggctgaggtgggaggattgcttgagccagagaggttgaggctgcagtgaaccatgatcaccccctgcactccagcctggacgacagagcgagaccctgtctcaaagaaaagagaattatcgccaggcatgtctgtaatcccagcactttgggatgctgtggcggttggatcacctgaggtcaggagttcgagaccagcctggccaacatgacaaaacccagtctctactaaaaatagaaaaattagccaggcatggtggtgggagcctgtaatcccagctacttgggaggctgaggtaggagaatcgcctgaatctggaaggcagaggttgtagtgagctgagatcacgccattgcactccagcctgggcaacaagagtgaaactccatctcaaaaaacaaacaaacaaacaaaaagtattaaaagataaaggacataaagtgttgggaaactccagagatctcctctttaaattctctataagtctcttttcaagcttttgttttgttgtttacctccctagtaagctaagccctaggagccatgatggcacttcttagcatttcaaagactgagaattagcttaacttttgttggtgtagttattaaggcatctaatgaccttaactttttaatattcctataccttattttccctcttggccccaatttcctgacaatccctgctcttatattttaggtatatgaaaagatggcaaaatgagtccttttctgatttttttttctccttttttgagacagggtcttgctctgttgcacaggctagagtacagtggcacgatcacagctcactgcagccttcacccccgggacaaaactttcctcctgaaatgggaaaagttcccttgtccccctcacagggcgtgcaatgggagtgtggctcacttcttcactgccctgctgctcagacctgtagggtaacatacagaggggcaggctatggggctccaaccc

SEQ ID NO: 16282 - DNA, 1023 bp, Homo sapiens
aaatctatgccttaaaccatggaatcagggccaggcacagtggcttgtgcctgtagtcccagctactcaggaggctaaggcaggaggatcacttgaacccaggagttcgaggcaacagtgagctatgattgtgccactgcattccaggctgggtgacggagtgagaccccatctcaaaaaaagaaaagaaacatgtaatcagcatggatccaacactggttgactatggcaacttaaaaacgaacaagtggacgggcacggtggctcacacctgtaatcccaacactttgggaagctgaagcaggtggatcacttgaggccaggagtttgagaccagcctggccaatatggtgaaaccccgtctctactacaaaaattagccaggtgtggtgatacatgcctgtaatcccatctgaggcaggagaatcccatgaacccaggaggcagaggttgcaatgagccaggatgtgagagaatatgcggctgtctgtagaacaggaggagcagagacttttttgagacagagtttctctcttcttgcccaggctggagtgcaatggcgtgatctcggctcactgcaacctccacctcccgggttcaagcgattctcctgcctcagcctcccaagtagctgggattacaggcgtgtgccaccacacctggctaattttgtattttcagtagagatggggtttttccatttcggtcaggctggtctcgaactcctgacctcaggtgatccccctgcctcggccttccaaagtgctgggattacaggcgtgagccaccatgcctggcccctgctcactattgtaataacatcctgtcatcagatttcttctaccaccatttgactgaaatatttctcataccagttttccagaggtcttctctcagtccttcctagacttctattagctctcttatttctttattcttgaaactctcctctcttgccttggtcataaatctcatttctctttataactggttattctctctattttgtgccagtctctcttc

SEQ ID NO: 16283 - DNA, 1075 bp, Homo sapiens
aagcgcctgtggtctcagctacttggaaggctgaggtgggaggatcacctgagtccaggaaggctgaggctgcagtgagctgtgattgcaccactgcattccagcctaggtgacagagtgaggccctgtctcaaataaataaaataaaattaaattaaaaagttagctatctcctgctcctattctcaatcagcatgttcaagatggagcttggaaccaggtgcagtggctcacacctgtaatctcagcactttaggaggccaaggcagaaggatcatttgagcccaggagtttgaaaccagcctgggcaacatagtgagacccgtctttatttaaaaaataaaataaataagatggagcttggacttgcctattgtaaaaaatgctccccaagaaattatggtttgctgccatcaccactgttctccaccaaccctgtttgagaaccactgacttagactgcagtctagcagcaattcagtgaggctagttaaggtaaaatctgactgatttaatcaacaccacatctgcctttggggctgtattaatttcctgggctgctgtaacaatgtaccaaaaactgagtggcttaaaacaacagaaagttattatttcacagttcctgaggccaggcatctgagatcaaggtgttggcaggaccatctgtctcctgcagctctagggaagaattcttcttttcttctgctctttgctggcaatccatagtgttccttggcttgtagctgcatcatcccagtcacatggctgtcttccctctttgcatatctgtgtccaaattgctccattttataaggacaccagtcactggattagggcagaccctaatgaccttatcttgataacttgattgcctctgtaaagaccctatttccaaataaggtcatatgctgaggtactaggggttagaacttcaatatacctttttttggcaggggaagggtgggacagggacacagttcaattcataaaaggggcaaatgaaaatttcagaataattattgtcacaagttggagagagaagattttctagaaatgtgcataataatgagagaca

SEQ ID NO: 16284 - DNA, 1076 bp, Homo sapiens
gcagtagatgcctgctattatgagggattagataggagcagtgagccattgctcagctcctgttcagtgtgggggttccccagccagttcatcacaggtatcagagggcaaacactgtgacaggagctgtcaggaggactatacaaagagaaagcattattgacatagcaaagacatgaggtgacctagatgtttgtaagccactctggcagctacagctgagggagcaggcctggttagagatttctcacaggtgttctccagacccgaacactgtagttttatgtagattgctcccctcttgggaaggaagtagagctgttttgtttctattcacgtgttatgtattacctctctcactatctcattaaccagtgttgtcaccaccacacccaactctgtgtactaaaatttgttgttcagaaattaaaaaaaaaaaaacttaagacatgaaacctgagagcccagtttacatttttcttttatttatttatttacttagagaccaagtctctctctgtcacccaagctggagtgcagtggtgcaatcgcagctcactgcaacctctgcctattctcatgcctcagcctcctgagtagctgggattacaggcgagccaacacacctgactaatttttgtatttttggtggagatgggatttcactatgttggccaggctggtctccaactcctggcctcaagtgatctgcccacctcggcctcccaaagtgctcagcttacaggcatgagccaccatgcccagccttatttttattttatatatatatttttagccgggactacaggcacacaccaccatgcctggctaattttttttttttttttgagacagggtcttactctgtcacccaggctggagtgcagtggtatgatcacagctcactacagcctcgacctcccaggctcagccattctccccacctcagccttccaagtagctgggactacaggcacgtaccaccacacgtgactaatttttatattttttgtaggtacgggggttttgccatgttacctaggctgatctcaaactcctaggctcaaacaatcctc

SEQ ID NO: 16285 - DNA, 1046 bp, Homo sapiens
atatgtatctccatagccccttactacagataggaagtcattaaagattgattattaagtgataggtataggtattacaaccttataggctagatacaatatagcaatatggaagattcttaaaagcatagcgccaagtgggccgggcacggtggctcacgcctgtaatcccagcactttgggaggccgaggcaggtggatcacgaggtcaggagatcgagaccatcctggctaacacggtgaaaccctgtctctactaaaaatacaaacaattagctgagcgtggtgatgggcgcctgtaatcccagctactcgggaggttgaggcaggagaatggcatgaacccgggaggcagagcttgcagtgaaccgagattatgccactgtggtccagcctgggtgacagaacgagactccatctcaaaaaaaaaaaaagtatagcaccaagttgaggggaaaaaaaacagaatagaaaaaaaaaaattatagcaccaagttgaggggaaaaaaaacagaatagtccaggcatggtggctcacgcctgttggatcactgaggtcgggagttcgagaccagcctgaccagcatggagaaaccccgtgtctgctaaaaatacaaaattagccggcatggtggcacatgcctgtaatcccagctactcgggaggcaggagaatcgcttgaacctgggaggcggaggttgtggtgagccaagatcgtgccattgcactccagccaggacaacaagagcaaaactccatcccccgcaaaaaatcagaatgatatctataacataatactaaataagcaaaataaaatatatgaaaacaaaacaataatatatataatatacatttataagaacatatacaggctgggcatggtggctcacgcctgtaatcccagcactttgggaggccaaggcgggtggatcacctaaggtcaggagttggagaccagcctggccaacatggtgaaacctcatctctactaaaaatacaaaaaaaattagctgggcatggtggcaggtgcctgtaatcccagctac

SEQ ID NO: 16286 - DNA, 1030 bp, Homo sapiens
tcccggccaaaaaaaaatttttttaattatccaggtgtggtgacatgctcttgtgatcccagctacttgggagactgaggtgggacgatcgcttgaggctgtactccagcctgggcaacagagcaaaaccccatctccaaaaataaaaataaaatgtgtcttgacaaaaccatgaagtctttacaactgttacccatcctaagggacctcagtagcattgtaggcaattcctatggaactattctggcccaatcctatttgtcccattggtacccagagtacctcctaaaccctcttatagaagtcagagtgctgatcaaaagaatactattctcagtggcaaatggggtgtgtcttgtctatatctatgtgctcttattttccagggatgttggtggtaaatgtaacgtggaggaacaagacatatgtaggtacactccttgactgcacacgacatgattgggcacccccaaggtaagcacttacagctatttagtttatattattctgaaccacactaattggtgatcccttatacttttatcctgctagagttgtacatccagcttttaaaggacatgatggtatagataccagggaaagcactgtatttatctgacattcaagaagactgaatggccaggcgcggtggctcacgcctgtaatcccagcactttgggaggctgaggcaggcggatcacctgaggtcaggagttccagactagcctgaccaacatggagaaaccccgtctctactaaaaataaaaaattagccaggcatggtggtgcatgcctgtaatcccagctgcttgagagggtgaggcaggagaatcgcttgaacccaggaggcagaggttgtggtgagccaagatcacaccattgcactccagcctgggcaacaaaaagcgaaactccatctcaaaaaaaaaaaaaaaaagaagatgaattgtgtattaaagtgttcggggggccgggtacggtggctcacgcctgtaatcctagcactttgggaggccaaggcgggtggatc

SEQ ID NO: 16287 - DNA, 1046 bp, Homo sapiens
acacgccaccatgcccagctaattttttttgtatttttagtagagatggggcttcaccatcttggtcaggctggtctggaactcctgacctcaagtaatccacctgcctcagcctcccagagtgctgggattacaggcatgagccactgcacccagccaatttttattttattttatttatttatttatttattttgagatggagtctggcactgtcacccaggctggaatgcactggcgcaatctcagctcactgcaacctctgcctcccaggttcacacgattctcctgcctcagcctcccgagtagctgggattacaggtgcacgccaccacacctggctaattttttgtatttttagtagagacggggtttcaccatgttagccaggatggtcttgatctcctgaccttgtgatccacccacctcggcctcccaaagtacctggattaaggcgtgagccactgcgcccagtcgtaattttttttatttttatgtttttatagagaccagagtccctctgtgttgcccaggctggaatgcaatgatgcagtcatagctcactgcaatttccaactcctaggctcaagcagtcctcctgcctcagcctcccaattaaccaggactacagatgcatgccaccacacccagatgatgttttaattttttgtagagaggggtctcactatgttgcccaggctggtcttgaactcctggcctcaagcaatcctcgcgcctcagcctcccaaagcacagggattcatattaatgttttttaaaaagcacttttatatccatagcaggtgttttttccatttgacaggaaaggcccagacaagttagcttaatttgtctggggttacttgagacctcactagcagagccaggattagaacccaggtatctcgattccttgtccgtgtttcctccactgtttggttcctatgaaatgagttattgatggtctctctattttttagagtaggtccaaagtatactcagttactgagtttctttaacaaggattttataggttgagttagaac

SEQ ID NO: 16288 - DNA, 1286 bp, Homo sapiens
tttatactctttgtactgggaaagtgaggatgatttggtagctttattggggtcatgtcttccccaaggtgtggggagcttagcttacttggcttttgaggtatcatccctctgttctcccctcctatctttccatgaccctctggattgagagagagagataaagactgacagacaccagtgtaggctggaaaagggagtgtgtgaccagagtgccaaaagtgactaggagcaggaacttggctccgactcagtttggaaaatgggaaataggggacagtaagcacaatgcccagtagtagttgatttccaaggaccctggaaccctacacttgagaggcttagggtcaccatctgctcaagaggatcccctctgatctacaggccttttccctaggtttctgcctcctcgtttttgttcaagttgggttctgagtcctccccaaaaaccattgttttagacctcttggcagggccccaaaacagcctccctcatacccatcattccctctgccttctgctgccctcatgggcagtgctctgagcagtgacctccctttcctccgtggaagtagctagtgcagacaccgtcatcccaccccacctgagtcaccccaaccaagagggtgactgaatttcagcctgattatgccctcctggggctcctgtgaggtggagccaaggttccctctctgttcctgtttgtttttaaatattgttgtgtgttttgtatctgtggcactggcctgcagcatactctgtatatattgtaaagaaaccgttaggagtaattttcttttgcattgggcaggcatggccctgcattcctgccctttccactcattctgtaacacagaggacgaacttctgtattagctgggcagccttgggttctccagaagagaacaggtttttcttttcctttttaatttttcttcttaaacatttggctctttgatcctcatatccaagtctcccctgaagagtaggagctgctcagaagagcaggtgaaagccaccatggcagatcctgatgcctgccgggcctagtcttccctctgaaataacatgaagcagcagctgtggagattcttgacaagtgctgagtgaaagatttgctgcccacctctacatggggaggagaaacacaggtgggagctacctgtggcatccatgacctagtcagagggatgagatgctcagcaggggtccccatcctatcccaccccacaaacaaaggctggaaaaatttgctaccaagggccaagaccaccagaccaagcctg

SEQ ID NO: 16289 - DNA, 1001 bp, Homo sapiens
tgcaggaggccatgaccaaggcggtgggtctgcccgcagctgcggcagcgcggcccagaagatgcgttgtgtttccggtagttttctgtgaggattgactcaacctggtcctcatccctattccttgttggcgtggggccgaacagggctgtgccatttgggaggatattaaaacaaaatcagaaatcttaagagaactacacacatattagcaccattcctagtctgagtccaggcccacagatctgttatctcagctcataatgcagatcaataacctcagctgtcagggtagatcaacaatctcagcatctcgcacacatctcatgtcaatcgtcaaggctgctccaagcactggcttaggtcatctgaagccagaactctgtagatcatgagcacagtcacaacaagacagtcgtggaaagcgtcgtcactaacttgttcacggtcacttcagatcacaatcagtgcaagttacttcaatcgatcatgcaaggttactagttcagtcacctccattcattatccctactggtccttatgacagattagtgcctgaaggccacagtcaccggtgcgcagacccctcagatcacagtccttgtaggttacaatcacagacacttcaacacaatcatcaaaagccccgactctgttcacagtcaacccagattgcaatcaagagaggtcacattatctcagatcacagtgggtcactctgtcacctcagattacatccattcagttattcaacaaataattattttatttatttacttatttttgagatggagtctctctctgtggcccaggctggagtgcagtggcacaatctcagctcactgcaacctccacctcccgggttcaagcgattctcctgcctcagcctcctgagtagctgggattacagacatgtaccaccatgcccggctaatttttgtatttttagtagagacgaggtttcaccatgttgcccaagctggtcttgaactcctgacttc

SEQ ID NO: 16290 - DNA, 1032 bp, Homo sapiens
ctggatactaatctgagtctccaaaaaggagaaagggttagggatcatttggtctcaccttccctcctgcttttacagaaagggaaccagagaggtatagtgacttgtttatgtcatgcagtgacttgacagcacagtgggacatgaacttggagtcttggatgtgcagtcctgatcttgctcccagcactgctcagggaagacattcttcctgctctgccttcccacctctcctcccaggctcctgtgatccccacagggagagctagagcttctataaaaactgctgtaattgattcttaacaggaagtgagggctttttcactttgagttgacaaccacagcagctacacacacacacacacacacacacacacacacacacacaaacacacacacaaacacagacatacagttaaggtttaaatatctgtcccctctgaaactcatgttgaaacttattccccaatgtggcagtagtgaaaagtgggatcttcaagaggtgattgggccatgaggactctgccctcatgaatagattaattcattcatggattaatggattaatgggttcatggattaatgggttatcacgggaattggactgttggctttataataagaggaagagagatctgagctaacatgctcaaccccatcaccatgtgatgcccttcagggcctcaggactccgcagagtccccaccaccaagaaggacctcacaaggtgcagcccttcaaccttggacttctcattctccagcactgcaagaaagaattccttttctttataaattacccagtttcaggtactctgttacaaataacagaaaaccgactaagacacacacaccccaagtttgtacacaaccatgtgcacacacacagtcacttgcccatactcctacgcattcaggcacccagctgggaacacagcgtgcctttctttctagtgccacaagatacccatttataggcttccagcttgtgccctctgacctgccttacattttgatagtagagggtggattt

SEQ ID NO: 16291 - DNA, 1117 bp, Homo sapiens
gacagggcttaaaagtcctgggcaattagctgggcacagtgtcgtgcgcctgtaatcccacctagttgggaggctgaggcagaagaatctcttgaacccgaggtagaggttgcagtgagccgagatcgcgccactgcactccagcctggatgacagagtgagaccctgtctcaaaaaaaaaaaaaaaaaaagtcctgggcagcaaggcctccacttcaccccctaaaggttgccccaagagcaccgtgtgactgctaaggtatttccggagtctaaagacgattattcaggtctcatttgcatacccataatacactgcaaacagtatttttttcggaaaaacatttatatattgcttgacatttttaagtatgagaattttgcatgcagaatttttttgtataaactttctcaggtagtaacccttgggattagtagacaccatcagtgtactaggaattgcagttacccgaaaattgagttacagaagtaactggtatactctggtttctcttcagatcgcataaatctttcgccttttactaaagatttccgtggagaggaacaactctgagtcttaacccaattttttgaggccttgctttggcaaggctatatgtggtaatccaacaatagaaattatttttaagtttgtgtgttcctttttctgttcaatggtgcttttgatattgttgtaaagcagtgactagcagattctgtgtggtaaaagcactgaaccctgtttagttcttttctccctaccttattggtaattatttctgtgtatatatgttccaaagaaatgcggcttgtatattcatgcttttcaactttttgtgatagacagttgatacacaagtagtacctcctccgggatcttcttagtcaagactgtttggtagatgcatgttttttgttacttgtaatgtacagtattcagttcattttctttttgcagcactgtccggttgaaacacaacgcgaggatcgggcgtggtggctcacgcctgtaatcccagcactttgggaggccgaggcaggacaatcaagaccaatcctggtcatcaaggcaggagaatcaagaccatcgaggtcaggagatcaagaccatcctggc

SEQ ID NO: 16292 - DNA, 1120 bp, Homo sapiens
gcgcccttccccaagtcacatctctcgctcctcaccgaagggaggaaccactattctgaattctgtgttaatcattgacttgccaattttttctctttcaatttaatagcagtctttatttaaaagaaatcaaactcagacgtacaaatacacaaaacagataaaacccgagtctctgaccaggaaagcgttattttccagccagccagtcttcggcttcgccccctaacggtgacataaggcactctgtgaaatgctctgttccggaatcaaaagattgatccgattatttgcatacccataatgcactgctcacagtacaaatttaaaaaggcaaaatcaaacatttttattctaagcatattctgtgaaagttagacttttgtttaaacaatactcttaaaatttttttctaggtatagaaccttggcattcactagtcaccatcactatactaggagtttctgttacccgagaaacgagttatgaaattaacaagcatactctggtttctcttcagatcgtataaatctttcgccttttactaaagatttccgtggagaggaacaactctgagtcttaagctaattttttgaggccttgttccgacaaggctatataaagctgttaaaaaatcagattgacttcatttagggtgtttcttacagatatcgtttaagttttcggttctgcttgtaaacgcttcaatcgctcatgcgtttaaactttgtgtaagtgcaagcgttctttttctagtgaagcttcttccaacaagttagaagtatttacttcagtgtcattaatgtgaaagattcttaaaagtgttctggctgggcgcggtggcttatgccggtaatcccactgcattgggtaaaccaaggtgagcggatcacttgaggtcaggagttcgagaccagcctgggccaacgtggtgaaacccacgttgtacattgttttcttagtcttctgaatcctgtgtatattttgcatttagcgcatctcaattaggactagctgcatttcaagcgctcaatcggcacacatggacaatgactaataattgccctgtgcacctctgctaggtgtaaaacgtttgaacagagcacagtgtgtagatccg

SEQ ID NO: 16293 - DNA, 1048 bp, Homo sapiens
gagtctcgctgtgtcgcccaggctggagtgcagtggcgtgatcttggctcattgcaagctccacctcccaggttcacgtcattctcctgcctcggcctcctgagtagctgggactacaggcgtcccccaccatgcccagctaattttttttttttttttttgagtagaggcagggtttcacggtgttagccaggatggtctcgatctcctgacctcgtgatccacctgcctcagccttccaaagtgctgggattacaggcgtaagccaccacgcccggccataatgtacatatttttgagacaaagttttgctctcattgcccaagctggagtgcaatagtgtgatcttggctcactgtaacctctgtctcctgggttcaggcgattctcctgcttcagcctcccgcgtagctgggattacaggcgcgtgctaccatgcccggctaattttttgtatttttattagaaacggggtttcatcatgttagccaggctggtctcgaactcctgacctcgggtgatccgcctgcctcggcctcccaaagtgctgggattacaggtgttagccactgtgcccagcctaatctacatattttaaataactatgggcatgaatcaatcatcatcactttggaatctattatccgctttcaaatctattatccaagatttagaactgtgcacttaaatgacagttgaatcttaacaatactttaattgacccataatatattattttgaacccccttacttgtttcagcttttggacaccaccaatagccagaatatctatcaaattcttcttggagaacaaaggtagcgactccagctgatctggcatcttcttccatgttggctagctctagacaaatataaaaggcaaaattatcacagaaagctatcttttcataggtacaaagcaaaatgattcagtttatttggaaaggtggctggaatacagtggtaaactctggagctgaacggactgagttcaaatctggggtccataatgtctgactttgggcaaatcatccaatctcattccact

SEQ ID NO: 16294 - DNA, 1050 bp, Homo sapiens
cctatcaccattattatcctcatttcatctgtaattacttgcatcttttaataggctgggagttctaagacagaagggactgtgtctcacttctgttgttccagtgtttagctttgaaacccaggcacacagtaggtactcagtaaacagaatgcgaaggaccgtccagagacaccagtcccaaacccttttccaggctgatcggtcccccataagtctccagccttttttattttaaagcttattttaaagcatgtccctgaagacgagtggggagagcagaccacccgctgattccaattccctaggcggccgcggcgagctgcggcgtctctgtgccccggcctgcccctatcccgcctgcgccccgcccccgcccggctcgcgccaaggcccgctgctggcgccgccgccatcccggcgcgtcactgcgcaggcgcggcccgcgagcgtggggtatctcgaggtgccgggttgcaggcgctcaggagcgctagggtttgaggcctgctttctgctcgcgccagcagagcactacctgaggcagcgaggcgcagcgagcctagcctccccgcgccctgggcagtgtggccatggagaatcaggtgttgacgccgcatgtctactgggctcagcgacaccgcgagctatatctgcgcgtggagctgagtgacgtacaggtaaaggccgggtcgggcggcgggaagcgcgcgggatcgcggctccgggtacccgccaggacccctgccccctttgtccgcgtgcgcgccggagagcctgcagtgcgccaacaaggtcggcgacgcggtgcgcttacggcgtgctggcgcttttcgaggctcatctgcagatctcgggccgggggcacaaccccccgagggctgcaggaaccttcgggtccccagagagctcggcctgggcctctcaggctaccccgggcctcttctttgttcgcagtcggcggccttcatggagcccaggcccggccctggctgcctggccgtcggggttcgagttggctggggcccttcgagatgtgggatgagcttg

SEQ ID NO: 16295 - DNA, 2200 bp, Homo sapiens
catcctggctaacacggtgaaacctcgtctctactaaaaatacaaaaaaattagccaggcgtggtggcgggcgcctatagtcccagctaccaggaggctgaggcaggagaatggcgtgaacccgggaggtggagcttgcagtgagccgagactgcgccactgcactccagcctgggggacagagcgagactccgtctcaaaaaaaaaaaaaaagaaaagaaaccagtggttctggctctggatgaagcacttcatttatttgttcagtaaaaatcgtttatggagtacctactcttgtctatcattaagctaggtgtggggttcttggacagcactttaacactctctgctttctatagcatgacccacagcttatgtgtaagtgtgagttttaaagtgttaagttccagtttggaggcattggctctgtctccctccatcctgacacagggaactgtccagtcatcacatctctattctgtcttggatgctgcagggctagtgactatgagagaacacggctgatgtgaggagaaatggtggacaataaagacttcagcagtggcatcgtctgtgcttgaggtgaacggtagcaaagaggccagctaaagcagggttactttcaagattgaatttactttcacgatgaacataatgaacgtgtttgtcccgagaaacatagttgttaaagcattggtttatttacaaggtgcttgtttgttttgggtgttgtgagcagagaacagagcgtagctgtgtttgagagctgtttgaaagatattgttcctgtccttacctaacagagtctggtggaaagagtgctaactgaacacatgagattgggtccttgttcttattacacttatgctctagtgaccatgattcacttaacctttatgaacctgacgctcttcatccagacagatatgaacagtagtgcctaactcataggaccattttgagatttgaattggaaaatggatttgaaagtgctttgcaaattctagtgtgcagttcaagtgagtgattatgatgattgcgatattaaaccttagatgagagggatggtcacagagcaatggaagaatagagcctattagcagacctattcatatatgaaaagttaaggtatgacaagaggcgctcttacaaattaatgaggagagaatgacccattcaggaaattgtactgggacaattggtaatccaaatggcaaaaagaaaataagatcctgccttatgccatacacaaaaatcagtttcaggtgcattaatgacctaaacgcataaagaaaaactactaaaaagaaatataggagactatctttataatattggaaagggggagaatgtgttaagcaagatgcacaaaacacaaaccctaaagacaaagattggcacatttaagacaaacttgaagaagacatttgcagtgcatatcattgagagatgactaatatcacgactatttaaagaacacctacagaccaataggcaaaagacgtattacctaatagaaaaaggggcagataatataaacatttcagagtaaaaggaaacaagaatgaccaataagtctgaaaagatgcttgactgcaattatgaccaggcacatgtacaggcataccttgttttattgtgctttgctttattgtgctttgcagataatgcggttttgacaaattgaaggttgtggcaacaaagtctgttggcgtcatttttccaacagcatgtgttcatttagtgtctctgtgttgtattttgttaattcttggaatagttcagattttttcattattattatatctgttctggtgatctgtgatcagtgatctttgatgttaactttttttttttttttgaggcagggtctcactctgttgcccaggttggagtgcagcagtgtgatcatagctcaccgtagccttgaactcctgggtttgagcagtcctcctggctcagcctaccaagtaggactacaggtacctgcctagctaattttcaattttttaatttttttagaggtggggtctcattatgttggccaggctggtcttgaactcctggacttaagcaatcctcttgccttggcctcccagatccctgaggttacaggcttgaaccactgtgcctagccttgatgttactattgtgattgtttattatttatttatttatttttgagacagggtctcactct

SEQ ID NO: 16296 - DNA, 1133 bp, Homo sapiens
tgaccactcacaatggtccaggcacagtgctaagtactagatattcagtaatgagcaacacatataaaggcactaccttcagattgagggagacagacaatagatatgttaataaataattacctagataaagtgctatgagggaaataaagagggtgatgaaatagagaataattggtagaggctattttaaatagagtggtcagggaaggcttccttgaagaggtgatattctagccgggtgaaacttgaaagttaaaacaaatggtgcagaaagctggggcaagaacattccaacaagtccacagacttagaggcaggcaaaggcttagtggggttccaggagcagaaaggatattagtatgtttggagtgtagtgaggaataagttagagggagatgaggatagaagggtttgcaagatgtaggtcatgtagagccttgttgccatggtaaggagcttgggttttattgtaagagcaatgggaaactattaaagagttttaagcagagaagtgactttgtaggatttgtgtttcaaaaaagattattctggctgctatgtggattataaaggggcaaaagtgaactctagaaaaccatttagggaggctgttatagtagtatgggtaagagatgaggtggctcagtttagggttgtggaggtggaaagccatggacacatttgagatatatctgaagagaaccttgaggccttgatggactcgttggagaggaagggaaaagaattaatgactagtcttaagattttgacttaagcacagagtagatgacaactgaaatgattaagactggagaagagatttaggggccaaaatcaagagtccccttttggacatactagtttgagagtcttgttataaacaatttccatgtgaaaatgtgaactagtgatataactatacaaatacagagttcagggcagtagtctgggtgaaaatagaattttatagtatcttagacttaattgattgtaaaatgcaccactattttatttttttccctcatgatgaggggaaaaatgctgctgattatactgtgatacaagctttcttattactttgagtatttttaatttattgaaagagctctctgagagtttatttaaactgt

SEQ ID NO: 16297 - DNA, 1046 bp, Homo sapiens
acacctgtaatcccagctgctcgggaggctgaagcagaagaatcgcttgagcctgggaggtggaggttgcagtgaattgagatggcgccactgtactccagcctgggtgacaaagcgagattccatctcaaaaaaaaaaaaaaaaaaaaagatcaaagcccaagacccaccaaaggtgtaacatgtaataggaaatcttctccataaaccgtatttcagagaggactatacacttagggttaggatgaactagaaataagcccattccatctgcctgtctccagttgccttaacacttagctaagtattaatagaagaaaaggtccttgagaagttaaaactgtaagttggctctcaaaggttatgtagcccaaattcacacaatttaggagaaccaaaactctaaacttgagaaccctcaagccatgcatttagtttaaagtggcctcaactggtaggacccctaggtccctggcagaagcaaatgcagatcgatcctctgtagtagctatgctgatatcacacaaaatagacttttaggcacaagtgtatttttagagatagaaagggcagttcataatgataaggtttcagtttaccaggaagatacaacaatattaagttatatgcatctaggctggacacagtagctcatgcctgtaatcccagcactttgggaggccgaggcaggcagatcacctgaggtcaggagttcaagactagcctggccaacatggtgaaacctcgtctctgcaaaaatacaaaaattagccgggcatgatggcagtcgcctgtaataccagctactcaggaggctgaggcaggagaatcgcctgaacctgggaggcagaggttacagtgagccgagactgagccattgcactccagcctgggtgaatttttcaaaaaaaagaaagaaaatattaaacaagttcatatcagataaaatggataaattccaagaaataaagacagtttctataaaagagatagaaaacctggatagcccaataaccattaaatacatggattcagtagtcaaaaat

SEQ ID NO: 16298 - DNA, 1050 bp, Homo sapiens
aaggcagggaaggtcatagagggagattctgttgtctgaggcctaaagtgtcccaacattataacaaaaaactgtaacaagggctgtgggagttataagccagaaaccgttgccgaaaacctatatatacatatacacatatcataatatcacaccaggggtaatatttttttcttgggtttgttatgtctgtatacctattcttcaaggctgggaaaggaagtcctgctgaaaatacatgctggagagcaatgttccttgtatgtttctctgtgggagtaggagcccaggctggtgaggacctggaccaggtatttgtgtgggagcttaggagcattcaggaaggaaaaagggttgaagtcatccagatatgcctcatacacctgtctcctgctgggactattgcttttaatagcttactgctttgctttgctttacagctcttacaaacttaaggaaaggatacctgtttatgtataatcttgtgcaattcttgggattctcctggatctttgtcaacctgactgtgcgattctgtatcttgggaaaaggcaagtaagacatttttggattaattttccctttctcagtagtttggcccagtattcaccaaagggagcactctctgcctttgatgttaataataacccctgcatttgtgcagcaccctctacttttcgttgtgctttcatagctcttatttcccatggccttgtgaaataagctgactggtattctttccatataacaggtaataaaatataggcctagagatggtcaaaaatggttcacatccatagctagccagagccacatcttgggctagaatccttttgtaaaaatgttcactaacaactaaataaattgatgtgatacttccagtgccaaagttatgcaaggccaaaagggttctcacccttttggagcctaaatacgttctaaaatgaactattctaaaacagaataaaaagagcatcataaagatattagttcttcttaaattaatttatgtgtttagcaggattctggctttgaccagtggcattccat

SEQ ID NO: 16299 - DNA, 1048 bp, Homo sapiens
aatagcttcttggaagaaattttattttgtttatcatctttggcaccatggaagaaatgcagaacaaagctgtggttttctttgtgttttatttgtggagtgcaattgaaattttcaggtgggtagaaatgccaggatggtgtttgaatgctgctccctgtttgcagcagctctgttcttgagggagttgttatcttagccagagtctcatttggtttgggactaagattacatatgtggagaattctggttgcacctatgtgctctgcaaagttgagacagatttttttaaagccgtcattggatcataataccagactggatactagggagcagaagaggagaaccagagaaagggaagactcatcttaccatgacttcaggatcttgcagtcttggaaagagaggacccatccacatggaaaaattcttgaaagggctgaagaaacaggaggttgaaggagcaatccaggttggatagaactaatttaagactaaatttctacaagggatgatagaaatgaatcttataccacaagattattgaagtttgaaatggcctctaacccaattttcccgttctcggttgttagtagcataaatatcttttaagaaatggatctagttaaagtagatgtattcttctttaccagaccatacacactccatatgtcttccctttcagtcagctggagcaaggattttgcaaatgaacttctcagctccaggtttggtggtattttgacaaagttgctagttgagagagagaacaggccatagcagccttaaattgtgtcttaaccatggtctgtgtcccatggcacccagtgtaccctctaatagccttaatacaaaggtaaaacagattataggtcctatgtttttcaaatcagacacgtaatgtgctgatgtaacaaggtttgagggaagcacatctcacacaggagagtgaaaatccagttatcacacttatgagctataaaaggatcagattatgggtccttaatgcaatgtttactgtttgagaaggaacatttattttctcaag

SEQ ID NO: 16300 - DNA, 3257 bp, Homo sapiens
gaccaacatggtgaaaccccacctctactaaaaatacaaaaaattagccaggcatggtggtggacgcctgtaatcccagctactcaggaggctgaggcaggaggattgcttgaacccaggaggcggaggttgcagtgagctgagattgtgccactgcactccagcctgggtgacagaatgagaccctgtcgcaataaataaataaataaacccactggggaaaaattgctttgtgtctattgtattgttaatttgttctaaattgtactccttcctgagccgctgcaataagctttttgctgtggaatatgacgacagctagatactgtccctgccacaagagcttctggttataaatagacaaagactctaatttctaattgacctcttttctttttcaggtttatacataaattttcgtcacctttataaacagcgcagacggcgctatggacaaaaaaagaaaaagatccactaaaaagaaagatttagatggcttcttgccagtttgagcctaatctgattcttacagttttaccttcttgaaccaatgtaaaagtttttttaatgttaaatgattaaattctcagtgaggctatcttccttttccccagtaacattcctgaatttactgttatcttattgtagtacttgcatgacatggattcctgatatctgatgagaggttcattcttgtgtattcagttaatgacaccaaaaggctcagcccaccccaaccctatctcatgttcagtctgtctaatacatgccagagatttttttttcaaaaagtgctttatccctacaatgtactgacagttcttacagttgagatttgttcttttcagctattgcttgtgaaaaaaagcaagactatgtcactctatagaaggctgttaaagtgactcaggcaggaattaattattctgtacctaaggggttacttgtttaatgggatggcattgactttttgaaaatcaagtggactgagtcattgataaaacatttctaagagtggggctagagaacatactttacatctgacatcctttggcctaacaacatctattattatagtgctcagcagtgtgggcattgaagaggcgcagaatgctttgaaagaaactaatcagaatcttggaacatcatgatcatgccattcttaagtaaatcaactattttcaacactgaagaaaaatgaaacattatttagaaaacaatgagattacaagttccaaactcagccaggaatgtggctcacacctgtaatcccagcactttgggacacctaggtgggagcatcgcttgaagccaggagttcaagaccagcttgggcaacgtagtgagacccctatctctacaaaaaataaaaaaattagctgggtgtgatggcacacacctgttgtcccagctactcaagaagctgagatgggaggatcctgagctcaggaggtcaaggctgcagtgagccgagattgtgccactgcactgcagctggggtgacagtgcaagaccctgtctcaaaccaaaccaaaccacacacacacaaacacacatacacacacacacacacgaggtccaaatggtagcagggatccaaagggaacacagtatgtaggtcaaactggcagtaacagtgtacagcctttgacaaactagaaatattagagtaggccaaacacacctccaaactgtaaggctgtgcacaaacataaaaaatggcagccttccatctcctgcactggctgagtccatttacttgtgtacttgttctagtgagtggtgggactgtacatttttgaatagacctcaaaaatacttcattctgctgctgttcagttggctttttaaacctgtctgcagtaggacactgaaaacagcaagaacttcggggtgaacacccgctgatcctttaacaaggatttctggcaggaaactcacaaaaaggagaactgaaaatttagacatacagttggccattgtaaaaaacatcagtttcctctcatacattccaagtaaaccaagtaaaataagtgttggagtaacacttgcataaaagaatttaaggagtgatagctctttctgttctgccattcccaacattcctgggggaaaggagactcaatgagttaatactatttcactgagcccaagatggaaacttggtttgacctaaaacatctgattaatataggctagctgatttcttaaaaattcgttgcattgaaggatattttgcatgtctgtaacacctgtcaatacttgtttgtattgatttctgatattcttgcagctgactacgtgtaattgggcagatcagctttgcagtagattatgctgcatcctcgtggcaaaattctgtattcttagtgattgttacaaacccctttattgctgtctgagaaagtgaaagattgtgtatttctattaaaacatttacaatcaaaattctaatgactgtgcttaaagataatttagtctaatggttctctgttagtgataaagacctttgttcaggcaaaatattatgtagcagttcagcatgttaaaccaaaaacagttgctctggttgaagcctgagagttacatggaaggtggtgcaaatgaaaaacactgatgatgcagacaaagccttgagaagttgcccaaagtcataaagctagctgataaattggaaccataattaactttggaatcggatcggtgatctgtcaggattacctagccagaaccttgcttaggcaatgaggcctaatcagtgtcagaaataaggaaacctcatgatttatgaatctatgccacttagaaagttgaaattatattaaagtgataagacagaccaaaagcaaacgacctttagtttcatagtgaaaccattttctagaaaatcaaatattttattttcattaaaaaaaaaccttgaataataggaatcattttacacattaatggttgctctttaaaagttagaatctcaagagataccaaaagcacttaagagttaccaccacattttgcccaagttctaaggaaagttctgaaacttagtggtggtgtgtttgtactcagcaagctccagacagtctgagttgctcattccatgaacagaagcttgaaaatgcccttacagttgagatataaacgagggaagaggtgaagctttcaggaagccagagagcccctgccggtcaggtttcctgaggaaggcaggggtgctctatgctcatcagtcattcaagcttctcaggaaatgtgcc

SEQ ID NO: 16301 - DNA, 1076 bp, Homo sapiens
gctgggattataggcccgtgccaccatgcccaactaatacttttatatttttagtagagacgggggtttcaccatgttggccaggctggtctcgaactcctgacctcaggcgatccacccacctcggcctcccaagttgctgagaaccaccatgcctagccacacctgcaatctcaacactttgggaggctgaggcaggtggatcacttgagcctaggagttcgagaccaacctgagcaacatggcaaaactctgtctctacaaaaaaatttttaaaaaaattatccaggtgtggtggtccacgcctgtgatctcagctacttgggaggctgaggtgggaggatcacctgagccccaggaggtggaggctacagtgagccatgattgtgccactgtactctagcctgggcaagagagtgagacttgtctcaaaacaacaacaacaaccaaaaaaactggttatttactaaaagaccttcatgtgaaagttacatagaatactttttctcctgggccaggtgtggtgactcacacctgtaatcccagaactttgagaggctcaggtgagaggactgcttgagttaaggagttcaagaccagcctgggcaacatagtgaaacccccatctctactaaaaatgaaaaagttagctgggcataatagtgtatgcctatagtcccagctacacatgaggctgaagatgggagtattgcttgaacccaggaggttgaggctgcaatgagctatgatagcaccactgcactccagcctgggcaacagaatgagaccctgtctcaaaaataaataaatatataaagaatccttttttctcctaatctctctctctctctctctctgtgtgctgtcttctcggtttgcaacagtcacagcagctatgttacaaccacagaacaaggttttgcaacagtatggccttgaaatagaatactgcccagttgaaaacttaagcaatcaaaatggaatatatgaaacaatgcctgctagacttcatgtgttgcttcttattaaggaaagctattgcctttttcaggagaatgttactctttaagtggcag

SEQ ID NO: 16302 - DNA, 1082 bp, Homo sapiens
aaaaatatctagctcagattctataaacgtgtgaactcattttgaactttaaattcagatagaaaatgttttaaaacaacttaactgcctgtttctccattgtttttgaaattcttaagcgtaataccactttgagtgaaaaagaatctccatgtatctagttagtaaataaactgctgcctatagaaatcacaggaagcaaattcatctaatcaagacctattttcaaaaaaatcatggagtcataagtgaaagtatatgccctccttgctttgttgtattttattttatttatttttttaagacagagtctcagtgtgtcgcccaggctggagtgcagtgacacaatctcggcccactgcaacctctgcttcccgggttcaagctattctcatgcctcaggcccacaagtagttgggattacatgcgcccaccaccacacctggctaatttttgtatttttatagagatggggttttcaccatgttggccaggctagtctcgaactcttggcgtcaagcaatccgcccaccttggccttccaaaatgctgggattacaggtgtgagccaccacacccggcacttgctttggttttgactcacagtatgtcagaattattagtttcctaataccccctgtttatctgtagtggcttgggtttttttggcagaggggtctctaactttgaaccaatctgataaatgcaactattaaaggtcattttagtttctgtgatctgtatggtgatgtttataaaccctatgcctcatatgttaaatgtttttcattttgcctaggtctcagtcctgaggtcacacccagtctttgatgaaacgaagtatattcattttgtccttccctacccactaacagcctttgttgttttcatttctgatacattacattttaatatcataaattattcatttagtttaggatttatctttgaagttgttatcttctaaagtagtaagattggcatagcattgacggtaattaatgcctgtcatcaatgccaagggcatctgtgattaaaactgcatgtttaagacagggtaccgtatctgtgctaagcagatg

SEQ ID NO: 16303 - DNA, 1050 bp, Homo sapiens
ttacaccagtaggactagaagttttaggaaggtaatttaaacaaactaatcagtaactaaactatatatcagccgagagtgactatcatttgagagctactctagcaaaagctgtttagagtgcaaaattaactacaacccttgctcactgagcttcagttgtcctaattcatctgatttatagtgggaaaaatactttgaaaataattcattcacttccattattacttcagtccaggtattccattcttcatggtcacaaagtaatgtttaaatgtacttttatgaggtaaatattgagatcccagctatagaaagatataaatgcccttttttaaatttagtaaaggcaaagctagggaaaaaacatttttaaaaattatagcgacaaaataaaattctcccatgatacagaagaagggtatcccttgcgtattctatattgtatcatgggagataattggtagataaaatcagccaatgattgcatatagaaaagttttaaaaagtagttggaaagagatggagttcatgctgttttggaatgtgaatgaccaggtcagcctctgagataagaagtgttcactcatatttatcctgaaactattagaataaccagatttattagtaagattagtcttaatcttctaattagtactttgatgggttgtttttaaatacttttaaattgtatgttacttttaagaactcatgatttaaaatgtggtcttaatatatagtatagttttacgtggcattgttctaaaaagtctatacagagatatgattgagtttccaattataatgtaacaagttttgatttattgtttgtatgcagcccctgtattagagattaacagattttaactttaacatgttatcttcttttactgtaaaaatgtaagcgtaaagtcaaggagttaagatttggaagcctgacttgggttctagtcctggctcctccacttactgttagttgtacaatcttaggcaagttacctaacccttttaggccttaatttctccatctataaaattcatatatatttt

SEQ ID NO: 16304 - DNA, 1785 bp, Homo sapiens
aactgggagagtaaacaaaaataaggtacattctctgttcttaaggactttataatctagtcacagggaacaacttttaggcagtgcagtataagaccaaacgtgttacatacagatacttattgtggaggaatttagtgacattcatgcggttatttatttatcacaacacatgttatatgttgcagtacagcagtaagacagacacagttttgatccttacagagtttaacacttagtaaaagaggcagacactaaattatttttgataagtgtcatgaaataaaaatagagtttacatataacatcttaagttgcctattttgtatcattctttaattacaatttaagttttgttcaggaggtcactgataaacacattatctttttttcccttccaagaatcgtttgggattttagcatgtttgttaagatgtactctgccgaatgcgtctgatagtgcaaatttatttattttttgtgtggtacaatgtcattgtgtgtaggcaatttttgtttgtttgtttgttttttggggtaaaggtagactgaaaatactcttatggtttactttgaatctaagtccataaacaatgtaatgctattggcttacctcttttttttttttttgagaccgagtcttgctctgttgtctaggctggagtgcagtggcacgatctcatctcacgacaacctccgcctcccgggttcaagtgattctcctgcctcagcctcccgagtagctgggattacaggcacccaccatcatgcttggctaatttttgtatttttgtagagacagggtttcaccatgttggtcaggctggtcttgaactcctgacctcaggtgatctgcctggcctggtttacctctttaaacaaagatttatttgactggtgaacctttccctctgacatggaaaaacctttgtttcttttcttacccaaagggcaattgttaaaataaagggttgaatctaatcagtggctgtttgaaaataaaactttaaatttatgtattctctgttcagtttccttagggactttgatgcaaatatatctcctacctttatgtatcttttatcctaactatgataggtttattcacactaagtattgtggtttcttttttccttcagagatttaccgcattgtttctcagaagcaaatgtcagacagacgcgaaaatgacatgtctccaagcaacaatgtggttcctattcatgttccaccaaccactgaaaacaagccaaaggtgcagtgctgtcagaacatctaaggcatttctcttctcccctagaaggctgtgtatagtccatttcccaggtctgagatttaaatatatttgtaattcttgtgtcacttttgtgttttattacttcatacttatgaatttttccatgtcctaagtcttttgattttagctttataaaatcatccacttgtcccgaatgactgcagctttttttcatgctatggcttcactagccttagtttaataaactgaatgtttggattcctcagttattgtttacttttcatcatggaagcctgtcactgtatgtaggacataatagaacttgatcacttgaagctcagacctattggtcttgatcaaatcaaactaagaagaccttagaaataagctaccattttgccacagagcagcttataggtaatacactcttctctcagtgcagtgtacatttccacaaatctaagaattgccctataaacatagcaggattttgagagcttgaaaattttccattattctggacatga

SEQ ID NO: 16305 - DNA, 1032 bp, Homo sapiens
cccacccccatctctatctccatttccccaaatgttgagaggcttgtccactcgtacagtgccccctgagaccgaccattcagggtgacccacaggtgcttgggtggacctgcctagaacagcagttgtgcacgttcatggctctgatccatcaggtatccgtgggtacagctcatcccaacaccctcctactggtatcacgggcatgggggaagcaacgttcccccactactctcatagcttaccggtaattgctgccatttcaccaagtgtctgttgtatttcaggcactggctttgaacttctcatataatgttcctaattctcataagcaaagtcttgttttagcagatgaggaagttccatgtcaggcaggataagtggcttgccagtagtcagtgtggggattggagagctaggatttgaacttagatttgtctggttccatggtcacccttcaatcaaagctcatcaactaatatgagagttcagtgtctcccaccaccgctggctttgtgatcccaggcaagtcgctaatcctgtttgaactccagctcctcatctgcaaattgaggaaagtgaaagtgcatctccatgggcccttgtgaggcataagtcagacgaagcatgcagccaggattcagtgagtgttcactgctagtgtgaatgtgcttattactagaacacaggttcctggatgggggtctgattagtctttccacatccccacctgccccctaagtcctagcagaggaaacatccagtatttcacatttcagtgaacaggattccacttccaatgtcctgggaaggaagtggaagtgtgtgaaggccaatccagagccccaagcaggacctgcttctgccccgtgtccctgtgctctcgggggtggagaccacgtgactagggcaggcatgccactgagctcacaggtgtggttctgcactacttcatcagcactcctcacgtttatgttgagcccgagaccattctcagcccctagagtctactttcataaagctgtcccaata

SEQ ID NO: 16306 - DNA, 1050 bp, Homo sapiens
ctgtacttgactgtctgaaaccattgttctcctgtcattctggtcgaattcgcttaaggcacatggtgctgtttgctgactccgtgcaggatgttcatctatctggtcccatcatatgcactacaaaatcctgactagcaaaaaatatgactatatcatatgtatgcgctattaaattataactgtaagcccacatgtctacaagcaaacctgactgtcacactcagagtgattcgctgtttgtttcctgctttctgcattaatattcttttgccgtttgttcatttgttttatctggctgataggtagctgacaaatggaagcttgcactaaaagtctaagaaaatatatatgggagtgaaacttaaaattgagaacattttttgttaagtgatatatttttctaaatattaggaaggattgtcattactctaatctggtggtaacccctgggtctggcttgtggcagacacatcagtatttgcagagaacagaattcaagaatccctgggtctgcacggtggctcacgcccagcacgttgggaggccaaggcaagaagatagcttgagctcaggaatttgagatcagcctggctaacatagtgagaccctgtctcaatacaaaaaaaaccaaaaaaattagctgagcatggtggcctgcgtctgtagtcctagctgcttgtgaggctgaggtgggagaccacttgagcctgagagtttgaggctgcagggagccatgatcgcgctgctgctctgcagcctgagcaacagagcgagttcctgtctcaaaaaaacaaaagcaaaaacaaaaaccctgggtctgaagtgaaggtgtgaaaacaaatgcagtgatgtctatgaagcttagcaaaaggcaacggggctctggaaatgtcagtttattcaggggcgttattaccctgcacttggatcactgttatcatgtagggctgtgcattcatttgttcatttggaaagcattgattcagcacctgggggtaaagcactgaagtaaagccttactgtctgctgtctcgcacattccgccct

SEQ ID NO: 16307 - DNA, 1043 bp, Homo sapiens
taatgacagggtgaaaaagaaaccctgctagtcaaaggagcatggctgggtggagagagaatgagaaactggctttcttcgggcccttgctcgtcagcattccccctgtcggttctgccctatctatagttcctcagcccactgaccaatcccttggctgtgtaggatcctaaaggtatttgacagaagtccagcataggctcacatagttgcatgcagggaactaatacctttttaaaaggtggtgaaggggatggggatatttttttgaaagatgattgagggtggcacttatgaaatctcaatatacagtatgacatggtgccagcaattcttcattcctaacctgcagaacaaaagtttgactctacctttgaaaagaaaaagctttacttgcaggagtactgattagacttcgagtatatcatgcgcggaatgcctcactggtgtgccattcccttggctttatgggttttttctgtgctgccccaaacacagatttagtcagtgacatcctaatccacgggatgaaggctcgaaaccgctcaattcatggagatgtggtagttgtggagctgcttcctaaaaatgaatggaaaggaagaaccgtagccctgtgtgagaatgactgtgacgacaaggcttcgggcgagtccccaagtgagcccatgcctacaggtgagccagctgcagagccactccgatgtccatttttcttgtggaattatatttgtctcctctttagcaatccagaaatactgcccttattttatttatttattttatttaaattgacaaaaactgtatttattgtgtataatatgatgatttttgtgtatttactgtgtataatataatatgatgttttgatataatgcattggagaatgctagactgagctaattaacctatgcattaacctcactatgtgatgaaaacacttaagatctactctcttagcaattttcaagaatacagtacattgttattaactatagtcacaggttgtacaataatagttcctaacacgagatatagtctct

SEQ ID NO: 16308 - DNA, 1050 bp, Homo sapiens
ccgcttgttaatggcagccatttcaaaagataagaaaatggaaattaagggaaatctgttcagcaacaaagatcttgaggaattatgcagacatatcaacaacagaaaccaagtaagagggaatttcaaaattctcttacctgtcatctcttgctaagaaaatatcagctttattgtgtagtaccgtgaagtatcatatattctagcaaattaaattctagaattattctaaccagtgctttcagaacatttgtagatgttctcaggtaacttgtggatttgggagatttgacggtagattatcagatttttttttttccgaaaggtggaaatgtaaagattcaagcaacgcataaagatatgatgacagaggccagacgtggtggctcacttgagggcggatcacttgaggtcaggaatttgagaccagcctggccaatatggtgaaaccccatctctacaaaaaatacaaaaattagccgggtgtgatggcacgcgcctgtagtcccagttacttgggaggctgaggcaggagaatctcttgaacccaggaggtggagattgcagtgggccgagatcacaccactgcactctagcctgggtgacaaaattgagactgtgtctcaaaaaaaaaaaaagatatgaagacagaaacatcacctgttatcttaccacccagagctaacaattaatgattctagacactgctaacatttttatttataaaaatatcggccagatgcggtggcttgcacctgtattcccagtactttgggaggctgaggcaggtggatcacgaggtcaggagatcgagaccatccgggctaacacagtgaaaccccatctctactaaaaatacaaaaaattagcatggtggcaggcgcctgtagtcccagctactcaggaggctgaggcaggagaatggtgtgaacccgggaggcggagcttgcagtgagctgagattgcaccactgcactctggcctgggtgacagagcgaaactccgtctaaaaaaaaaaaatcacaccgtgcctgctgtttgaatctgctt

SEQ ID NO: 16309 - DNA, 1290 bp, Homo sapiens
cagttctgttctaaatgtgatcatctgggagtctggcctgtaacggggagaggaggctaatgttttggaaagaattaagatcgcatctgtgcttttgagaccagctcagggtattaagtgtggagcatcatcctcaccttcatgcctgacacctgtggggcctgagtgccttgttgcaggccaactgcctggccagcgggggcgtgctggaagtccgtgtggacttcgtggcttttccttgctgactttggaggttcctggtacttggccttcctgggaaattgctcaagaaagcggctttcttcttcatcctactcttcattcattcattgaacaaaccattttctcactaatgatttcctagctttccgtacttcaccaggagcccctaaactcctgacctgaggcatgaacaccatgacctagaaaccacatgctaggtgctccatctctgcagcttccagcgttgcttacaaacgagcactttatttcattaaataatcatgagtctgtttcctgggggtttctgagctcccacaactctcttgggttctaggtaagggacaagactatgtgagggaaagctgcttagctagctagagaaatagccagaaaagattaggttattattatttttttgcctttttttggttgttgtttgcccaaccttcaataaggattgggttcttaatcttttacctgcacactgcagactttaggaagctaattgatgaaatcagaataggcttggaccttatgctctttggtgatttctgtaacctcccttcctttctctagatttttagaaaattttattttttaaacttttatacagatggggtcttgctatattgcttaggctggtcttgaactcctggactctagcgatcctcccaaagtgctgggattacaggcatgagccactatgcccagccaactttctctagattttaataacccggggacctgttggcttgatgacttgttccatccctgtaatgatcacaaggtcgatggtggacctgtggtgtgtgttcagctgtgtttttcagacctgctcccaacagactctcttctttagtcccctctcaatcctgtggggtctattttgcataatactgacttgtataggtagttggattgcattattgcattgcaaacatttgttctttttttttttttttttttgagtcggagtttcactcttgttgcccaggctggagtgcaatggtgcgatcttggctaactgcagcctctgcctcccgggttcaagcgactctcctgcctcag

SEQ ID NO: 16310 - DNA, 1035 bp, Homo sapiens
ctctgacttcaagttcagggttgtttccacaattttggtcctttttgttaagaatatagtttatacattggagacaaattattgatggaggctgcaattttgcaaataaaaataaccctcaaaaatccagtaatgtgtatgtgaaatgaaataggtgaactgaatttggtgagctttagtgtcgctgtaaaagcaactatcctttgtaaacttactgcatagctaataatgtaaatcagtgttgtgtttaggaatcagctccaggactgtggtttgatatgtggaaacacctctgcgtttgctgtgggctggtagacagaatgggctggacctggctgtactgtgaaaggcttctttgagctggttctttgaccaggtaatgaaaacgttaagcatctaaaaacgaagtctttaggaggcttccaaggatctggaaagctgaactcagcaatttttagacttcagttttctggacaggacagctcttctagtcaaggaagccagtatctcctgcatttgtgtagctcttgactccatttctttgaaggtttcaaatgataatttttacacttacccagataatctactctgcctgagcacataattggtaatttggcccaaagactgcatacttagattgcatcctggtcacactgatatcttacatgcattttagatatttaaatattaaaacaaatattcttatggcaatttttgtttgttttgagatggggtcttgccgtattgcccaggctggagggcagtggctattcacaggtgcagtcatagtgcactgcagcctgaaactcctggcttcaagccatccttacatctcagcctcctgagtagctgggactacaggcgcatgccactgtgcctggcccttgtggaaattttatttatttatttattttattattttattattattattattttttgacacagtctctctctgtcgccctggctggagtacagtggcgtgatctcggctcactgcaacctccacctcccaggttcaagcaattctcgtgc

SEQ ID NO: 16311 - DNA, 1044 bp, Homo sapiens
caattcacagaactcaggaatgcactgtacttctgattacaattttattatagcaaaaagggtacaaatcaggagcagccaaaagaagaggcatatagggtaaggcctgggagggtcccagatgtaaagcttctggtgtcttcacctcttggaatcagggcacagtcactctcctagtacattgatgtgtaacaatatgcacagagtattattaaccagggaagctcccctgagcttcagtgtccagagtttttactggggccccattacataggcatgattaattgaatcattggccatgtgattgaactgaatctctagcccttttactcactgcaggttaggctgtattacatggctcagagccccaaccttgtaatcacatgattggtctttctggtatggccagcccccatcctgtgtctttttttttttttttcccccagtcatcttttatttggaggttaattcccattaggatatgaaaggattcagcaacgatcgagactgtgttccttatggaggggctcgggccaagaaggtcatggcggggagtgcagagcatgccctcttcttcagtggtacttgcatagccacttgtgcttgagctccttgtaggaaaggcagtagctgaagagcacgtagcttgccagcaccatggtaacccctgagatgctccccttcttcatgtcaatgcactgcttgtagtaccagtaataacctcttcaaaatgctccggtagtgccactattgctgaagtcctgcatcaagctccagcttggcagctcccctagtttgacctccagaagtttcttgttcttcactggtatgactgatgccatcttggagtcctggtgtccactgtccctgtgtcatctttttaagcaaactgtgggcccacattgaatcaccttattggcgtaaactatcagggcccactgtgaataacaaagacactcctattacttgagaaattccaaagatttagaggttacctccagaaaccagggacaaaggccagccaaattctttattatacaacat

SEQ ID NO: 16312 - DNA, 1074 bp, Homo sapiens
gaatgttgaccaggtgcagtgtcttacgcctgtaatccccgcactttgggaggcttaggtgggtggatcacctgagccctagaagtttgagaccaatctgggcaacatagtgaaaccctgtctctacagaaaattacaaaaattagccaggcatggtggcacgtgcctgtagtccagttacttgagaaactgaggtgggagggaggatcgcctgagcccaggagattgaggctgcagtgagccatgattgcaccactacaccccagtctgcgcaacaaaatgagaccctgtctcaaaaaaacaaaaaacctatgcttaagtgagcacctgcattgacttccagtcctgatcctgaaatcaggattccctgaaggttgttggaaagtgatctgggggtagggttttttcccagaggtgatacgtgctcagggatgagatttgctgaccctcctgtgtgtatttgggcagggagaagggtccagctgtaacaaacagctgttcttgtatataagggggaagcaagtctggagaattgacaatttctcctgtggactagaattggagacatattttgagtgctgtgtttcatctgactgtatcttcctgcccttgggtgtgcttctgggcactggctactgaccttttgccttggggacccgaccgtacttatggttctgttaaagttggagggtgtccaggttcttggcatcttcaacaaagaattggacaaaatgcacaaagcaaggaagggacgaagggatttattgaaaatgaaagtaccctccacaatgtgggagcggtcccaagcataggagctcaaaaggccccgttgcagagttttggggaatttaaataccccctagaggattccatttgttattttgggtacgctgtatgtaaatggagaggttgaagtaaagttacaaagtcatttgcggcctatgacctatggagaggatatttcctgttatagctgaagagtgaattggccttatgttccctacctccagacccaattttcctgcctcagttctgagttatgaggtttaactgattgggtcacattggatcctg

SEQ ID NO: 16313 - DNA, 1028 bp, Homo sapiens
tgagagtgtttgtcaaaatttctgatacctataagtgtgtgtgactttggataagtcacttctcctgagacccagtttctccgtctaaaccaggggtttagactacatgtcctgtaaggcaataatcatgaaaatatcttctgttgtggagtatttcacagttgcttgaacatttgtattgttattctttaccataactacatgggattgagtggaatatgatattccttttttacggattgggaaactgaaactgaggtagccaaagaaaacactcttaggtgaaaatgaattatattgtagtacctatgacgggaaaaaaatgaacgtatatgaacaagcactggaaggaaacatagataaatgactttaaggttgactttttatctctggtttttagcagtttgactatgatgtgtctaggtgtgggatttttctttttttaagtattgcttagggtgccctgtgttttttcgatctggatgtttgttgttttttgttaattttgggaaattcttggcctttatctcttcaagtatttcttctgtcctgttccctcttgttcatccaagaccccaactacatatatgttagacgattggatcttgtcctacaactcttggatgctctgttctgatttcttttattctttttttttgctttagtttggttaatttcttttttgtttttttgtttttttgagacaagctggtcccaaagtctgggcctcaagtggtcaagctggtctcaaactctgggcctcaagtggtcctcctgccttggcctcccaaaatattggtattacaagcatgagccaccgtgcccagcctccatttaaaaagttctgtcgacctatcttcagggtcactgattgttccctcagctccatgtaatcggctaatgagcctgttgacctctgatgccacgtttttaaaatttctagcattttaatttgattctatttttagttttcacctttgctgaaattcctcatttgttcatacatgttgtcacctttaacatattaa

SEQ ID NO: 16314 - DNA, 1028 bp, Homo sapiens
tattaatccccatcccatctggaaaataataagtgactcttttttagccttctgtgtgctgtggaaggaatgccaggatacctgtttattacttatcaagtgctggagaagctgctttcattcacccagccccagcgatgcacaaaacaaggatttcaagttgtttccctcttgtgctccagccctgccagtgaatcccctttatcttcctgcattatagcatctgaactcctatcatagcatgtacttgtagagctggacttccctttcctatctacccttggtcctcttttggaatacagccccttgctccagagaggttgggctcttcaatgtttttttgcacatggtgttcactcctgtgcccataatttttttgtgtgctgttgcttctgtcttttcaaacagtgcccattttctaggtccacctcttgtctagcttttaccaggtgccccagcccacactggtaaccactgcatccatgttctctgacactcgctgtctgtgggatttttttagaagttcaaccttactacgtaactatttaatgtgactgtcacttgtctccccagctggaacaagggaaaatgttaggatgacataaggtagcaccttagactttggcttagtctcaaccacatcaggctcctgagctcaaggaagaatcttttgggcagcctaggttagcatacctgagttcctcatacccttctactttcacaactcttgagtgtgaaccaagtcctcaaggtcaatttcttttcatatctgagctccaaagcctctcttggagtaagccctcccttaactttgttcctgtctaggctcccaggagccgaggcacagctggaacagcctccagtgccaatgcctgccttagtacaatgacactcatttcttggttgagcagaaacttgtttgtaacaacttaacctgtttctcctccctctaccttaaagagcttaaacatttaacaagactatatctttcatcccttcctccctctttctttcataaaacctctctt

SEQ ID NO: 16315 - DNA, 1008 bp, Homo sapiens
gcaatggccttaagagttgggtggctctggcctaatctttggtctgggaggtgaccagctacctccctgctgctcctgggatccacatcactatctggggcatctgggaagtctaactgtagagcttgggatattcacaagatggcaggcctcctttctaggtccttgcctctcttgaaggaagtgggcagtattcctggtgggtgtacctagagcacctctcatagtttttttgattctgattaccctaagatgtgatgtaagtaaaatctggtaaatacagtttaaatccatttcttgtgtacaatgctgtatgctaggtgcaaggctctggagttaaaaagatgacataatctactgtaagggcagcctgaagggtttctctgggtttctgtatgatgcacgttagtggaaggagagggcaatggagagagagggcattcatgggctaattaatcatatgcatgttagctgccaatcattttaccactatgttcttggagtccctccttttcttcagatataagtcttccaacacactgtgcaacttagggaattctgcaagtattagtctttgctttattctccctgggctgatggcttagagatgagggctgacgtgagtctgcacacttggtggctgttgtgctttcagtccagtattgtgtctctcagctcctaccccattttattcctgatacttgagacctgccctgacctttagaatagggatcctggtgtgcagccttaatgaactttagaagaaccctcctgggaggattctctacttgtgcctccattattttgaacctctcttcattgtaatgatcacgaagtgctgcatccactgttataggcatctgctgacatttgtgggtgccatatggaacctaaatcctaaaaacgtcttctgcacatctaaaggttagagaaagtgcttgttccttctttcctcaatgagagcagagcattctctgtgggaagcatatgaacatttctggcttggtc

SEQ ID NO: 16316 - DNA, 1800 bp, Homo sapiens
gctgtgtccatgtaacaactctcaccgggcgtggtggctcacacctataatcccagcactttgggaggatgaggtgggcagatcacctgaggtcaggagttcgagaccagactggccaacatggtgaaaccccctatctctactaaaaatacaaaaattagccaggcgtggtggcacacgcctgtaatcccaggtacttgggaggccgaggcatgagaatcacttgaacctgggagacggaggttgcagtgagctgagattgtgccactgcactccagcctgggcagcagagcaagactccatctcaaaaaaaaaaaaaaaaaaaaacccactatttccccctttccccatccactggaaaccaccaatctaccttctgtctctatgagtttgactactctaggtacctcatatgagtggaattacacagtatttgtcctttagggactggcttgttttagttagaataatgtcttcaaggttcatccatgttgtatgatgtgctagacactggttcttaagtaagtgctggttctaatgctgtggtccatagccacattttgggaaacactgcattgggggtagagtgagtagctaggtgggctgtgtagaaagaggagtaatggcagcttgtcctagtgggatttgtcgggagaaaagaaatagaaaatgaagcacaaagaagaatattgtgcaagtgttccctctcatttccagggaaaatttctcaaaatattgaaagatttctgtccatggcagacttgtagttggaatttgcatgaccagcttatagcttgtacatatggttcagttttgtgcatctattaatttcaacctgggccaccaaactgcattgttaagaactagagactattggctgggcacagtggctcacgcctgtaatcccaacacttggggaggccgaggtgggtgaatcacaaggtcaggagttcaagaccagcctggccaacatggtgaaacccccgtctctactaaaaatataaaaaattagctgggcgtggtggcggatgcctataatcccagctactagggaggctgaggcaagagaattgcttgaacctgggaggcagaagttgcagtgagctgagattgcgccactgcactctagcccaggcaacagtgtgagacactgtctcaaaaaaaaaaaaaaaaaaaaaaaaacaacaacaaccaaaaacattcagagagaggacaaccattttggaaaacaggtattaaaatttcttgttaaattataccaccatgaactgcactccttggcatttacctaagataaatgaaaacatttgctcatgcaaggacttgttacacaaatattcatagcagctttatttataattgcccaaaattagaagcaacaaaaatattattatcagatgagtgggtacattttagtgtattcaaacaatggagtacaactcaggaataaaactattgatacatataacttcgatgaatctcaaaaacatgctaagtggaagaagccctgtacaaaagagtacatactgtgagagcctgctaatacgaaattttagaacagacaatccacagtaacatatagcagatgagtggctgcctgagggtttagaggtagggatagtttaacatcaaagtgcataagggaacttttttggagtaatagaaacactaaatcttgtttgtggtaataggttcacaggtgtgaacatttttgaaaatgcatgaaagtatacacttaaaatggtaactgtaggctgggtgcggtggctcacgcctgtaatcccagcacttcaggaggcc

SEQ ID NO: 16317 - DNA, 1028 bp, Homo sapiens
cagctttaagttctcaaggaaaacatgataagtgacgtgggtaggagacaggattatttttcctgatcctggagctctgaaaagaattagctgccaaaatttatgtcgagtcttttcatctgaagctgaaccaagtaggtagttgtgctgtgagttaaaaagggttggaggtgaagagggcgctaggatactgctctctttcattctatttaaagcaataatttgcattgccaccctgccgttcttaacctgctctaattatcaaggccttattttgactaagaccctgaaaaagcgttgcatgatttagatcaatacgcagttcatccaacttagccgtaaattatttctgccttggagttgttagctgataaagatcaataaatgttaacaacagttttaaattataactcaacttgtttttcttttccttctatctaatgaaaccatgtgtaacctagatttttaaattttacgtatttatgtgtgacatgtatgtgtgtatgtataaatgaacgaatgacaggtctcgctcactctgtcgcccaggctggaatgtggtggtgcgatcatggctcactgcatcctcaacctccccagctcaagcgatcctctcacctcagccttctgagtagctaggactacaaatatgtgctatcatgcctgactaattttaaaaattttcttttctagagatgcggtctctctctgttgcccaggttggtcttgaactcctggactcaagtaatccacttgtctgggtctccctaagtgtgggactactggtgtgatccactgtgcttagctgccagcttagatttttgaggggtacatagcccactgtaattggatacctctcttcagagccatagtagcttattataccttggggccatcctgcttggagtgtgcctcaaaagtgttcctttattccctaggttagagagttatgtaaaaacggggctctcaggtcagaatgagatttaaggcttctgcagagcctatatgaaagtgtttttgggccgggc

SEQ ID NO: 16318 - DNA, 1046 bp, Homo sapiens
agagataagggggggtctgagttaggatagtggcagagtgaagggacaggatggggacagatgggagagagatggtgcaaagggcagggactggtgtgggaagatgggtaggggagtagcagggagacttggccttggcccttcctggggtggttgtggtgggaaggagcctgaggcccatggccgtgctccagggctgtacgtggagagctgtgttctcctcctcctcagatcacaaagcctcatttctaatggaaacctgaggctggggctgccctttcctaagttacagattatttcctgaggaggatcccagccctaagagagctggtttgatttgaaaatctggacacataggaatgaaactcagagtgaattttattaaccactacccaaagcaagatggaacttagctcatgatgcccaacaccatagaggaacaagagtgggctgggcgcagtggctcacgtctgtaatcccagcactttgcgaggctgaggcaggtggatcatgggagggcaggagtttgaaaccatcctggccaacatggcgaaaccccaactgaaaatacaaaaattagccgggtgtggtggtgggcacctgtaattccagcaggcttaggcacgagacttgtttgaacctgggagatggaggttgcagtgagtcaagattgcgccactgcactccagcctgagtgacagagtgagactctgtctctaaataaataaataaataaataaataaataaataaataataaaataataatagagtctagtgatatagctcagcttgaggatgggaaccagcataaggcttgataagaccaaactaattagaaacaaacacgatggaattttcttttttcatttgaaaaaacatttcaaagtttattgttggaggtaagtgcttaccaccctgtgaagtgcgtgcagggctgtcattaggtggtggtaacaggcaccaaatccccaagaagctgctacccaccaagtgacctccgagccactgtgtcctctccctttacctttctggctatgcatagaa

SEQ ID NO: 16319 - DNA, 1054 bp, Homo sapiens
ttttcattaatttttgaaacggagtctcacctcttgttgcccaagctggagtgcaatggtgcgatctcggctcacttcaacctccacctcctgggttcaagcgattctcctgcgtcagcctcccgagtagccgggattacaggcgcctgccactacgcccggctaattttttgtatttttagtagaaatggggtttcaccatgttagccaggctggcttcaaactcctgacctctggtgatccacctgccttggcctcccaaagtgctgggattacaggcgtgagccaccacgcctggccagaggttggttttatacattttagggagtcgtgagacatcaattaatatacgtaagatgtacactggttctgtctggaaaggcaggccagctcaaagcagggaggaggctttcaggtcacaggtaggtgagagacaaatggttgttttcttttgagtttctgattagcctctccagaggaggcagtcagatatgcatttatctcagtgactttgaatagaatgagaggcaggtttgccctaaacagttctcagcttgacttttccctttagcttagtgatttttgggggccccaagatttattttctttcacatttccccccttttctttttaaaaacttttgagaaagcattttagaagaaaatgaatctttcgtctcaggtttcatcggatctctcgcggctaggacagtttattcctagacaggtaggtaggtcccaagttactaggaaagctcatttttagcaggttgtggtctcatgtcctatgatgagaaaatagggggagaaagggagaaaaactacaataaacaaaagaataattctggaaaagtgatataggccacattattctgaagtccatacatcagtaggcaggtatgaaggtggcttatgtatgctgttattttcttttgaagttgtctagcttcggttcacagggctttaagaaagcacagcttagttttcagtaatttcaaattaggaaagatgggaaaaaggaaaagaaattgaaaacattgttttttttgtttttg

SEQ ID NO: 16320 - DNA, 1038 bp, Homo sapiens
gtaggcggggggagggagaagatgctggagacaggaacagtgtgtgaagggcctggctattgtgggaagcaagtgtggggtgctgaggaagatcaagaaatgaattctctctggacttgtctgccatcatgtacctcttttctgtccccagagaagagctagacttgggtgtggcaggagcaggggcaagagggatgtcctagcctggcggctccagcagcatgctctggggttcagtgatctcatgtgcccaggtttccaggtggcttcttgtgaggccctccgggatctggctcccaggaccaatgtggtctagcagtgaaaagcccctcagaatttcccttctcctcctctccaaccccttccatctctgctgcctcctaggcagtgtttttccctggagcgggtgggagaagctggagctgacagccagggatggtggcaagctgtgttatgtaagtttgaaaaaaggaggcttgcttgccatgtgaatagagatcagatacaaggacagctagaggcagcacagccatgcctgagcagcagctgtagtctgaagagaggtgtctgagccagcagaggaagaagctgctggactgggtggaggagactgttcttgtggggaaggagaggtgtctggttctgtgaactgccgatcttggagggcagcctgtgaagcaatcattgtctattcctataacatggtgtgctgcttatatgccatgccttattacatcaatcctggtctgtaacttgtgatggtatgagagccgccattgtgactgtttcaatcatggcaaaccatggcccagaaaagtcaagtgacttgctcacggctgcatgtagagtaagtggcagggtcaggatttgacacagggcttctgtctcactagccagtgctgctcttttactctaaaacaggcttaacagatcatgcctaaacagcccatggggagagtgtgggccgggtgagggagcctggtgccgtgtggcctggcatggatgagaggcaatggcactgggtgggaggagtggaag

SEQ ID NO: 16321 - DNA, 1636 bp, Homo sapiens
ctaaaaaaaaataataataaatgcattcatataacagtatcgaagagaaaaataatgaaacgttattagtggctctgctgggttgtattataggaggtttgggttttttctgtgattttctagatgtcctatatggtgtctatattatgactattaatatagacaccatataggtttgggatgtcatggtttagcatgtttcctagatatggtctgccctcaaagtgagtgtcattgtttgctgatgtctgctccacaaagccctgctccaggggccttcaccaagtcccagccttggtttgctcacctataaatgaggataattgaccctggtctatgcacattacaggacagttgtatgaatcagaggatacagcggaagaaaaaatgtttggaaatttaggtctctgcaaactaagggccaatgtactggtatttgtgacagtgaccggatgggtgggatggggtgataataagagtgcaaggaagggggatgggggcatcgttttgactctgaggagcagctttaaggcctctcacattccagctccaggtagcaaggggttccccttgactggcagggtagatgtacctgtgtaggctgttaggtgagtgactccagtggaatggaatggaatcatgactcagctcccaccctgccacacatatttgtaagaaaaagacccacatgctccatgcctggtgcagaagtctagaatgggaattcccgccaaaccctgtccccttctagcctgtgtagcctcagcaagcagataggtcttattacttgtttttttctgcctccttcatgatccagccatagatactatatcttaccagtaggggtggttgaagcaacagactttgaaatcctgactgttcatgataacggactccttcctgtggatcatctggccaagtctgcattcttagagagtggaaatcgactgtctttctgttctacttctacagcagctgctcatttcatctcctgacagttgcttcttgaactcagaacaaagggccttggtgtacagtgtttgcaagccaagggctgcctctgatggcggacgggggtgtggtcctgggactcgtggtcagggctggtctgtgtggaatgctgatccttctcttccccaatctacctgtgtcagttccctccttttctattttctcttccctgcagatgtcaagccctccaacatcctagtcaactcccgtggggagatcaagctctgtgactttggggtcagcgggcagctcatcgactccatggccaactccttcgtgggcacaaggtcctacatgtcggtatgaacagaagtttccattgcttgagcttcttgtacggtcagggagaggagcccagtgggtgcctttcctgtggagccagagtcttgtgctgggtaggggacaagaagtgagggaggaggcacagtgctctgccctgaggagatgaagttgaatgggaagatggtcttggtctttcttaggccttggagcataactgggatattggggccttgactcactgaaaggactgtccagctccagagtgtggctttctttctgaaggattgtgagctccagctcccctctgggcatctctacatgatagtcttcagatccacaaacc

SEQ ID NO: 16322 - DNA, 1100 bp, Homo sapiens
ccaaagtgctgggattacattcgtgagccactgcacccagccgtgaaaatgcttaatatgttgatataagtgatggaagtataaatgtgtaggtgcaacattttgaaaggcagtctaatagtatcagtgtgattttaggtattaatcttaagaaaataattcaaaagtgttcatttgaattgatgtcatcaattgtttataatagcaaaaaactggaaactactaaaatatcatataatatggaattagttatgtgacaaaagagctgtggtactagactgccaaagaacattgaatgacacagacattcatgatataaaactattagaatcctgtttttattaggcaaaatcctattagatatctaaatagatacatttctatttttattatcattttttaaagagatggggtcttactctgttgcccaggctgaagttcagtagtatgatcaaagttcactgcggcctcaaactcctgggctcaagtgatcctcacacctcagcctcccaagtaactgggactaccagtgcaccaccatacctggctattttttttttttttaagagacatggtcttgctgtgttgtaactagtctcaaattcctggcctcaaaccatcctcccatctcagcctcccgattagccgggattacaggtgccaatgtgtccagcatatatttatatttaaacagagttatatgcttggaaaaggaacgtgtaccaaccaggctaataacggtaatgattatcctgtgcagaatctcactctgttgcccaggctggagtgcagtggcatgatatcggctcactgcaacctccatcttctggattcaggcaattctcctggcttagcctcccgagtagctggaattataggcacccagcaccatgcccagctaatttttgcatttttatttgtgtatttattttttactttttaagatggagtcttgctctgttgccctggctggagtgcagtggcacaatcttggcccactgcaagctccacctcccaggttcaagcaatttctgccccagcctcctgagtagctgggattacaggcccccgccaccatgcctgcctgatattttgtagtc

SEQ ID NO: 16323 - DNA, 1081 bp, Homo sapiens
gcctaacttgactgctttttctttcttttttttttgagtcttgctctgtcgcccaggctgcaatgcagtggcaccatcttggctcactgcaagctccacctcctgggttcacgccattctcctgcctcagcctcccgagtagctgggactaaaggcacccgccaccatgcccagctgatttttttgtatttttatagtagagacggggtttcaccgtgttagccaggatggtctcgatctcctgacctcatgatccacccatctcggcctcccaaagtgctgggattacaggtgtgagccacggcgcccggcacttgactgctttttcttaagtccattgagatattgtatgtatgtgcatacatatttatattattttaatataaacttccactttttacatttattcatccccagactacttcatttgtcttatccgtctatctttgccaaagttgcaagcatctccagggcaaacccagtatcctcagtcttaagtcctctgtagcacctatgcacgtggcatcattgttcagagtaccatctttgggatcagaccactgggtatatatcctgagactatcagttactaattgtgtgaccatgagcaagttactgaacctctcttagcctcaataagatgagaataatagtaatatctaccatagagttttgttaggattaaataacatgtactatacataaagcaccacagcagtacctgggatgtgataaacactcaagaaatgttactgcaattaatattattattacatacatccttattgattaaacagtgttttctgctaacaagtttttggggtttttaaatctcctgtaggttttggctgatggtttgaggactggtgtcactgaatggctcgagcccctggaagcaaaatctgctgttgaacttgttcaggaatttctgaatggtgtattacttgttttattaattgagaatttatacttgctatgtttaaatataagtttctctttaagcttgatactcttttttgattggaatatatacaaagctatgagatctgttatggtcagagggacagcttttgttctgaat

SEQ ID NO: 16324 - DNA, 1016 bp, Homo sapiens
gcatcttagcttctcccgtcgttggccaaaagcaaaactgtggcatggaacaaagtcatgaggagggaggggatgggtgtcttggacctccacccctccatcccaaggcactaaagcttgggggctgcagtggggatatacttgcaaagtccagagagggcaactgactcatcagaggtaacagagcttttagactccccatggcctcagacaaaggacttcagggctattgtgtttcctgagtgtgggcttttgaatgacaagtcaatgtactgaacatttattattcagaacttactgcagctgggtgtggtggcttgtgcctgtaatcccaggctgaggcaggaggattgcttgaacctgggagtttgagaccagccgggggcaacatagcaagacccctacctcttaaaaaaatttaaaaattggctggccatggtggcacacacctgtagtcccagccactgaggtaggaggatcacttgagctcaggagttggaggctatagtgagctgtgatcgcaccactgcactctgatccaacctgagcaacagaacaagaccctgtctctaaaaaagtaagaaacataaaaattaaaaacaaagaagaatttattataaaaagggggaaaaaagaatctactacatgccagtggcagatgatagaaaatggagaaagactggaccttcccctctaggagctgctggtctagaggagaggcagacagcaaacagacagtggtgactgatcatgctgagtgctgccctagagatgtgctcaaagcagggaactctgttggggtggggatggagtattcagggggcattcaccttcacagagaaggtgattctgagttgggttttgtaggatgactaagagttcaccaagaggacaacaggctatagataacctttcaagtaggaggaacagcttgtgcaaaagcaaggaggcatgcagttaataccatatgttctaagagtttgtggctagaaagtaaataagcgagagatggagga

SEQ ID NO: 16325 - DNA, 1058 bp, Homo sapiens
catgtgtcaccctgcccttgatgtggcagctgcccagggaaggtgtagtgaatggatggatgctcccaccagccagagacccctccggtacctttttcctcgtgggatcctgagagctccctgcagtttgcagtgagagtggcagctgagttttctttctaagaagaagggtggctctgggctgggtagttatctcccagggcaccccccaataagccagtctcacaaggctgactcggactgcattctcttggagtagctgagcttgaatggtgaggagggccctctgggctggcatggagtcggtttctgcatctgtaaaatgggtacatacctgaaaaagcttttgtgagtgtaaaatgagatcacgtatgcccatacctcgtcactgatgccctcattatatagaaaagaggctctcagagatattaaatggcttgttcatccagccagttagtgaaggagctgggcccaagccctacctcaatagcatttcctctttcctttttttttttaaaaagcagtacgtgattcatgtggatcatttagaaaacaagaaaagcacaaaggaaaaacaaattacccttaatgctaccaccctaaaagaaaataattatattattcttcttaaaattatttggatgttatttttcctgtcatcctttttctttgcaaaatatgggaagtagaaatggtctctatgcagccaaatgaaaaagttcatatagctgttttgtagctcttttctcttagcaatactgaaaacattgtcttcaattcaacacatagtctgtgatttttgatggctgcttagtattccatgccatatttacttaaccaatcccccagggctggatatttaggttgttgcagtgactttttttttttaaaagaaactatcataaaacattgccgcttggtgagcatcttatgtctttgtgcacatcattggtgacttccttaggatatgttcctagaagtgggattgccaggtcaaaggccacacacatttaaggtcagagtgccctccggaaaggctgtatccgttttctctctca

SEQ ID NO: 16326 - DNA, 1050 bp, Homo sapiens
ggtggaagagcccctagcttgtcccaggagtttcaggttctctgggttttacaaagggctttcctgtcctcctctccactgctctgctggtactccagggtctgggcagtggctgctgttgtcaccttattccagggctgaggacctgaggctcagggagcgaggagcctgcccgaggtgagcagcagggtcatcccagcaagtgaaggggcaatctcctcttctctgggctgagctgggtttggcccccaccactgtatggggcttcatgccgggggaacccacagtggggttaaacagaaaggcctcctggaggaaggaaaagattcccagagttctatgcttcaagtcattttggttaaaaaaaaaaaaaactaattagaggtgacaatggtgactttgtctgtgtgttcactttttcctccttcttccccacacctcccccttctccctgtccctcatttgttgtatccatgggaaaactaggtaacattataattactgaaaatattgtgggtacgtggaagctaggagtggggggtgcctgggagtgcaggaggccctttaaaaaaattttttttttttaggttttattttatttttttcctttcgtttggaaacggagccctttgcagtcatgctgtcacagttaaaataaggtttaaattacaggccagcccgtggcttttcccctttctttcagaatttttgccaacttgcaatttacttaatgaaatcctgctattccgtttaacagggatattttttgcagatgttgatttaacttagctttgcaaaatatgtgaactgtaccgtttcttttcctatttttaacggtttcaggattctagttcagcagctccactggcgctgccatgccaacagtggtgtttactcccatcccttgaaaatatttgttttccatcgttctgtctgccctcccctccatcccacatacccacaaaggggagggtcccatacacatggcagaatctgccagtggagattggggccagaagggacaccagagtttccgatagtccatcctct

SEQ ID NO: 16327 - DNA, 1047 bp, Homo sapiens
ggaggaaagtcacatttactcttaagtaaaccagagaaagttctgttgttccttcctgcccatggctatggggtgtccagtggatagggatggcggtggggaaaagaatacactggccatttatcctggacaagctcttccagtctgatggaggaggttcatgccctagcctagaaaggcccaggtccatgccccccatctttgagttatgagcaagctaaaagaagacactatttctcaccattttgtggaaatggcctggggaacaaagactgaaatgggccttgagcccacctgctaccttgcagagaaccatctcgagccccgtagatctttttaggacctccacaggctatttcccaccccccagccaaaaatagctcagaatctgcccatccagggctgtattaatgatttatgtaaaggcagatggtttatttctactttgtgaaagggaaaagttgaggttctggaaggttaaatgatttgctcatgagacaaaatcaaggttagaagttacatggaattgtaggaccagagccatatcattagatcagctttctgaagaatattctcaaaaaaagaaagtctccttggccagataactaagaggaatgtttcattgtatatcttttttcttggagatttatattaacatattaagtgctctgagaagtcctgtgtattatctcttgctgcataataaattatccccaaacttagcagcttaaaataactaacatttattatctcccacagtttctgcaggtcaggaatctgggagcagcttagccaagtggttctggctcggggtctctggtgaggttgccatcaagctgtcggccagggctgcagtcatctgagtcttgactgggtctgggggacctgctccaagctcgctcatgtagctgctggcaggagccctcagttccctgccatgtgggcatctccactggactacttataacatggcttccccagaacaaatgatccaaaagagcaagggtgaagttgctggggtttttttctttctttctttctttcttt

SEQ ID NO: 16328 - DNA, 1033 bp, Homo sapiens
ctggaagttgaggcccgctttgttcggctccgcgggccggagcccctcctccgccgccgcctcccgcccccgcggcccgcgctcgtggaggtggtggtgtctttgcgtttcttttcttcagtcgggtctccccactttcctctacaggaatgcggtccgtacagctggggctgtgggtgaggagcgggagcctagtgattgacagattccttcttcgttctttctttgccttcgggattagcatttttatcgagtatttttagactcggttgtgccagtctcccgccccctgagcatgcacgcactttggttgcagtgcaatgctctgacttccaaatgggagagacaagtggcggaaaatagggtcttctcccacctcccacccccccatcccgactcttttgcccttcttttggtccaagagattttgaaaccgtgcagaacgagggagaggggcaggctgcagccgggcagataacaaaacacaccccaaagtgggcctcgcatcggccctcgcattcctgtagagccttccttcccaaagcgcgctgccatctgtctggatctcctttatccttcccgttgcgcgctagctaggtcgggcgggagcccacagatggctgatagaaggggtcagtgacttcactcccccagggccttccttagcttagatgtgcctggctgggaactgggggtgcgggtaccttggcttcctgtctctacctctcagcctcctttgatgctgaaccaagggagagagcgtgtgtgttgggggctggctcttttgggggtcccaggctgccgaggaatgagtagaaagcaccagggactgtcagccgcaaagggattgtcatccctgctcctgggccagggtggactccatccttggccacctgcttggggcagttgtacaggggctgccaggcgagtcaggcaggcacaaagcaacatctgtccacgggaaccgagggcaggcctcccctggaaataaatgccacatatggtgggagtgcggacttaaattttttttaac

SEQ ID NO: 16329 - DNA, 1122 bp, Homo sapiens
cccaagttggaatgcacttccggctccccctcaagtactagcttactggttaggtgggctgttgagtgagaatggtcaggtccagaaactcatggctctgaaatgacccagacgtggtggctatacccttgactgccctcagatacgtgcaagagggagctcacgcttcaagagtcatgctttggccctccacctggctgtgctcctcttactggggcaaggagactgtagggccaagggacaggcccatctagagcaagcacttcctttttccagatcatgctcagaggcctgacccttccagttccctgcatcagtgtcttgagcctgtttccaagtcctgcgtgggcctcttccccaggtctgttttacttgagggcagactgtgttggccatggacagcatgtgtacctgtgggaccaatggctgggcaaggggtgcaggggcatgaaggaattggctagagcttggacttgtggcctggggactctacttgggtgtgcacaaggcctctgaaagttatgggtggtgctaggggtgggctgagatcttgggctgggtctctctgagcttccacattccattgtgaaaccaagaggtcagggaatcctaaactcaaacctggacttattaaagtattggtcaaggcaggatgatagaacgcattctgtgtaaccgtttgttaccttgatttgtctttaaatactacatatggtgtgtaggccttcctctgtatttttgctcttagggcaggcatttctgtatgtatgtatgtatgtacgtatgtatgtatgtatgtatttatttttgtagcatccgctcagttgcgtggccacaactgaatcccagtccaggtggcaccattatatgggtagcattttggagatgttcacaggaattgatttccctcaccctcaacccaggccagagtgaatttaatgcagatgagggagaaggtgctacatattatagctgctcattcaaaaagtggagcagagagctggaccactgaatgtgcctttgtttgctggaaatctttattaagtaccagagatatagagatgaagttgtgtctctgaactgctcagaggcaaaaaagggacaccagtaaccacagttatg

SEQ ID NO: 16330 - DNA, 1029 bp, Homo sapiens
tccctttgaagtccgggagatgccactaggcccagtgcaacttggatgatatttaatggccaagagcagagacttctgggacctgacttttcctgctctccactttactttagctctgggcttcaaagggactattggctgggagtggtgaaagtttagtggataatcctgctgaagaattttggaaggccttgaggaaggaattaaaaataacagtaagcatgccttttctttctctttgattgtggtcagtgcatggaatgtgccagggccgctgcggagcaagcacgtggccccgaataacccctccctgccaacggaattctgcagagaacatgtaagggctgtgctgtttcactcctgctttgggctctcagggtttgtttccgcgatcatccaaacctcatcctccttctcttgccccagataatttattggaagtctggagagggacttgagttctctcaactctccaaccagactgttgctgtgggcgaggccatgtcgggtgagctccaaggagagcagttggaatgacagagaggaacggtttcagcctgagaaatgtgaaatataaattcaaaccaaacttggcacctgtttggagagcttcagctgatactacagtgcccctgtcgttagcctttgtggctcagctgggtcttataaatagaacacgatgcatttccccttttgctaccccacagacacgcggaggcatgtgtgggggtggcatggacagagagtattcattacttatgctccagtgcatcagatagtcatcgtgggaactgagccctggtgtcatggggatgactaggccatcttgtgggtaaggctggaagcggcttttgagtctcctgagttacagctcttcttacccttgccagcctcccttccccagctgaggccctcagtccttcatgcctgtgtgccgcagtaagccagttggccccttccgtcgtgagtccatcccacattctgtatcggagcccagcattgctgtatcaggatgcttttggccaaaag

SEQ ID NO: 16331 - DNA, 1023 bp, Homo sapiens
gggtgcataatcaggatttgccagtggaggtaggaagggtggctggattgtgactgtcacgctcctggcatcagatgatactggtagcaagctagggtcgtctgtgcactttgctctctctcagtcttcccagcagccctgtcaagcggggagtctagcaagaagtggccaaggcgcagatcatttaagaggaaggatgtgagcaaactggatcccaaggggacagacagaggcccactttgcctcagagtccagagagctgctgctgctaagaagggaaagaggaactgggtcggggtgcctgctgacttgcagcgctgtgttggcatgcgaggtagcactggttgggaggcggttacctgaaggaagcaaaggcagctggtggttcctatcttcttgcctctggcagcacctaaaagaagcctcttgggccaatgagaggatggactgtcccccacctgcagagttctgtgaagtggtgcggacgtctttgttgatctcatttggtgcctccccctgttgatggctgaggaagccaaggctctgagaaggcacatggtttacccgaggggacacaggcaaggaatctgaacccggattgcattttctgttttagggctctttgtgtgaccacggtgcttcccaggcccacacttccagtgttccaggcccttgaccaccaatcctgtggaggggtcctcagggcaggcagtgggaccacctgaggcctgcgtggggtggcctgtggtgtgagggacccaggaagtcagcctgcacctcggcgagtcagaagatgtggccatccaccaaccatcagatgttcccctacgcttagggctgtgaccagaagtggcatcaagatgggaggcgaagcttctgggaccagagaaccagctgctcctgttcatcctgcttttgggtgaatagctgatgctctgggcccctcatcccaccatcccaccccgtggctcctcctgagcagggctgagggcatttacctggctgccttctaaagcagacttg

SEQ ID NO: 16332 - DNA, 1098 bp, Homo sapiens
aggaatttcagaggctacaaacatactcttgttgaaggtgctttgggggtctcctgagcatttacttttgtgaatttttgggcagcctagtatagaggtgatccagcagtaagctgagagagaggccctagtttgactcttaactcaggcatggtctccttgggtgagtcatttcttcatcaggcagtcctcagtcttttggttgcagtgtagttgttaaaaatgtgggtacttggaggctgaattcttgggtcaaatcttatctccatctctctgtcctttttttgtggttttttttgtttgtttgttttttgtttttgtaggggacaggttcttcctccaccactcaggctggaaggcagtggtatgatattggcacactgcagccttgacctcccagctcaagcgatcttcccacctcagcctcctgagtagcttgggactacaggcacacatctctatgctgggctaattttcatgttttttttgttgttgttttttgttgttgttttttgtagaaacagagtttcactatgttgccccaggctagtctcaaacttgtgagctcaggctatctgcctgcctcagcctcccaaagtgccgggattacaggtgtgagccactgcgcccggccttatctccatctcttaactagttgtttgatgttgggcaggttgttcaagcctcctggagccttggtttacccatctataaaatgggtataatggtaattatcttatagcatggtcatgagcgtgaaatgagagcagggggaggagtaatcattgtgtctggtccatgggactgaatcaatgctagcaatggtcatgatggtgaagaatgaggggaggaggaagaaacaattcctgtgggtgctaggaccaaaagtagtatcctctaggaatcctggccttcaaggtctaacttccaagattctgtgagtacgattctagggagcctctgcctcagacttctaagtagttcttcaggctgtgctctagaagttactggaatgaaagaaaaattgtagtgtttgaaggtcttcaaggatcctggtcctctcacactgtcactcttagtcacatgacctttgactgt

SEQ ID NO: 16333 - DNA, 1045 bp, Homo sapiens
ctgcatggaggatagatgacttctcagccattgggaaaccagctaaccagctttctgcttgatggttgtagtaaaatcccatgattagtgacaatggcatgccaggtttgaagagcaaaggtcaggaggtgagaaagcagataaatgcaatgtttatcttgaaagaagttgtcaactacttggaaatccccaagcttacttcctccaggaagccattctggactacttcacccagttctcatagctcccgggccctccatcttcccagcactgaaacacacactgaaaagggcatttttctaaatatgtctctgcctccccttgtggagggatgtggctccttgagatctggggtcacggctggcgtgtttcgtggagtagctagaaagagtaataatcctttttgaatgcacagcatttacagaggcctcacaggctgaaaatggtaattaggatacacaattgggtcttttgacctcaaatccaggcattttcccaccttgtgggcctcactcaaatgatgaccccaggttctgcctgtgatgaatgagcaggcatggttttgttctgttaggatatgacggtagaagagagctgtttgtcagaaccagcagtggcttcagatcttgaaagtccaactccttcattttacagaggaggaaacctgtgccccaaagcaggtccccccaagttccagcccagtgccaccccactgcacagagcagctgtctccttttgatcatgaggaagccaccaggtccctggtggagttcagcagatgtgccgggtgggcgactctggtgggtgtgaggatgtttcctttcctgctgggaagtcctccaagctcttgtgaaagagatgtggtttgtcgagcatggattttcaaactttctttatagagagctgttgttagcttaaaaatgcctggaaacatgatcaagtgtaatgttttaatgataacatagaagcacatagtactaagcacatgtaatgagaatgtacagaactctctagtaagagtctgaaatttggccgggtgcagtgg

SEQ ID NO: 16334 - DNA, 1105 bp, Homo sapiens
ggagacggacaaacttattttgaaatagtctttttttgacatttccaaagaatatactcaatgtttttctgcaaccctttgccttctttttaggtgaaggacctctacatttaaagcagtgggttcaactgctaacctgaaaagctataataaaacatcccagagtatccaaaaagcctggaaacaaagggaaaatagtgtgtcctgctttccaactttcggatatgctgtagaatagactgaaacaaatcactggaaaataggttgttgtcgattttatttagaagcttttgttcctttggattttcgtctcttatttttagacagagtctccctctgtcacccaggctggagtgccgtggtgcaatgatagcttactgcagcctcaaactcctgggctcaaatgatcctctagccttgacctcctgattagctgggactacagaagcaggccaccacgtctggctaatttttgtatttttctgttgagaagaggtcttgctatcatgggcaggctggtcttgaactcctggcctcaagtgatcctcccgcctcagcttcctgaagtggtaagattacaggcatatgccaccacacccagcttttttgttcctttgaaagaaggcattgctaatgattgccctgaggtgtctagatgacccggccagccatccacctctgcagtttacacagcttgttgatctccacagtgagaattaacttcacaacctgggtccaagaggctggaggattgtcagtctttagaaaaaaaaaaatctattatctttagagaagatggacttgttgaggaagaagagtagacaaatactttctggaaatattttcaaagggaattagaaaaagaaaaagattttggttgtcctttggtgaatgagaatattcatcagcagaatgcctcattaccacgtcacacagctgaccaaggcctcatctgagactgtgtttgaatagaaattaaacagggctgacagtgaagtttctgcttttaattagctttcaaaggtacacctctacctgtgatgttgaaacatcttgaaaaacctctctgctctgtgcctgaatgaggggcatctagagggcttgg

SEQ ID NO: 16335 - DNA, 1037 bp, Homo sapiens
ttacgtggatcttgaggattttaagaaccagatttcttctctttgctcacattaggggaaaaaaaataaacctcagatgccccgtgatatctcgttgcgtcaggttttcctataaaatgtcaagacggcaatattaggtttcctggcttgcttttccccactgtgtctgctcttgccagaatttttattagggggaggggagcattctctacccctcctccctcaatgaaatcatttcttccctagcctttaaccctttaaagtttgggaagggaatactttgattttagggttaaatagaaaacttccttaatgactgtggctggaattaaggtgtacttaaagctgtagcagccctggtgggtcctgggctgactgggtgctagggtttggtatggaaagcagcttgcatcacctgcttttcttcccatgcctgtgccttccccaagctccccctcctaagccaggtacgattccagctatgttaaaaggccctgggaaatgttaactgatcaaaaatgctgggtaagtagaattattatttcaccctgaccaacttcagtcagattagcatatctgctgtcaccaggtatggcacaggcatgggtggaagctgtgcttggaaagtgaatgtgtttaggccaggtgtggtggttcatgcctgtaatcccagcactttgggaggccgaggtgggtggattacttgaggtcaggagttcaagaccagcctgaccaacatgacgaaaccccgtctctactaaaaaaaaatacagaattagccaggtgtggtggcacatgcctgtaatcctagctacttgggaggctgaggcaggagagtcacttgaatctgggaggcagaggttgcagtaaaccgagatggcaccattgcatcctagcctgggcaacaagagtgaaactctgtctcaaaaaaaaaaagagaaagaaaagtgaatgtgtttgctggaagctgtgcttgattaagtgaatgtgtttgatccaagagggcaggggattctggaagagacattaagtacaga

SEQ ID NO: 16336 - DNA, 2530 bp, Homo sapiens
aagggtgtcctttggcggggtgagaagagagcagcctccaaagattcccctgcaccccgccaggccctgccaggggcccctcccacagttctttgctccttccacggagcctgtttgagaattcagtgattcacttcccgtcgtcaactcttgtttaacgttcccctccattgttaccaaacaatccaggccccagtgatgtgtggtgttctgagagtagaggagggaagagagagagagagccagaactgtttacagagcccgggagatgggcccaggcttgacagccgggccgacttgaaagacaggctgcagtggactgtggccccaacagctgggtgtgtgcagggtgggaaatgccaggcacagccgctcctccacagaaaccactctgttctttctgctcttgatggaagctcctgccctttattgtggtgttagcttctttgttcagttacaccgacagctgagttttctatttggggccatagttttggggtcatgattcctggagtagaaaaaaaacaacataggagctcactcagaaggatccctgggtaaatgccatcctttcctgggccccagtttcctcacgtgttcagggggaaaagaaggtggtggtgaaatgccccccaccagctccaaagtcctgtggttctgaggctggaatattctgcaaaaggacatttgcacaccacccttccactgcccccgccccagtgtcgtgtccaggtccagttctaccagccacagatgtgagcatgtctggaacctgtctacctgtctcattcattccatgacctctgatttttgaggtcagtaattctgcagcctccctcacctttctggtttaaagcaacctcctctctcaggaagttgtttgaaatcaatttaattcctttatatcccacatgacagctacgactgccactgtttagttgatgttggcgtcgggtttggggcttacttggcttttgtgtttgcttctaacctgcagaaagagtcaaagttctgaagttttctctctcatcctttctgtttgttgctccatgtacagtagggaagaggaatttttgttggtagtccacatttttgattacttatttgctctgctgctatattatgattcaggttttctccaaggccctaggtgcctaaaagcattgaaggaatgagaagtgtagacacagaacacctttaagccacttccccctgcaaattagtgtatttcacaggtatttggaatgctagaaggtactagaaggtgagaagacactagagatccgttgaacccatcattttttaaatgagataatccatacctaaagactcctccatgagtcggtagcacagccagagggagggccacacacacccctgtcatctaatgagcagccagggctccagtccatccccagtgtgggccatatatctgtgtgctttctcctctattaaatccaacacttgataaaaatctccagttaacaaatatttgttgagcaagtttattgcaaatcgctgtatttaatgtctgcctacaaccttagccacagatgactctctctccctggtatggcaagtgggcagagcttcctcattcaaaaacattttagcttcctgcacttccccgctggttgctttcgcctaactggcacctgtggctgtcattcccctgctgtttttaattgcacctctcaagaccagctgattgcttaaagaacatttctggtattgggcccatggcagtaatgtgcgtctgtggatccctttgctatgaggcttgacttcttgatcgggttcacaaggctggtgggcagcctgagatctttgcttatttcctacgtcttctgaaaggtactatgaagcttaccagttgctgatgcacgctatcagctaataattccattaccattactattttctgagcaaatgtgacctgcaagcccctcgctccatccaggatgcaggcaaagttaagctaggtttcctttccctcaaggagctcctggcacagttgggaagggaagtcagaaacacacagaagtcacttcatcataccaggcctttggtgctaaatgatgatgaatttgaagagtgtgggacagtggggatggtggactgtaagagttcgaggaggggaggatggagagaggtcattcttagcagagagccacagagtgggttactgtttgagctggaagataattggacctccaagggctctgtccccacctgcacctcagcgcactatgctggtggccaagagtgcaggagcctcacattcagatactgtggctgcaacattttacctccactacttgggcctgttcagcattttgagtttctatgcctgtaaattaggcctgtctaggaagtgggggtgaggtggtgggtgggcaggtgctctgaatctcagctgggactgggtgggctgataccggggagagttgtaagtatctaggacccagcgggaggacgcctcacctggaaccctttgcttgttcctgattgtagctgttttagggatgca

SEQ ID NO: 16337 - DNA, 1088 bp, Homo sapiens
aagtgcagacgtgagtagcacttggcatgaggtgggccccagccccaccctctctccttggggtacactctggcaggcttcaccttcaccatcggctttgggctctgccatggccacatccttggctgtggctctcaccaccattttgggacactttacgggtcccgcttgaagccaatgggaggaaacctaatttcctgccacaggaaattgttctgctagggaagaatatatttaaggattaaaaccttctgtcagaggaacttgagggagttgctagagaaagacctttgggggtctctcatcaggaagccagtgggtgtgggagagatctcagtcataaatggggaggaggcccaacggcaggttcctgagactgtactcctaatgctagcagctggtcttgggctgggaggaagggctgggccagggagaagagtgggtcataaatagaccattttctgcaaccaagtatatttatggtaacatcagctcagaattaagacttatttattggatttacttaatgggcccagtgccctataaggcctgggagagtgtgttctggacacatcagctatattaaatccagcagctgaaactcccaattcactcttattactttggtaaggattgctacatattttgagtggggcagagggagaaagaaagaacaatgccagggctctgggcagcccagactccgaaccaagaggtgttgttgctgatgcgtaagaagtgaatgagatgtcttccctgtcgtgagtttgggaattgcatggcacagagaagcaggggcatggtccagatgacttttagaaaatactgccaagccagactggcggtcgtgtgctcacaagctggagagtgagaggtgcctgtctccttgctatcagaacccagcctgacagccaggagtcctggccacttggcatggccctgatacagactgctgtgtgatcctgcgacatgcactttgcctctccaaggtatgggtgtatggtgaggtgggaccattgtaagatgtgccttattatccacacggcattgtggtgagaatgatctgagataaggaacacagaagcctt

SEQ ID NO: 16338 - DNA, 1032 bp, Homo sapiens
tgtgtatttttagtagagacagggtttcgccatgttggctaggctggtctcaaactcctgacctcaggtgatctgcccgcttcgacctcccaaagtgctgggattacaccgcacctggctgaggttgtgcaattcctgagagaccgaaagagactcgcatgtacattgtagttgctgaaatccagcctggacatcgtggcacttttgggttgagcacacccggtgaaacacacccacccggcggagtgactagtagcgcgaaccagctggaatgcatcgaagaccttcctgtatccgatgccaagtgaccgctgcaagcttgcagctattcagtgcaggcgtgggaagcaggccagcggagcagcatgtctccagctgctgtgtttcttcccactctgcgctccctcttccctttctgctgctctccatatttgcacaatgattattgttacaaacaaacatggaccagaggggctggagattggaaagagcagcccagatttcaccctgtcagctcttgtttcttctccctcctcttcctccttgtgcctccctttactctgtcccctctcccttcttcctttcttctcattaagtgtgcctgcagggtcctgttgtgaacatgagtgatttatctacagtagagacagaccagacttgcggaccccagccagtgtgtgggtgggggctctcctgttttagtctctgttcttcagagttgcctgcttggatagtccagttgctcacgggcttggcttccctgccccccagggtgtggtagtgtctcgggccagagggtcacgttgttccccatgtcccttcacctacatatgcgcccttttagacttgtgagaaggccccttggacttcctaggtctttgtggttcaggccagcacaaaacaggggacaagcatttatccagtgcctaccatgtagcggtcatggtgtaagcatttttatatgcacagtcttacttaatttttacatgtcacacagtagatgatattatcctcattttatacctgaggaaa

SEQ ID NO: 16339 - DNA, 1032 bp, Homo sapiens
attctgctgtggtcctcatgtaatacccagctgccctcattcactcaccaagggcaacatgcagtgccagcagaagcccctgggccatctgcacaaaggtcaaaagtttctcaatgggtgtatctcgctattccgcaaacctaaacaccatgtgtcccactgatgctatctctgcagtgccattttatattttacttcctctgtaccccgaggcctttggcaaatgaatgacaccaacccaacctcaagccctgccacctcttgcctctgctagtccctcctagcctgattcctccatattgtcagggtgtcttaaatgccaccagatttgtcttcccacaggcatggaggttcacaagtaactaacttggtttccacatctgccagctcagatgactgttagcacctgtgaaaattcattttgaattcaaaacacccaaggagaaagggacttcaaagttgtttccttggctagatcttacactgaccccagaagatgtggataaagaatggataaagaaaaacgctgattaaaatgtaaactgttggccaggcgtggtggctcaacacctgtaattccagcactttgggaggcagagacaggcagatcactcgaggtcaggagtttgagaccagcctagccaacatggcgaaaccccgtctctaccaaaaaatacaaaaattagctgggtgtggtggtgcacgcctgtagtcccagctacttgggaggctgagatgggagaatcgcttgaacccaggaggtggaggttgcagtgctcataccactgcactccagcctgggcaacagagtgagacactgtctgtctcaaaaaaaaaaaaaaaaaaaaaaaaaaaaagaagtaaaatgccttttggtttttaagagtctgaataagcagagttcgggggagaaggatgaaatgggttggagtaatcatctggtgtgaccacatctgcagcagtcctcctaaggacctccccagcatcatctaaacacctcccttaccaagaggaggcaggttgcaccgtaag

SEQ ID NO: 16340 - DNA, 1034 bp, Homo sapiens
tctaggaggtgataagaaatttggagacaaattgaaatatgtgaattgcttttcttaaacaccccagttttttagatctaaatgttcctcattggagaacacacagaaaaatcaagataacttggaatgaaaaaatgtgacatttaaaaacttagtgaaagacctttttaatttgagaggggaaatgtcaagaaagtcttgtccaatacagctcaatttgtaatagttgcactcagatgtttctgaaatgatcatggcattttgttttcacatttatgtgaggtaactttaagatatttccacatatatcatcggttttaactatcacatatataatagctgcatttgactaagtcttgaagtcatttgtctaaggtcactctgtcaggactgtcactcagttggtctgaagtgggtcttactcgtcaaagggatctaatttttctggcagaattttgatctcttacctcccatctaggagagacttccctaaatgtaccttttcccaaatacaagcccctgaactcaccaatttcatagacttccccattaagaatcatacctaatcttacctgatcttttctcaccctcactttcaccatcacgcagcaatgagtttagccaaactgcgaagtctgagggaacggtccacaaaaaactgccctaacttcaacactcactacctgcaagttcaggggtccccagaaccacctcacttcagaccagctgggtacaaacttaggggccccatcaccaccctcacattcaatgattcactagaactattcgcagagctcagggaagtgctgtgctcacatctccaattttattatagtgaaggcatacaaattaatcagccaaggaaagagatgaataggacagagtccaggaggggtacaaacatagagcttttggtcatcttatccctgtggagtcattgacgtcattacctgcattacttcctcccagccatgatatgtgacaatatgcatagaatattgcaactagagaagcttatctgaggctttgatgtc

SEQ ID NO: 16341 - DNA, 1069 bp, Homo sapiens
tctcttcaatatactggtttcctttcttttggatatatacccagtagtgggatggctgggtcttatggtagttctatttttagttttttgaggcacctccatactgttttccatagtgggtatactttgctgaattcattaatcagttctaacagtttttggtggtgtctttaggtttttctgaatataagatcatgttgtctatgaacaaagctaatttgacttcttcctttccaatttggatgcctttatttctttctcttgcctaattgctctggccaggatttccagtattatacggaataaacgttgtgaaagtgggcatccttgtcttattccagatcctagaggaaaggcatccagtttctccctgtttagtatgatgttggctatgggtttgtcatatatggcatttattattttcaggtatgttccttctatatccagtttgctgaaggttttttatcatgaagggatactgtggtttgtatggctccaccaagtcccatgttgaaagttgatccccaatgttagaggtggaacctgatggaaggtgtttgggttgtgggggtggatctctcatgaatggattggtgccattctcatgggagtgagtgaattctactcttagtctccatgggaactggttgaaaagagacaggcacctcttcctctctcttgctgcttctctcaccatgtgatctctatgtcctggctccccttaccttctaccatgaatggaagtagcttgaagccctgaccagaagcagatgctagcactatgtttcttttacagtctgcagaaccatgagccaaataaatctgtttttaaaaaaattacccagcttcaggcattcctttatagcaacacaaacagaataagacaagggatgctgaattttatcagatgccttttagcatctattggaatgatcatatggttttttgttcttgattctgttaaagtgatgtatcacattgattgatttgactgtgttatatcatccttgtatccctgagatgaatctcacttgaagtctcgctctgttgcccaggctggagtgcagtc

SEQ ID NO: 16342 - DNA, 1059 bp, Homo sapiens
cttcatacctccagcacccttgtctccccttactttcagctgatgatctctcttcatactcgctgaaaaaaataaatgaaatcagatgagtgccacctcattttttgtgtcagagtctgctagtatccccagtattcctctccctctttctttgtaataacacctttgatctttttagctagaaatatggctgtctcatgtaaagaccatattttccagcttcctttgcagttgattatagctatatggccaagtactggctaatgaaatgtaagggggagtattatgagtagctttcaggaaatgttctaaaaacatagaactggcttgtgccctttgatcgttttcttctccctcctctcttttgctatgtgggatgagtctatgatgctggaactctatctagcagccatcttagaccaggaagggtaggtccacatattgggatagaagagtactgagctaggaggcgtctgctccttaagaattttatgacttccaaatcaaccctgaacaacctacctctggacttcaggtacatgagaggactaaattctgtcttatttaaacaatattcttctagtttttggtcacatatagacaaatgaatcctaactaaatgcatcagtctttctaggtcaagatgtatattctgtgccttctctctaatcataatggaagtgtccctttcctattaaggccagcctcttattaaggccttagtttctacagttatttcctctcatgaatcgtcagtttctcactcctcagtcatttagagatctttgcataactagctcagtttcatcactctggtcttagtctaattgttgtctcctcagagaggctgttcttgaccaccatatctaaggtagtttcctcttattctctatcccattatcctagtgtattttatttagagcatttagggcaatctgaaattaattttatatctgtttatgtgcttattgtctgattcctcacataccttcaagaaagtaagatccacatgggcagggacttcgtctgtcctgtttctaaaacctactaggctctcaa

SEQ ID NO: 16343 - DNA, 1032 bp, Homo sapiens
aactcaacaaatgtatttccatgttttctacatctttataccaaaattccctaatccccttcaatagccccccaaaaaaccaactattagttttattttaatctaactggcaattgatatactatataaataacccagatagagctgtttcttgccatcttttgggaacccaccttcttgctttctagtatcttgtgctttcacacttgcataagtaattaaagcctggttacaaccacagtgtctagatcatagttctctattattataagatgctgatatgcaatcatttgtgagtatatcatgtgtcttcttatttttctaccattagaataccaaagttttcttatgaattggagcaattccagattatctctgtatcaatgtcactcttcttcacctttcttccagtgtgctctcttgattaggagagaaagggatggagtaagcttgagtatgctgctgggaggatgtgatgcattgaacatcactgatcatgagtttcaaaatgaggaaaaggttgagaactattcctccagatcaccaaactgaggcatgaatgactaccatcccaggctagagcgatgagataaacaactactacttggtaatcaggagtctgttgttaacctcttctctgccttgaataccattataagaaataggacttgggagacaaaagaaactaggagtcacccactgggtaagaagctgagttttcaagaacgtgtgatctgctgcaacaacaggggcctgtcacagagacatgcaccagtgccaagggggctcagtcactcagtgtggccttgctcatgttcttgggtttctgtggttactgtgaaagaaaagccaatcctagcagagctagtttgctggatgcaaagaggcaattagtgtcatctgatagatgtttatgcagaaagggactgggaaaggctgtgaaggtagaagtgaagatggagaaatgattgccagtaacccttgatgagcaaccttggttcagtgggggaccagaagtagtagatgagtaac

SEQ ID NO: 16344 - DNA, 1009 bp, Homo sapiens
gccgtgaccgggtcgccgcgggcgctctgtgggcgatgagggtctcctgagcgagcaagaccagtctctccccgactcgccacgcgccacgcgccgcgcgccgcgcgccggttcctcggcttcccacgccgggggcgcatcctcccgggagctgctgcccttttccaacatggcgccgcgggaggcgggtcccgctcgtcggctcccggggttccggcgccgcgcgttttggttccggagtaacagtgtcgccgccgccttcctcctcctcctctcgccgctaccgccgtcgccgccgccgcagccgccgccagtccgcgcggcctcgggtggccggagctcagcctgcgcgcgccgcgccctgtgtctccgggtggggcagaagactcgccccttgaacctcccgcggggactctccgtggtgtggcggccctggggctctttcttaatagccccggactgagtcccctccagtcgaggaccctctcctagtccactgacgagcggtggacacctgccgctgtatctcccccaaaccgagtccttgccctgctgcctcctcatacccacacggcggcagagaccttcaccatagcgttcgctcaactccagaaccttccgacctccgctagttcctgcgggcctttgcccgcttcccggtgcaccctccccgggagacacctcagacccccgacagcctgggcaggctcggtgcctgcgggtgcgttcctgatcacccctcccctcttccctccccctcatcctccattcccttgttttcaccctctgtcctctgcccgtcactccccttgtcacctcttggagccccctcctaaccagcggccagtgggtttcccataccccaggatgtgagcctctttaacctgtaatgctgtggctagcccttggcccctttcctgccatggagaaccaggtgctggtaattcgcatcaagatcccaaatagtggcgcggtggactggacagtgcactccgggccgcagttactc

SEQ ID NO: 16345 - DNA, 1048 bp, Homo sapiens
ttcccatataccagctcctttaattttgatcttcttaacatctttataagatcagcaaggcaggttttttccccatttttacagcagaggatacagaggcataaacaattgtgtgcctttcttgaggtcacacagctagtcaatagagagctggggcctgaggtcactcactcgctggtttgtttcctcattcatccaatcagtttttcatgcagcaaatgtttattggatagcagttctctggccaagcactatgcaaggtggtgggggtgcagtgagcgtacagttcatgccctccaggagctcatggtccagtcagggagattaacaaaaaaggaaacagagttcagtgtgggaagacaagaaaaactcataattaccaagcggagtgataaatgatataatacacctaagcattaggtgctccatgagcacaagaagtgtctaatctagctttggggaccaaaaaggcttcctgaagagggcagtgtccaggtggagtaagttaggacaaggggactaggaaggatgtttggggcagaaagaacagtgtgtttaaagaatgcctggtgagtcagtaggagctgcctgtgattcagtctgtatggacagtgacgggggagagggtgggagatggggcttggaggaaggtgggttagaccatggagggccttagcccagggaagtgacatgatcatatctcatattgtcagaggcatttgagccatagcaactctgttagtctgttttcatactgttatcggaaaggggtcccaatccagaccctaagagagagttcttggatcttgtgcaagaaagaattcagagtgagtccacagtgcaaagtgaaagtaagtttattaagaaagtaaagtggtgaaagaatagctactcactccatagagtaggacgttcccgaaagtaggaggatgaatgtgcccaccctacgtatgatgtttgtttatgtataggataaaaaaggatcatggggagatgtgctctgctacaagggtttgtgataaaggattcattttcttaattactatat

SEQ ID NO: 16346 - DNA, 1055 bp, Homo sapiens
attttttttttttttttttgagacggagtctcgctctgtcgcccaggccggactgcggactgcagtggcgcaatctcggctcactgcaagctccgcttcccgggttcacgccattctcctgcctcagcctcccgagtagctgggactacaggcgcccgccaccgtgcccggctaattttttgtatttttagtagagacggggtttcaccttgttagccgggatggtctcgatctcctgacctcatgatccacccgcctcggcctcccaaagtgctgggattacaggcgtgagccaccgtgcccggccagtaaccctatatattagggtaaatatttttatgctcatttggaggaaactgatgtttaataaagttaaatgtcttcctgaaggctacacaagttaatgagtggcagacttagaattcaaccccatttcaatcagtaaatgtttattaaacacctactatgtgcagagctttgtgttagggctaataaatgccaggataagattatagacctgaagatgaagttatttggataacttgaagtaatattatgaaggttactttgttacatttctgtccaagctattatgttcagtatcttagtgtacaaagtttaggggtgtttttttggtcgttgctgtttgtttctttgtttttttcttttcttttggttttggtcatttctgcttattttatcactatttagaacaaaattggagagaatccctttaaaggaagagtatatagaaatgacactaatagatccagatctaaaaacaatttgctggccgtgtgcagtggctcacgcctgtaatcccagcactttgggaggccaaggcaggtggatcacctgaggtcaggagtttgagaccagcctggccaacatggtgaaaccccatctctactaaaaatacaaaaattagccgggccagtggtgggtgcctgtaatcccagctacttgggaggctgaggcaggagaattgcttgaacctgggaggtgtaggttgcagtgggccaagattgtgccactgtactctagcctgggtgaca

SEQ ID NO: 16347 - DNA, 1050 bp, Homo sapiens
cattattttatgggcacctactattcataatacaaatgagagtagttatttgtggtataataggttttatagaaccttgaaaaacatgcaaacttatatataaagttacgaaaatgactttaataaaaattacatgcctatgtatttttcctttatgtattataatattcgactatatgtgcatcttaagtgcattgatttcgtgcttttccatcttcataatatgatttctgcctaattattgctgtatactagtttgttatttgcaaagaaaagctatatctactctaggaaaatcataaacattatttagtttgttaaatgttaattatgggggtcatctgaggagttttctagggctgatttatttacagatcatgcattagattactgagtgtgtgtgtgtattgtcttcctaagtttgactttggttatgtgcagtgctctttggcattggttatatgcagtactggagactgttttcttatcagtatctctgacctgacccttttgagctatgttgtatcattccattttgacaccttttatcaaactttaatgaaatgacccaggcaaacaaattgtcattaaactttccatcacttcgtcccttggtatcgtcttttataaattggacagcaaacgttgtattgatcttctcgtttttgcagctgaacttgaaatgacccagactgcttgttgtttatggcccagagttgcttttccttgacatttccatccacagcatgacaccctttttgtttttctttctttcttgtggagatgaatgaacaagacatacgatatcgggacactcttggtcatggcaacggaggcacagtctacaagtgagtagtcaattttgtttaaactttctatccgcttttccaaatactgagtatccaagttctctgtggcaaagatttttaaatgaccactaacacttagattttatttccatatttgactccaaaattctgcaagacatctattttctcaagaattgcctggaaagtgcatttatattgcctttttaatatttccgagtct

SEQ ID NO: 16348 - DNA, 1927 bp, Homo sapiens
agtcactcaaactttggatctagaaatgaagtaatatttaacttttaggattaaatcatagtaagtcagttagccagcaatcactgaaagattatcttttatattattttttccttaatgccagttattcaagccaagactcatattttcagctttggggccagataatctagtctcaagatgtttgaaaactgaattttctatctccagctccttcccacaggatagagtaagagtctgatctggacttgaggtagaattttctcagtgatacaatgggtagtatatatactgccttcatggtgttttgaaggttgaatgtataccattacttaggaattaatttgaacctatctagagacaataagaggagggaaggaattgtcattctcaaagatgctggtctctcctcctttctgttgccttatctaaaaagaggtatttgctgggcagtgggctggggatggtccttggaggtggtaactgagatcctgtggcctattaggttgtgttttgcacttgtgatttgactgtagaggccaactaaaacattaaattactgtttgggagctggaatcatattagctcattatagtaatatgatttatttaatgaaaattagaaggactgatggtcatttgtataaaatgagaaaatacataaattgtctagttaaatgctatttagtaaacagaatatttcaaaacatggaattccttaggggaaacagaatgaaaagagtccttggtggtgaaaatattgggaaccacatagtacccagaaaaccttgacttcctctttcaccaaccaacctgaaggtgtgaaacttaaagagggagcaagaggtctggacccagcttcgcttgtggctgtgttagtggccctactcctttatatatttttgcatgatgtgtatcttgtaaattaagagtagtttttaaatggttttaaaattgacctgagagctagaatgatggtttgatttattttgactttaaatttctaatcacttaaggagtcttttccttgcagccaagatcatattttaaagaagcaaacaagacatcatcctaatgcaaaattaaatatttgtatatgactggattgcattatagtatcgtgacaagcaaggatattaatgttttcagaaaatcaatgaatatttgtcaaataaaattaattatgtatgtttccttctctccttctctcagcattcattgttacaggtttgtttcatacgataatgtatattttattgattcgaatctaaggaatgaacctgagctcatggttctctgtacctttcccacctttgcttttccccacctctccatgttcctgtaacttcatacatgctcatatccattatggcaatgatgtattattggcatccagccaacatgacaggatgtcacaggtcgctgagcagagattttcagactcagtttccacccgaattaactattattgaaatagtttattgagattgaagtattgatcattttctgctaaccttggcttaagggaaggaagaagaggcagtagtgtttttgaaagacactaaatttcatttttaaaaatctcatttatttagcctttttttctttctgttttatagcctttattgttttattgcttggaaaagggtatcttggttttattttttatgatagtataattatacttcagaaatgcacttgattactatgggtaacaaaattgttctagtatattggtttggccaatattgctatacaaacaacttttcagtcaattgagtctggtaaaaatcaatacgttatggtaatatttcaagtaagaatttgctgaatctaagtgtttcaacttcatctcctctcagagaaaaaaatagttttgaagtggcaagacttctttctaatattttagtaacaattttttatttata

SEQ ID NO: 16349 - DNA, 1089 bp, Homo sapiens
gctcctttggagtctcaagtgaaatgtttcaaagccctacctgcccttatacgtggaagatgccaagaggtactcagagtcactgtggttgcatttacatttctacagtgggcgccaatcacaagcttcatgttatggccccagctgtgtgggaatgtagctgagcacactaggtatcgtcatcctcatttgatttatgaagaaatggaaacacagataaatgaatggatttccctgaggattcagaccaagtcaaggataagatcaccactgaaacccaggcttttttaattcttagtcctttcccaatgccattcctggtaaataattacattttggctctaagaggagctagaataaacagaatatatgcaaacctaagaatttctgccagcaatctctagcagatatacttcagctgtactttgaatttttattttgtgcaccaggcacatgtatcttgtagatgaccaatatgaacaaacagctgtctcccttcctccctccttccttggaacgtgtaatctctgaataactgattagctcaatgtcagaaatgtttgtgctgatctctgaacctcagtcagttcaacacatgactccctggaaattttatctttggttttcttttttttttttttttttcactgccatgattttgtgagttagtttatgagtgtatttaaatcatttctggaatctaaatattttggacttgctggtctttataaggaagttagtttccctcctctcacatagacctctttctgctttctcctatctatcatattttaagagtatatgtgacaccgttaagttttaatcttctaaatggattggagaataacaccttcccttgactaacctcaaaggatttttaaaaacagaatgttgcctaatttttgagggagaatgttctaacacagtttatatatttttgtaactcaacaaaggtatctcataaagaacattggtggaattgggttttaaagtccaaatactttccttctgttgtccagaacatagctcctcaacctagaggcatagtgtcatgtgcagtgaagtcactcaaattccttcttattattg

SEQ ID NO: 16350 - DNA, 1033 bp, Homo sapiens
gatttaattccattgtggttccagaacacccttcctataacttaaattgttttaaatttgttgagacttatattatggctcagaatatgacctattttggtaaacagtccttgtacacatgaaaagaatgtatagcctgcttgtgcctgtaatcccagcactttgggaggctgaggtaggtggatgacttgagctcaggagtacgagaccagcctgggaaacgtggcaaaaccctgtctctacaaaaaataaaaaataaaaaataaattagctgggcatggtggtgtgtgcctgtagtcccagctacttgggaggctaaggtgggaggatcgctgagctgaggaagttgagacttcagtgagccatgattgcaccactgcattctagtctgggtgacagagtaagacctcatctcaaaaaaaaaaaaaaaaaaaaaaaaaaaaaaaaaaaaaaaaaagaatgtataatccactgtatagggtattgtataatgtcaattagatcaagttggctgatagtgttattcagatatttgttattagatatttgatttttatctagtactatcaattactgaaagaggggtgttgaaatactcaacaataattgtggcctacagttctgttattttttacttaatgttttttgaagatatattcttaggtgcatttatgtttgttatgtcctcttgataaatcggcctcattgacattatgaagtaaccttctttgtctgtgatcatattctttgctctgaaatttatagtctgatattaaattctaggcttcattttgacaagtgttagcatgatatttttttttttacttttaacctattgtgtcattatttttgaaatgtatttcatgtaggcagcatacagttgggtcttattttttaatccagttggatgatctctgctttttaagtgagagtattgagactatttacatttcatatgattattgatatgtttggattcaaatctgtcattttgctctttgttttctatttgttctgcctgtatgcccccttt

SEQ ID NO: 16351 - DNA, 1049 bp, Homo sapiens
agatagttcttttttttaagagacaggatttctctctttcacccaggtgggagtgcagaggtgcagtcatggctcacttcagcctcaaattcctgagctcaagtgatcctcccacctcagcctcccaagtagattgggaccacccgatcatactacacacaggtaatttttttttttttttgtagagatgggttctcgctatggtgcttagactggccatatacccctggccttcaggtacccttccacctcagcctcccttccagagtgctgggattacaggtgtgtgccactgcacgtagccaacataattcttttatattggtttgagggtcattcctatgctcctcttttgaaaatagccaatgtggctaaaatagagtgcataaattaagagtgttataacttaactgacttttaaagccattactattgacctttgagacctggcttttttctttggtcccatcaatcacttctgtaccacctcccccagtatagaaggacaaaaggttagacagatgcagatacagcttgtattactgggaattatagtggtaagaagaaggaggtggggaagaataaaggaactaccatgtttttagttcttatatttcatagtgattataactaatataattagaagattaaaaaatattaatacctttctatatttaggtcatactactagatattacactggaacttcagaagcaaattatgtctgaattggaaattctttataaggtaattttttcataatttttatttgtaaagcatgcctatggtattgacttgcaggtttataactacttttgtcttatttttgttacagtgcgattcatcatatatcattggattttatggagcattttttgtagaaaacaggatttcaatatgtacagaattcatggatggtgagttttcccttttataatacttttaaaatgatttttagagtatatagtgctttaaaacctggttttgatatagatatcaaatagaattaaagataataaaatatgctaataattacctcatttatactc

SEQ ID NO: 16352 - DNA, 1032 bp, Homo sapiens
ctgtaatcccagcattttggaaggccaaggcaggtggatcactggaggtcaggagttcaagaccagcctggccaacatggtgaaaccccatctctactaaaagtaccaaaaaaattagctgggcatggtggcacatgcctgtaatcccagctacttgagaggctgaggcaggagaatcacttgaacctggaagctggaggttgcagtgagccaagatcatgccactgcactccagcctgggtgacagagactctgtctcaaaataaataaatcaatcaaaatttttatggatccataatattgtacatatttatggagtacatgcataataatattttgacacaagcatacaatgtgtagtaatcaactcaaagtaatggagatatgtatgaccacaaacatttatcatttctttgtgttaggagcattgcaattccacttgtgtagttattttgaaatatacaataaattattaattgtgatcactctgttgtggtgccaaacactggatcttattctttctatctgactgtacttttttacccattaaccaacccctctttgtccttcctttctcactacccttctcagtctctggtaatcatcactctactatgtctccataatcatttgtttttggctcccacatgtgagtgagaacatatatgtctttctgtgtccagattatttcatttaaaataatatccacccatattcttgcaaataataggatttcattctttttatggctgaataatatttcattgtgtttatgtaccacattttctttatctttattttttcttcgatggacactcagattgatttcatatcttggctattgtgaatagtgctgcagtaaacattagagtgcacatatctcttcaatttactgatttcctttcttttggatatatacccaatggtgaaattactggatcataataaggtagttctatttttagtttttttgaggaatttccatactgttttccatggtagctgtactagtttacattcccatcaatagtg

SEQ ID NO: 16353 - DNA, 1035 bp, Homo sapiens
taaaactttaaataagttattggtgaaagcatcaggaatagtccccttgtctagtaacagaacacatgagagaataatcagatgagtgttgaatattgcaaaaggaatctccttttgtttttttaatgttcccaaaatatctgaattcatttggagcaaattattaagtgagaaagagactataacaaagcaacttcaaggcctagtgttactaacagtgctgtttaattttacacatctgctcatcttagctgtatgtacatttggggaatggaacagcatacacattagatgtgactaaaggaaagttttttcttttaaggatataaactgtgagatggagaaaacaactgatattttcaactgtgatgtcatatctgtcactaagggttgttttcttttgtggtggttttaatatcctagtgattccacatttcttctgaaatcctcctttttaatgagggtatctagattttgacaaatcaaatagtcaggtttttgaaggtatttaactgactaaatggaatcataaactagatttatttttaaagccagtccactccatttctagagtatagttggtgcgaaaggtaggtgtagggagagtgagttttgttagtgttactttctctgagtataaataagtgtgtaaacaaatttggtggatgaaaaaaaattgaacatttttgactaccaagagtaagagataacagtattcaacatgatataacttatattgtttctattccctgtactcctacctccgcacacccagctaccggtaaagtggtgatagccattttaataagaattaacccaatggtcagttctcaaaattttattgattctttaaaaaatggacatctatccatttgacaaaagaactaaaggaaaaacatccattcttaatagtaaagctttctttaaaagggcagtgccatggaaattcgagtgttgttagaaagtgagtgttaggatcatcctgtctctgggcatacaggttaattctggcttgtaatgaaatccctctctagc

SEQ ID NO: 16354 - DNA, 1025 bp, Homo sapiens
ctgaagtagcatttgccttgtaaaacatgtgaaatagcagtactacattaatttcctcatcggtttcattcaaatatgacctgttacccgtagcatatgaatgctttttccttgttgcctccctttggcattactattacttagataggaggactagcttgataattacacatatagagcaaaactcatcctttttgtgcaaattctttgcaagaagattacattttcttatctacctacttttcctgaaaaactagggataggatgatgggtgtatttactgttgttgtaagccaaggtttgatttcactgtcacttaaaataaactctttcttctgtagaaaccagaaatcgttgaacgtggaggagttaagaccttacattttaccttcggttaaaaaaaaatgcttttcattaaatttgtgatttgaatttcggattgagcagatgatgtcatttctgcaacttggtgtggtgtgcatgtgtgcttttaaagaacaaacgctgtagatacatggaattagttacatggccttttctggtccctttttagacgtgaagccctccaatatgctagtaaacacaagaggacaggttaagctgtgtgattttggagttagcactcaggtatgtctcttttcctcccagtgtactgttttctctgcaacaacccctttatattttcattctgttctctggattgaaaaatcacctagctgccagacaaacagaaactctgcatcttttcctcatctgggagtgtgttattcatttttaatctctgagcgagtttccttcatcagaatatgattgttcattgtttaatgacagtaaaaactgctgatattgtaattactacttacgaatagcaaacttcattgatatgcagctttgatatgaaagcgttttggccagacaaaagggagggcagagtgggagctgtgcctggggagcccaactggcccacaataaaaattaatattgggagcaacaatggtggagggccattacaatgtgcagcacaa

SEQ ID NO: 16355 - DNA, 1034 bp, Homo sapiens
gcaagatgtcttacaagcagtcctcccaggaacatagttaaaaggtaggactgaggttccacaagatgtcaggaaataacactgaaagcaaagccagacccatgaatgatgagttcaccagttcaagcactggcacctgttcccaagcagactggtacagagaggctcccagctgaccaaactgcactaaattttctctctgttgtcttgcatggcattgtcttacagagcaaacaaataacatcagccatccttttttaccttgtacagtcatgacagagagggccaagtagatgaatgcacattcccaagttggctggagcctggcctctctgtagaaccatgaccacttgcaaccggaagctttgtgttgaatcgggaagaattcacattttttgctgtatctcactccgttttaagccgtccatttaccattgcttaattctttaaattgcaagaaccaatggtcagtgttggcacctgccagctagtttagatcttgactatatgtgtggtgggcaagtttcctctgtctttaagccatgtgaacagaattattccatggtccctgatgacatgctgagcatatacccaagtgaatggcgcaatgcctgtggaaggtcttgagctagaatgttctaagtgctttgtagtagttattaagctattagcttttttaggtgtgagactctcctcttgctggttttctaactccaaatggaagtatatgcaaaagtcataatccacagatcactgtgatacctgttaagacactgcagactgttgcaaatgcctagttcacccaccacagtagaccatagtaattcctcctgaatcagtgtgcacactctgattggccagaaacaaactattttcaaaatgtagggcaaacctacgaacctgtattgaaaggaggtggggtggggacagaggatgggagaactgagtctctcccttttccctccccgtacatagacaacaaacataatcacacaaaacttcgaaagggagtttggcaaacatctacactctct

SEQ ID NO: 16356 - DNA, 1048 bp, Homo sapiens
ttgaaaatccatacacatatcagtgtatattttgtgtacaagatatgagtacaaggtaatgaaactaggtattctaagacatacatatatacacatacacacaagcatatgtgcaaatgagtgtgggccttttcaaagtagtcactttacgaggtcataatgtttattcctgttacatggctattgttcatattggttttagaactttgataacttcagcatattcatgtctaagcaacaaaatatttagtttttgtatgtggctttgggttttggtaatatccataggctattcaaaccttagtctacaaataatttacatgatgaacaagctgaggggtataattttaaatccaagataaggtgcatactaataaaatgaaataggtattctgttaattgaaataattctaaaacaattacaaaaggagaattcagaaatgtttgagcagtgtcagtgtctttgaaataagcgcagaacttctcaagatctagaaaggcagtttcatatgcaggaaggaacactggattaagttgcaaatcttagggtcagttcctaggcttccacttattaactgtttgggagctacttcagtgggactctgggttttaatctttgaagtgggttgatgctctcttagatccattagcgttaaagtccctgatgttgcgattctgctttgaaagtaattacaaatacatgtaaatgatgtcaggactgaggattggccacattataaaattgcaaagttttgccactattttctttaaataggtttttgtatgtttgttaaattttatctttttggccaggttcaatggcttagccctgtaatcccagcactttgggaggccaagccaggcagatcacttgaggtcaggagctcaagaccagcctggccaacatggtgaaaccccatctctactaaaaatacaaaaattagctgggcatgatggtgtgcgcctgtaatcccagctaccttgggaggctgagacaagagaatcacttgaacccaggaggcagaggttgcagtgagccgagatcacg

SEQ ID NO: 16357 - DNA, 1028 bp, Homo sapiens
aggagaaatgaaaaggattgcctgctaaaaattgtcatccttcattcaaactttacaacagtgccctgcattaggatgatagcaaatccattaaggagacttctcaggggatgcatcagctctggcattgggaaatttggcaagcaagatgccacaggaaagtgaagataatacagacacaaatgtatttaaagtacttttgcatgtataaaaatactgttcttcttttggctgcagttcctgatcttggttaataaattacatcaaaatgacctgaagttaaaaaaaggaaaaaaatctgagcaaatagtgcccctggtattgtaaagctttgaatgttttcacaccccattaatttattacttctctttcttcatctttaaatttcattttttttttcaaaaattccgactccccgctgctgcagtgattttcatcttgttgttaattttccctgctccatatggagctccagacatttcacctggaggctgtactagattttgctgtagtgatcgtacttccggaggccaaaactgtcatttagggttcctggtgcatctgtctgcgccaggcttttcactggcatgggagagtgtgaataacaaattggatgcacctgagattcggatgattagtgtgttttgtgaatctccacgacttgtaagcagatagctctgtggggagggggggcttaacagcgactgtgggcgaatctgtactcacaccttacatttggggctttgcaagggaagtgcaaacatcctaggcagtctgagtgcagagagagtaacaaatatttcatcctgccttgtcattgattagaaaagagcctttaatttcatttcaccccatgttgtgattaatttgcattctttgtcagaagttaatggagttttttatggttcactctgaaatccttgaagacatcagacttgatctgatgtttatacaaccgccagcggaattttttcgtttgattgatggcaagcttgatgttattccaaacggctttttaagctgttttt

SEQ ID NO: 16358 - DNA, 1111 bp, Homo sapiens
cagctttgctattatctctccctcctaggctctgtggtccaggaggccttctacttctctccctttgcaagaagcatgggaaaggatgtgctaggtactcaagtccaaaggaggttcatctggtaaaagataaaggtctaaaacagcatattatatttggtgttgttccggtactttaacagtactaccattgttactttcatttccctaacagcttagcaattctcctaggtaacttttaaagtcaccgtgggaaggaagtaagaaaagggaggggagcatggtagaggagggaggtaatgtgtcaggatggagatggcaagtgtagcagggaccagataaagaaattgggtttgagaattttgtacatccccttgacatgactggggctgatctgaggttggaagtcattgcattttaaggtctctgcccttgaggacagttggcacatgcccctgaggggttccctgccaccctttatgaatttggcttggtatatcacggcattttctagactgctggggaggaattgtcatgatcaaatggactaatgcctaagagagcactttgaaaaatataaggtggtaaacaagagctaggtaatattagtattatttatatttccagaaagttcttcagggatttacctatgtaactctgaaaatatatgaccatgtctcacaccaggtaggactaaaatgaattatttttctgatcccacaagagccttcctttacagactttcttttttgagttataatttatcattcacaatcaccatataatatatagaattatatacagaatctcgtcatttttagttcagttactggggaccatgattcccttacaatttttaaataatcaatttagcccccagaaatagaattgaaagttaatgaacttggtgttcagtctggctttcatgtggcagctttgctattatctctccctcttaagctctgcggtccactaggccttccacttctctccctttgcttttattgatgcagtctgctactttatggaatcataggatttcagcatgtgaagagatcttacaatgatctagtccaactcttagattacagatgaggaaataggagtccac

SEQ ID NO: 16359 - DNA, 1050 bp, Homo sapiens
acattagcaatgattgcaacattaagcccagtgttcacaatctagcaatataaaacattatttatatctgaatcgtaaacagccttttgaaatggattatggtttttctccctattctaatacaacctggagggtactaaaaagtgttgtgtgaaattaacattctgctgactttcgcctataaatgagaagcgagctattaacatttgtgtattttcattatgtaaattgtgttaacacatgcccacaaattgccaccagcaatgcaataattttctctcagtgatcataatgtgtccaagtgagtcattttgattatgacatgctaattacatattgccttttttcagattcagaaaaaccagggatctttaatggtaagctttatgagttcagaaaaaaattcacttttctttttcctgatggctgcttcctttgcatgcttgaatgccttgttttaaacttagcaaattgcattttgaagaaaatgcaaacctttaactgcctgtattagattaggtaccattagaaataatagaacctcctgagcatcaatgtttttataagagtttgctgttgttgattaatcttgctatattttattgcattaatgattttttctttccactccactgtaaagatattgcatagaggctaatactttttcctctcttcttttccattgcagcctctccagcttctgcagtgcattgttgatgaggtgaggcatcgtcttatgtgctttcactcctaaagtcattcctaatggtgtggaaagcttatattttgtttcctaatgaagcacaatgcccaacatccttggagcaagttgtgttgtatggctctgagctatgttacgtgaactggccttgtcctgaatcccactcttctgattctggccaagaaaccctgcaaaaacagactatcccgcaggctggtcctcaggggcatcagatgccctaaagacaaaacacaataatattaattgaccctctccctggccagatggggatggaactggaaattaaaatgatatcatttttttctgca

SEQ ID NO: 16360 - DNA, 1023 bp, Homo sapiens
ggtcctccctaagtccctgaatacctgcgttgtaaagtgctttggttctttataagtgatgtgtgtctatgtgtacctgaagccttagccatctgatatctttggggaataagtcggcccctattgtctagataactgaaatttatgactgtaagctctgacagctatgagaaatttgcatttttagaaagaaatgtttctaacatctatttgttcttggcagcctgttgacggagtgtggtgaatatcatttaaccttttctcaatgacttagtcccttgttctgaacatggtactgaacgtaaactttgatgtattgatgccctccagggctgtaaaattgtgtggggtttaccttattctttcactgaattttaccaaccattttgccagagtgtttggcgctgacattgatattctcgggcctcttgaagtgtatagagccctttgcccccaggctaacatgccttacatggctgtactgctctgcatagtgcttttcctgtgccctcttgtgattgcctctgttctctatgggcactcctcattcttgttggtggctaccttttgtcccaacaacctgaccgtctgtcttcggtgttttttgtttgtttgtttgtttgttttgttttgtttttgagatggagttttgctcttgttgcccaggctggagtggagtggcacaacctccgctcacggcaacctctgccttctgggttcaagcgattctcctgtcccagcctcccgagtagctgggactacaggcacacgccaccacacctggccaattttttgtattattagtagagacagggtttcaccatgttggccaggctgttctcgaactcctgacctcaagtgatccgcctaccttggcctcccaaagtgctgatttcatatggtactttttagttttgctaaggtcactatcaggagtacaaagactgaagacaggctgggcacggtggctcacgcctgtaattccagcactttgggaggccaaagcgggtggatcacaaggtc

SEQ ID NO: 16361 - DNA, 1027 bp, Homo sapiens
aatgagctgctactgtcagcccagacccagtggacagaacgtcacaccaaaatgcccacacatgtaatttgtcacgcctggcagcccagagcatggggtgagccagtgtggaaattgaatcatctttcactttctctgctcaagacttgatgtggagtaggatgagtaaaaggcgggctttctgttctgcagctgagcggagttagaggctttcttctctggtatgtcatctgccagccttcctaagttcaaagcctcgctttcaccctgatgttttcccttgtaacacaccgagaagtaggtcagttctatctgcatcatgaaatcaaaaataaacttagagtccaaatgctgattgttccttcatggagtggccacattttaaaataaactcaatgttttaacaagcattgattgaatttgtacaaatctgctatgtagttatggctactcacactctaaacgagactcattctcggaccaggagcacctattcatctctttcccacctttctccttctgataacatgtgactgcttttttctcccctgtctacattctgttacagcagatatgtacattgaggacctttaaaatattaaaatatagctgatttcccagaatctcacattagtttgcaccttggacaggttgtttttggtttgaagattagcttctatggagatccttggaggtgagggtccagttttttttcatttttttgttttttagatttttttttttaaacaaactcgattttctccccaagcaagtacagatttgccctatgggttctgccagttgtgtcataaagatgctactctaaggcagtgaacagtggaggatcagaaaccaatttagggtctgacaggcaacacgctatcctgctgggcatgaagcccctagaattacaaatgacctttgatcccagcactgaggatagaatgcagtgatccaatagagctttgccaattagtatgaatcccagtgcctaagagtagacattgttgggccagggcaaaggaac

SEQ ID NO: 16362 - DNA, 1038 bp, Homo sapiens
agagggaagacattccagggagagaaaatggcacaggctgagaccggagggaacaaggacagtgaagaacccaccctagccaaagcaaaaaagacccttggaaatgatggggtaaagttagctgcatggggccagtgtgatctggaagggctgtgcacaccagagagtagtggggcagttggacgcacttgttggttcttaagcagggaagtggctgttcaatgatagataggcaggcagggcggacaacaggactgattccgcctgcccctggtgggccagaccctctggctgaagctgattcgtgcataggaatgtcctaaccctttggctgtttctcaaattttgcgaaggtctctagccaaaaggatgggaaaccgagttcagcgcttgtagctgtttggcagcatgtcacttgtctctctttctgcatcttcttttctgtgtcctttctgtcactatcagggaaaatcattagtatgctaatctagctagccgtcattttaacactgacctttgctaacctgcctttgcaatttcaggaactatgtttgacttctctaaaagtaaccttaaattgtagtcttgtaagaattccagagctgtatccttcactccttcttctaatgaggttatgaccaaatgctcattataattgctttagactccttttaattttcaagcttattaatcataagaagagttatttaaaattgcataaattaatcttagattaaaagcccatcaaagcctcgaaacaattaagaataagtaggatttccctggggcagcaagttttattttaatattgtagtcaggtggatatcagaaccttgaagtatggtagtgattaatgtatgcaaaatttaaatgagattttttaaatggcaaatctaaatcacatgttgacctaactgtaggctttaactgcattgtctgtcatatatttaaactgtttactaatcaacattttaattacagcatgtgctggcagaccctaggacaaataaaatctagcatttaaaaatgttactgcag

SEQ ID NO: 16363 - DNA, 1128 bp, Homo sapiens
gcaggccagggtgttgggatcagggcttcagtgggctcgctccatgggcctggctgggggttggctcaaatggcctggagtaaagccttctaccgaagtgacagattagtctttgctcgagattagcctattgacaagttaaaaataaaaacaaacccaccttatggaacatctattcagtgcttcctttgtgccagccattttatatgcatttcctcatttaatcctcacaatacatctgttttaagagccactgtttttcagatgaggaaacaggctcagaaagattaaatgaataatccagggccttaaatcagaatccatagtgttcacccctgcatcagattgcctttctctaaactcttcaacctcctcattagtgtatgtgtatgcatgcatgtatgtactacctcctattttaataatgattcagtgactgatatggtttggctgtgtctccacccaaaatctcatcttgaattgtagtccccataatcctcacgtgtcaagagagagaccaggtggaggtaattgaatcatgggggcagttttctccatgctgttcttgtgatagtgagtgagttctcacgggatctgatggctttataagtgtttggtagtttctcctgcattcattctccttactgccgccttgtgaagaaggcgcttgcttcccctttgccttccaccatgattgtaagtttcctgaggcctccccagccatgcagaactgtgagtcaattaaacctctttataaattacctaatctcgggcagttctttatagcaatgtgaaaatggactaacacagtgaccaaacacattagcctgctatatgacagtgacattacctatatctttatctcattccagtcatggagactagggaccatggcttgagagtttcaccttaaactgtctcgatacactcagtctggctaacttagacaggaagagctctgtggatacttgctgttaattcaattaaagaaaaatgaattcattacctcctcagtatcctgacatattacctttgtgtgcttgcttaaataagatatcctcttataaagagcaaggatactttctatcatagggaataccagtgtcttagctacttaaggccctatgt

SEQ ID NO: 16364 - DNA, 1665 bp, Homo sapiens
caaacaaaaaatcccccaaaaaacaaacactatactgaacattaatatagagaaaatggaaataagactttaccatatttttaatctcaaaacaaagtgttgccatttaaattgggaggtaacatagtttcaaggatccacaatctctgcctccggggttcaggcaattctcctgcctcagcctcccgagtagctgggattacaggcatgcgccactgcgcccagctaatttttgtatttttagtagagacagggtttcaccatgttggccaggttggtctctatctcttgacctcgtaatctgcccgccttggcctcccaaagttctgggattgtaggcgtgagccaccgtgcctggcccaggatctggttttagaaagataacataggcaatgaaagcatttttatttttagaaaaaacctttatgagttaaaccaattaataaatgcatatgtgaattaagaatgctatttgtgcaacatctgaaaagtagtgcatgtagaaggaacttgaaattgatcgtactctaaatttgattcgttcgactttggtcttcacctaaatctgtatttatgtaacgttttatcattaggatttctttgaaataggcagtagagacaattttaaagtacttagttgtctttaaccatcaatttcagaagtagtattaattgccactgcactttttgctagatgtttatgactatatttccccttccatgttaaaaattgtgcaactcctgttacttttgattccctctactcttggtttcagtagtgtcacatgaaaagaaaattccctagaacccttccttcagagttttctggtaagtcttcattcttagctatgaacttctaaaattcgtcaaaatgaagaaaccacctttttatttttcagcttttctttagatcaagcaaacaaaacaaacataaatcctttgaatattaactaatgatggagatatcagtaactctcataggactgttgtaaacgttcctatttttgaaaacttaatctcttttttaccttttttgctattcactgctttcagtttacccgctttggttgccgggttaatttcaccaaaacactcctttcattctgtcactcctatctataaaaactttgaatggctttctatcgaaaactggataaagacttagttctcagtctagtattcaagattttctattgtctggccccattccactttgtgtgtgtgttttgtctcttcagctgtatagcaaaagcccttaacttaaagccagagctgttagtttgcgtctttttgttggctggtgttctgtttgtacaccccccattctcccatccctaccctgtggacacaataggtgtttttaatatacatgtgtcagatgaacaaattatgtttaagatttgtttctgtcagagactggggcctgatactcttgtctataagacaatctaaattgaaaatatttttagggtcatatcttcgctcttttttcttgctgctgcttagatgaacttgaataacattaaatccagaataatttatcaagggctgttttagatttaccttttacattattttaagttatagagataataagtgactacacttctcattgtaatgatctaacagtaaatagggtaaaaatggaaagacctcatcatcttc

SEQ ID NO: 16365 - DNA, 1044 bp, Homo sapiens
gttattggtgattttaatatattatcacatatgtgtgtatatttatttaaatatttctgttatagcggaatgtttactaaaaattatctttttaaaaattatacaagtaatgcatcagttcttacagaggttttcaaagtctatttctcaggcctctggtggttccccgaagtttttctgagggttctccaggtcaaaatgattttcctaataataggcattatttacgtgctgacatttgcaaaatcagtggtgggtaaaactgccagcaccttggcacaaattaaggcattggtactaaattgtactagtagttgtgttcttcatcactgtgcacttggaattaaaaaaaaaaatgccagttaaactttatgtccttgatgaagcaataaaacttactaattttattgtatctcaatccttgagtacatttaaaaatatattttgtatgatgaaatgaaaagtacctgtaaaacacttttattgaatatcaaatctgatggttaactcaaggaaaagaacttgtgcagttgagttgtgagctttttaaatggaataccatttttacttgaaaaaatggctggcaaagtatggttatacagactagggtatttggcatacattttcatgaaaataaacaaagtgtgcctgtcactacagggaaaacaactgacaatatttgttactaatgataaaatttaagctttcaaatgaaaatagaactttggaagacatgtatttgccactgtgagcttgacagtttcccaatacttgacttttttgataagatcagtgtgatattaatgaatgtgttatgttgaagttgcatagtgaaatatgtcaacatttggaagaactgcataactcagtgaactaatattttccaaataaccaatgcatgatattacaaaatcatgcctggataaaaagatccattggaaatggaagatagaccaatgaatttcagtttatcagagtgggaaatattcattgatacggtttcagattcctgcgttgcagcagcctttaagaacctgccatttg

SEQ ID NO: 16366 - DNA, 1081 bp, Homo sapiens
actttacttcagtgaatgacaggatgacctagaagatggactgtccagtactatggccactagttctgtgtgggtattgagaacttgaaatatggttagtcctaattaagatttgctgtaagtgtaaaacatactggatttcgaagacatagtatgaaaaaaagaatggaaaatatctcattaatgattgatattgattgcatgttgaaataatattttgtttattggattaagtaaatatatatcattaaaattaatttcacctacttgtaattttttgaaatagagatgtggcctcactatgttggccaggctggtcttgaactcctgggctcaagtgattgtcctacctcagcctctgaaagcgttgggattacaggcatgagccactgtgcctggcctttttactttttaaaatgtggctagtagcacatttaaaattacgtgtgtgtctcaatatttgcagcttacattgtatttcctttgaacagcacttttctagagatattactgctcataagtagaatgggaattaggtgggaggacaattgtaggggtttgtagaacccagtggcagaatcctttgggagagggagtggacattgaggcttattttcattgagttgctggtgctttctcttctgctgttgtttgttcttggaattaatgaccttcttttcacccccgcccccccgcccctacctcccttccctccatggagtggctaaccccagggagtttgcttcattctttttttttttttttttgacagagtctcactctgtcgcccaggtttaagcaattctctgcttcagcctcctgagtagctgggattacaggtgcatgccaccatgcctggctaattttttgtatttttagtagagacggggtttcaccatgttggccaggctggtcttgaactcctgaccttgtgatccacctgcctcggcctcccaaagtgctgggattacaggcgtgagccactgcgcctggccagcttcattcttttgaggagaaaaataataaacgataatagaaagcagtaccaacaaaacaaataaccatgtaaatctaagtagtt

SEQ ID NO: 16367 - DNA, 1409 bp, Homo sapiens
tcgcccaggctggagtgcagtggcgcaatctcggcccactgcaacctccgcctcctgggttcatgccattctcctgcctcagcctcctgagtagctgggactacaggtacctgccaccacgcccggctcatttttttgtattttttagtagagacggggtttcactgtattagccaggatggtctcgatctcctgacctcgtgatctacccatctcggcctcccgaagtgctgggattacaggtgtgagccaccgtgcccggcgaggttatatgtgtaatttctaatatatttgcattaccaatatggtttgtaataattgacaggtgccaaaccgttgttactcatatttattaatgatgaacaagacagtctctatagacagagcatgtattttggttaagaattgacaagtaaacagggcctctctacatatggcataagagcggtaaactgagttaaacaggagagcacataaaagcgtaaatttttttaatgttaggagtggattaaggaaaatatcccaaaggttgtgacatcaaaattgagaacttactgatttggagttagctagtaaaaggctgggataggaggggggagaagagcttctccttgaaagaacagcatatataaaagtcctggaagatggagagttggttaaaagattggttacggtggtcatgctaaggagatggggcctctgagtgcagtaggtgatcatggaaaagtttaagcacaagcgtgacatcattggatttatattttagaatgatcactggcaatagtgaggagaatgacttggagaggataatattggaggcagggagaaaagttaagagtctcttgcagactctgaattagagtggtaatagggactaagatattttaaggtgttaagattgacaggacttggtaaatagattggaggtgaacaagaagatggtgtagcagcttctggcattgacgggtgattaggtggatggaaggtttggagagagttgatgtgttagattcgaatatgttgagttgatgactcttgggatataaggagaggtgtttagcagatgtggatttggagtttaggagaccaaggttaggctggaaataaagatttggaaattgttaatttagagatagcgttttgaagttacgagtggatgagatcactcaggaagactgagctgagtgaaaggattactttagacttaggattcagtgatattgttcttcttctgtcatagagtttatctctacttttttttccttttttaaaaattaaatttaaaaaaattttatttttagacagggtcatgctcttccgcccaggctggaggcttgatctgctgggctcaagccatcctcccacctcagcctcctgagtagcctcccaaaatgctgggattacaggaa

SEQ ID NO: 16368 - DNA, 1100 bp, Homo sapiens
tatagtgatggttactgacaaagtaaatattaaaaagtttcaagaatataaacttccaaagagtagtattttagaaggttgattaatattttataatatctcataaattaaattaaaaccaaatgaatcactacaagtctctgattagttcttaattttcaggggttgatgatctctaaaacaaatcactgactagttttgattatttaaatgagtgaatggttttaatgatcataaaaggagacttgagctttgatgtatgctagttaaatttcagctgatttttttcaagtggagaagtgcatgctttacaggcatgcacatgcacatgcacactcatgattacggttatataatataagtgcttgaaatttattttactgtgttgttccatcatttgatttgtagtctagcatatagaattcaatatattaatcaacttgtaattttaattgctataatgctaccttatttatttaacgtagaataaaactcaactgttgtgacctctgatgcctttggtataatatatttaaaatatcagacttctaaatgctggtttgttggcatactacggctggcaagctaagtccagtctgtggcctgtttttatgtggttctgagctaagaaatctgaaaaatattcccaaagagttattaacaaaaaaggaaagaaacaaaaacaaagaatgtgtaacggagaccatgtgtgcctgtaaagcacaaaatatttacccgtatagtaaaagcttgtgaatccctgttacagatcattgaacatttcagtttgggggactggcaagtgttgagaacattttttgcgaatttttgagaacattttgaaaatgtttactgaaattctatctttgaaatatgaagtgtttgtttttaattatatttagcagaaattatctgaatacacgaagattataggagtcattttcaaacaacgtgagttttgtatcacattattttattttttaagtggccataataagaaaacattttttgagaatctactgtatgcttataaaactgacacatgctcattgtaaaaaatggaattgccaaagttccttccttgttagctgtttagtgtg

SEQ ID NO: 16369 - DNA, 1096 bp, Homo sapiens
atgtggcggcgagatcttggtttgctgtggccttaacctccctggctcatgcaattttcccaactcagcctcccaagtagttgagaccacaggcatgcaccaccacacctggctgatttttgtttttatgttttgtagagttgaggtctcattatgttgcccaggctgtcctaacatttaatttaccctttattaaatgtttttgttttgttcctcaaaatgataaggcttctgaggcatttatctataaatccctataatagctagatatgaacctgttacatggtagttcagtaaacatttattagctctccaactcgttttaatgcagtagatggaatcttttatttcattttaattcagtggattttaaccattttaccttgcaaacacaactgagccataccacactctgtaattacaaacagtggctatgatagggatgggaaatagagtagggaagaatggtattcttcctcttattgccctatcctgtcatctctgaggttaattgatgtctttgaaatttaatatactccatttaaaaaaaattttccctaattacaaaaatgttatgtttaatgtagaatccatagaaattataattacttgcttactttacagataaacttttaaaatacttctgtggtattctttttgttagtcatttacgggtgtgtgtgtgtgtgtgtgtgtgtgtgtgtgtgtgtatttctggtttcattttgaaggagaggagaacctcactagctcacgtaacctggcagccgcatgtattattgatccatataaataatggaagaaaattttaatcttgataggatgttgagcacatgtgttaaggggtactttgtttgaaataccttattgcttagtgtgccaatattggtgttgatgaggtgtgaaatttacataattatgaaaataaaaggaaaaataattttggattaaaatatcttgtccattcagggacaagataattatttgatatttcctctcaatcctttaatattgttttgtttagaataatacctgtatcattcaaaatagtttataatattgtttatagttattgtttaaattggctttgttagaa

SEQ ID NO: 16370 - DNA, 1929 bp, Homo sapiens
aacacgtattttgtatatgtatgtattgtgtactgtattcttacagcaaagtaagctagagaaaagaaactgttactaagaaaatcataaggaaagaaaatatatttactattaagtggatcattataaaggttttcatacttgttatgtttgcattaagtaggctaaaggggaggagtaataggaggattttcatcttgctgtctaagaggtgacagaggtggaagaaaatctgtgtataaatggacccacacagttaaaatctgtgttgttcaagggtcaattgtacttaattttttgattgtttttaaatttttaaatagataatacattgatgtacaaaactcaaaagttacaaaagggtttgcaatgaaaaggaagtccctctttcacccttatttcagtcacaggtgttgctttcagttctttttatatttttactggggtagctgctgcacctacaaacaaacatatttgcctcattcttttttagcagctacttagtaggcaatagattcgttggattctgtgttattaaatattcccctgttggtcaacatttgggtagtttcttgctgttgaaaacattgctgtagagaatattctgtgatatatatcactatgcacttgtctaaatatagccagtagttttataattcctagaaatagaaagtgcatctaaatattttttgtagatgttgccaaatttccctctagagaaaggtgtgtttgctaatttataatcttacaggctctgtaagagactgttttttcctcctgtgccttcaacgataccatgtgttattaaactttttgatcattccaaattaacagcgaaaatttataactcattatagttttaacttgcacttctcttatgggtgagggtgaagtttgttgttgttgttgttgttgtttttaaaaatatattttttaaattataaaagcacatcgttatttatttatgagcggagttttactctcgtcactcaggctgggtgactatatatgtatatatatttcttttttttttttttactcttcaaagttccttgagctttttattttgaaatttggtggttgggctttttacccttttttatagacttaagaaatttagcactttgtgatataagttgtgactactttttccattgtgattgtcttttgagttttttttatgattggtgttgcacattagccatcagttcttttttattgctaagtaatgattcatggtatggatatatcacaatttctctaactattcgaattatttaagagcattttggttgtttacagtttctggctatcataaataatgttatcctgagtattcatgtacaggtgcttgtatggacataagttttcttttctccaaatacatgcccaggaatggaattgctgggtcatatgtgtaagtatatgggtttttgggggttttttttttgggagaaaataccaagttgtcttcctgagtggctgtaccactttctgtttcttctggtattgtatgagaggtccagtttttctctgtctttgccagcatatttgttattgtcactttttttatttttagatgtttaagtatgtatgtagcgataactcattttggttttaatttacattttcctaatgactaatgatgttgaacatctttccacatacttatttgccatctgtcgacatacttatactctttggtgaaatgtctgtgcatatttttctcattctttaattgaattacttgtttttatattattgacttttgagagttcctttgcatattgtagatactagttttagtcagagatgtagtttgcaaatgttttcttccagtctgtagcttgtatttcttcgggaaaaaaaaaaaaaaaacaccttttgatcttgaaataattacagatttgtaggaagttgagaaatgta

SEQ ID NO: 16371 - DNA, 1596 bp, Homo sapiens
taggattacaggtgtgagccactctgcctgacccttctttgattttgatcttagggggaaagcttcaagataaaatgatatttttttttctgtgtttaggcttttgcccttgaatctaccatgttttgtattattatcctttttttttttttaagcttttcgttagcatttgtctgacataaactttgttcttttgttttcaaccttttgtggtgtttatttttgggttctttttgattttttgttttaaaatagctttattgacatataattcatataccacaaaatatattcctttaaagtgtacaattcattggttttactatatccacagagttgtgcagccaccatcactatcaattttagaacattttcatcacccagaaaagagcctctctacccattatcaatcactctttagtgccacctctcccatcccctgaaactactaatacggcatctgtctttatagattttcctgttttggacatctcatatgaatggaatcgtatggtatatgaccttccgtgactggctgttttcatttagaatgatgttttcaagttcataaagttgtatgtgccgaaactttgttctttttaatggccaagtaatattccgttatatggatataccacattttgtttatacattcatcagttgatgggcatctgagttgtttccactttttggctaatatgaatattcgtgtataattttttgtgtggaaatatgttttcaattcttttggttaaatacctagaactagaaatgctggctcatatggtaactttgtttaacctttgaagaactgccagactgttttctaaagcagctgtaccatttatattcccaccagtgatttatgaggattcgcatttctctccacatccttaccaacacttgttattatatgccttttttaatatagtcatcctagtgggtgtgaagtgacatctcattgtagtagatttctctcttacaaatagcacgtacctggctttttaaaaactcagtcttaaaatttaacttactctcattttatgctaacgttgttacatttggtctttgttctgccatcttaatttgttgtctgtcatttttttctgacctctgtgatatgaattatactttgtttctcttttattttctaatggtttgggagttctgccttctatttctgtaggtagttactattgaaattttacccaacacatttaagcctaaattttactaccaacatcaacaacttttaagagtaattactgtgtcttgcctcttctcctcttcactaatttattctatcagacatgtattcatagttgtttcttcaaaattcatattaaccacagagagacaaatatttcgtgttctcacttatatgtgggagctaaaaacaattgatctcatggaggtagtgatgatggtggttaccagagggagactgtagttaataagaatttattatgtatttcaaaatagccagaagagaagatatgatgtgttcctagcacaaagaaatgataaatgtttgaggtgatggatatcctagttaccctaatttaatcattgcacattgtatgcatgtacaaaaat

SEQ ID NO: 16372 - DNA, 1713 bp, Homo sapiens
tataccaagctacagttgtagatattgattcaagtaaaggtgatacttcctcttccagttgatttttatactcttaatttgtgtatacatacattttcacacatgaatatgtgtgtgtaagagacagagtgcattcatttgcacccagggttggaggaaagaagagaaagaaatgagaatatgtatattggagatacttggctatttgtacctcacctgcccatgaaggctaaaaatggatggttaaacacctgtctctgtgctcatgatgaaaatgacctttgcaaaaaaaaaaaaaaaaaaaaagaataaacaaaagaaacacaaacaaaaaaactttagaaaataacctttgcttctagaccttctaaatttttctgaatggagagttttgtggtttccaaaagtgaaatagtagaagcaggaagaaaatattctcttacctaggtgcaaaactggcccaggccaaattctaatagacacttgcctttggcagtctcccagttgtctctcttcatgtttcccccacctttgtctgccccctccttagttgtgtgttgagctcctcactgtgccattttcctcaggtctgtagacatgcctcttcttataccccacaaaatcccctccagtttcctcctaatattatctataaagcagaagaaaatagcctgatctgtagagtgaagggggattaggctctaacgtcagtgtattagccctactgctgaaaattcctgaaattcttaatcgattacaatagtgttccatacttaaatacagcacagcaagcttttctccagcattgtgttggatcgctgtttctttggttgaacacagatgatgttgggttatatttaggggccacatagtttgaaaataattcatgagtgtttaaaagactagcatattcagcatggtaagatgcactcgtgaggagatgggaccctttgtacttcctagagtacaaagaaacactgacctagagaaccatattctaagaagtctacttttgtttaagcatttttctgggtcagctccagtaaatgaatcttgctattcataatatttcttcttctgaacctataggtttttaacttagggatgagagtccaggatagtagctatttgtacatgtttgcttattttcaatttatgtgtttgttagggattgtccattaacttacagctgttttcactctgatcattgttcctagcaagtatgcttaggtatggtctcacttcctatcacctcactctaatgagtcctcttaatccttatcagaaggaaattccatttcttcttaggggaaagtgaccataatagtgtgtaagattgagttaccttaagttgtatatttcagaagtataaatcaatatttactcaaatgcctggaacttctggttcatctgttgtgaatataaaaccacttatgggcaaatgttaagtgtctagtatttataccagatatttatagtctttggagcctttcctaggatcatgaatttaggctgctactcaatttttaatactttacccttatactttcatttgaaaaagaaatgattgtttagaatggatttgaaagtgtctattaaactatatctaagagcaattataaaactaataatgtgtgatgaaagataagatggtcatcagttataaacaggaaaaaagctgatggtaaatacttatgcttatacttagctaga

SEQ ID NO: 16373 - DNA, 1033 bp, Homo sapiens
ttttaaataaaagctaatcatgttactcctctgtttaaaactctccatttgcctggccatctttgttacctgtctgatatcatcatctataactattctttctgttaccttgactctaacaacactggtctacttgctgtttctcagatactgtgtatgctcttgtcttgggccttggcatgagtgttttctttacctggaatactcatcccacaaacattcacgtggccatctccttcatcttcttctagtcaaggtattaatatgtctgatgagacacctaccctgactaccctattctttccaattcccattacactgccctattatttccataacattgtcagcatctgacatactttactatgtgtattatttattttctttctcttctcattacagtgtaaatgccataagggcagtggtttgggtctcttgtttattgaagtatgctaagcacctagaatattattttacatatactaggtactcagtaaatattagttgagtaaatatttgtagaacagattcatttcatattctccattttgtggttctgcttcctttatgtcaagaccatgtttaggcattatatgggtcccagaagttcctgaaaaccctccagattcaaatctagccagaaagaggataaatctttgtcctagcattcccaggaaaaagactgaggttcactaaactattttaaaatgccttattcagcccttgaccagtcagccctggccaggagaaacgcaaaactctttttggcctagacttgaaagttggtcatatgttccaagtctgaaactagaggtaaagatacaaacaaaaatgtctattcagggaattagaagctactgaataagcacacaagaaatgtctactcacttttgtataccattggtttacaactgtgatccttggttactggctgcatgggatgttagtaggtgctctttgaccatgccccattaagttaaaaaacttaaatttaaacaatttttactcctgtggaatttctcaatttttaata

SEQ ID NO: 16374 - DNA, 2411 bp, Homo sapiens
tcataaccctgctggacttaaaacagcctaatggtctgccagctgtgagagaatagatgagccagataaagtgtatttaccatacttttaactcctgagctgcttgggagtctttatagactcctttgattaagtctaccaggagaccagctactaactcagtaaactaatctgaggaataatgtaaagttagaataactaggataggtagagttaaactccagagaaaaaaggtgatgaaaagtataaggcaagcttattaaggatgggcttattaggaacctgataaaaggatgtgataaaaatgaaatcaaagggttttacagtgctaaagtttaatagtattacatgttggaattgtttcctgtttcttagtataggtaatttctgtatgaatggaaaattcatgtgtaatttttgttgtactccaaagaactttagccacaatttattgtgaaatatttgcaaccttgaaaattcagaaatctagcaataggatctctctctgtctctctcttgctctagcaaacgactgcatatatttcatacacacacacacacacacacacacacacacacttatatacatgtatagtatattggttttgtataaggtataaaaagcaaattattataaaaacaatacatatgctcaatgtgaagaattttgtaaataaaagttacaaaggagtcaatttttgctgcctttttcaatctttcaacgcataatatgtaaatttgcttatttatgctctatacttcatgtttatatcttgtctttttcacttaatattttatgactgtattctcatatcattaagtattctttcctttaaaaattcccatttaaagatagtcaaagcaatatgaatttgttaatgatttagtatatgaattggagaaaacatattttctgcagtcttctttcttaatgggagctgacagcctaatgatgaaactatatcattccagctatattttaaaaaattacatagttgtcaagtttttgtttgactaagtcagagggttcattaaagattgtaaggctgacattcgtagataggaactttagtttcactttccctaagacagcaagaaatattctataacagaaagatgactatttttagcttttctttctgctggtgaggtggaatagcaaatatttttagagcaattgaaagtacagcctcttagattagctcagtgtttctatcatcagaatctcaattattttatgtatctagattttttttttacttccaatgttttgagtttatgtaaattgcaacatgattcgtctttttatttttgatctagttcgtttctctgtggaacaatataaaagatgaaatttctaaaaccttaacttttctttctgcactttttatgtattttgagttgtaattatattctgcttattgtgggcagttctcttctttcttggagatgaaactttgataattaatacttacggggagatggtgttacaaatcttctctcataataggctcttaatattcacaagagagatcccccatgaccattgtaagtacccttaattatgaacaccactagaacatttcatctttccccaaaacgatgccataggataagtgaaaatttgagggacttctgtttttacccttaatgaaggacatcttggttgcttccaggttttggcagtataaataaaggtgctgtaagcatccatgtggagggctttatgtggacatatgttttcagctcctttaggtaaatactaaggagtgtgattgtgggactatatggtaagagtatgtttagctttgtaagaaactgtcaaactctcttccacagtacatggtgctatactgtaaatggtattttttttatttcagtttctgattgtttgctgttattatatggaaatacgactggtttttgtatagcatcttcaccttgctaaattcgattgttctagaagcgttttgtagattctattgaattttctacataggtcatattttctatgaatagacagttttactcttttccagtcttgatgcatttttcttgctttattgtgctggcaagaaccttcagtataatgttgaatagaaatggtaagagtggatgtcactgcctcattcctaatttttgagggaaaacattgattctttcacgtctcagtaaagtgtttcctgtaaattttcatagctgtctattatcgatttgaagatgtttacttctattcctggtttctggagagtgtttattaggaatggttgttgggtttttgtcaaatgcgttttcctcatctattgagctgttaatatggtgtttcttttttagtgcgttaatatggtgacttgatttttgaatggtgaaccagccttgtatttttgcaacaaatctcccttagttatgat

SEQ ID NO: 16375 - DNA, 1048 bp, Homo sapiens
cttaagtaaactttggtagttttttgtcttaagacatttgtccattcttgctgagttataagtttttgtcataaaggtacgccaaatattaataatattctcttcacatccatagaatatgtagtgatataacctcttattcctgatatcgacaatctatgtcttttcttctttgttctcttgattagtcttgctagagatttcattttgattttcaagaagaaaccagcttttggtgtcactgatttttctatatttttgtttttcaatttgattattttctgctctgatctttattattttctttctcctgattcctttgggtttcatttctcttctctttttttagtttcttaaggtataaactgaaaccattgatttaagaccttttttttctaatataggcattttagagctgtaaatttctctctaaatactgctttagctgtatcccacaacttgtgatattttttgttttcattttcattcagttcaaaatattttgtagttttccttttgatatctttgacccaggggttatttagaagtgtaatagttcccaaatatttgggcattttcctgatatagttcttgttttttaaactaacacataaaaattgtacatatttatggcgtacaatgtgatgtttcagtacatgtataaattgtgtagtgttcaggtcagaataatttgcatgaggccttaaacattcattgtctgtttgtgatgaggacattgaaaaacctcccttctagcgtttttttgttgttgtttttgtttttttgttgctgtttcgtttcttgagacaaagtctcattctgtcttgcccaggctggagtacagtggcatgatactgtttcactgcagcctctgcctcccgggttcaagtatttctcctccctcagcctcccgagtagctgggactacaggtgtgcgccaccacacctggctaatttgtatttttagtagagttggggtttcaccatgttggccaggctggtctcgaactcctgacctcaggtgatccacctgccttggcctcccaga

SEQ ID NO: 16376 - DNA, 1075 bp, Homo sapiens
tctacaaaaaatacaaaaaattagccagatgtggtggcacacacctgtagtcccagctacttaggaggctgaggcaggaggatcacttgagcctggaagatggaggttgcagtgagccaagatcgagccactgcactcctgcctgggtaacagagcaagaccctgtctcaaaacaaacaccaaataaactttaagggcaaaggataatctcagagtacttgggcaagttgctagaaaacagtattctcaggggaagcatcaaaggggaaaatggccaagttgatatggtagttgacttcattgtagttccaccagaaagacaaaaaataaacaaacaaaacccttatatctgacagtcgcaggtaacatagcgttgaatactgtggtgaacaagaaattgaaactatagttctcaagggagttaggccctagaagaatcacttgtgagccagaagggaggaataaggacaagggagtcctaggtggcaactattggatggtttagaactctgccaagctaaaaggataatgtgagatttacctgaactcatgaagtgaaatgcaatcctagaggctagtaagttgctgctaggaaataacaatgaaaaaaatcctttcacagtggttctaaaacactttataaatcctatttcttttaattatttaatcattttattttggttggttttataggaagaaaatgaaatgctattagcttaatttgattgccacaccaagatgagtagactctcttcataaagtggggaacaaatgaaaatctttgaaacagaagtgatatgatcagcactgtgcttattatatatacccaaaatacatttttggaagagtaatagtcactattttttcaaaacttagcaatgcagtatctgcagtgattccctttcatttagtttctcatccaactaaataagccaactagaggaaccctaagaaaatagaattttattttctttcttgggaagtatctgcaagaattgagaagcttggaaacatttcttgtaaggtaaaagctgtttttttttttttaagcctaaatctcagagtgttatacata

SEQ ID NO: 16377 - DNA, 1084 bp, Homo sapiens
gatccaccttcagtcatggtcttctttttcttttttgtcttgcccacctatagcatcacaaaaccaattattgcttttaacacctctttgttttatctatcctaccagacatcttggaatgttcctctaaattttcttctattctgcagcccccttttcctcctgctttttgccactaaacaaaaacaaattgtgaaaaggaggacatctccttgatttttttggggatggggggttagagacagagtcttgccattttgcccaggctgctctcgaattcctgggctcaagtgatcctcctgccttggcctcccaaagtactgagattacaggcatgtgagccaccacacccagcctctacttaatatttcctgtactttctagcaaaacacttaaggcaacttacctgtagtatttaagaaaacataggagcctaaaggtggtaatatcagaaattaagtatatttagcaatacaagtataacctggagcttgaaagatgtcagaccagtcatgggaaacaaacaaacaaacaacatgtaacttaaatgttttatgtttaatttttcagaaatgtcggtgatcacttactagtaaatcagaattaaatagtgatattttccaactttatatgttacatagctttaggttctcccatttcttgttataaaagccatgtacacacatactcttttaaagaaaaattggaaaacacaggaaaataaaaagcttttttcggtatatgattttctgatttttgtctttccataattgtgattgtacactgttaataatttttgtcctttggtttcatttaacattataacctaagaatttggccgtaattaattttatgctttctttatacatgtttttaaatgtctgtcacggtattttatcaaagagatttaacctttgattacatatttgtatatgttttgctttagtttatcaaataagacatgcttattgtgggcaatttagaatatgcaaaaaagtataaagaagaaaaataaatactcatgaaggtatcacccagaggtaactactgtctatatactactcacacagaattttatttttga

SEQ ID NO: 16378 - DNA, 1050 bp, Homo sapiens
aactgaatagaagctaaccagaaactcttccagcaagcattagggactaaagaaagaatgtaggagagagaaggaagtccatagatggcattgttacaacaccagatcaagagcaggcatttctgtgcctggagtcaaatcattttcaggtttgacattgtatgatgagattaaagatttctatcagtttgagaccagcctgggcaacatggtaaaaccctgtctctaccaaaaaattagctgggtatggcactgtgtgcctgttgtcccaactactcggagggctgatgggggaggatcacttgaacctgggaggtggaggttgcagtgagctaagatcgtgccactgcactccaacctgggtgacagaatgagaccccatctcaaaaaaaaataagatttcagtcaaacatttcacacatcggtattttcattctacagtagtccatcttggcatacagacagaaacaaagacattaaaaacagtatcatcattctaaacaaagtgaataatttaagcacaaatcctactgttatgaacatgacctctgataaaagcctatcttgatggctataacccagcaagcctgaccttgttattacaccaatgtattttatgtctgagtaggagaaaaggaaaagtcacattacctaaagttagaacaagtatctatagaatttcaattccaagatattttgtaaatatcaaaccatagtatgaccaaatacacattgtcatgtgatttttttaagtgccataatcacaattttaaaagatatttcataaacctctggatatataaatacttttgggctaaatgcatcataatatatatatttgttctgttctttagactattaatagtaatatgtatttatgtaaactatgcaatagtattactgactatatattttttctttaaagaaaacatttgagtgtttaggaatctaatatttcttctttggatatttactttgctctttctccaaaaatatttggagaaaataaaataaataatgtttattatgtttggaaaattacattaaatg

SEQ ID NO: 16379 - DNA, 1022 bp, Homo sapiens
ttagggaaaaaattaaaagaaatgtacagagaacaaaactatattttcagttttacttttgtatataaatctaagactgcctgtgtgataaaacacttgtttaaaaaaaaaaaggaaagaaaagaaaaaagaaaaacaagcacccacaaaccaccttcagttcatttttttctggattctgaagatttttcattatttgtcctatggttttggttttatttgacttcgatggcattattttatttgcaataacagaaaaggaattgcatgtatgaagttttcaatcgtgggcttttctttgttgtggggagggggtcgggggatagtttgatttccattttctgaaaacgacagacttggattctgtttgtgtgtgcatattttatccagccttaagttataaagctcatctgtcccgctgcattccctgtgtattttcaggacatggctcgtgggtgtgtgtgttcattgtgtgcgtctgtatgtatttttctgtcatcactgttccctctcctcccgagtgtgcattcagttaatataatcagttgcttgcttctttcaaagtgctttgaaggtcttgaactcacgtgtgagcatctttatcaactatcccaattgcatgttctccatcacatattctcttatttgctctgtaccccctgagaatatgttttagagatattggaataaagctgtctgggtaaggagtaggcttagccgacctatgaataatacactttagtctagttctttattctaaatctggattgccagtattgtgtatttaaaccaagtctgtgaatacctgctttttttggccacagagtaacaagttttcatgtaagatcttcataccaaagtaggaagtaaaaatagcttagaaagctctgtcaggtgttttgtgcagctgacagaggtaatgttacatcacctaaaaaagaaagatacacggtcagttatcctaaaaataaattgtttggaaagtacaatgcaccacatttttgtagaagtctactatttga

SEQ ID NO: 16380 - DNA, 1088 bp, Homo sapiens
gattgcgaccgaagaagtcggattgaagctttggaactcttgggtgcctcctttgcaaatgaccgtgagaactatgacatcataaagacataccactatctatatttagccatgttagagaggttccaagatggtgataacattctcgaaaaagaggttcttccaccaatccatgcttatgggaatagaactgaatgtagaaatcctcaggaactggagtccattcggcaagacagagatgctcttcatatggaaggccttatagttcgggaacggattttaggtgctgacaatattgatgtttctcatcccatcatttacagaggagctgtttatgcggataatatggaatttgagcagtgtatcaagttgtggcttcatgccctgcacctcagacaaaaaggtaacaggaacacccacaaggatcttcttcgatttgctcaagttttctcacaaatgatacatttgaatgaaactgtgaaggccccagacatagaatgtgttttgagatgcagtgttttggaaatagaacaaagtatgaacagagtgaaaaatatttcagatgctgatgtccacaatgctatggacaattatgaatgtaatctctatacctttctgtatttagtgtgcatctctaccaaaacacagtgcagcgaagaagatcagtgcaaaattaacaagcagatctacaacctgattcaccttgatcccagaactcgtgaaggtttcaccttgctgcatctggctgtcaattccaatactccagttgatgatttccacaccaatgacgtctgcagctttccaaatgcacttgtcacaaagctcctgctggactgtggtgctgaggtgaatgccgtggacaatgagggaaacagtgcccttcatattatcgttcagtacaacaggcccatcagtgattttttgaccttgcactccatcatcattagcctagttgaagccggagctcacactgacatgacgaataaacagaataagactccgctagacaaaagtacaactggggtatctgaaatactgcttaaaactcaaatgaagatgagtctcaagtgcctggctgcccgagcagt

SEQ ID NO: 16381 - DNA, 2156 bp, Homo sapiens
cttatgaaacaaattgtcacagtgtagttatacattctatttttgtccccttttccctttttctcctgtatcttttaaaatttggaaactacttttccagaaggcattatttatgcctccctaataaggtattttacttatgacagatgaaaaggaaccaggatatgtttgaattttttcactttcttagtctgtgacaagaagtagaaatatcactagtgtggtataggaacttacatgttttttatgatgaaaataattctcaatgccacttgaaaggtaattgtgtctgagagctgcaaatttttcaaccacaaaatgtcacttattcctacaggctatacagaggtctttatggtttttttgttttgttttaatggcaacattgtaactgtcaaactaaaagggtattctgtgattatcttttaagcattacagaaattcaagtgaaagttatatgcttatttctattgatgttaaaaatgataatgaaagcaaaattagctgtatctgtaattttctctctagtgccaaatgaatgccttagctactcatagtgcatggtactgtaagtgaagacctgtagctttttttttttctttaatgaaaagcattataatgatgtagcagcatcagatataaacttaaaaaaaaaggtttcaattaacattttatatatggataatgctttgtaaagtgtaagagaaaggttgcagttggatcagtataaaacaatgaccaagccaaaatcagcaccctagggccttaaataaaatagagataccccacaaaatgaaatattttgaaggatgggaggggacagaaggggggactatcccccaaggatgcaagatactttttacagttgctatcattatactttgtcttcttgcttcagttaggaaggttttgatggtaaattctgtcatggtaatagatacctattttcctaacctgagattttacaaggaaggtttttaggttggcttaaatggaggtatttatttgagtgagccctaatttgaaaattaccagacttgatcctcctggtatgaatcaaggaaatactgtaccttgctcttagcaactctcagtggcctgaaagagaaaatgcacttcttcaaggtgagtgaatcatgctttttccacagttcagatcagaccctttatttttcaaactacaaggcctgcttattggacagtctaaggaatagctttgatacttggtattcagttggttccattattaatgtatattatttttatttaaacatcaaaacttaaaatatcagataatgttgcatgttttaaaaacacatttcatccctttggctacccaggaccagcactatttaagacactgcttatttataaaatgagaataatgattatatgtacatattcagacatcaaaatttaatgacattctattttgagaagggaagacaatgctgaagaaagtaaaactgttgattgaaatgctgacagggtggagaacgaatttgaagacagtggaataaactatgaactatgctaatggtaattagattttttgtttgtttagtatagtggtaaattgtgtagtatcttgctgagaatctaattctatcttgtaaaatcaatccaaatgtgtattgtgaaacacctgtataaaatcatttttgaaataagtgatctacatgcctgtttttttaaaatgtttttggtagaattgtttgaaaatatgtttagccagacccttccccaacttaatttttttttaaaaaaggaaaataggtaagaaaatgatagttctatatctcagccctctgtgaactctaggctgtctccattttgcagccactttggtcatttgatgtttactattggtatacttatgctttgaattgtaaatcttcattgatggtattacagattcaaccaaaacttctctgtcctgttcagtaattgttatataaatctggatgagctagggaggcccaggtggatgttttcattcgcaaatcatgagaaacttaagtgggttttatgcacttgatagagttggcaaaattgaactatgaagttaactatttaactcaaggaatgggcggcaaacccatcccctcgattgataaagaaggggaacatttttacattagaactgacactgaaaa

SEQ ID NO: 16382 - DNA, 1050 bp, Homo sapiens
gagagactggaaataatttaccttcttccccatcccccacctcctatctaaagattttcccctttctgcagctgcttacgtgaatataacagattaaatctgaaaaacctagatcatgaaatttttaagccatagccactcaggcggagtccccagaggcccgtgggaggtcacgcgcttcagggaaagtgcttgctgtcagtcccacttgtttatggctgagttcccccttcccagcctgactcatccccactcccaccctccgccaaatcgctcagggggaggaagaggtgcatgtggaaggaagccttggttctcaaaattcactgtcagctggtggtggaggatggatttttccagtctctcctacccacagtgggggagcacagatttggaaaaggcttagaccagatcttcctctccatcagaggggcagctgcagggacactgaggacagagcctgatgcacagagaggtccaaggagcatgcacttgatggcgggaggtctgggttctgcccttgccagacttgggaccgtgtgcatgtcacttcacctctctgacccttattttcctgtaatggtaaaagcaggatcagaaatcctcctctgcctacatctgtcatgttggccttaagtgagataatagatgtgaagctcctagtgaaccacacaacatgttaaggatgtttggttacttttttggggaagttatccactatgctggtcaacttggcaaaggctcacagcagctctaacacattcggaaggatcctcaaatgcagcttcccttccctcctgaatcagatggcctccgatcactgttgcctcagggacgcactcagctccatccatccaggcctgcaggtccccaggaacatgtgggctggttcttactgaggctcaaacctatcgccggcaccctgccatgctccactttaggctcacaagggtcaacaagcaatacctcacatcatgacaaaaattaattccagatgcattaaagatctaaacatttaaaataagaaaagctacatgtgtattagaggaa

SEQ ID NO: 16383 - DNA, 1079 bp, Homo sapiens
tccccagaatccttgccctcagccacttctcagagtccacactcacatctcctaaggtgtcgatgataacaatggctttcctttactaagggaatttgcatttggttaaggttagggtgagatttaaggagaccaaactcttgagacccaaaggaatgtgttggtaatagtggaattccagtctgcaggagatctgtccacaaagggcggccatccccaagcccctcaacaggaggccaggtagagacttgctgttgtgtctcatctgagcctgtagctttggaagcaccctcatgtgtcagtgactctcagcacttcaaggaacaaaaatgatttagggtgcaggaggggtgtggggagtggaactaaggttgcctggcttgaaacagagcatctccctgggggcagttggggcccagaggccttggccaaggctcctaccactggcctttctcctggcagcttccagaacaatggctgcctgtttgccctgcctgagaaacttcaggcctgatttagtccttagggcagtttgcacttccagatggccttcctcatgtccctgactgctgcccacccctccccctccccctcgcaccgtcccccccgccccccgacccaaccaacccgctcccatcccaaggctcttgacttgatggagggatgtgggaggaagaagggttggtcccagcattcacagcctcacgtgtcaagagacagatctgtgacatcagcatcacatagcacttcttgtctcccccctttccattccactcagccaagaccttgatttcagttgctaagcaacctgtgcctgagtttccaagtgggtcgtcaggtgagcatgagaggtggaaggtatggaggggtagtgcttaaaactctgcaatttatagatggagacactgaggcccagaaagggcaagacacttggtcaaggttgcacagctagttagtgccccatgtgtcagatgattgatcctggcagcaaatgcttcagaaccatcccatttcccactcctccttcccccaccaagagaagcacccagacaacagcaacaccttagagacttcccgtg

SEQ ID NO: 16384 - DNA, 1042 bp, Homo sapiens
cttcccacgaagaggcttttcactttgctgtcatattaggtcagcttggaagaagtgatcaccaagagacacccaagatcttgtttaggcaataaatgaatgaagaccatggattaagaaccgttgctagatatgtagaatattaaaaggtggaaaaggaaggtgctcataactcctggttttctggaccaaacataatttctgggctttatagacctagtgaaagagaacggcgcacggtttattctaatcgtccacctgagtcattcggttcggtttgggttgccaaggaggctctaactggagccctttctcctggtttttcggcgtggttgccttgggtatttttgaatcacattaagttttaagagaccttaaagccccgatgcccactgggttaccgacttacggcactaagttggctgcctgtggctgttaataaaccacggggattgttgtcaacgaggacagatacatccttacctttccacacgactgtattttagtgtttgtttctacatgtctgcactcttccccacacgcctcaaggtagtttttctggatacatatgtttatttttcaggaacaggagttcaaaggagagataagccagtatgtatgttgcaaagttaaaatactgttgcataatagcaatccagtttcattcttagacatacgaagttgaggaggaaataaaaagtgacaatgtaaataaaacacatacagaatgcttacactggggaagaagctgtagtaactttaatattgcaacctgatggattgcaagtgtaaagccctgcaactaaggattttactcagtaaattctttcagataaaatgataaatggaatttgaagtctgatgtttactctgattaggtgggaaatgcaccataaaagttagaagtcattgttttattttatctgggtataaatagtataatttatttaacttgttgacttgcctgtcatcctcagattttgttaatcttattgaagcctatttgtatagttggaatttattctaagttttattggcttct

SEQ ID NO: 16385 - DNA, 1054 bp, Homo sapiens
atttcctcttaaatgatggatgatataagaaggtaatgctaacattttttgcatctattaaaatcatatcttaagacatctttttttaatttccctgatttgtgttctagttgtggtacttaaaagtaaaacaaggggaaataaactcataggaaagtttatactttgattttctctttcatataatcttagattatttagatttttctaacagcataaaatatttcattataaaatcaaatactgagtcattgccaatttgatagtatcattgaaattaaatatgtgtactttaaagacaggcataggattttttcttttaattgaatatactgcttatcttttaaagtatatgtggctagataagaaaggacctgaatggacttgatttggaattttctctgttcatgtctttgaaggtattcagactaaaagagaatgtcagctttttaactttgtaaaacctggtccatattaccgcatagctgttagttacagtagctatttgcaatgttgaatttttgagatgagtatttttactgctaacgatgtggacatgtgtattattttcatataactgtcagggcagtaaagaaactagttaggaagtcaacctccaagatttatcctcataggagacagtgttaaaaatcttactttagttgaccactatggggttttctttaaaatgttaaataatgttttcgaataatttggtttttgtacccattttatcttctaccaaataaatttaaaaaaatcaagtttatacacgtaatttgctatcaagaaaggtatactgcatttgaaggagaagaataacgtctctttttctcttgtttaaagctcttgaaaaaaattttattttgaaataattttagatgtacaaataagttacaatgataatatagtacagagagtttttttaatattcattactcagcttaccctcatgttaacatcttacataaccatggtataatgatcagaactaaataatcaataatgacttactaaaactacagaccttattagaatttcaccagtttttcca

SEQ ID NO: 16386 - DNA, 1042 bp, Homo sapiens
aaactcattttattgtagatcagtaaattctatttccatagtgattaaaccgtctttatcttaatggtattgatagtaatatagtaatgttatactgtgaacattaataacttcatgtagaattgtcagttgtaagggtttttcttaatatttttgttatattagcagtcttattgtatacttaatataaatttatctatagtccagtcattatttagtatttatttccagcatattaatattcccaaatcaataaaatacataacatgtttcaaggataatgaaattgtatagacagttgtttcagtatatataagcagtcaaactgtagattttctgttgaaaaagtgataaatgttagttgacatttggtaaggaaaaagtccaataatttaatattttttttaataacatcctagggtaaagtatgttgtaatactaagtagtatatataaaagtagtatctgagtctgtgtatttatttcagtgttataagtagaacaacaaagttagaaagctgcaatggaaagcaaagcctttgtaagtaatcacaagacttgggtctagtgttggtgcagccagaactagttgtgtgactttggacaagtcattaaactctagatcttatttttttgttgttcttctttacaaataagctggttggattacggtttttaagattattgccagttctgtgattcttttttgttttcacttgtttaaattgtgttaaaatacacgtaatataaaatttaccatctgaactatttttaagtatatagttcagtggtattaaatacattcataatgttgtgcatccatttccattactctttcaatcttgtaaacctgaaactctgtactgattaatcagtaactccccagttttcccttcccccactccctggcaaccaccagtctactgtgtgtctttatgattttgaataagtacctcatacaaatggaattatagtattagtgtttttggtgaccagtttatttcacttagtataatgtcctcaaggttcatctatgttgtaac

SEQ ID NO: 16387 - DNA, 1027 bp, Homo sapiens
cttgaatacagatagctggcaagaatcccaggcaaacactaggcagattttctttacagagcatgagaaagacgaaggcttctaaagtgtgtgctgtgttcgtgtaacaaaagagaaaacaccatcttctttctggcatttgaaaggtctgctggctccccacccactcaccctgtgggaacactgccagtcagcttatgtccagcccacacagagctccctctttttatcccctccaggggaacaatctagccaaaatcagactatcttcaaaataacacaggaaatctatgttggctaatgagtcattctcccttaaatgtgaatgagtaaccgaagatcaccaggcatggtgggaaaaactaatggcatgaaagactaaataaccaggaaaatggccagtggaaaaagtaaaactaataagaaagaactttattttaaaaaaagaagaataaatcatctaatatattcagagatccaagaagatactacatctattaaacaagaataggaggacacaagtttttagattgaaagggcacaccaagcactgaaatagagaatcaaacatggtactgtgacacatctcaaaactgcagaattcctaggataaacaaagatcccggaagaaatcacacacatagtaacaagtaacagactgaaatcaaaccccttatgaataacttttaatgatttaagacagtaaagtattgcctacaacattttagaaagaaaataatatgcaaccatggattctacaacctgccaaactattaatcaagggtgagagcagaatacagttgttttcagacactgaagggtgcaaagtttgccttccattggaagtaaaagaaatgaatgaattacacattcaccatcaacttcttgagaaacggaagtttagcatttgattttttttaatatatcattgctgccaaaagggttgaggggaaaatgagaaggggggattaaaaacgataaaattagttgttgattcacaccatacaataaattacagagctcctgt

SEQ ID NO: 16388 - DNA, 1371 bp, Homo sapiens
aaatgcttcaaaatcaagaactttttaagcatcaacgtgatgctctaaagaaatactcagtgaagcgtttcagattttagatctggggtgctgaactgttaagtgtaatgcagatattcccaaatctgagaaaaatccaaaatccaaaacccttctggtcccaagcattttgggtacagcatactcaaactgtattaggtatttcttttggcctagggggcattgtgaaaaattactgagataccaagggagccacaaactaagaaagtttgaacatctctgctttagaagcttgagctaactaaggatttcaccaaaaggaggaagcacctcttacctttttttgtgctgaaaagtttgagtttgcaattttaaatctgatccaaaattgtcctaatacagttgttcaacattaaaaaaaaaaaaagcaaagaaaactttatcctatgaaatgccggtagtacatctttgcatgattttttttcttcttgcctccataggtatggtctgaatatgcgttgcttggcagctcgggtcaactataagactttgattattatctgcgcactcttcactttggtcacagtacttttgtggaataagtgttccagtgacaaagcaatccagtttccacggcgttcgagtagtggcttcagagtggatgggtttgaaaaaagagcagcagcatctgagagtaacaactatatgaaccacgtggccaaacaacagtctgaggaagcattccctcaggaacagcagaaagcaccccctgttgttgggggcttcaatagcaatgtgggaagtaaggtgttagggctcaaatatgaagaaattgactgtctcataaatgatgaacacacaattaaagggagacgagaggggaacgaagtctttcttccattcacttgggttgagaaatattttgatgtttatggaaaggtggttcagtatgatggctatgatcggtttgaattctctcatagctattccaaagtctatgcacagagagccccctatcaccccgatggtgtgtttatgtcttttgaaggctacaatgtggaagtccgagacagagtcaagtgcataagtggggttgaaggttggtatctgtctgcttcacttgcatttttcaagcatgattgtgttgaggaataagaaaatgttgttaattatacatcaagtacatagcttactgtcaaaagacctttcatcactctaatttagcagggaggaacaggttaagcctgaacctagggcaactttctagatgctatgacttaagggctgccataagaccaaacctgggcaaacagaattattttattaacgtaactcagaatctaaaattctcaccagtaaggtaaaggcatt

SEQ ID NO: 16389 - DNA, 1044 bp, Homo sapiens
aagaatttgtcaagaggtggaaaagctaccttaaaggcagcagggcaaagcacaactagagctcacaaccaaaactgcacttcagcctctgctgtacacagaaactacaggctctgtctcaggagagcataggcacattttaaaaggttatgtactaggtttttgtggattctatcaaagtgataagtgatccttaaaaccagccttctaaaataattgcattccatgggttgggtatttagaaatgtaggtggcatttagaacacaatgtttaatcaatgggctgaacaaagatgcttcactttgccttgcccatcaccctatacagtttcgcagatagtctagtcactctatgtgagaaagataatggtaagtagttgctactggccaactgtctagcacttacctgaaaacttagtatggagctcttttaaaatgtgattatttatatttatgttgaaagcggactttaaaaaaaataatgtgctgtaacacagtaaatatgtacttgtagcctggatagcagactgtgttcaactttttaaaaagatgtttcctttctaaagattaatttcttgggagcaaatgagtatttgttgcatttgttcaatttgttgtatatggtgaatatttaattatggttttcttgaaacgtgtaaattaaaaacacaatcagtgttcaggcttcagttatataatgtaagcacaactaaaatgaaacttgttgactgcacaagaaattacaaaaatgtttctgttttgaaacttgatctacaatcagtaaaagtttgataatcagtatatcccttcccaacccccattgtgacagtttctttttgtcactgtctagaattttgtattttatttcagactataccttggagttttgtatattttgagagagatatttttgggacattattttggaaacttattacaaatctaaatttggaaaggagctagtagctttaaggccaccaccatattttacttttttaggatttttccccctttaaataaaaatattagatcaaatactatatg

SEQ ID NO: 16390 - DNA, 1073 bp, Homo sapiens
agtgaaaatgaaaacacaaaccacagactggcagaaaatatttacaaatcatatatttgacaaaggacataaaaagactcaacagtgagaaaataagtacattttgccaattaaaaataggcaaaagactgaatagatacttcaccaaagaagaaatgagaatgacaaacacacacacacacacacacacacacacacacacacgcaaagatgctgaacatcatagtctaagggtaatataaattaaaaccacaacaaaatgatctaaatactcaaaaataagtgattagttaaataaattagggtgtatttgtgcaaaaggttattatccatcccttaagaattatgttttgcactttaaaataacatgaaaaatagttttggaaaaatgtattaagtaaaagaaagagaatttaaagatatacacaatattaatccaaacttgaaggaaaattgtgtatatgttacgtacatgtgttcaacaaacactgaaatacattaaaatataaacaggcctcatttctgggtgtggcaattatagaaatttcattttttttctttctatttcttagacttttcctaaatattttccaacacacacatattatttttataaattatttaagcgatgagagaaaaacatagacatatatctgagccccccctccagtcatcattcagcccttcttgtaagagatgccactgtggagacccccagcagtggaagtcatgtacctcagttttccctctcaacagcctttcccagaagcctcctctggctctcagctcttggtgctgctgcctttccttccaacgggaacgccttcctcccctggccgtctccttcactgacactcctgctgagtccctctcctggggtggaggtccctggggatcctttccttccccttttccttcctggccctcattctgtccctgtgggatttaatttacttctgtggcatcagcaagggcacccaagacacccacatcactgtgtctggcctaaactgttctcatgggctccaagcccatccatgccacagatgtttattgggtatctatagccaggc

SEQ ID NO: 16391 - DNA, 1050 bp, Homo sapiens
agaccatcctggctaacacggtgaaaccccgtctctactaaaaatacaaaaaaattagccgggtgtggtggcgggcgcctgtagtcccagctactcgggaggctgaggcaggagaatggtgtgaacccgggaggcggagcttgcagtgagccgagatcgcgccactgcactccagcctgggcaacagagcaagactccgtcgcaaaaaataaaaaaaaaaaaaaaaaaaagaataatgagtgttgatggaagagattcactagagaggggatctctgatatggaggtccctgaggaagcatttaggtgagttccagaatggaccagggcttgtccttaggcaggaagggagatacctcgctgtcatgacaagtagaagggagggaagacggagctgtgtgccaggaattggatggctacacgttgaaagagtgaaggaaatcgtgagttcatctagggaaggggctgtgttcacgagatggcagaagttagagggatgagagagttcaccgatgtagcaagagaatgattggactgatgaagcctggaacctgagttagatgagggaagtgagtggatggtgttctgacgtttgcttagattttgtatttgtttgtgtggcatttgttagtcacagggcaagcaatcagcccaagttgtttccatctcccctgcaacttaaaatccatgctctgaatcacttccttatctaactgggatgcaccctgccaatctttccctgcccttagtcgcccaggctgaggtaccaaatgagttgggacagcctctacgccccagtgcccacaggggttatttaaactagccattcctaacctgctcaacctgccctgctgtgcttttcccgttgaaacccaataaaggatctgaccgaggcctcacgctcactgaccaaagcctggtgattcccctgcagccacacactgggtttggtgtggcccctcctcttgggaaatgtgggtgatacattcttctttcagcaacattgcctctgttatcactcagttgcctccatcaattaaaatcctgcagg

SEQ ID NO: 16392 - DNA, 1064 bp, Homo sapiens
atgtcatgactttttagtaactaaataactaagggttccaactgtaaaaagaccatttatattttttctttgcatgcttagatcttaaatgtcataaacaccttaagtttaaggagatgtatttttagcctagataatagtggaattctatttagtgcatttttttctctctccacagactcagtattcatttaaacaagtatttggcactcacaccacccagaaggaactctttgatgttgtggctaatcccttggtcaatgacctcattcatggcaaaaatggtatgatatgactcttggagttttgttagattttcctttttctcctcttctgataaaacttttttgatatttatatatttgatttatgtttggtgttgaatccatatttaatttgttagggtggtgctaaacttgccttttttgagctggctaattgttagtgttttctaatgcagtgaagaaatactctaagtggagaacttctaagatataactcattgtgacttgctacactgtaggtcttctttttacatatggtgtgacgggaagtggaaaaactcacacaatgactggttctccaggggaaggagggctgcttcctcgttgtttggacatgatctttaacagtatagggtcatttcaagctaaacgatatgtaagtatgattcttttgtgttgtgactatcttactggactaagacacctatggatacagtagtagtaaagaagaaccaaagcactggattcattttgaaaccttaactgttccttagtttttaaacatatttcttactatttaagttaaattctaaaaaacgtggtgtgatttttttttttttgcccccacttcaggttttcaaatctaatgataggaatagtatggatatacagtgtgaggttgatgccttattagaacgtcagaaaagagaagctatgcccaatccaaagacttcttctagcaagtaagtaattatatttgtctgcagcactggcctaggggcacaggattctttcctgtggtttgcccagacatgaggaatggtgaacattaaatagaga

SEQ ID NO: 16393 - DNA, 2527 bp, Homo sapiens
acctgagacagtaaaaggagttttgtaggctctttaaccacccgtgtcttggtgatttctacagactggagcctaaagctgttatctatacaagtaatacttacatatcttctatcattcattaatatggtatgatatctgcactgtaattccatcagagttgaaatactacttcctagatttccttgggtcttgcctttctgagacgtaagactggttaccacttggcatcacaaatgataaatctgcatttgtgccagagttgaccctgggatcttatgtttaatattagtatcttgttcctgagttgatggttttgtttttcagctaaaggcttgtctttaatgctgtctttattagggcctctcaggacataaataatacgaagacctgtggcttatatttaactttgtatatctaagggaacattattggagaaacagctggatttagaaaatcattagactgagaatacataccagtatatccacttttaattacatgaagaatttatggactctggttgaggccatacttgatacaagcatttctgtggttcttagtgagtcacattttgatacagttatcttcaccagagtccttgaattttcatcacgtttattgggaaaacaattacaatatggctaagtaagctaaatgtaaaaatattaacactcttaatactaagagtttatgccaaggaagactctttggctctgtttaacatttcttcaagtgagaactttacaaagggacttatttctggagtgacctatctatatttacccttggaatgttggtaatagtaaaaatacttgggttaggttgtggagcaatacatggaagagttaaaaccttgtgagacagttactttttatttatttttgagacagggtcttgctctgccatgtcagctcactgcagccaacctcctgggttcaggtgatcctcccgccttagcctcctaagtagctggaactacaagcacaagccaccatgcctggctaattttctaatttcttgtagagataggagtgataggggtctcactaggttgcccaggttggtctcgaactcctggcctcaagcagtcctcccaccttggtctcccaaagtgctgggattacaagtgtgagccaccatgcctggcctgaccatcactttttatatcaaactaattactttcccatttgttttaaagtgtcaactgtcttgactctaatcttgagtatacccattttcatgtatgctcgtgtgccaactttttgtttggtttgttctaaatgagattattttcaaaggatcatatcttggctttatttagttatacaaaagaagattgacaaaagtaccttgtgtgctttgtaacctttctgggtaactccttaaatgaacatacaagggtgcttgtttggccctgaattcagatttaatttgttaggttggtgttagacctgcttttttaagctagttaacttttagtacttttaatacaatgaaaaactattacaagtggagggtttttaagatatgactcattgtgattgtcacatagtctggactgaacatgttggtgtgagatggctgctgtagaaacagtaacttctaccttattcctttggtaggtggaacagttgcagcacacccatgaggaacacagattttgtgtatgtgatggtgttggctcttttcttaaggagaagggtgcagttatactatggttggcattctgtggcatgtttgcatgtaggttattttccattgtcactgggctggctgctgtctctaagccctccttgcttcctgaaaaatctgctattgactatcagtgatggtggctggtaaatgtctctaccctcaccattcacaagacttaagaccaaacaggtagctctcatacccaaccttcatcttgtcatacagactaaaacttcataagccactttgaaaggattgccactcctggtatataccaaactctttctgaatttgttttctgctgttgctgaggaggtcagaactggttctatctgctagtcttttcaaattaggaaaatactagattttgatgcttaacctgtgcatgtgatgttgctgtaatactactttggtctctaaattgtttagtgtattgtttcatgtgctttcttagagcaaattagagcaaagcttttaaaacaaaattggtttctgttatcttgttacttaactaatcttgactatttagctttacaatcttatctaagtttaatatttctctggagtattatacgttatatatatattataaaatatatataattttcattagaagaataacatgtcatgtcacttggcgttttagtcctagtcttaaatgaagataccagcatctcataatttaggagactaatcttttttttctttcccatagacctccacaatctaaattgcttcgtgaagataagaaccataacatgtatgttgcaggatgtacagaagttgaagtgaaatctactgaggaggcttttgaagttttctggagagg

SEQ ID NO: 16394 - DNA, 1925 bp, Homo sapiens
agacgatattcttcccccacccccagaagcgggacggtggcctgggggtcgccatgattcctgtcaattgcctagagaatatattttaatatgaggatattaaacatctctatataagatattccttcagagaatttaggatttggaagaaaccttatagtcattaactgtaatgttgcattttgtggaaaatcctgttggtagaatccctgaaggatggctgtttaaccttcccagaaatactgctattgaaagagagcctggaccatgcatagacagctctttatattgagccacaaaaatttgttatttataatttctatctagtagttgtttgaagttgagattttataggcaaacagaacacactttagctactatactgttgttctgaaatggcgtctatgtatttttttctgtcaggtaatattaatcagtcactaatgacgctaagaacatgtatggatgtcctaagagagaaccaaatgtatggaactaacaaggtaagcagcagccttctctgttcttttgtatagtttcatttgtgtgcattttttttgcgtaacacatttggatatgaatgtctttgtagatggttccatatcgagattcaaagttaacccatctgttcaagaactactttgatggggaaggaaaagtgcggatgatcgtgtgtgtgaaccccaaggctgaagattatgaagaaaacttggtaattttaatgtatttgtcctataaagtcttgagtttttgtcgggaaaacagttacttggatgagcagaatgacattttgaatattttaaaaatggatagagaaccattgattgtagaagtaaactaggcttggtgtggtggcttatgcttataatcccaacatgttgggaagctgaggtgggacgatcaattgggcccacctgggaggtcgaagctgcagtgagtcgtgttcatgccactgcactccagcctggtgacagactgtctcaaataaataaaaataagcaatctttgcttcatttagtaatttctgggacttggatatccttatttttttttaaactccatttgttttgtgttttagcaagtcatgagatttgcggaagtgactcaagaagttgaagtagcaagacctgtagacaaggcaatatgtggtttaacgcctgggaggagatacagaaaccagcctcgaggtccagttggaaatggtatgatttggtgttgtatcatttgtccactcattggtctgtctgtttctctcttttttaaaaaaaattatttcatttaagagaaatgtttacataccttctgaagaaccaagcacataataatttgaacaaaatttaaatgagcttattttgcatactatgattcttaggtaagtaaacttatgtcagctcaagaaattgcaatggttagttgcactggggctgtatgcagtgttaaacttgtttaaataagctctttctctcctatgtaactttttgtaattttctataattcaatacagaaccattggttactgacgtggttttgcagagttttccacctttgccatcatgcgaaattttggatatcaacgatgagcagacacttccaaggctgattgaagccttagagaaacgacataacttacgacaaatgatgattgatgagtttaacaaacaatgtaagggcaaaactatttgaaataattttatttaattattttttttttttgagacatagtttcactctgtaccccagggtggagtgcagtggcacaatctcggttcactgcaacctccgcctcctgggttcaagcgattctcctgccttagtctcccgagtagctgggactacaggcacatgccaccacgcctggctaatttttgtactgttagtagagacggggtttcgccatgtaggccaggctggtctcaaactcctga

SEQ ID NO: 16395 - DNA, 1329 bp, Homo sapiens
gaaatgtgagtgaaatgaagaatcatatgttctttaattttatgagagttttaacagttgaaaaggatgttctctgacccaaacaagggagctttctagagcttagctttggttgtagcttgcttttgaatttattagaaatatttccttagtatgctttttttttttaatgagataaatgattaaatgaaatggtataaaagtgccagcatcgggccttggacgtaacagatactcagtaaagcttaattggatctgtatttggtttacaaatcgattgtaaaagtataaactcaggattaatctcttacaatggggtagaaggaaataccgttttgttgggaagcattgcagcactgtgtaatgtatgtctgttctctcatttacagagggtcatttagaggtttggtgggggtacacattcataagagaagttagtctcaaccaatatagtttttttaaattctgaaaatagcctaaaaactaaattttagcccttaattttaggagaaagtaattttcacatgaagttagttgtaaatgtctttgggtgaggagcttgtttaacatgttttcatttctgagaatgggggtgggaattcagatgaaatgttagagaaaaaagtgctttctccatgatgtttctttccacaaatatgcttgcataagcaaattaaggaagactattttatagcgacatgaaatgtttatataccaaatattgaacatagtggtctaccttcctagattgagattttagagaaaacaactactatctatgaggaagataaacgcaatttgcaacaggaacttgaaactcagaaccagaaacttcagcgacagttttctgacaaacgcagattagaagccaggttgcaaggcatggtgacagaaacgacaatgaagtgggagaaagaatgtgtgagtatcgtttgggtagtgcttgtctcagagtcggatgatttattttacattgtagttaggttcgatattttgaattattgtatttgcggtagggttttggtggtggttgttaactctcaggaagaattggagaactgtcatttttaggaaataaagagattgggtaatctggtgtactcgtttgctgtgatggaatgataatatacattgccactgataatctgtaggagcgtagagtggcagccaaacagctggagatgcagaataaactctgggttaaagatgaaaagctgaaacaactgaaggctattgttaccgaacctaaaactgagaagccagagagaccctctcgggagcgagatcgagaaaaagttactcaaagatctgtttctccatcacctgtgc

SEQ ID NO: 16396 - DNA, 1050 bp, Homo sapiens
ctttgctgaactagaaagcaatattgcatttcacctaggtgtggagcctgctaaataactgtgttttatagactattgagaggagctgatctttttcctcttgtcattttcctctcagtgttctgtggctgtggagatgagagcaggatcccagctgggacctggatatcagcatcacgcacaacccaagtgagtactgactgtaattggggtcttgctgtgtgcttttttcctcctctggtctttacattatcactccttctaccagccatccacttattcttcagaagaaatatatggttttggttttccccttggactatctgggcctccatgggcagactgcagtaggcagctggaatgctgagagcctcagaaggctggataagagcaatcagagctgcaaggcaggcggtggtggaagattggtggctcatgttcatattctgccaacgctcataaagctttctgaggctgaactgagagtacctctaaggagggaaggctaaaggcttaagttggagactagacagctttgtgtaaatcattgtttcctgacttgcttcttggtcttggtgtagcaataggtgttcactaaaataaataacactgaatgaaagaatttatagtagggaaggaatcataccttttcttcttctgttaaacttatactcaggagtctgacccagtctttttccatattttaataaaatcccttctttacaaatacatacatatatgtatatcacatgttatatacatatatgtatataaaatgttatatgtatataacattttaaacatttacataccttactgagcaatttagaaaattgttgcagcaggataaagatgggaaatcctttctaaatttaatactaagataagcatattttataaaagttgtttgctttctcagagggacttgaattatctcatcataaaacagcagttctcaaaggcctcctaaagattgatttgctatgaatgtgttactaattgcaaagttcaactctaagtgctggttgttatgttttaggcgcaaaaagc

SEQ ID NO: 16397 - DNA, 2016 bp, Homo sapiens
aggggcctccaagctgggacgcagcccttactctcagggtcagcgccggctgggaaggccgcgacctaaccaggagattacgaacaatgtcaccagggccacagcggagctcctgccaagtcaagcaactcatggaaccaacggaggcgaagtccgaatacctaggcaaccctaacctaaaagtgtttttaacgttctcaggtcctataatttacccaaataaagtgggaccgtatttgcaggcgctgagaaactttctcaacagtaagaaccaatcaggcgcagtgcgcaggcgccttcagtgggtcctgggtccgcctcttccgcccggtgcgggcgccgattggtccgcgtggacacataagaggctgcgtataggcgcgagagcccctttcctcagctgccgccaaggtgctcggtccttccgaggaagctaaggctgcgttggggtgaggccctcacttcatccggcgactagcaccgcgtccggcagcgccagccctacactcgcccgcgccatggcctctgtctccgagctcgcctgcatctactcggccctcattctgcacgacgatgaggtgacagtcacggtgagtgcgggcgcgggccggcggccgggctgcctgtgggcggtgactttcggctctccatgcggttcccggctccaggccgttcgactgagcacttccggccggggccaggccgcgaacacaggccgcatagggcgggcgctcctcggggctggggcctctctccgggcaggtcctgggcccccgggaccacgtgcgggcccagcgggcatggagtgcgcttgaggctgggcgctccggctccaagagccttcgtgtagaaaagctcttccgcagtgcttgggcaccctgacccgtgcctcgtctctctcagggacacttactcggacctctttcggtgtaattgccttgaattcccccggtcgtggaggaaggcgcccgagctcggctccacctcccaggtcttgtaacttaaaaatagccgcgtgactcaggcaagtcccagcccgtgaaacagcagtgatgggctcgcctcattgcagggcgcctggcacacatctcttttgcttgtgatagaatatttgagctggttaaacatgttatgtacacttattgagtgacgtgcagcattttggagatattacatacgctacgttttgatggattgacgtttttatttgttgtaggaggataagatcaatgccctcattaaagcagccggtgtaaatgttgagcctttttggcctggcttgtttgcaaaggtaaggtgatggtggcaaagtgattgtggtaaggcctgctgatttacgagggcagttgtacatgctaaagtacccccagcggtgccataacgccccacatgccgctggatctcctaggtgtttttcgttgcatgtatatctctaggagctaataagatttcagcttgtcaagtcttacgtttccttatcagactctggtttcccttttgctctgaaaccatggttaaaaaaaatgtgaatcaggtcatttattcccaaaaagggtcactcgggagataggtactacgcatgttaagttgcaagcaaattctttttctttttcttttttttttcttgagacggagtcacccaggctggagtgcagtggtgcgatctcagctcactgcaagctccgcctcccgggttcacgccattatcctgcctcagcctcccgagcagctgggactacaggcgtgcgccaccatgcctggctaatttttgtgtgtgtgtttagtagtgacggggtttcaccatgttagccaggatggtctcgatctcctgacctcgtgatccccccgcctctgcctcccaaagtgctgagattacaggcttgagccaccgctcccggcccgcaagcaaattctttcagtaaattcttgcattaaacctatggtttgatggacatttgggtttagcggacttcattgacacagtaggtactgtgtgttgggatataaaagactaat

SEQ ID NO: 16398 - DNA, 1010 bp, Homo sapiens
atgtttggtacacatgcttatttttccactgttgaatccatggatgtggaactcactgtatatagtgttaggggttgatcactgtaacctggaatgggggatacttttcgtttttggctgcgtgagtgcttaacaaggacagaactgggcgtttacctatgcatgcacatgtattgcaggccctggccaacgtcaacattgggagcctcatctgcaatgtaggggccggtggacctgctccagcagctggtgctgcaccagcaggaggtcctgccccctccactgctgctgctccaggtaggaaacatggagtttttagtattgggaggagtgtagagattttttaaaaaatagtattatagacaaaattgccattaatttttcacaagtatatgaagtatggaaatcctaacacctgattgactttttttttctagctgaggagaagaaagtggaagcaaagaaagaagaatccgaggagtctgatgatgacatgggctttggtctttttgactaaacctcttttataacatgttcaataaaaagctgaactttactgctgttggtcttgtccatagttttggaatgtgctctgcaaaaatggtctgttttgtaatgttggctttcagcctattctgccatgacacaggctggattttccctgccaccattgccggatgtgagatttagacaatcctgatgctaacaagaaggcacctcatggtacagtgttgaaaactgcactggggtggcaggaggaaggatcagagcagatgctttgtccaggttacctgtgtaaacttgatgattataaggtgtgtcccctacactgggggtggagggtaatacagaccagctttagaaagcctcctgggtatttaccctatacaaccctgcctaagaacgaactttgacgtatgctgaatgttgactgctacatcccaaggttgtaaaaaaacaagacttagctatgtaatgtctcaccaaatgtttgggagttttatggtaac

SEQ ID NO: 16399 - DNA, 1086 bp, Homo sapiens
attttgcttcagatgggggcaaaagtggcttgatgtgtggattcctgtgtctcactttctcttgctttcttctttaagagtttagcccaagcctggaaacatcattttcaggtccctgtgcaaaatggaaatgctggggctccctgttctagaattattcagaatttcaagagagcattcaaccaagttgggggtggtgccctttggagctcaggccctgaataactagcctcataggttgcgtgcccatgaagccagtcctagttagtgcatattcgtgtttacttatttcaaagttcaaagttctgaagatatttagagtctgtatgtaaggcccagtggcgtaagagcttttaacataatgagccagatctgggcaccagcgtggagatgcatttttacagggtgaatcattaattgggcattctaagagtcactcagccttttcaatgattcatcagccatgctgatgctgttgtgtagttcatattattgttgtaattagctgatgcttgtcaaatgtaaacctggctctaacctgggtgttttcaaaaacagcactagttactgtgtattcaggtagagggggtcagcatactgtaactctctgttttcctgacttgtaataattaaccccttctctcaggggacgcactctcattgtctttcctgtaaacagttggtaattgtgagtggagctgtggagtgagaaagtgggtactgcttttcctgtttcaagggcctgcatgttcagaagcagcagtgtggcatgggagatgttatagcagcagagtcaggggccagttctttcactgcctgataacttgggctttccaagggaaagggagggaggtggtcactgcgggtgagacaaagaaagtgcttggtaagggatttctgggatccttgagcccagagtggattagatgggattagagacccactctgagctgtttctacctgcatcttaatccactccagagctgaggcttcctgatccctctaaccaggtgcatgttcactgggcttccagcttccaagccttctacctgtggaatgcttggtccaatgtctggggcacccact

SEQ ID NO: 16400 - DNA, 1042 bp, Homo sapiens
caatggaaacttctggattaaagatgtacatatgagtaggagattattgggaaaagggtgatgttacatttattggaagggcagttgaggaaggacattgaccatggcacccacagagggaataccttagcctgtacttgtacttagaggtacagggaagggagggacactgatgaaatttgtctttcagaaccgcttctggagtcttcctcccaagagcgaggcactggtgctgctctgtcaaactgttcaagtgccttcatgtaactgcttgctgtctctgctggcccctcccactggctccaaccatggcttggtccccactccccttaaccccagctcctgcacttcccatgcaaagcacctgccagcacctctggataactttcccaaccacattctcatactatttgctcaatcattccatggggcaagagaatgtcacccgactaggagtgtagacagacaggacaagttggacagacagccctcaggcagaatctttgaaaacagggactccattattggcactgaaaaccctaagtcttaccacccatggagaggccatattggagccaatcaacctgtgcccctagctgatgtcccatttggggatccccaacaactgtggacaatacttcctttctaggggcaccatatgcatcccagggactgtaattgtgaattgtgtggaagccagatgttacattgtctccctactgtaaacacagtgaccttcccagacagataactgagtcattatttatgggtaccctatgaactgttttccctataatgggacccctgcaattagaaaaggaggcatgaaatttgaccctgacttcagccgaccccaccgtggcctgggacctggaaagcattcatgtcagcctcccctcactgaccagggttgtgattgacgacaatagaattaccctacactttttccttgtaggccaagatggagtctctgcaattccaaatacatcctgctctacctggatcactgccttgagctgggtggaaaggtcagtagacaaat

SEQ ID NO: 16401 - DNA, 1036 bp, Homo sapiens
aattggtttggtatttttttaaatcattggttatatatatgtagcatagtagattatttccaatacagaaaaaagctgttattattttactttgagggtgggctatacactagagaatggaaaaagaatgtttcaaatactgtattagaacagtatttggaagtcgctaattagagtaagagtatgggaacacaaatattaaggaaatcaggaaagaatgtaaagtcaggagtagagaagaaacaatctttccctgttactgtcacatataattatagattttatattaaaggctttaaactctagtgtctatcacttgggatcttgggatcttgttaaaaatgcacattcttagtgctccccctccatcttccccattctgattttgtaggtcttgagcgggatttggaaatgtgcattttaataatgtcacaggtgattctgaggtatatggtttgtgggtcatcctttgacaaatactgcctcacatgatctggttatatttctgaaatatatttttcaaatcaaggaaaacgttccttcacatttgaatcttggtttgttgctgacagccattagctttctgtaatgtgctcatgttaaacacttctgaatccacatatacaaaactgcctctacctcttaggagtttatatgagagggctgatcagtataggcctttctaggttgttcatgttattactgtgggaacatatggcaatttaaaatattggttaattttctctctctttttatttctggacctacttcttggacccatctaatctgacatatcttttctctttcctacattctacactcttgtcttggccaattgctggacatgacgtcagcctaactgcagttccacagtgtggaaaacatctgtctttgccttatttgattcagttcaatacttatttataaagcaagtattgtgtgccgatcactgttttaggtacagaattatagatgtgaagcctcaactagggtttttatgcttgcattgtcaatttccttgacatttttggtaaca

SEQ ID NO: 16402 - DNA, 1043 bp, Homo sapiens
agaggatgcgatgggtgatgagatgagaagcaaggagattaatcagagtaagagtctgggaatctgatccagaggaatggcaagagataatatgatgccatctatcactggcctcaactcctattttgctttatctttcttcagaagaaggggttttagtttgtaaagattagcataaagattaataagataaaagtgaagcttaggataggtaaataaataagttggaactcaggcccacatctagagcaagggttggcaaattttatctataaaggacctgatagtaaatattttaggctttggggcctgcatattgtctgttgaaactactcagtttgcccattgtagtatgaaaaaaggcatggacaatacatatatgaataagcatgattctgttccaggagaatgttatttagaaaaacaggtggctgactttggcctgtggcctagagtttggcagtccttaatctagagcactgaataaatcgctgaaccactgagagttttgtctaggtagggttatagaataatggagcagctgaaaggtaagatgaagtaactttttttttttttgcaatattgctttatttatttatttgtttatttttgattatactttaagttctgggatacatgtgcagaatgtgcaggtttgttacataggtatacaggtgccatggtggtttgctgcacctatcaacccgtaatctgcattagatatttctcctaatgctatccctctccttgcctccacaccccaacaggccctggtatgtgatgttcccctccctgtgcccatgtgttctcattgttaaactcccattatgaatgagaacatgcagtgcttggttttctgtccttgcaatagtttgctcagaatgatggtttccagcttcatccatgtccgtacaaaggacatgaactcattcttttttatggctgcatagtattccatggtgtatacgtgccacattttctttatccagcctaagattgatgggcattttggttccaagtctttgctattgtgaatagtgctg

SEQ ID NO: 16403 - DNA, 1033 bp, Homo sapiens
gaaaagatagaaatgatgggtcagatagtctaggcgagatttttaaagaattaaaaaccagaaggtttgcaacagattggaagaaaattttgtttctgggactgtaagtctaattaaagttgcaaatgaggagcatataaagtaagagcattaataatgagctggaatagtgggaatttatggtcaaagtaagtttttgaggttaaatattttagaggtagaacacatttaagtaatgaaatctaagcaatatggaagccattgttgtggttatcagagtggattgttggaaaagagtaaaagcaaaaggtcaccagaagagagatccgttgaagccattattatagatattgaagttactgatggtagaacaaggtatgctaccagaggccgtacatcctgttctcttgtgatagggctattcactgtataagttttactagttttggcagcttcagtgaatgcaggagtatcttttttattaaatgactcttttatctggcaaaactacctctgatcagtggattgcagactattaacgtgactttcatgacattttgaacttttaaagtggcatatggccaaacattttatgaccctctaaaataacttaaaatcatagcgtctttatggtctcaaaacaagcaagctgttccaagagaaagaggaagtatctgttagtgaaaattgttgtgccttatgcttactgccaagagtttcagaatttttattaggagttccacaaagtcgttagcttttaagaagggagcatagagaaagagtttgggagagatgggagaagtgatgtggggggttcaatggagaggatgtaaaaagtaatgatgaataattaggaaagggatccacaatttctggcaaaagatttactttctacaaatgtatgtttaaagtgtcatggaaacactattacattctcttagtttgattctttttttaatgaccggaaaactagcaagttgagtagccacagaagatatttatatatgaaggtagaaaaataaaattttaggga

SEQ ID NO: 16404 - DNA, 1072 bp, Homo sapiens
tgtagaatctatatgatactgtttatattacagtagataatatgactgtaaaaggaggaggaggagggggagaaagattgaggtaaatctcctgttctaacatgaaatgatccagagacagttcattgaatgaaatatggcataaaactatttatattatgacccaatgttatttaaaaacaacataataaatatgtagacattaaaaatatggaaacacagaaagggaactgacaggatgaacacctgggaggatatagatatgaggagtaaggtagagtagttgaagagtgcttttcaggttttattctatgtctgtacggtttgaaaagagtagtttttgagttttaatctgtataagattaggaatatattgaacttctatttctgacaatgatgagtttggttgtttttaccatttcttgagttaaaaacaatacaaaatgctagacaaaataaaaaccttcattaaagttttggggagctggtaaggtataacataattactaggccaggatctatgggaaaatgagaacattgagaattaaggtagacacaaagctcttagaaccgaacttacttttcctgctcttacacaccattcaacacagatatgtgagggggttttccctacacactagccaggcaattcagcagcagacaccagctgggtgccctctaattcaatttaattctgacactgcctacctggagatagtgtcagatcctacaggttgaaagatcattcccacaagacggctcctccccaccaaacccagcctccctacatcacatgccagttgcaagcactagttgtgacctgtgcttctgactgaccagctaagaattgagattctgacaacccccttcttggggggttctattaatttgcttagagtggctcacagaacacaaggaaacactttaattacatttacccgtttattataaaagatattacaaaggatacagatgaacagccagatagaaaaaatgcaaagggcaaggtatgtgggaaggggcacagagcttccatgccctctccaggcataccacccttcaggaacctcca

SEQ ID NO: 16405 - DNA, 1046 bp, Homo sapiens
cattttctagctatcagtaatattgccaagctgcataatggaattattaaccatttgtgtgatttataagtggtaattagcatgttttatgggacatgaagactttgaaagtttgacctactatatctttttgggttgttttgtgctctgtgattaatttttgtgttgatttttattaaaggagagttttttcattttagaaatgtttgagacgtattttcattgatgattagtagttatggaaaaaataattggggctgaatagcttaattagtagaaagtttggggtaccagactgaactcaaataaatcataaactcaaactcattaaaatatatattcaaaaaagtatatgttctcctctaaagtcaacaaaaaatagacatgttttagtaagtctgataagtaactctctaaatctctttactgtctttctacaggaaaaagcaatttcggtatctactagaatccaaaggaaaaaaacctggtattatcaacgaagaaaataatgacagcaaaagacttgtaggagaaaacacaaatcgtgctacattaaattatactacaagagacttttataatgaaaagctagaggtaaaactactgttaatctttgcgatctaatgccaggatatatcccacatggcttggaatttgggggttgtacattttacccttagttaagataacttttttgttctggaatatttgtcaaccttatattacaaagccagggacagtaggtacccaggcaattagggagaaatagagccctgagatgcagaagaacccagggtttcagtatcgttatttcagcagaaaaaaaaaatgctcaaaagaaatctgtaccataaatctgtagcaaaaatctagtccaaagcaggaccaagggtcccgatctatgtaagaaataggttataggcttgctgtaggtacttagccacatcatgccagaccatcagagaacacagcaggacctccgtttttgttctccttactgggaccattgatgttttaattcatacctttcattctacaccattttt

SEQ ID NO: 16406 - DNA, 1117 bp, Homo sapiens
ttgcttgagttcaagagtttgagaccagcctaggcaacatggcaaagccacatctttacaaaaaataaaattagctgggtgtggtggtgcacgcctgtggtcacaactgctggagaaggtaaggtgggagggtcgtttgagcctgggaggcagaggttgcagtgagcggagatcatgccactgcactctagcctgggcagcagagtgagaccctgtctccaaaaaataaattaatttaaaaaatcataagcattgggaaacagaagaaaatattaaaaaggaggaaaacatactaatgttctcagaactcagaaacaatctttttttttttttttttttttttgagacggagtctccctctgtcacccaggctggagtgcagtggtgtgatcttggctcactgcaagctccgcctcccaggttcatgccatttcctgcctcagcctctcgagtagctgggactacaggcgcccaccaccacacctggctaattttttttgtgtttttttagtagagacggggcttcaccatgttaaccaggatggtctcgatctccagacctcatgatctgcccacctcagcctcccagagtgctgggattgtaggcgtgagccaagaattcagaaacaatcttaatgagacttcaatatattttcttcaatagtttttatgcattcttttctaactttttaataaaaatttcaaacatacagcaaagttgaaagaattttacaataaacatccatacgtccaaaacctacactcaactattagcatcgtaccatacagtgtacttactttatcacatatctatgtgtctatccatccatcagtctaccttcgtattttttaaattcatctcacagtcattgcagacattagtatgcttctgcctaaataattcagcgtgcatttcattaattgagattcagtattctacagagtatttttctttgtaaatttttccatttagaggtaaaacttatatactgaaatgtaaatcttaggtgtacaattgctgagttttgacaattcatacattcatataacccaaaccctatcaaaaaaaattttatttttttcacataacattatgatttaagcattttttcttatt

SEQ ID NO: 16407 - DNA, 1056 bp, Homo sapiens
tgggcctgttgtagcctcagacccctgtagtagggaagaggcggcttggttggttccttcacactcctagttccctgcccggcccactcactgccattgtgaattcctccagggtgaagcagaggagaggagaggtaactggcaaagacgttcccagcgggactggtgttccttgtaatctggtgctgctgtccttggttggcagatgtccaagttccagattctcctctctcagggcactttggagaatttccccctcactgggctctcctgctgcgccatgccctggtgcaggctgtgcaaatctggctgactccttaagatccacctccgcacccccagctcccgtactccatgggtataagctgtacatttactttctaggaggggggtcacctcattctggtgaaaatctttggtggagtcctttccagataacctaagttccatgtctttccatggtgctaaaacataacatctcctgcccctccaggctctaaaaatacagactgttcccaccctagccctctctccagtcttccctcctggatactccagctagggtttggcctttagatgtttttcagaggagaatcaggcaccaatccttgtacccccagataccagggcatccggatcaagctctgaatgttgtccctcttgcttggcttgggggagagttcctacttttccttccccataggggagtggaggggctgtatgcagcactcctacatccatcttcagggaaattcacacctagcaaactccatcctccagcctccttgtgcatacaggtgggaggtgagtgagggatggcgcgcacccgctttgtagtttctgaacagacagggcagcccctctctttggaatgtgtgcatacttagtatccatgttctcagctctggatcctcagctgcaactccatgacaacagcaagaaggatgcctgcaacaccatattacagagaccatcttccctgcttctcaccacattgcacagtctctagccagtctgtccatgtctgttctgtgtgatctcctgggtcacttacat

SEQ ID NO: 16408 - DNA, 1049 bp, Homo sapiens
ggtgacttcacagggtttccccactgtgaagtttgcttatttccctagggaatagggtacctgatgaattcagatgttgtggtcttggttgttcctttaggcctaggctctgggcagctggcgtattggtgctgtagactcccttatgaatgtactggaatgacggtggaacctcagagatggaggggattggtggctactgacccccaacacaagatgcactccagcaatgggtcaagtttcaagatggcaccatgctatagcagcttaggtcatggaggttggaatgctaaagtgtttcctgttctggggcaatgcagccacatgaactcccagtaactgtccacactggtttctggtcctgtgaggactgggagacccttttatagcaatgactgttcctgtctatggaggtgatggggcaaaggattccagcttactttttccccgtgagaagaagtttccctggctctgagctggtcctggtgggggataccatgtggcagagggaggatatctcacttccctctctgtggtgctatcctgggcttccatgctctatagaaattttgttgctcccccggtgctttccagtgtacttcatcagtaactccagtcaaagtgtagtttatttattgttttggtacctttttgtgtcaggcaactctagttggccatcatgctgacatcactctataagttactctagaatgtttaatttaaaaactgagcaaagtgtatcacatcttgggatatggtacctccttgtcaaagcattattaagaactttgtagtagaaagatagattaaactttttctcagaatcatgtggagattactttatatagagaacatatattttagaatagtttttcaatataataaacgtgtatttattatcttggccaccaagatcattgccattcactcaagacaagaaaggattctctggtttccttggtggtgagtttctttttgatgttttatcagagctttgtggaactgtggttgtcatcctggttatgtgctcaaaaacttggcagcagaag

SEQ ID NO: 16409 - DNA, 1053 bp, Homo sapiens
gggtgcagcgcaccagcatggcacatgtatacatatgtaactaacctgcacaatgtgcacatgtaccctaaaacttagagtataataaaaaaaaaacattaaaaaaaaaaaaaataaaaaaaaaaaaagacactatcaacagagtataaaggcaacccacagaacgggagaaagtatttgcaaatcatatatctgataagggattgatatccagagtatatagagaacttacaaaattcaacaacgaagcagacaacatgattcataaatgggcaaaggacttgaatagacgtttctccaaagaagatatgcaaatgtccaataagcacattaaaagatgctcaatgtttaggagggatgatagtaagggaagaaatgaaggttaccaacggctacaaaaacttttgggtgatggatatgtgcattatctgattgtggtggtggtttcaggggggaatacatatgagaaaacttatcaaattgtatgcttcaaatatgtaattgattatgtgtcaattatacctcaatgaaactgttaaaaatgaactactgatataagcaacaaccgaaataatttcagagccattatattgacaataagaagccagatgtaaaagtatgtacagtatcattccatgtatatttagttcaagtatagacaaagatagtttttgatgaaaataaaatcagaatagtggataccaacagggggtgagggtggctattcaatagtgaggggcatgagggaaccttccagggtgttggaaatattctaagtcttgagcagggttgggattacatggatcttaaaagtataagaattcatacatttacagtgagcatacttggtgtactttatgtatgttatacctcaattaaaaaaaaagaggagaaggaaaaggaggaagaagacagtgcagtgaatcaaataccagtactgaaatggcaataaaagtctctggaacagtgtgagattgtcccttgggagtgaccagaaaacaaagatgctctttaaagaatagcacagggcgtgcactcatttgagggtgtcca

SEQ ID NO: 16410 - DNA, 1054 bp, Homo sapiens
ggacgccagccgccagggccccacggtgctgcgaggcagccggcacccacagccccagggcctcgaagtcactggggacagaaggtacacgcccgcccttgtctgtgccgctccccgtccctgtcccagtatctgcccctgtccctgcccctgcctcgcacgctgctctgcaccacagacagtgcgactaatgcattgctctgccaggtggcaaggagctctgggctccacgaagctcctttcaccttttgatttattttgcagccttgtaaagtgttgaggccactcccacctcactctgtggttctgaataatcttcaaagccaggctaattctgagaatgcccttaggaagaattttagggaggcctcctagaggggtgaaagcaggaggggagtgctgtccgggtgccgggaaggagagatcctcagcctgtgtggattaaagctgaggacacaagacgagaagaagtgtgtctaaccggaaagctgatatgagttgccaatcctaggataagttgaatgtttggagccttagaatgctcccaagctgtaggcttccagattctgtgaacttttctagtaagtttctccgaagttttttgagtcaacacattggtttgaggatatgtctaaggacctaaactgtttcagagtcataaaatgtaaactctagaaatggcatagtgtcatcagaatagtggtatagctctaagaagcataaatatgccaaagtaggcattgcggtgctgagaagagcttgtcagtgagtgaagcaatagatactaacagatcactgcattcatccggcagtatttgttgggtgtcttagtgcctaggttcctgatagatcctgggagaatactaatgcaaaaacagtaacaaaaaacaaatatggacaagaacaaaaagtgtaagatgtgctctctttgcttaagaaatgcgtaattcatttgtcaagccctgttaatgcccagcaggcagggcctgagcttatcaggtgggctgccttgcccccttgcccactcacagttcagcatcagtctccatggcca

SEQ ID NO: 16411 - DNA, 1003 bp, Homo sapiens
tataacatcaccttccagagataacacttttaacctctctctgtgtatgtatacacacactccacacacataatctttttaacacttagtggattgtggactcctttccaagtcgtgaaacagacatttatgttgtcaagtactgagcaattctagatgattctgaatgtgcattggtttgtggtctagcctattagccattttactcattgagagaaaggggttaagcagactgttaagtctttgtagtctacagcttccagttctggtaactgccaccaggttaatgaagggtggcttctggctggagcctcactgtggagcagcttggctttacttagttgtagttatttgaggaacaggaccttcaaccacttgtgctggtctgtttctgctacgaagacctgcggcccggcagccgatctctagttctgattatggacagggtgggccttcagcgctctgggctctgcttctgtgtcactgtggagcctttggcaaggcttgccacatctccaggtctcagttccctcatctgtaaatgaaaggggttggatttgattctcttttgctctagcactctgtgattccacgttaagtcatttggagtggagtgagatggggcttgggcgtggcccttcatcgctgctgcacaggttaggatgcacaggccacaccagaatcacccaaggagcacttcaagcatatattcctgggctctcatccccactcttctgccagagtgaggcttgagaatctgcatttttaacaaactccttaaggtttctttctcgaagccgtacttggggactgctgcagggatggtggcctctccaagtcacccagctgttcacatcctacttgaactctggctcaggccaaaggcatgtgaaaagcatcttagttaactcaaaagccttcatggagacagctggtgttgctggaagcttacatgggcccagctttagggttgccagcaggttggcttccagagccctaggag

SEQ ID NO: 16412 - DNA, 1116 bp, Homo sapiens
aactgagcctccaaagtcaccacagactaggagagaggcagcatggatggcccccagaatgaaggccgaggatgtcaggggtggagacagacagagagccagggaatggcactaggcataggatggagcatggtttgaagtggagttagtttggtgttttctacacctgggacatttgttcctttaccacactgagagatggaatcttagtgggaaggaaccactatttgtcttttactcattaagttcctagcccagcataaaggctcctggaataagtatcctaatgggaaaagctaaagcctcttggaggcactcagggtttggccacagtcattgatggttcaagagttgttaaggtgattcagaccaacacaaaccaggggcctgtagctgaggctgggactcagcccatcagcaatcagaagggccagaaccacactggatcatttcattctgggttggaaatgactggaataaagatcctaggggaagcaggagcaatgaatctaagacttagaacagaaggagcacagacacccaggttacctgaagaagagtcagatgatgccaagtgtgaacctgagaggcaggagggctggggaggcagagtacagcagtggagagaacactgagctgagagcgggagccctggccctgggtgcagtacgattctcctagcttggggtttagctttggataatttgttttatttctcagagtttcagtttcctcagtttcaaaatgaggatgatcatgccttaggtcataatgttgattaatggcagaacttgatttagaaccagatctcctggaagtaacaattacttgtgctggacattggtgcttgcaaaatacttctcttaagtgatcacatttgatgacatttgtttcaggcctgtttcaagcacaccataatcaggactgagcaccttaggacactcctggtatgtctaatcagggaaatggggaacaccacaatgttgacatcaaggattctaaagtctattattattattatactttaagttctagggtacatgtgcacaacgtgcaggtttgttacatatgtatacatgtgccatgttggtgtgctgtacccattaactcgtcatt

SEQ ID NO: 16413 - DNA, 1043 bp, Homo sapiens
aagccaccttctttcctccattacaataggccgtgtcctcctttctcaaaccttggctcagaggcgaggcttgtagttcactgctgcattctgctgggagaaccatggtgaccctctgggtcatggtcccgactgggacaccgtattttcgtgcttcttgtttttattgttcctctatttctttttcttttgagtccaatcttcagtcaagccttccgtgtgaatgatagtggccacttggggatctccatctgcattttattgtatggccacgcaaaaccttttatctaattcctagaagacatcgattgctgcatagcttggtgggtgaagaatggaaaagcacaatctcactttattttgctggtggctttgccctccctttcctacaagcagtcattcaggcctaatggttctgttcctcctaattattcatttgttcattcgttcattaattcattcagtctgccattcaatatatatttatcaagcatccactatgttccaggtgcgattccaggcttcagagatagaacagtgaatcaaactgataatgcccccctctccaggagccagcattctagcgagagagaatgacttgctgaattgtttcagttggaactttttttagactctgaaccttggaaaaagtccactttccatgggcttattaaatgtgctgaatcagacagttggtgctgtttactagagatcagggttcaaccagctttagctgcatgacccagaacatttgattttatgatttacaaaataaaaagttatggccctctgcagatgtcccatctaatttgctcattgtgttccttagaggcaatgtggtattgtgaaaaaagcaagaccaagctttgcggttcaagtggcccgtgcttgctgggcctcagtttcctgatctgtagaatgaggctggataaatctaagtttctctccaactctacagtctgatggttctagtactacaagatcaagatttttttcctaaagagccatttgtcttattttagcttcaagccaagccagggcat

SEQ ID NO: 16414 - DNA, 1055 bp, Homo sapiens
accatgcctggctaatttttgtatttttagtagagatgaggtttcaccatgttggctaggatggtctcaaactcctgacctcaagcaatccacccaccttggcctcccaaagtgctggaattacaggcgtgagccaccatgcccagccttttctgttgtttataaatgacataatctaagatgttttgttatagcagcccaaacaaactaagctgttatgaatagttatgtacacatttttatattaatgtaggttttcatttcttgtgagtataaacctaaaagcagaattgttgggtcatgtggtagctctatgtttaacattttgaggaactgccatatattttagagtcccactagcatggtagatatgcaaagttatcccactgtcatttgttgcaaacagtattttttccctaatgaattgtcttggcacctctgtcaaaaatcaattgtccataaatgtaagggtttatatctagactcttaagttctattccattgatctatgtgtttagccttatgaaaataccacacttactgttgattcgtagtaagttttaaaatcaggaaatatgaatcctccagctgtttttctttggtcccttgcatttttgtgtgaattttaggattaccttcagaaaaataagagggcatttggtagtttgtattgaatctgtagatcaatatgggggagtttgccatcttaacaatgttaaatcttcagatccaagaaaatgtgatatctttccatttgtttagatcttccttaatttatttcaacaatattttgaggttttcaatgaataaatcttctttaattaaacttgttcttaagtatttttattctttttaatgctgttgtaaattgaattctttttcaaattcattttcagagtactcattgatagtaaatagaaatacaattaagaggtagggtctcactatgttgcccatgctggtctcgaactcctggcctcaagtgatcctcctgccttggactcccaaagttacaggttacacgcatgagcaccgtccctggccctcaaagtatt

SEQ ID NO: 16415 - DNA, 1046 bp, Homo sapiens
tgctcatttttctgcccttttgccctacgttgcttttttactggcttcactttgtgggctttgcttagagtttatatttttagtccaatgaaaccaagagaataattggattgggtaaattgttcttctcttttccaagatatttgcatgatttcacccttgaaagagggtagatagcttctaatttgcccaaattccaacttaatgtgactctttgtggactctctctcttataaacaccccaagcaaactctaatctaaaagtactttctgcttgtgactattaaaaatttatcatattatgttatagttattttgacatgtgtcttagctcctaaaggagagattgagtattatatgtatctgtatcctcagtgcttaacagattaaaattattcagtaaatgttttttaaatatatacaagaatggaacaaaagaacgaggtagaaattggttatgaaacctcctttcctagaaataatcatgaataggattaactaagaagtaaactttcggggcacttgatctgttcttaggacctcttgaaaccttaaactgaaacctaacataaaactgatgaaatttattttgttacatgtagtttagaaaaattatctattatttttcttattttaatcattagaacaactacccaacataaaaaccctgtttagatttctttatatatattaaataattattaatcaacctaaattatacacataattattaacaaataatcataactgctcactgccatacactgggcaaggcactgggcaaggcactgggatgaaacagtggaaaagatgaacacagtttctactcaaattgagcttaaaacctagtgggaaaagtaatacaaagtcagttaataagcaaaagaactgatgaatgctatgaagcattcagatgcattcaacaaatattatgatgaatgctgttgatgaacgctgtgaagttaactgggtagtgaaaaatggtggggggcacacattaaatggaatgttaggtgaaggtctccagggagggcaggagtccagaa

SEQ ID NO: 16416 - DNA, 1126 bp, Homo sapiens
tggaagttcaaagaaaaaatgtcccaggaaaagcacagcccgttaaaattcattctaagtggtcagaaaggtaattgaaaagaaggctttctcagtgcagtgttggcaggctagtttccctccctttgcaatctcagctctccaaacatctctccctgacactaaggtcattccaaagaggaacaaaattaacaagaattcattactaagacatgctaaattgactgaatcaataaaatccccaaagcccagttgaagagatcaagatgggaggaataaacactctctccttccaaagccagaagcctgtgggacccctgctacagctttgattttcaacatgaatcttctctgatttgactagaggctccctctcccttcctatgcccacctttgtcacccacaaatggctgcatcacctgctgatcacgtggggctggattttctaccatgagaaaattcctgcctggtttctctgggccaaggcatcttttgtggctgtgtgtatttgttggaggtctgcagagcaggagaaatgagggctagaaaagagcagaactttgctttccctccttctgcctgatgtagaagtcttgagccccttgaggctagaaggttttcatacttgatgcagcagcggcaccacaatgatgaaatcagaagggcttagggtgtcaggttgcatggaaggtgatattacagggcttgtcatgtagtcgtgtttactgagaagcctataattttcgctttgactgtatattgatttggaggctttggtagggtgtgtgattggagagtgttctttatctccatcagccacccccttggccttgctgcttcatggataagacaggccactcccttaatgagtagccatcattccatgctccagggcagcttgtctcttgaggtgggtccatatgccattagacccatccccagcattagggattcattccttctacctaaggagttgggctgtaataaaatgctgttctctgtagcatgacaccaggcctagtgtgaaagtgaatttgtggatgtaatccgttccagatgaaccccaatttggctgagaggtagcaggcagaaattagaagcactgaggaggggggtagaaatttga

SEQ ID NO: 16417 - DNA, 1045 bp, Homo sapiens
tactaatagctacttctttgtttctaagtatgcttataaaatcagagtcattccttcatatatatttatgtatataaaactttgagaatttctgggatgatgaagtttttaaaaatagacataaaagtttgaaaatacaagtagattgatgctttcactgaaccacaaggatttttctaagtagctaagtccttcactgaattccagcaggcagtggtagtggagaagtaatttcttagatacacgtagcccagatggagaagagaagaccttctttctcaactctcatttttctcttccttttagccagtccttcctttttgcccctcttcatgctctagcctctttccccttttcatttgttcattaagcctgtaattacctaaaaagaaataagaaaaagaaggacaagatgtgtacgtatatgctcatagttggatagaacaaccatttcattatttctattggctagagtattattttctcaccttattaagtgatcaatccttctgtagacatttatgagaacaccatggtttctgataaatacatgttttgagtgaattccctctaagtaaatattgaaaaggcagggattctttatgtgtttccagtcattgcttgaaaactcagccttttggctttaaacaccagaataattgctcagagccataagtgcccttcccaaagtccagcaacaacatgtggagccaacttagaaaacatggggtaaaaaaataatccctgctccttctggccatagtctgatcagtgtgtttggtttcaagtaacagtaacaacttatagcagcttaaaccaagagggatttactttcctatcataacaagaagtctgaaggtagacagtaactacagttgattcagtggcttaacactggtatcatctctactgattctcccatggtctcaagagggctcctgtggctccagccatcatatttgagttcaaggcagacagaaagatggaaaggactgtactgtaactttttttttttttgagacggagtcttgctctgttgcccagg

SEQ ID NO: 16418 - DNA, 1053 bp, Homo sapiens
tctcacaagccaatctctctaatgaggacaatctccctatattaccatatatctttcctttgtaattcttttcacattgcaattctaaatgtatttgttgggtttcattaatgttggcatcctgcaccagacaaaaagttccgtaatgataagaattgagtctgtttttcctggttcaagcagatgataagtactgatattttcagtaaatggacaagtgaaatacattctctactgtgtatttggctttaaaaaaatttttttttatttttttatttttatttttgagacagagtctcactctggcccaggctggagtgcaatcacaatcacgtgttctcgactcactgcaactgcctcctaggttgaagtgattttcacacctcaccctcccaagtagctgggtttacaggtacatgccaccatgcccagctaatttttgtatttttagtagggatgaggtttcaccatgttcaggctggtcttgaactcctgacctcaactgatccacctacctcggccttccaaagtgctgggattacagacatgagccaccgtgcccagcctatttgtcttttaattctgtttatgatattttcaacttacagaattttaaaatatatatacaaatatataaatattttcttttgtgtttttgtcttcattatagctctgcttaaaaatccttccccacattaagaatatagaaatatagacacatttccttttacagttttcatacttccgttgtttgcataaaacctataatccacctgcaatttattttgtcattgatataaattagagaaataactttactcctcaagtggctggccacattcccaaccctttgccttcctttccttgatgatttgaagtgactcattgattgcacacgaaatccctctacatgtttagtcaggtaaatgatctgtctcttctgtcgctggttgtttttgccactgttttcattattacggcttcgtgctatgttttagtatctgacagttaccttttgtaagaaaataagatttcataaaataatactttgtg

SEQ ID NO: 16419 - DNA, 1045 bp, Homo sapiens
aatgccttcattctaaaaagaatttaaaataatgtttacaaatgtagtgaatagaatttacaagaaaacaaataagggaggaaaatggagcaaagaggaaactgggtagaaaaaataggacatgagtaagactggtgtctaaactccgtgcctttacatctaactagagatgtgtcaaaaattttactgtgagctccctagcagccaaagcaaagaaagaaacaattgaatgtgtaactcataggtaaaaataagtgaaaggctgggtgcggtagcttaggcctgtaatccctgcactttgggagaccaagtcgggcagatcacttgaggtcaggagttgaagactagcctgaccaacatggtgaaaccctatctctactaaaaatacaaaagttagctgaacgtggtggtgtgtgcctgtaattctagctactcaggaggctgaggcaggagaatcacttgaacccaggaggcagaggttgcagtgagctgtgatcgcgccactgcattccagcctgggcgacaaagttagactctatttcaaaaaaataaaataaaataagctgatttatttatttattgagttaagtaagttggggcaataaaataaagcggataaaatatattagccctttgactcaagaagtcaataccactttttatgagaacaattaataacacctaacatcagtgaacacttcttatatgccaagcactaacctaaccaatgtaattatgacataagaacaccatgcatcaggtaaagccagttatattttaaaagtagaatttggggtttacaaatggctttctcgtttgtgttgttacttaattgctcacaacaaccctatgagagatattggtcaggaaaatatttttatatgaggaaagtaagatcacatttctaatcattgttgcacccggaatataaatccagattactcagatatactttttttttctttttttttttgagatggagtcttgttatctcacccaggctaaagtacagtggcgccatctaggctcactgcaacctctgcct

SEQ ID NO: 16420 - DNA, 1043 bp, Homo sapiens
gaggttggttgggaggggaaaggagaggtcattccaggaaaggcaaacaatgtcaagaaagggagcctggcagggttaggtatgtgccaggtctttgttctggcctgagtttaagatacctgggaaggcatgccaggagctgttcctggagaagtctgtagagggcataccctgagaggcctttgatgccccaccaaggaggacgacttcatcccaaagacttcgtgaggctgctaggggttacacatagaggcctgagcttggcagacatgcactttgggaaatacactgtggcatctgcaggagggacaacagacttagggtttctggggagagttggtgggtgaggaatccgagcctcctaggtacaggaatcatgacttgtttactgctcacccagggccttgcacagtgcctgacatgcagtaggtgcccagtatttattaaatctgggaaaagttgttaaacgaatccaggcagggaatgccaagggtggtggcagtgagaatagaagatagggatcctcttagaaagacatttaggagggacgtgggtgaaaatttttaatctgaaatccaaggaccgaagaaacttcattttttagtgaagcgcaaaaactagaaggtagctttgaaaaggcgtttgacttcaggaaccaattggccaaaggaatgtttctagacctttcaaaactttaatctgtgctttgtgaattacacagtttggttctattcaatagttccctttttccctcaaatgccacctgtgaaataagttaaacaccatactgttttaatgtaaaaatatttcctcaaatccactgtataaattaattactctttggggaataggataatctaatttcccttctacaatgtgctccattcatatgctctccattgctgtagaggtaggttatgaatcaactgtttctgaaggattatgagctataataaatgtcaatatgagctctgattgatttcctgcagcctcactagttgtgacttcatttagtaacttaatactaattgtgtcgctttgat

SEQ ID NO: 16421 - DNA, 1078 bp, Homo sapiens
agagtatttaaattgcataaattcaatgtgtgacacttctgtttttgctgttttctcagtggttcttaaatgttttcatctcaggacccttttctcctctttaaaactgaagaccccagagagcttttgttcatatgaatttattcgttaatatttacagtattcacattttaaactgaaatttgagaattttatattactttgctttcaaataacaataataaactcactatataatacagtaacagtttttttaaagtaactatttcccagagcaaaaacattttgagaagagtggcatcattttacaatttgcaaatactgtatcttttaatgtctggcctaatagaagacagctggattctcatatctgcttctccaatctattgtgatagattatttggctaaagtatatgaagaaaatctggtttcacataaatatgtagttggaaaatagagaggtagtttagtggtcttttcagatcattgtgaatcttctcctttgatactataccaaactagaaaagtggtagtttcttaaaggttagttgcaatgggaaatctgaaaccacatcaataaacttgtcatgttctttatactcatgagtaagagaaaaaaaggcaaatagcatcttagagttgttatggaaataggtttaatctcaaagatcccctgagaggatcttaaggaccatactttcagatatacttttccaagtaaatggaaatatatccatttttttaaactttttattttcaagtaatgttaaatttacagaagagttgcagagagaatgcagagttcccatgtactcttaacccagcttcccctaataagaaatttttaaaactttatggtaaaatatatataacataaaatttaccattttaaccattttaaatgtacagttcagtggcattaagcacattcacattattgtacaaccatcaacagcacccatccatagaactttcttcatcttccaaaactgaaactctatacccatgatgtgtaagttggattcacttattaacccaaactacttgaggcatctgttgagatttacatgcttaactg

SEQ ID NO: 16422 - DNA, 1024 bp, Homo sapiens
agtctactggaattcagtagtattcatcatacctaaaggtgaaacaagagagccaatcctatttcgaggaaaagataaggatactcaatatcactatgaaggttccagccaatgaaatgagacaagaaaaataaatgaggtataaagattgtagaaaaaggataaaacccaccttatttatatatgacatcatttcttaccaacaaaattattgccaacttatgaaaaactattagacctaatcatatattcatgacactgtccagatcaagtaaacatttaaaactcaatagctttcctatatataagcaagaaccatatagatcaggtagttttaacaagatgccattcactatagcaagaaaaatattaaatatttaaaataaatgaaacaataaatgtacaagaaccataggaaagaaaaacaaactttactaaagggcataaaatttaaataaatgacaaaacaacatatttcagtcgaagacaactccttactaaaaagccatcaatttcccccaaattaatccataaattcaatttttaaactcctcaatattccaatggaattttcatgagaatcacctgattttaaaattcatctagaagagcaaatgttcaagagtagccaaaagcttttgaataaagatgaagtgaaaatatgtcctacaagatatgaaaattttataagcccacagcaattaaaacacgtggggaaggaacagggataccaaagagatggtaatgaaatgaaataatctagaaatagacccctgtttgtagtatatgataaaagcacatttaaataattgaggaaacaactcaataatcagcattaggataataattattattaaaaaataatgttagatctctgtgtcacagtatataccaagataaaaactataaatataccaaaagaaaatatagaaaaataaaatctataaaaatatcccagaaaaatatttttaaattttgtggtgaggagagactttctgacaagaactaaactcttttggcctct

SEQ ID NO: 16423 - DNA, 1072 bp, Homo sapiens
tctgtctctatctctctgtctctcttgctgtctgtctctctctcttgctctctgtctctgtccctctctgtctctcttgctctctgtctgtctctcttctctgtctctcctgctctcttgctttctgtctctatctctctgtctctctcttgctctctgtctctctcttgctctctgtctctctgttgctgtctctgtctctctcttgctctctctccgtctctcttgctctctgtctctgtctctctcacactctgtctctctcttgctctctgtctctctgttgctgtctctgtctctctcttgctctctctccatctctcttgctctctgtctctgtctcacactctgtctctctcgctctctgtctctcctgctctctgtctgtgtctctctcttgctctctatctctgactctctgtcttgctctcttgctctctgtttctgtctctctcgcactctgtctctctcgctctctgactgtctcgctctcttgctgtctttgtctctctcttgctctctgtctctcttgccctctctgtctctctcactctctgtctctgtgtctctgtcttgctctctctatctgtgtctctgtctctcttgctctctgtctctctctctcgctgtctctctttcttactctgtttctctgtctctcttgctctcttggtctctgtctctgtctctctgtctctctctcacttgctctctctctcccttgctctctgccactgtctctctctcctctctctctttctctctctctcaaaatgtgccctcctcctctctctgggctggcccctcagggacatccactttacccttaatgaaagcctaggctttgcactcttggaagggaaagctgttgacttctagcagcttttgttttctgtcctgcacaaaaacaaagcaataacatctaaggacttggctactctttcaaaccggaggaggaagtggaggaataaagatagtaaatcacacacaaattagtatctcaaaaagtgacctgccacacctgtgtgtatgtgtgtgtgttctgcttttttctttcaccaaacaatattgt

SEQ ID NO: 16424 - DNA, 1031 bp, Homo sapiens
agcaatggccttaccataagttcacagatcttgccaaggccttcctcagtcaaactccatctatacctgtgagtcctacatttctgacttttaaaagtcagaacctgtctatacctgtgagtcctacatttctgtcttttaaaagtcagaactcctctctttttgccaattccttaaacttcttggatgggaaagaagtttagtttaaacacattagcaaaagaatgggaggtcctcaaggcccaggcaacccatctcctttgaaactgatcaataccggactataaaaacttactgctcaaatccagctagtacccaaagtatgtactgtctatatacctgtctatacctgtgagtcctacatttctgacttttaaaagtcagaactcctctctttttgccaattccttaaacttcttggatgggaaagaagtttagtttaaacacattagcaaaagaatgtgaagtcctcaaggcccaggcaacccatctcctttgaaactgatcaataccggactatagaaacttactgctcaaatccagctagtacccaaagtatgtactttttaaatgtattctaaaaaattgaatttggggtttaggtattactgatccaaatgagtcctataaaattaacttccagaactaggttctcagagaggccaccattaccaccttcttcaacataactagcctatattgactttctgtccatcaaataattggaggccatttgggtggtgataggaagaattaagtttatgcagaacttgaggttcagctatctgacaccttttgcgggaggaggaggagtgggtctatctgaaatcagaaataatacttttatgaggctttttaataatttttattacttacagaaaatttctgaaagttcctttctctggctcccaattaaatggcttactccacaatcaacttataaaagcactggatcattgtcttgatcccaaaaaatttgtcccaactatagttactattttgagcatctgtattattgtttgaaaacctta

SEQ ID NO: 16425 - DNA, 1967 bp, Homo sapiens
gcactagccacatgtggctatttaaattttagttaattaaaattactcagttcttcagtcacactgaccatatttcaagaactcaatagccacaaggggctagtggctactgtattgaacattttgcagataaaagaaaatttccgggccaggcacagtggctgatgcctgtaatcccagcacgctgagaggccgaggtgggtggatcacaaggtcaggaattcaagaccagcctggccaagctggtgaaaccctgtctctactaaaaaactacaaaaaattagccaggcacagtggcagttgcctgtaatcccagctactcgggaggctgaagcaggagaatcgcttgaacccaggcagcagaggttgcagtgagccgagattgcgccactacactccagccggggcgacggagtgagactccatctcaaaaaataggaaaatttccgtcacaagaagtgctattggacagcactgctatgggaacataatgttcagtggaacacgtgaacacgctgaaaacactggaataatccataatttctcctgatttgtcaggcaaacatgattactactacactatgagaacagactctctcattgatttgtaaagactccatcatcatatttaaaatttctaatctacatatgatttttttatgctattgatttatctacttctgctccaataccacacccctagttttaagtcaaggttctgcacctttctctttcagagcagaaatgaagaattcttgcatggagtaggaaattagattagaagtgatagtaaaggcgctttcacttcccagactctaaatgtaaacatttctctgccgaacttgatttatattatgttgagctgtatactcaattacttattcatttattctacaattatttattgagtacctgcctggtaagcactgttttaggtcctggggttaaaatggcaaacaaggcagacaaggcccctcgtcgtcttattttcatagagcttacattcttgttttggagagggaaagagaagaggcagggggaggaaaaaagaatatgaaccaataaacaaataaattaaaaaactatcacatagtaatcagtgctattcaaggaattgaaattagagtgatagtaactggtggcctctttgttttggctgccctgagacctctgtgacttagtggcatttaaactaagatctgtccaaagaagaagctaattactagaaggtccaggcagagctagtaccaccctcaggagggaaaaagcttggtgtatttgaggagtaaaaagaaagtctttgtggctgggtcttagtgggcaagcagggaaataataggagataaggttggagaaatagctgaagccacattttcatgtagggttttgtaaactagggtagggaattttcatttttttctgagtatgatagctactagagactcctaagcagggaacagacctggcctaatttaaatttttaaacaattattttgatggagaatttattggcacagtcagtagtggaaataggagacctgttaggctaggtcaagaaagaaatggtgatagatttgactaaggtgatagtagtgaagatggaaagcattggacagatttagaacatttaggctatagaatcaacaggacttgtcaattggatgtgaagtgtgaagacaatagaaaactctgggatgagcctgggcaacatagtgagaccctgcctctataaaaaaaaatattaattagccagacatggtggtatgcacgtatagtgcatatagctacttggaaggccaaggtgggaggatcacttgagcccatcagttaaaggctgcagtgagctatgattgcaccactgcactccatcctgggcaacagagtgagacgttttcaaagaaagagagagggaaaggggagaggggagagagggaggggaggggaagaagaaaaaacagagagagaga

SEQ ID NO: 16426 - DNA, 2023 bp, Homo sapiens
tgcttcccaagtcctgctatggcggaggccttcggtcgcctaagccttctcttgcgggcaatttctgccagtccctgggccgggtgtcctttctctggccgggcgatcgcctactggggcggggcggaggaggtggggtggagaagaggagtcaggaagaattgggccctgacgggacttaccccggccgtagcctcatttgagcacttttggaagggattagagtaggcctaagagcagcttggtgtacagttgccccaagtgggcaccagttaataaagaaatggatcttggcagtctcaagtgcctacttaaaggtgggggaagggaagtatttctcggaagaggtgctgatgggccttcttttcagatggtgaggcttctgcttacatcttttttatgtctttgctgtttgggacctaattgctactttttctagtcgtagcagatgacttgcttgaagctgttggaatagttactgcatattgcatacccttccttgtagctaaaacaacaacaaaacgcagtgttgtctaatattggacaagactctattgtgagttagaaagcagaggttttctgcttgtgaactcctttctctgatattttctattttgtggtaagttaggcttggtgtaagttgataaccacatctcatttaaccatgtgcgtcagattttgcatttttgagctttagaaactcaaaagttttcatttggggaaaaaaaaaacctcagttctcctgaggagtcagggatatggctgaagaataaaaatgaagcttgattcagtgcaatttttagaaaacctggaaggaaacatatatgagcagcaagttactattgcctcttttatcagtattatttcttttttgtttaacttaaattggttggctaaatattcattgacaaattagaagtatgtcactgtcaactcgttgactttctattattaactgatttttatagtattataagtaacagttttaaaaattgaagcatctattcaggcactgtttcaatacagtgttttgcataatagaaaaatctctgatatctagtgccattactaaatagtggaagtcttcatttttaatctagagaacacagtctaagaaggaagttgaggattgtagaagataattttttgtttgtttgagacggagtcttgctttgtcgcccaggctggagtgcaatggcgcaatctctgctcactgcaacctccgcctgccgggttcatgcaattctcctgcctcggcctcccaagtagctggtactacaggcgcgctccaccatgctcagctaattttttgtatttttagtagagacgggtttcaccatgctggccaggctggtttcgaactcctgaccttgtgatccgcctgcctcggcctcccaaagcgctggattacaggcgtcagccaccgtgcccggcctgtagaagatgcacatgtaagaaaaatctgattaggtaagaaaaaataaaaagacaaaacaagcctgccacccagagacgtacaacaaaatgcgaactgtagttatttttctagacctttggatagccattaatatggttccacgttaataacagtggaaccatactgtatgttctgtttgtgttttcagtggaaaaacattacagaaatactctgaacaaccttctgtcaagtaaatttttcgagaacttatatgattatagatctgaactaatttatttaatcaatctgttatttgccttcctttttattttctagtttctggcttttataaatattgaaaatatcctcataggtcagtctttgagtgttcttattttcttgggataaagtgaattgctgagtcaaaagaatttgctcattttcaatgcatttgatacatactaccacattgctttcagaaaagttatgctagttttcccaaccagtgtttgatgggcaaaaaaaacctggtgagattgaatttatgtttattgggcttggtatttcttttttaaattgcccctcgctttttgctcattttattct

SEQ ID NO: 16427 - DNA, 1029 bp, Homo sapiens
aaaaaatacaaaaattagccgggcatggtggtgggcgcctgtaatcccagctactcgggaggctgaggcaggagaatcacttgaacccaggagacagaggttgcagtgagccaagattatgccattgcactccagcctgggcaacaagagtgaaactccatcaaaaaaaaaaaaaaaaaagaagaaaagaaaagaaaattgtagattcacatgcagttacaagaaataatgcaaaaatcccacatattcttttttccaaaaaattttatttccctaggttattggggaagaggtggtatttggttacataagtaaattctttagtggtgatttgtgagattttggtgcacccatcatctgagcaatatacactgaacccagtttgtagtgttttatctctcacccccttctcacctttttcccccgagtccccagagttcattatatcaatcttaggcttttgcatgctgatagcttagctcccacttatgagtgagaacatataatgtttggttttctgttcttgatttacttctcttagaataataagtctccaatcccatccaggttgatgcaaatgccattaactcattcccttttatggctgagtagtattccatcatatatatatatatatgtgtatatatatatgtgtgtgtatacatatatatacgtatatgtatgcgtgtgtatacgtatatacgtatatgtatgtgtgtgtatatatgtatatatatatgtgtgcatacatatatatgtgtatatatatacatatatatacacacacacacacacaccacagtttctttatccacttgttgattgatgggcatttgggctggttccccatttttgcagttgcgaattgtactgctacaaatggcgtgtgcaagtatctttttcgtataatgacttttcctctgggtggatacccagtagtgtgattgctgaatcaaatagtagttctacttttagttctttaaggaatctccacactgttttctatagtggttgtactagtttacattc

SEQ ID NO: 16428 - DNA, 1029 bp, Homo sapiens
ctgtcaaaagtctatcccagactccttactatggcattcatggcttccccatcttaacatagctaatttttttcaatctcatctgcagttgttcctcatcccttatcacccccagttgcactgtttgtaattctttactgtgtaacacatatttgtgttttcatgcttttgttcatacttgtccctcttcttttgataccttttcttttctttctgtctctcttttttcttgagacagggtttttgctctgttgctcaggctggagtgcagtggcacgatcacggctcactacagccttgaactcctgggctcaagcgatcctcccacctcagcctcctgagtagctgggactacagttgcatgccactacacctggctaattttttgtattattatttttatttatttattttttgtttgtttgttttgtttttggtagagacaattttttgccatgttgcctagactggtctcgacctcctggactcaaacgatcttcccacctcagcctcccaaagtgttgggattacaggcatgagccaccgtgcccagctctctttctcttcttaactgcctgatatattcctattgagaatctgccaggctggctgcggtggctcatctcctttcaggttcttctctacctttcctgtgcttccttatctatgtttgaatagtgcttcatatggatatttggtatagcctataagaggttatgatatagctatccctatatccaagcctctagctatatatgagggttttgaaggtgagaactaaaactccttcatctttgtgttcatagcagagtttcttctctgacagaagaaactcagtaaatatttgttgaagtttgtccttgcctagtaaatgcttgctttctcagtttccttgtggtaaaccaaagggatccagacaagattttcttctggcactaacaaattattttatgatttctagataatgccaaagtggtagtgtaagaagatggcaaggaagaaatgtttgaattccaagaggacaagctt

SEQ ID NO: 16429 - DNA, 1030 bp, Homo sapiens
cgggaggctgaggcaggagaattgcttgaacctgggaggcagaggttgcagtgagccgagatcgtgccactgcactccaggctggatgacagagtaagactcttgtctcgaaaaaaataaaaataaaaaataaaagatttattagcatgataaatcaggcttttcataatgtgcccctatctaccttagctgccatttctttatgcttattcgtattatagcataataatcacattccctgtggaaattttctgtatgcctttgtaaggtttttttcctatgcttcaaatgcttccccccacccccccataaacccattcatacttcatgacccactgtaaatattgtttcttccttgaatctttccctgtgagcctcagaattttgtatatacttttataataaaaagctcttatctcattatttccttactagatagactctgaaattcttggttgtttgatcagtgtattaattttggtattcacgttgtacccacaaagttcctggaacatagctgttagacattgagtgaaaagtcagatatgaatgaattttctaattgattttattattgataaaaataagtcttggtactatccccatttttttcctttgtgaattgttcacatttctcttctaccaaattcactgaattaacccttccctcattctctaacatactactttttgctcttaaccagttatcttacggaactttagttatcacaactgttatgtgaaataggtgacatttttactgttttgtggttaaggaattagaggcatagaggaattaaataaccagcttttcatagctggagttggaactcagtattttatatcattaaatatacacaaacgtgtgaatgttattgttgtgtgtgctgggtattttctgtttgcctctgcggaactcttctacctttttccatcctgctgtgctccagaagactgacttatacaggctgagtcaatgggctctgacttgtgacttcattgctgtggcctctgaatccaaataaatgac

SEQ ID NO: 16430 - DNA, 1050 bp, Homo sapiens
gcctcagtctcttgaatagctgggattacaggtacccgccaccatgccccactaatttttgtatttttagtagagatggcgttttgccatgttggccaggctggactcgagcttctgacctcaggttaatctgccgtctcagcctcccagagtactgggattacagtgtgagccaccgcacccagccagacagccttttttgggtacctgcacttggtgggtcccaagttcttgtctggtgtccaagaaaaatgaggtcctgccagacgcttgaaggatggtggaggcggataattttctttagtgatgaaaatggctcttagcagagaggggagctagagaagagacaggttgggcaggtaatctttcctgaagtcaagctgcccctctgaagtccagggacctctctccagtcaagccgcttctctcgttcgtctttatctgcacaggatgaggggtgggttggccatcagtagttttggaaaaagcaacattcgattggtaaaaagacattattcggaaagaaccaactgggagagaatcggcagacggaagttctcattttgggccacaggtttcaggctttttggtttgaagttggggtttcactgggaacccacccctgtctgcctagaatgtctctgcttcctgcctctatcattgaacttcagatatataaagaagttattctatgatatgtcattgactaagcattaattatgttgacccttttagtgactctaaataaagagctctcaacaaacctatacctttaaagggaagaaaaactatacctgaattacacatgataatttcttagaaggcattaagtatttaatcatatctgaggagaatttggaaatgaaaccatttacagttgcaatttaaccagctctcaagagcattacttcctgtagcttatatcagtgctcctcaaactttaacatgcatacagatcacctcaggaacacttgagggtctgttcaaagtgaagattcagtagatggctgttgggacctgggattctacatttctcacaaactcaggtga

SEQ ID NO: 16431 - DNA, 2425 bp, Homo sapiens
taaatttatacctatgtatttcacgttttggtgctattgtaagtggcactttaaatttttttgatcttcagttattcattactagtatgtaaaaatatagctgatcttttctttctttctttcttttttgagatggagttttgctcttgttgtccaggctggagtgcagtggcgccatcttggctcacttgtaacctccgcttcccgggttcaagtgattgtcctgcctcagtctcctgagtagctgagattacaggcgtctgccaccatgccctgctaattttttgtatttttagtagaaatggggtttcatcatgttggccaggctggtcttgaactcctcacctcaggtgatccacacaccttggcctctcaaagtgctaggattacaggcatgaaccaccgtgcctggcccagctgatctttttatattggccttggacttcgctaaactcatttcttctaggaattttttgtagattaatgggattttctgcatagccacatacatagtcatctgattagaaacagcttttttcctttccaatttcttttatttctttttcttgccatattgtatttgtaagactccgtccagtacagagttgactgagagtgactgggcagctggcctagaagtgcctcttctaggcacttctttttcgtttcctagtttgctgagagatttttatagtagtggatgttgaattttgtcaaatgctttatttatatcctatcctgtgacttttcttcattaggcttttagtgtggtaattaaattgaattttgaatatttaaaactatccgtgcaatcccaggacgaaccccacttgattgtggtgtaattatcctttttatatattgctagattgtatttcctaatatttcattgaggatttttgcatctttgttcatgtagtaattttcttgaaatgtctttgtcggattttgatatcagtgtgatcttatggaaattgggaagtggtccctcctattctagtttttggaagagtggtgtagaatttttttttttcttccttgaatgattagtagaattttccagtgacaccatttttggtccatgagttttctttgtgcaagagagttaattacatactcagtttgcttaatagatataggatcattcgtgttgtgtcttctttagtgaggtttagtaatttgtgtctttaagaagttggcctgttttattgagttgatgaatttaatgggcaaagagtttgtagtatttgcttatcatcctaggtagagttttattagtttcattgatctttagcactagcttttggttttgtttctcggtttttttctttttttttttcctttttaatttcattgacttctgctgtttattattccctttcttctgcttgctttgggtttttctttttcttttttttcctgaagtgtttgagatctttctgattttcttacataagcatttaatatgataaattttcctgtaaacactgttatgtcccacaactttgatatgttgtattttcatttttgtctagttcaagatatttctaattttctttgagatttcctctttcaagcttggatttagcaaaagatggtttaatttggaagtaggctgtctacatattcagtggattactgagagaggagtgttgaaatctcttaagtataattgtggaatcatctatttgatttctatcagttttttctttattttgaagttactgctgctaatttttcttgttctggagtttgctttgtctgatagaaatatggccactgtagccttcatgtgattagtgtttgcgtgatatatcttttcccatctttttacttttaatctgtatatatcaatcattacattgaaaactgagctgttatggacagcatagagttttgccctttttaaaaaaaagatctgagcggttgccctgccttttaaatggtttgttttgaacatttacacttgatgtaattatttacgtggttagatttaggtcttttaaaattacttttctctttgttcctcctttttctgccttttggattacttgaaatttttaaaatattctacttgatatatttattggctttttaaaagcttttctcttggtcttactattttagtggttgctctagggagtataatctaactcttgacattctagttaaggtaaatattttaccttctcaaagtaaaacaggtttttttcctagcctctttatattacagttgtcgtatgtgttatgtctagaaacatttaactcttcctaccaagcatgatgttacagttttttatttcaacagttttataagttttcaagaatttaagtggagaaaaatagtgtataatatttacccaggtatttaccatttctgtcgcttttccttctttcctgtagttccaagtttacccccatatca

SEQ ID NO: 16432 - DNA, 1028 bp, Homo sapiens
cccaagcaccctatccagtggtagaaaatacagtgtactggatgccacaaagttatagtcatgcaattttagttaataacaggagacttaagtctcttgattgatggagagacttaagatttagcttattttacatatagctaaatctaaattagtgactttatttcagttgtaggcaaatcctcttgttaaaacttgtttttaatttctgagttcttttaaaaaaaaagttttacatcacatttctaagagctggagatgacagtgtctctgttttctgttttctctacaaataaacgtataacttaggatcagttaaaatatttcttttcacatcttaactcttatagatgggtggtgtctatcagcagtgctctgttaaagacagattcttaggggagtgtgggtccagagaagtaaggagtacctagattagcaaaatgtactaaggtgagtaagtgagtgtctgtatctttggcttttggaggggagtatgcatgtgtgtaaatttttctgtaacaaatggtactgtcgaaaacaattgacatacatttctttcatgacactatttttatacaagattactttaaatctgtagctaactacggtctgcttgtggtgaagtaaagtggttttagtccacagagatcttttttggaaggttatttgatgtagtaaaattatatatgagataaaaataagcagacacatgtttgagttccacttctgctattgtaactagctcttgtatctttgaatgagtcaggccttgctgacttcttaggccccgttgcattttgagttaaaattttgtgcacaaatagtgagctcactagtttcatgggaaatggagatatttgtgacagcattgaatgataaggcagtaaactttggttttatttcatagtggtaacttttctttcttgaaatagcagcctaaaagtatgccctgtaaactactatgtggtacagtattttttcattttggttaaatatctctgaagtatccttctaacttaaaagtgatt

SEQ ID NO: 16433 - DNA, 1887 bp, Homo sapiens
acacctgtaatcccagcacattgtgaggccagggaaggcagctcacatgaggccaggagtttgagaccagcctggcctacatggtgaaaccccatctttactaaaaacacaaaagttagccaggcgtggtgatggacacctgttattccagctatgcaggacgtggaagctgaggcacgaaaatggcttgaacccgggaggctgaggttgtggtgagctgagattgtgccattgcactacagcctgggcaacagagtgagactctgtctcgaaaaaaagaaaaataaaaacaagagaatgaggtaaaaaaaaggaccaagcctttgaaacaggaagttagaaaaataaaataaacccaaagaaagtagaaaaggtatttaagataaaattagatattaatgaactagagagcaacaacaacaacaaaaaagataaagatctttgacatgaattttctggaagataagctacagactgagaagatatttgcaaaagacacatgtaacaaaggactcttgtccgaaatatacaaagaactcttaaaactcaacagtaagaaaacagtctgattaaaaaatgggccaaagagcttaacagacacctcaccaaagaagttatacagatggcaaataaatgaaaagatgctccatgtcctatgccatcagggaaatgcaaattaaaacaacattgagataccagtacatacctattagaatggccaaaatcaaaatactgactaccaaatgtggaccaggatgtggagcggtaggaactctcatcatttctcgtgggaacgcaaaatggtacagccacaaaatggaagacagcgtggcagattcttaaaatacaaaatgtactcttactatgtaactcagcaatcaaaacttctttaaaattacccaaatgagttgaaaactgtgtccatacaaaaacctgcacatggatgttcatagcagctttattcataattgccaaaacttggaagcaaccaagatgtctttcagtagatgaaaggatgagtaaactgtggtacatccagaagtgggatattattccgtgctaaagaaatcagctatcaaaccatgaaaaaccgtggagggactttaaatgcatattattaaatgaaataagccaatctgcaatggctgtatactgtacgattccacctatgtgacactctggaaaaggcaaaactatgaagacaatgaaaagatcagtggttgctaggggttagtgaagagggagggatgaatagtcaacagcacagttttttttttttttgggtgggtgggggcctaaactattttgtatgatactgtaatggtggatatgtatcattatgcatttgtcctgacccatagagtgtataacatcaaataagaacccttatgtaaactacagactttgggtaacaacggtgtgtcaatgtaggttcattgaatgtaccactctgtgttgttgatagggaggctatgggtatgtattaggacagggttatatgggagctgtagcttctgcatatgtttgctgtgagccttaaactgctctaaaaaataataagttttttttttcttttaaagggggaaataaaccgttggcaaatgtgttgggggagggggagaagacacaacattgagaataataaggcataattagaggtaggaaaaataccgtgtgctacttttacatctttttttttttttttttttttttttgagatggagtctcgctcttttgcccaggctggagtgcagtggcgcaatctcggctcactgtaagctccgcctcccgggctcacgccattctcctgcctcagcctcctgagtagctgggactacaggcgcctgccaccatgcctggcgaatttttttgtatttttagtagaga

SEQ ID NO: 16434 - DNA, 1050 bp, Homo sapiens
atatttaaagataaatcttatcctagttaaaattgtgaaatattttaaaactttcttttcctttgtcatttccatataccaggcatattagtatttctttttattttattcattagtaagccatagtccctgccctggagggaggtgcccatggtcccctgagggcaatagaggtataaatagatccttgccagttattcctcttgtttgccccatgcctcttagtctgtagtttaaacaaatttatactgaccctaaaaatgaatgtgattttttctttttaaaaatatattttgaggcaggtacagtggttcaaccctgcaattctagtgactcaggaggcttaggttggagggtcacttgaagccaggagttccagaccagcctgggcaacacagtgagactccgcctttaaaaagaagtaggaaacttagctgggcatgatagtgtgtgcctgcagtgctgcctaccagagaggccgaggtgggtgtctcacttcagtgcagagactgcagtgaaccctgatcttgcactccaacctgggcgacagaggaagaccctgactcttaaaaaattaaataagatataaattttgggcaaaggtcggagctggtggagaaaggacacctttaactttatggtcttttcttttatccattatagcagttttccagaccactgtcattttctttcttttactgtctaatgcttttttttttttttttaaatctctgcagattaatttctcttctgttttacaaactaaatagaattttctataattactaatttctttccatgcctctccagatgaagcaaagcaaagcataaaatcagaaatacagcaacaactgttatctgtcaagtcttccatctgggttttgatactatcatgatttttgtgggatattgcctccattatttcatctgtcatatcttgaaccttttcctcctttcttggtatatcagtcaggatttttcattataaacaaactttaagaagttaaaagtgaaatagacattaaagattgagaatcttaggtgtgaagg

SEQ ID NO: 16435 - DNA, 1096 bp, Homo sapiens
cagaaggctgaggcaggaggattgctggagcccaggagggtggagctgtgatctgtgatcatgtcactgtactctagcctgagtgaccaagtgagaccctgtctcagacaaaaaacaaaaaacaattcacgtattattgaggagagtagtgaagggcaagaggcaaatgtacggctgggtgtggtggctcatgcctgtaatcccagcactttgggaggccaaggtgggcggatcatgaggtcaggagatcgagaccatcctggctaacacagtgaaaccccatctctactaaaaatacaaaaaattagccgcgtgtggtgatgggctcacgtagtcccagctactcaggaggctgaagcaggagaatggtgtgaacccaggaggcggagcttgcagtgagccgagatccaccactgcactccagcctgggcgacagagcgagactccgtctcaaaaaaaaaaagcaaatgtactatctcattatagtacagtgattaagaacacagaattcttgctccccctatctcactatctcacctagactggagtgcagtggcgtgatcacagctgactgcatccttgaactccggggctcaaactgattctctcgcctcagcctccctagtgggtaggactgtgcaccacaacacctagcaaattttttgtagagatgggaccttactttgttgaccacactggtctggaactcctggactcaagcagtcctcctctcttggcctgagccactgcaccctgccaggaattttttaaatatcagctatgtttaagacattgagcaggagcttggtgatgaggagttacacacaacagtgtatcatacaatagaccaccatggtacgtagagataagtttttatggctccatggtacttagagataaatttttatttttgacctaggtgggaaaggatttagtaatgaggtgtggcatttgattggacaaggaagggcagaagtgatatgggaacctgggtatttaaggctcagaaaacaaaactaagtggggcacaaagtttaaggaatatatgttgaacaattatgagattgaatgtctggagtatgcgaagaatagaggg

SEQ ID NO: 16436 - DNA, 1096 bp, Homo sapiens
ttaaaaaccacaaaggatgcagtaatatcttttaatttgtttgaaaacttacattctgcctcaggaacccttttttaaatttaattttttatcaaagtaacacaatcatgattttttaaaagtccaatagtttcccaagagttataaatgaaaaatagtgctccaaaccctcagttccaatcccattccccagaagagaaagaactatttattttagtattttttatgacttattattccgtattgctgttttaagacagtcatcttcatacctcatgttacttttgctttttataaatgtgacggcagttcttattcattcgtatgatttaaatgaatttaagatattcctttgctcctttgacattttcccttaaatgtacattttctaaaagtagaaaaaaattacatcattaacaggttaatgtggctggggggagttgaaatggcagttcttggaagggttttggcaccctggatttttgttctttgtcagaactataaggtatagaataattgtgacttttgtagtattttgaaattgcaatccgatacccataaactgccatatgtgagtgttaaaacagaaatgttttggtcatttagaagtaaacgttatgtgtatatacattttcatacatggatacatataacctataatgtgttttttaatacattttcatatgtgtgcttatttttactccctctcaggcttatagcaatagctagttgacttgcaaatgtataatggaagcattaaaagactggataggaggattgagctctgatagtttaagaataagcatagaggctgggcgtggtagctcacacctgtaatcccagcactttgggaggctgaggtgggcagatcacttgagcccaggagtttgagaccagcctggccaacatggcgaaaccccatctctactaaaatcacaaaaaaattagccaggagtggtggcacacatccgtaatccgctactccagaggctgaggcacaagaaatgtttgaacccgggaggtggaagttgcagtgagctgagatgaagccagcctgggtgacagagagagactttgtctccctctcccccgcaaa

SEQ ID NO: 16437 - DNA, 1286 bp, Homo sapiens
ttagcagtatttgaaagttcctttggtggcttctagaatggatcaaaaagctataaactccaagccacatgtagtggtgtgcacgtatagtcccacctatactcaagaaggtgaggcgagaggatctcttgaggccaagagttcaaggctgtatgctattattgcatatgtgaaaaactgctgtgcaccagcctgggcaacatagtgagaccctaactcattttttttaaaaaaggtattaactccaatatacgctatttttaaaaatgctgcaaactccagtacatgctatctaaagcacaggaattcagattgatagtaaaagtgttgatgtgatcggacccaacaccaggctgtgggggcgacaaagtccagcggagtcaaaggaatgagaaaagacaagagacaaagtgggaccagggggccaacgctagtatggaggctgcgaaggcctggagctctgggagcccacgctatttattggtgatcaaacaaagaaacaggtggtgaggatgtgggggttaaaaggaagcggtgtatcaagcgaatgagctacagctgtgagggtttagcattttctttgaaacatatggctagttgagataatgggagtgctagaagtaaggagccagcagtctagcaggcatgcaagccctgcctcagcttctctcccgacactcagcttttctcccaacaaaaagaacttgaaatacctgagaataaagttactggaagatgtgcaggatccacatagtgaaaaaaagttataaaactattgagagactgaataggaattggaattaagtaaattaaaagatactttgttcttggctaggaagacaatattatagagtcaattctttcagtcagtttactcttgatataattgtagtaaaagttccaagaggatttgaaaaaaaaattaatgattgtacttaacttgaaaaaacaaatatggaagaacagagaaaattctgtgagaagaatgataaagggatctttgtcaaatattgagaatttatcgactacaagagcagacaaattagtggaatagaatggagagtccaggaataaacttgtctaaataggaaatttgggtatatagtgaacagatcagtggggagagttagattagtcagttactctttaagaagaaactaagtgcttgtaacatgcctgtagacattaagggctccaggaataataaagtagtcctcatggggtttacattctagcagagcaaacataaagagtgattacagttagtaatgttgtaagtgctgcaa

SEQ ID NO: 16438 - DNA, 1108 bp, Homo sapiens
atggggtttcaccatgttggccaggctggttttgaactactgacctcaagtgatccacccacctcagcatcccaaagtgctgggattgcaggtgtgagccaccgcggcgcctgtaatcccagctactcgggaggctgaggcagtagaatcgcttgaacctgggcggcaaaggttgcagggagccgagatggcgccactgcactccagtctgggcgacagagtgagactgtctcaaaattgtaggaaagcatttgattttctgctttaaatatattctgattatctgaatcatcagagacattaattttctatttgtatgagttcctgacaacttttaactttctgataatcctcctttttataatgtgttggcatttcgattgataatatgattatttcattgaactatgctgtagtcaaagtatttataaaaaagatatttatttattagtcttaggagaagtgatatggtttgttctcatttgaatgatttttctggaggtacagtaagatatagtagcctttgacacaaagcctaaacaagaccttaattaaaaatattggaaatttcttttgagtattgattacttttaaaattgaaaatctcctgtttgtatataaagagcattatagttactgtaatctgggctttacaacccaaaaagtaattgaccagattgcacattaatatttttgctggttatattggttttacagattgaaaagtttttttttttttaatatctattgcttttcccttttgaatagtaagctgtttcaggaggccagggaacatgtctcatctgaattaattggaaacattgtgctaagtatttactgttatcttaaccacctcaacccaccttaaggtctgctctactatcttctgtccagaggtttgctatttagttaaaactctaggtagtacttggcatatatatactcttgatgtcttagatatggaactactctatatttagatacatattttatgaaaagctaatatgtaatttattttatataaaatgtttgaagatacacttctttgttttattcctcctcctttctcagtaaattaaaaatatttcaaaataatgtttagaaagca

SEQ ID NO: 16439 - DNA, 1060 bp, Homo sapiens
atttactgaactgagatgatttacttacttgatttacttgagtgtttactaaggaagtttagtcttaagatgtctaagataacttaattctatgataattacaactgtcttgttcatattctctgctttaatagttaagcatctctttctaataattactatataacaagtctttgacactgttattttaacaattatttggttgatgggggtctcactatgctacccaggctggagtgttatggctattcacaggcacagtcagtgtactacagccttcatcagactcttgggctcaagtgatccttttccctcagcctcccaagtagctggaactacagacgtgcaccatcaagcctggctaatattatatttatattgaaggatttttattgtttatcttagagttgtatatgtgtatctctaatggggtccatttgtggggagttaacttgttcacatgtacaagtgatgagaaaagttttaaaagaaaataaagtactcttagagaaatagaatgatcagtgagttatttagtaggtaaagtggtgaactgaattttcaaattctcaagttctgatcgtaactctaacgtgaaatttttggctttagcgggaggtaagccatttaatgtcactgggtttttcttttttctttctttcttttgagacggccttgctctgttgtctaggctggagtgcagtgatgtgatcactgcagcctcaaactcctgggctcaagcgatcctcccacctcagcctcccaagtagctgggaccacaggcgcatgccaccatgtctggctgatttttctgtgtgtgtgtgtgtgtgttttgtttgttttgttttgtttgtttgttttttttgtagagacggggtttcacctgtgtgtgtgtgttttgtttgtttgtttgttttggtttttttgtagagacggggtttcaccatgttgcccaggctggtctggaacttgtctgagctcaagcagtctgcccacctggcctctgaaagtgctggcattataggtgtgagccaccacgctcctccagttttggtttctt

SEQ ID NO: 16440 - DNA, 1741 bp, Homo sapiens
tgatccacccaccttgacctcccaaagtgctgggattacaggagtgagccgccacggccagccagtgtctcatttttatgaagtaaataatttgtattttctaagaataagatatgtgaagtaggtaaaggcagagttgaaattgtgaggaagggtggtccaccatcccgtcccccattcctgaagcccctctgtggaatcttggtgctgctggaaactgcttgaaaatacctacgtcccaccctattttccttttaacacattacattttacacacaagggaaccgattcccaggtcatttgttcaatttttataaacaaaggggtttcaattttagaggttatatggacaacttattatggaagaaagattcttaattttcttactgctatttgacattagttgctgtgtatgtaaagtgatgcagataaatgaaacctttaagagtgtattcttaagtttctttaagtccattaatttcttttgtagataatatttcatgtatttttcgtgtactctcttgatcggatgtatttgtgatataaacagggataagtttagtgaatagataatatgatcccctgggacaggggaaagcccagggagccatgtaggtgaacctagctcaaggttatgaggaaacgaatatatcagaggagggagagggaaagggaagtaagacagacaggaagatatctgcgataataatatgttcctcgaaagcacaatgaatatgtatctttagactacagatttgtgtcttggtttttggtgtttttatttttttgctctatctttagacatccatgtatgatttatttttctaacttgtttaatcttgttatctgattagagaagttatttaaaaagaataaaaagcttttatctgtgtgctgaagttgtaacaaggttgagagaggtgcatctcacacgagtgtgattacatttatgaactatctttttatcttaaaatgagctctagactagaagtcaaaaaaggttgagacttaaagtgatcacttagtaaccattgtgaccgttgatctctgttaaggattcctacttgaaaaaagaatgaagcacatataagcatgtgtatatgtttttaagttttgaataaaacattttagagttgctgatatatttactgtatttgtgtcttttacagaataccccttcctttaacagccttaaaaatcaaagactccattagtgatgtggtaacaagttagtgccaaatctccttctctgatggggagtaatgataatagattccctttaagcttgatatttattttacatgtcattctttcagtaaacctaattgcaggactgatacacttcatatatatatatattttaatgagatgaagtctcactctgttgcccaggctggagtgcagtggtgtgatctcggcttactgcaacctccgcctcccgggttcaagtgattcttctgcctcagcttcccgagtagctgggattataggtgtgtgccaccatgcccagctaacttttgtagttttagtagagacagggtttcaccatgttggccaggttggtcttgaactcccgacctcaggtgatccgcctgcctcagcctcccaaagtgctcggattacaggcacgagccactgtacccagccctctcatagatttcttttcatgtccttgtctttgtatttaaaaaatatagttgatgtgctgtatatagaatttctgtcctaacgagatatttgt

SEQ ID NO: 16441 - DNA, 1050 bp, Homo sapiens
taatacctttgttaagttcatgttttgtttttcttacagtatttcactggccttgaatgtggacataagttttgtatgcagtgctggagtgaatatttaactaccaaaataatggaagaaggcatgggtcaggtaaagatatcaagttgtttttcagtttttgttgaatttcctatagtgttaagacccttgcacaaatttgcacaaataaaaacaggtgaagctttatgtgtcatgattctagattcaaacaactaaagataataggctttttcctaaagtaatgtggcattccagttaaagagccactccaggtaacgttttctcagccggcatcaatattggtatatgttaacttaaacttgttgcacgattttgtcagattatctcgcttttgcctttaaaattgtgtgtttaaaaaccaattagtcaggttagcaagtctagttactttatggtgataaacatactctcacacacatttcctttaaggagaaagggaaggattgagatcctgtaaacattaaggtattcccagaacctagcaaagtgcctggcgatggtaagcattcattaaatatttgttgaatgaagacagtttaaatttcaatctttttcagactatttcgtgtcctgctcatggttgtgatatcttagtggatgacaacacagttatgtaagtatttttgatagattctgcatgtgaatattggttagttggttaaaccaaattaatttttacttagtacctcaaaggaagtgaaactttttaaagtctgaagaaactttttaatctgcgttccttagtagtagtacaaaagcccatttgtaacttggttaaatgcctgatcactattcttacaaacttagaaatgcatggtagctagattttgataaaccttgggattggagattagaatgtgtgtatgtgttagttgaggtgttcttggaagcagatcccaagatagaataaaaggtgaaactgacttattgtggaatagcatctgtgcaaggtaaacagcaggagcagatagacattgatataggcct

SEQ ID NO: 16442 - DNA, 1048 bp, Homo sapiens
tttggtgtacaaatgatcccatcacccaggtagtgagaacaatacctgatagtttttcaactcttgccgtcccaccctacccactctagtagtccccagtctaaatagtcttttattctcatcttcatgtgtactcactatttagctctcacttataaatgagaacatgtggtattgagtatttctgtgttaattcatttaggatgatgacctctagctgcatttgtattgctgcaaaggacatgattgtgctcacttttttttatgactgcatagtgtttcatggtgtccatgtgccacattttgtttatccagtccactgttgatgggcatctaggttgatttcgtgtgtttgctattgtgaataatgccacagtgaacatactagtgaatgtgtctttttggtagaatgatttattttccctgtgatctcaccaacatctgttatttttttactttttaaaattattttttgtttaatttttttttactttttaataatattccttatgactggtgtgagatgatgtggtacatcattacggttttgatttgcatttctctagtgattagtggtgttgagcatttttttgtacctgttggctgcgtatatgtcttcttgagaaatgtcttttcatgtactttgccctttttctttcttttttttaagtgaaagcaagtttattagagaagtaaagaaacaaaagaatggctacttcgttgacaaagcagcctgctcatttttaaatggggttatttgttttttgcttgtttgattaagttccttatagattctggatatgaggcttttgttgggtgtataatttttaaatattttctctcattctgtaggttgtctgtttactctgttaatagtttcttcagctgtacagaagctcattagtttaattaagtcccacttgtcaatttttgcttttgttgcagttgcgtttggggacttagtcataaattctttgccaaggctgatgtctagaatggtatttcctggattttcttttaagatttttatagattgagctcttacatt

SEQ ID NO: 16443 - DNA, 1052 bp, Homo sapiens
gttggactttattgaaagctttttctgtgtcatttgagatgatcgtatggtttttaattctgtttatgtggtgaattacatttattggtttgcccaggctggagtacaagtggcaccatatcggctcactgcaacctctgcctcccgggttcaagcaattctcctgcctcagcctcctgagtagctgagattacaggtgtacaccatcacgtccggataagttttgtatttttagtagagacagagtttcgtcatgttggccaggctgttctcgaactcctgacctcaggcgatctgcccgccttggccttccaaagtgctaggattacaggcgtgagccaccaagcctggccaataactattttcaatttgtgatggtaacaaatctttgtcaagagaattgtcttattaatgaccagagtgacacttgctgccaccttcttgagaatgcctattcttgaagatggatgctcactttcttttacttccttatcaatatcagataaactaagggtggaaccttgtcctaataactgttggctgatgtttgctctcacgtcctggtggtccatgccaggtttagatagctttttaggctaaggccagctatcagaaatcattagggtttgtcataccagaaaagcattatgggtaatacatgtgtaaataagatgtgtgtgtttggcaatcaaggcatctgacttttggcctgatacattccttattattatttattgatataaaatctgtaatataaaactcattttaattacagttatccttagtatactggggattggttctaggacccacgtcctccaccctgaatataccaaaatctgcgcatgctcatgtcagcccagcagaacccatgtatacaaaaatttgaccgtccatatatgcaggtttcacatcccacaaataactatttttgatccctgtttggttgaaaaatattcataaataagtggacccatgcagttcaaacctgtgttgtttaagaagcaatggggttttttttgttttttgtttttttaagatggaatctctct

SEQ ID NO: 16444 - DNA, 1157 bp, Homo sapiens
agaatgtagaatgacgcatattttatgcctgaaatttgcttgtttggaaaaaatgtaaaatttcttatgtgggtgatttcaaaaatttgatttgaaatatataattaaaaagttgctatattggcctattttaaattgctatcattgatgggcagcatagtcaatttcacaaagaaggccaaattgtgcaaatactaatatagtgggtgatccctccttgggagagttacaaacctcaatcacaaatgcaaaaacaaaaaatccataggcctacagagcagtaattttggcttactagcaaccaagaatatgatatgaggccaggtgcagtggctcacacctgtaatcctaacactttgggaggccgaggtaggcagattgcttgagcttgagagattgagaccaacctgggcaacatggtgaaaccccacctcaacaaaaaattcaaaaattagccgagcatggtggcatgcacctgtagtcccactacttgggagactgaggcaggaggatgacttgaacccttgaggtcaaagctgcagtgagccatgattgcactgctgcactccagcctggtcgacggtgagaccctgtctcaaaaagaaaaagaaaatgatttggacttggaaaaaaacaatctaacacgatctctgtagcatacttgttaaggagtacaatgaaaagaatttaaaacatggttatttggtaggagaaagttggaaaatccagtagccacaaaatgaatttaccaatcaaggtctgatttcctagttacctgacactgaagtcagattgcttggatttggatcctgacttgacttatgtgaccttggactagcttctttataatttttctctcccttagtttattcatctgacaaatggaaataggaatagcaccactataagaattatgagttgatgcatataaaacactgagaacggtacatgggatatgggaagtactcaattatttctagatgacactagagagtatagtatatttatatgaatagaatgcttttatctcctatagtactgttattactatatatatgactaaaagtacttaaaatgatttgtctctcagccctacttaaaaagaaatcctaggaaggctgaagtggaaagatcacttgactccagaagtttaaggc

SEQ ID NO: 16445 - DNA, 1919 bp, Homo sapiens
gcatacatagagaaggaattcagccatttattctattggctaattccacttctgttcagttatttagttgctaccttgcaaggaagaaagaatccaaaaaggccaagtggcctttaggatgagagtgagaattgaatgttggtcttagcctgagaatcctatgtatgggtcatggctattcacaaatgagctatggaaacttactttttagagtttttattacatatatatatatatatttttttaatctaaggagatacttgtcctaggagtcgatttttcaagatgtgccgcctcttaagctagagatgcaaaatgttttatttctcaacatgaagctctttctcccaaagtgacaaatgctagtgtcttttgaaagttgtaggaaacttggggagtttggaagacttggagatttagtcctaaccaatatcttcccttcccttagccaattttagctaccatattttgtttacagtacttttacagttgacagagattttaaggacgtgaataaagaacccatgaaattatttctgaacctgtttatctgcagaactgtgggattgaattatgatttctaaggtccatcagaacttgtaacactttattgctttaaaattaattcccatggaatcatggctttcagaaaataccattttaatattagaagcagtttgatgtgtctgtacatctagacctgaacatgtgcctattaaaataaaaaataggtgcttggttccgagtctggataaactatagggatgccttaaaaataagtaaatgcctctttttttattattagaggctgacaacaagtttttttttttttctctttgattacagatactgtgagagtcgacgaagggttttgttacagcatgtgcatgaaggctatgaaaaagatctgtgggagtacattgaggactgagaatggccctgcataaaatgaactctgaaaactttaccatctagagtgctcatgcaattaaaacaaaacaaacacaaacaaggaggcactaagcctattctgacaccactggtctgtagtaccagaattgttttgttaatggaaagtttaagtaaattatattgtaataaaaaggtagataaaccattgtacaacagtattctaggccaccaacaaaagtgtgacagacacactaaaagccctccaactttaacttgtaacgtagcttcattctcaaagctgactccttttttttctttttccttttcctgagtgtagtacagttaaaatttcaaacagctccttgacactgcttttcatgttcaaaccagccattttgttgtactttggtaaaggacctcttccccttcctcccctacacatacagatacacccacacacagactgactctctttctctcataccccaaggtcatgagtgaatgatgcttagttccttgtaaagaaaatcttgggatggggaaaggggtaggcagcaagaggattcaacaaacgaaaaacataaaaactttgtatatgacttttaaaacaagaggacaacacagtatttttcaaaattgtatatagcgcatatgcatggacaaagcaagcgtggcacgtgtttgcataatgtttaattacaaaaaaatatttattctttaaaaatcttcaagattatgtctatttgctgtgcattttctttcagtttgcttatctttcccgggttggggttgggataaaggtgtgtcggtttagcacctctggaagacctatctagagctctttcactttcctgaggttattttgccctttctggtgttggtatgtctgttgccggccatgggcctcatgccttgaattcctgctcttgatcagggacaagggaggtcaagctctgactaatgccatgacctgattaaggggtacagcagggagttttgttgctaca

SEQ ID NO: 16446 - DNA, 1030 bp, Homo sapiens
aaaaatcttaccagttaactttgcagtgtctaggtttgagtgtcataaatccacgtgttcctgttgcaacaaatacccaaaaattgtgtgtgcacttcctaataccagtcttcacccatggaggaacagtgctttttagagatgctttctatttcaatgttggcatactgcctgagggtattgcagttgtgggtgcattccctaatttgtatgatcaagatgaactggcccttttctacttccaagcttttaacagataccaccatatttgacagaattcccagagtgaattgcttgtgttattagtagattcagtgcccccagctgggataggcaagccatgacagcttccctgtttcacctacagaagtcttatctgagggatctattcacagtaagcaccaaggtctccatgtcttgaggtcagtttcattgtcttttgaaaagtgcatgcttcatttgaacaattcattcagcagcagatggactttcagtgatttaaaataaaattttgatccaaagctcaggacacaaaccacagtggtaaaattgagtagcatataatatcagactaaattatctgtaattttccacaacccagattgtatgtgttttatgtgtgtttaaataaatatgttagatacacgtgtatacatacacccatatacaacagatccaagactggctgacttcatttgaaatggttgaatctgctgtgtaataaagtggttcaaccatgattaggaactgaaatttagtagaagagggaaaaggagttaatgtaacaaattattttagctacaaaccccggtaatagagcacttgggggatgggatggggtgggttggtgagacaatcagaatggtaaattgattaaatgctcctaaccctgtaattttgtgcatagagcaccctatgctgtggaaataactgttcttagatttcattgtaactggactgttcaggttgcccagagggaaagaacattcctaattctaataaaataaacttttattttgttattccatta

SEQ ID NO: 16447 - DNA, 1047 bp, Homo sapiens
ataatgtttttacttctttttctgattttatgccttttcttctttttttttttttttttttttttttttgtctttctccactggctacaatatctagtgcaatgtttaacgtgtggtgagagcagacaccttgccttgttttcttaatcttagggataaagattttaatgtttcatcactaagtataatgttaactgtaagtttttcacagaccagcccaaagaagttcctttctattcctaatttgttgataatttttattaggaagggttattaaattttgtgagatgcgtttttagcttttaataagattattatgtatttctctttttattttgttaagatggtatgttacaggggttggcaaactgtggcccatgggccagatccagcccatggacagttttgttgttgctgttttagagacagtctcactcttttgctcaggctgccaggctggagtgcaatgacatgatcatagctcactgcagccttgagctcctggactcaagcgaccctcctgcctcagcctcctgagtagctaggaatacaggtgcatgtcaccacaccaggcaaatttaagaaattttttgtagatcttgccgtgttgcccatgatggtctcaaactcctggcctcaagcaatcctcctgccttggcctcctacagtgctgggattagaggtgtgagccaccacacttggctctcatggactgtttttgtttttgttttgagacagggtctctgtcacgcaggctggagtgtggtggcatgaacgtggctcactgcagcctcaactttcttggctccagcaatcatcctgcctcagcctcccgagtagctgggaccacaggtgtgcgctaccacagctggctaatttttctttttcatttttgtagacatggagtcttgatatgttgcccagattgatctggaactgctaggctcaagtgatcttcctgccttgcactcccgaagtgttggcattacaggcatgagacacagtgcccagcctattgcagtgttttttgttttttctgtttttttt

SEQ ID NO: 16448 - DNA, 1035 bp, Homo sapiens
ctggcttttttttttttgtagagtttgggtctcgctatgttgcctgtgatcctcccaccttggttttccaaagtgctgggattaaaggcatgagccaccatgcctggttaggaatgggagtttaaacaatggttttatttacatatttcattagctagtatttttttcttttttgagacagagtctggctctgttgcccaggctggagtgcagtggcacgatctaggctcattgcaacctctgcctcgtgattctcgtgactcagcctcctgagtagctgggattacaggcgcccgccaccacacccagctaatttttgtatttttagtagagacagggtttcaccatgttggccaggttggtctccaactcctgacctcagttgatccacccgcctcagcctcccaaagtgctgggattacaggtgtgagccatcgctcctggcctcattaactgttttcaaaagtaaaagtacatggataatacaaagttaaattttgtagaatcataaagaaaagcaacaccttcccatcttaactcccctagtgcctctactccctccacagagacaaatatcttaccagttggttgtgttttcttttccaaactgtatttctaaaatgtgtcaatatctcttccttttattttttattttttgtagagacaggggtctcactgtgctgcctaggctggtctcaaactcctggcctcctacctcgacttctcatagttctggcgtgagctactgcacctggcctcccccttattatttttttaaacatgaatggaagcatactatattttctacactttatttgttttatgtaactattttaacaacctgaggacttttacaggctgcataatatgtcttaatatggatgtatcttagtttatttaaacagttactggtgatggacatttccatgtttccagtattttttctcacaaacaatgcagtattatgcctttgtccacattcaccattgattgctattgagtatatctgtagcatcaagaataggcatactgaaa

SEQ ID NO: 16449 - DNA, 1064 bp, Homo sapiens
gcatcttttatcatcttggaaatggtgagacataccttaaagtttaaaagtaatttgggaataatgtacaaagcaggaatatgggatttggggctttttttttttttttgagacagagtctcactctgtcacccagactggagtgcagtggtgtggcacaatctctgctcactgcaacctctgcctcccaggttcaagcgattctcttgccttagcctcctcagtagctggcattacagacacctgccaccatgcccagctaatctttgtatttttagtagagacgaggtttcaccatgttggacagactggtcttgaactccttacctcaagtgatccaccagcctcagcctcccaaagtgctggagttacatgcgcaagccaccgtgcccagtcccttgctgtttttatactttctctatatccataactgtttcccatggaagtttttgtttctttgaatttctcatttttattacccctgcatcatctgctaccctaaaggatctggaggtaagaggccctaggctgaggtgcagtgaccctgcaggccagccctccaacctcctctcacagtgggggctgggtgcccctctgccagctgagacagcccacacacaccccagccctaatgattgttctctctacctctccctgcagtcctcctccaactcctcctctctgtatgcacctcagagccggtaccaagaactagcagtagccctggacttgagctctgcaacaatcagtcaactcattgaaaacatagtcattggtaagagtccagtagagtcccctgattccactctgccaatcctgggctccagtttccccttggggccctgaataaaggggctgggggcccctggtgccaaggacaaatggagagctggggtgcccatgcctcacctagagggaccccagagcaaggagcatgcagcatggctcttccattgctgccctctttgctgactctctcttcttcaggtacccctgctccagtccttgccacacacgccctggggttgtcacctctcagggaagcgctagcctgattggttgtc

SEQ ID NO: 16450 - DNA, 1038 bp, Homo sapiens
gggaacggtggaaggtgagaacagcggatgccaggtggtggcccttcaccatcatccacaaggtggatgtaattaacttaattggtaggaaggctagagtgacagccaggatgccttgacctccagggagctgttgtgttagctacaaactgatggcattccaggggagagttacataggcagttgattagggtattttgggtttttttgagacaggatcttactctgtagcccagtctggagtgcagtggcacaatcatagctctctgcagcctcaacctcctgggctcaagcgatcctcccacctcagcctcccaggtagctgggattacaggcatgcaccaccatgcctggctatatttttttctaatttttagtgaagatgaggtcttgctatgttgcctagactggtctcaaactcctgagctcaagcaatcctcctgccttggactcccaaattgttgggattacaggtgtgagccctaggatatttcctgatttgtgtattcaggaaacaacaacaacaagatctggcacatggaaggctgcaacaaaaaattacaatttcctagccagttttcagactgagacaattgagacctatagctcatggattgtaggggaggctgggtattcttggaaaaagatcctgcaacattaccacatggtattcattaattattctccaaagggatctggggtcattgatgaaagtaactgtagctgatgaaaagggaatacccagactgtttgagggccatttatataggattagagctgaccctgacaccataagatccacaatgccaccatgtcccctccccaacaagactgaggacatgtgaaatctaggtaataaatggatccctggatgaagaggccacagccccatccggttgtcatttctctgtccctaaatatgcaattgatatgagtatgcttagaagctaacagagctctcactttactccctgacctgtgggtatgagccactatagtaggaagagcccaggggaagtctctgaaactacctcttcc

SEQ ID NO: 16451 - DNA, 1036 bp, Homo sapiens
aggagagagtcgcgacggtgagcgccgagattctctttagttgcccggccgcagggcaaggcaagctggcgggtggcttttgtcccatgcagcggttcctggagagaggcggagctgggtgccgagcgtctcagggtgggcggggcgacacggtcccctttttactgtcccgggaactggtcgcctggggcaagtctggatacttagcagcacaggtcctgttctaggactgtagtccctcttggggtgcgctggacggagaagggagacttttcaccagtaatggctcttaccgtagtgccatctttttctgtctcgggggtttggaaggtaatgactagcacttgtgtagacagttcctgttaatcccgtgaattgggaatttaacatgcctggaagcttgcagcgtcactgccttctgccagtggagcgggactgtgttttttctgtggtgattaagtttaggaaagtacggttttggaattcatctgaaggctgagttgggcgttcactccacagaactgctaatatagaggaacccgatgaattcaggatgacctagtcgctattttttgaggcatatatctataattggatctaatttcggtaaagtgccaagtgtgaagctttgtttaccttgctttagtgttgggtttgaaagcctgttctgtccatttgttagaatgattttaggtattcggaatttattgtctttcgaaaaacgccctggaaaacagtacaaatagcagcctttggctgttttacaacttagttttggctaagcagcaaggttagtgttattgttagagggccttttgtttgttttctactctcatttgcagagtagtcatattattctagtctaattagaaaactctgaagacagaaacttttttttttgagacggagtgtcgctgttgtcggcccgggctggagtgcaatggcgcgatctcggctcactgcaacctccgcctcccaggttccagcaattctcctgcctcagcctccggattagctgagaatacaggcgcctgcc

SEQ ID NO: 16452 - DNA, 1091 bp, Homo sapiens
aatgaatctgtacttataaaaaagggcagggaatggatttggcccatggaccatagttttcccatgtcagctctagacttctgcagatggctccaattacatgtattccatcacagcagactccaggtggcgctgtcagtcctcaagttcacatcacctagtaaatttagtacttgtaactaactagctctcttccaattccagattcctagggaaaggacttcagttgtgtcaggtgtcactatccaactgtgttgccttaagggcggaaatgtgtggctagcagccctctcagcaggggctgtgggtagtctctcctgagaagaaggagcaaagggtatgggtgatgggcaactcttaaagaaaaaaggtatggggatgggctgggtatgtgccccagggttccccatagatccaggaagatcacctgtttattctgcttttatttcttataatctgtatttttttatgttgaggaacttatttttaacaattaatttgagtatgaactctaataaaaagctgactgtaatgcatagtttaaagtttaaaccttgccgagcaataacaatctctagatgtctgttgtttcactctaatacttactgtggaattacacctgagttgttttccttcttttttatgagcctaggagatcagccataacctaggagtttgctacatatacctgaagcagttcaacaaggtaatttatagaagtggtgatagatttcactgagggtgcacttgttgcagaagttgttacattgctcatttggtattatccctagtgcttgcagaggtttttggaactgaaaattgaaagtacctttatacatttttttctgttttaattctcacttgtcattattcatctgttgttttctgcttgtaataagaacatggaaagttctagaaatatgagggaatggcagtttttctcctttcttctttttctctacctccagttaaatttcccagtttagaaacagatgcttaataaaacatacatatcaaaaagtggacccttaagtcttaaaggtgtgatcatgaccatgtgagctatctccatgccctgacggcaacttagt

SEQ ID NO: 16453 - DNA, 1053 bp, Homo sapiens
tgattttcataaactgtatgaaaattaatacatgatgtgagatagtgaaaagacatacatgaaggcagaggatatggggtatgacttgtggttctgcaacttcacatacatctgtaagttgggggatataggcaggcaagaataataccttacctacctaactggattgtcagaaaaataaaatgtaaaattgttcataaactataaagtactgtacctatgtagaatggcttcagtgtttctttgtgaactctaaaaatatactatattaaattatttgaaagtgtagacttttttttcttttggcttaattgatcattgctggtttcttccttatgagtttttctctacctcaatgaaaatattggggtaaccttaataaatctcattatatggaggctgtatttaatagtcttttttccaaacactttattttattagtgacttccatgtgattgggagctatttaccatatcattggtaagtgtttaggtttctgggtaaaattgcatcaataattggagaacagtcagaggaaatgactgtaggtaagatcatattgaccggagagctaagtgaagtgaggagaagttttgtgtttacgattttgaaaaattaactttgtcatggacatagctagtgaaagatgattttaaaatagagctcaaattttggattcatttagaatgaagagagtttttttgattcaaaaattttgtaaatagtgacaaaaaaaggcattcagacccactggtatgattttggtatatttctttctacttactgcctatatggcacattatctttttacattgtaatcatggtgtatgtataacttgaaatgttttcctttgacattataccatttttctttgttgtcacattatctttaaatcattttattttaaaaacttatttaaaaatacataaatatatgtttgtttgcagtcaaacaatataaaaatacatagaataaaagattttatcacttctacccacaaattccatttttgaaacccataagtaaccccttttaatatcttcccttgcatg

SEQ ID NO: 16454 - DNA, 1030 bp, Homo sapiens
cccctttttttttgagacagtgtctcactgcacccaggctggagtgcattggtgggttctcggctcactgcaacctctgcctcttgggttcaagtgattctagtgcccaatagctgggattacaggtgtgcacaaccacacctggctaatttttgtatttttagtagagatggggttttgccatgttggccaggttggtcttcaactcctgacctcaagtcatccacgtgccttggcctcgcaaagtactgggattataggtgtgagccactgcacctggtgtgtttctgtccctcatctctaatcctcaacatgagtgctgaaccagatgctttgccagccttttttcttggaggtatcatgggtccgtccacatatgcttgtcgctattctgtgatttccagtggaggtacagattttcccccttggtgtttttatttattaattttttaaaaatttgttcagttattttagtggatattaagataaggtgttggtgggcattggttaaatgcatgagcttagttttgccatcttggactgagaatctacactgggtattttgttgttgttctcatttggtttagtttgatgtctgatccaattaaaaagaatagtgtttttttttaacttttatgtacatttagattgaaattctgcaatcactgaaggactgtgctaggctagttagctcctgactgatgtaaaacctttgatagagtggggctttttttttttttttggagacagggtctcactctcacctaggctggagtgcaatggggtaatcacaggttactgcagcctcgacctcttgggttcaaatgatcctccccccttcagcctcccaagtagctgggactacagtcatgcgtcaccatgggctaatttttgtattttttttttttttttttgtagagacagggttttgctatgttgcccagctggtcttaaactcctgggcttaagcgatcctcccttcttggcctcccaaagtgctgggattataggcatgagccactgcgcacag

SEQ ID NO: 16455 - DNA, 1168 bp, Homo sapiens
agcaacaaaagaaaaataattttattcttatacatgatagatccttagtaatatttttgaaagaatgtgtaaattattattattgttttgagatggggtctcactctgtagtccaggctggaacgcagtggcatgatcatggctcactatgtcctttatctcctgggctcaagcagtcctctcaccacagcctcccaagtagctgggactacaggcacatgccactgtgccaggttaatttttttaaatgtattttttgtagagatggaggtctcactgttttgctcaggctggtctcaaactcctaggctcaagcgatcatcttgccttggcttcccaaagtgctgggattacaggtgtgagccactgcgactggccaaattattattttaaagagcccttcaagtgcagaaatcttgaatgttactgacattactgacttaagttcttgaaagttcagctttctaaactgaaagctaagttcagctatctaaaaatgtaatatacctttctggacctagtgttctgtggtaattaggttattgttcaaacccttcaaatctaattcttagtttttttgttttcttatgtagtttccctgaacagaactgtggtaatcaaggactagtggaggtgtactttagaaatagcagtgagaattaatggttagctttgaaaatagaaaagtaaaataataggtgttctatggtataattgttttttattaagaaaggatatgttttattcattgtattttataaagttcaagccattgatgctaaaattagaaaaagtttgtcatcaaatagctaaaatattgatttgatagccaacagatgaagttacttgaaataagctatattagtctattctcacactgctataaggaactacctgagactgggtaatttatgaagaaaagaggtgtaattgattcacagtcctgcaggctgtgcaggaagcatggctggggaggcctcacaaaacttacagtaatggtggtggaaggtgaaggtggagcagggcacatcttcacatggagaagtaggagagagagtggaggggaaggtgccacacacttttaaacaaccaggtctcatgtatcaccagaacagcaaggggaaatgcgccccatgatccaatcacctgccaccaggcctcacctcca

SEQ ID NO: 16456 - DNA, 1046 bp, Homo sapiens
aggaaagcactcttataaatttttgtggaataaaggaatttagatttttttttttatttgggggagtggttgggaaggtagtggctgtaaattagaacagtgtatcaaggtacattaccctatagaaattgaatcaccctagaatttccctataggacattatgatcctgaacaagaattttagatctagctttgattagacattgacatccagtgtttttatggtatagttgtatgccgtgaagttttaaaagcatatatgtttatcagacaattaaaatgatctgtataatattaacaattaattgcatgttttccccaggagaggggttctgtaaagttgaaatatagggaagatgatgtgtctgaggtagatcagtctttggagaaatcagctgtgcagggcagagagagactgaactctggaaccaggagcactaactgttacgtagcaaagcagggtggaaaatgtttgttaacgcttaagtgttgcctgctcttagttaataacatgaatgttgttgagatctttgaatgttaaattattttaattttctaattttctaaggtagttgagaatttgaagcaagatagtctgaaccgcatagtgatagtggacactaaagaatcaagatggatgaaatgtaggatttggagactgacgagaagggatgggatggttgaaagaaacattaacaagtagtaaaaaaagaaaaataggaagtcctttgacagtagtgtcttagcttatgataataaagtgatacttttcttacaatgaacattatacagaatgcttgcatttgtaggtatataaaaatgctacttatccttctgccctgagtttctgctactactaaactttgaacctcttttggcaataagacaggtttcattttacttctgcaagtattcagataccatatgttaatgttttactctgggtacaataaagtttagaattattactggtcacacacaattaagacatgcaccgagggatatgatttgttgatgttgttgggagttacaacagaaaggagttc

SEQ ID NO: 16457 - DNA, 1071 bp, Homo sapiens
aaatctttatttctgtaaaacagattactggaattgggattgctggatcataggatacactgtgtgtgtgtgtgtgtgcgcgcaattaaaaggtactagtttgtcagttcctcaaaatgttaaccatagtgttaccatatgacctagcagttccacttgtaggtgtcctggggtagttatgggttatgcagagtgactgcaagtgagtacaagatttcttcccggaatgatgaaaaggttctgaaattagattatggtgatgattacacaactttgttcatatactaaaaaatattaaattatgtactttagatagtgaactttatggtatataaattacatctcaataaaacctaaaaaaattctgccaaattgccaatctaaaagacttagagttttttggttgcaagcagtagaaactgattgtagccaagtcaagcaagaagggaagtttttgaaagaacattaaataggtaactcatagaattaagtatgagaggtctttttctctgagctgtctcatttctccacaaccaaaatttctgtttttctgcctgggcagtatgctggctgtgagtattttgtgcccagaggtggggtaatagggtgttctaaatacagacattgttaatatcttcttgtcaactccgggtcttaactcccactctcctttttctcctgcagttctccagaggcagcaggacaaccggcttccttcttgggagcgcaggaagctgcagcgttccctgccttgttatgtcagttactagtcctccatctgctttccctactcagaaattttttgaaatctcttgtctgccaattctccatatgtttttgtgagcttacattttaaaaattattaattttcatgagacctcaggaggaagaattttttgactctttaaaaatacaactgagctgggcgcagtggcttacgcctataatcccagcactataggaggccaagacgggcggatcacctgaggtcaggagtttgagaccagcctgaccaacatggtgaaaccccatctctactaaaaatacaaaaattagccagtatggtggtgc

SEQ ID NO: 16458 - DNA, 1050 bp, Homo sapiens
attgttaattatagtcaccttattgttgctatcaaacacagaaacttatttcttctatcaactgtaggtttgtacccatttaccaaccttcttcatcccctctcaccttgatctcttgcccagcacacacacctttcccagctcctggaacctgtgaaagatctaattcagtaatgatcacagacctaaatagtttgtagtttcaaagcagaatttacatggactgaatttgacttgtgaactttgaaatcctgagaaatgggtcagatggttgttctgtgccattttcaaaaccaaatcattttgtaagatcctgctgtctgccatcctttttaaatcatgttttacatagtatttttttaaaagaactatttttcagaatacagtgcttttctcctttttaaaaaatcttaatcatagtaatttcccaataagaaagcaaaggtggtaaagaatactttttcctaaggaaaaaatattttataattgttttcaacatttttttgtgttagacatttttcataataaaaagctgaaggaattttacagcaaatacccaccaccttcagtcttcagttgacattttactgtaatgctgtatcaaatatctatcattatattaatcaatctaaattttttgttacatttcagagtaagttgcagacatacccagatccttaagcattcatatcattagctaagctttaatattttgtttgcagtttttttctctttcgaggtaaaatttatatacagtgtaatgcacaaatcttagatgtgctgtttatgtgttccagcaaatacacattactatacaaccaaaacccatattaaaatataaaatattaccaccactgcagaaagtttccacattcctcttctcagtaaatcctctgcttactaccccagagggtctattcttttgttttttattccccactataaattagttttgtctgtcctaaagcttcttataaaagtaatcatgttgtctgtgtttgtttgtttaaggcttctttcacaaagcataacgtatttgaggtccatcca

SEQ ID NO: 16459 - DNA, 1056 bp, Homo sapiens
taatggtatatgtagctcaatttcctcttgacttctcttaagtacaaaaatgacttcagccactccatcatgacctggcataagggcaagtcaacatggaagcagcagcagtcttgatggactgtggttaaaatagcttactatttggtggttcctaatcttttgctgcttcagtgttcagggaatatccttatgtctttatgcaaatgtgtgagtgtttctgatagatgaatctcttgaggtgaaattgctgtatcaaagagtttatacaatttagatttttatagatattactaaatcaccctataaaagattgtatcaatttatatcatcaccaatatatataagactgcccgtttctcatactcttgttatttgcatattacttacatgagtgaggttcaacatcttttctcatatattaggaaattctgtgtattttcattttgtgcactgtctatatcttttactcagtttttatttgtaatttttttcttattaatttgttggaacttgtatatattagggaaattagttctgttatctgttttccccctgttcattgtctttttacttcatgatagtttttaattatgtatacttttaatttttctatgtagtcctcttgaatatacaaaaaccccaaaacaccaaactgttgtttttcctattctctactttctgctcaacgcagaaaacctctgtgatcccagaatgtgggggttatttccccacacaccaagcagtacttcagtggacacctgctgtatgtcctataattcagttcagttctgacactacctacctttctatttttctaatagaaacagtactacttactaaataccgagtttatttcatatgtatattcttgcctcctcaccatttccatgtagagatatggcactggagagagtgtcatatctcacaggttgagagctcaggaccaccagactaccatctctcttcaggtggtagtcccaagtctgggtctccagaacttctgactgactagctacagattgaggttcccatgatccccttgttgggttttat

SEQ ID NO: 16460 - DNA, 1053 bp, Homo sapiens
aaatacagttactccttggtatacatgggagattggttccaggacccacacatatatgcccagatctgtgcatattcaagtactgtagtcacctctgtaagacctgagtacatgaaaactaggctgcctgtatagtcgggttttgcatcctgcaaataccgtattttttgttgcgtttgtttgaaaataaaaatcaccatgtaagtggaaccatgcagttcaaaaccggcttgttgaaggatccactgtagtctgtctttgctcttctgtgagttgtattcttctgttagttattgaaaaacgaaatcaatctcttgtgatggtgcttatcttcaaaaccttctttaaaaataatgttgaaagtatttgactgtgcatctttgatagttttatttctgtagggagagttttctgattcccacctgaagtgtgtggctatatatactggccataggccagctggctagtgctgggctgcaagaagctgcgttggagcgtccacagtaggcctgtggtatacttaacatgactattaggttaattatcagctttaaacattaaatgaaacttaataattatagttaaaatatataaaacatttttgcatatcactggaaaacagaatttctgagcaaattgtgaagtagaatttgacttttgttcctagcatgctttcttaatcaaaacatttaaaatacaacttttaatatttaacttcacttttatgcattttcggtaacagcagctcttgattttagaagatcttgtatcttttaaaaatatttaactgaacataaaacaggattatttttatttgctgccatttcagattaacattgcctgtcattttatgctaaaatcctttgttttttataattatctattaaattacattttcaaaaaaaagcattggcaggtacattgttattattatttaaattattactggtcaattaagagtagtaggaattaaggtaaaatgtctgtatcttttgtccattaactttttattggcctttcttcctgtcagttgaatttaaaaatagattgcga

SEQ ID NO: 16461 - DNA, 1455 bp, Homo sapiens
tatttctcattaacctttgaagtgcaattttgctggatatagaatgtaaggttggtgggtttttttttcagcactttgaatatttcactacacttaacatggcttttgacatgctctccactgtaattcttatcattattcctctggaggtagggtggttttttttattctgccgtctttcaagattttcgctttgtctttggttttctgcagtttgggtatgatgtgcttaggtgtagatttttaaaatatttattgtgcttggtatcctctcagcttcttggatctgtggttaggtgtttgtcattaattttggaaaattctcgctttattctctcttctctgatattccaattagatgtacattccactttttgataatgccccatgattttggatattctgtttttttcattcttttttctctttgcattttagtgtaggaagtttctactggctgtcctcaattgacccattctttccacacccacgttgaatctactgatgagcccatcaaaggcatgcttcattttttctttgtagaattccttttgattctttttttacagttctgtctctgtgcttactagtctcttcttgcatgttccctacttattttcattacagcccttagcattctagtcatagttatttgaaataccctggtgataattccaacatctttgtctttttctgatggttgttttgtttcttcagactggggtttttcttgtttggggcatgaaaatattataatttcttgttgaaagcttggtgtcttgtatgcagtaataagaactgagataaataggcctttagtgtgaggatttatgttaatccagctagaagttgggttgtgtgtttaatgtttgttgtagctataggttatcagagacttgaagcttctttagcgtacttgattttttgtctctactcttgacttcggaacttccctaagtattactcctcagagggagcctttttcttgcagttctttcagctaatagttgtttccgctattattcttgagcactgtttgtataatgttaagatgtgagggagaaggacatgctatgatctttgattaagtctcaggttttcagggggcttgtcttatggttgtgaccttcacaagtgtttctccagtagtacagctttcttccccctgttccctattccctttcccatctgtagtgttcccaatctatttcctgaagcccctgtcctctcttgactatgggttgtcgtattctcttctaacccccacttaggtcaaacaggaaagctgaagaaaattggaggaacaaggaatttctttcctctagctgggataagctttcacaattaattctctggaacaggttctgggcatgtttcatgatggttactcttcctctccccctgccagagacaggagggaatcttttggaatcctcgtgatgacaacctggtaaa

SEQ ID NO: 16462 - DNA, 1047 bp, Homo sapiens
ccgaagagaaaatagtattaggtatctcaagtatctctgaaaaataatttttgttactacagtattcttttccaggggacctagctgattatagagaaaaaatcctctgtaaatattgtgtgggtactattgttggattttttaattaaaataaagtaacttaaaagaactatagaaaattaccaaaaagcacttctctgcagtgcaaatgctcacaatcagacaaattggcatatggtcatgtagacctacacaaattttaatctgcaatttgaaggcaaattatcagtattttaaagtaagaattttaattcaataaattagaataatttcttcaatggagtagtttgaggctctttaattactttctcaagacaggtatagctgtttcctcacatgaatgacagttcctaaaagccaactgtttgtctaaaacaaattccttcacaatatttgttgaaaactcttgattatgcagtctggttttcattctagtgagtacagtagactgagcatgtttgtggacctgtgttggtcacacagaccccaagacagaacctggaagccacctttagtaaagaacctagataactggttttaagctttcatctcatgatattaaatactagaccgctggatttgagttgtttgtgataaagtttgtcaaacatttcatatcatttcatatcagcttcaaaatcaatgaagtgttaattttaagaaattataaaaatcagtattgtaatcagtttattttatagactgggttacacttaggatttatttaaatgttttatgtttttatttccaattttaaaagatgataacctctagcattctttttattgagagtctcttagccaaaatatacacagcattctttgatattttctgtgaaatatcattaggtcataccaatatccaccttccatcaatttccctaaaactcagtgatttctaaagcctagaaagttgatgactagctgccccatttgaaatggcattgagaagagccctgtgtcttctctgaaaggaagttgtgattat

SEQ ID NO: 16463 - DNA, 1067 bp, Homo sapiens
catgattatgaggtggctcagagaacagaggtaactcaataggagttacatctttgcattctttcctaggttttagtgccttctaagaccagatacctttgttccttttttataactctttcattgttcttggcctcttttggccttagctttctttgtaacacaataaagggattgcattaaatgatctctgaggtgccttcaagctcttaaacaaaagtctgtaatctcctgggagcttcagtcatttctgttttcctcttagattgtgtgggcttcagtctttgctttatttggagatggaagctactctatgttgtatttgcattttgcctacactgtattaacttaaactgaaactttgccaagctatatactgagttggtgactgagatgtttgccttaatgagggattattaatcttttgtttttccaaagctcttgtttcagttgtcttctttgtcatttggtctcaggtcttgatcgggggactgagtataatttccgagtggctgctctaacaatcaatggtacaggcccggcaactgactggctgtctgctgaaacttttgaaagtgacctagatggtaagaataacaattggcaagactggaacacaatagatactagctgtagtcaaatgagtcaaactggaaagccacagacttggggtggatatggctcaagtctgtgaactttagtgcatcacgctgctgttgttcctgtattgcatcgaggctgctggaatggattttttgcagtgccttgtagagaactgtcctttcaagcagaactagagcaaataaaaatgtgtatgtgctataagttggattttttttttaatcaaggccattaagtagatggatgatctaaaatttaaggctgagccacataaatcatgcctttatttcaactgcagtttcccttttcttttagtcctggacaccttgccctttttctcacatgtttattcagtgagtactcccaaatgggtgtgtataggtagcacctttatcagtgataggtgctggacttgggaggcaaaagacctgagttcttgttctgag

SEQ ID NO: 16464 - DNA, 1045 bp, Homo sapiens
atataaaaactcttacaactcaataataagaaggtaacccaataaaaagtgggcaggagatttgaacagacactataccaaagaaaatatatgagtggacaataaccatatgaaaagatgctcggcaacattaatcatcagaaaatgcaaattaaacccacaatgaaatgctattgcacacccgctagaattgctaaatgttagtagactggcaataacaaatatcaacaaggatacagaactggaatgctcatactagctggtaggaatgtttgacagtacaaccactttggaaaacagtttagaggtttcttgtaaagttataacccagtaatcccacacgtagataattaaaagaaataaaaatacatgtctgtgtaaaagcttatatacaatgttcatagtaactttatgaacaaggggaaataacaaattttcatcaacaggtaagtggtaaatcgtgatatatccatggagtactactcagcaattaataggctatcaagacacaacagaaattaatctcataaacatgctgaccaaagacgtcaaacactgttatattttgtgaattacaaaataggcagaatttatctatagtgacaaagcaagatcagtggttgcctggaaccaggggtgttaggaatcaactacaagggcaccagggagcttctcggagtattggaaatgttctatatcttgattttggtggttatgatgcaaggtatatatatttgtcaaaactgtaaatgtacagttaaatggatacattttattatatgctaattatacctcatagttgactttttttttttttttttttttgagacagcatctcactctgttgcccaggctggagggcagtggcgcgatctcagctcactgcaacctccacctcctgggttcaaatgattctcctgcctcaacctcctgagtagctgggattacaggcttgcgccaccatgcccagctaatttttgtatttttggtagagatggggtttcaccatgttgccccaggctggtctcaaactcctgacctcaga

SEQ ID NO: 16465 - DNA, 1045 bp, Homo sapiens
ctagagaggctagtccagtgtggaatgagccctttgagatgaataggcgcttacctaggtaaacaggaagagtgggatgtgaccccagcatagggagcagctgcaagcgagaaggccctgtgttggagagaacacagtgctcagtgaactgataagtggccggtaatgatggagcacagagaactaggcaaagagtggtgggagaagacaagtagtagattcaacaaaacttgattgtttgtctggaggggatgagggaaaaggaggtcttaataactcccaggtttctggcttgagcagcagggttggtggtagtgtcgtttactaaaccaggggacactggagccgatctgaagctggaggcagggtgggaagggaaagatttgagacacccaagaggaaatgccaaacagacaattgaacataaaggtctggtgctcataagaaagatccagactagagatctgtatttgtaattgatgacacatacatgctaatcaaagctaaggaaatgaatgaaagtgcatagggtgagagcgaagagtgggaatagaagaggacctagaatcaagccttgcacatgtgtattatggttgctcttgccccttttcccaatctcagtgaatgacactgctatctactgtgttgcccaaagcactttttccttgccagtcacgaagtaagtcttactgattccatttgttgttagttctgacacaggaagaccaggtgcctctatttgttgccctctagtggcaatctagggagtgggtgggccgccaagaaaagcagctgttttaagcttttgagccacatgaggcatggctcatgaggcatgatggctaggtgaggtttggccatttctggatttggaggccacttggagagtcaaggacattgagcacttaactgacttaacagtttatctccttcttctctaccttgtctgttcccatcgctgtccttccaggaatgaaaggggtttgtttaattccaagctccatctatagacttcagcacattaaatcttatctcttcattctca

SEQ ID NO: 16466 - DNA, 1671 bp, Homo sapiens
taatcttttaacagtcaaaaaaagtagtcacaaggcaggattcaaacataaagaccctggtaagtatctctaaatatgtgtggacaaaatagagatacatttactctccccaggagcaaacttgttgttgttgttgttgttgttgggggcaggaggtatgtttttagtttttgctttttttgcttgaaacatctctcagaaaggaagttttaatcactcaagccttttgacaaatacgttcaaatgagttactttttaaaagctcctctgaacttcgtgcctaggaaacgagctgcctgcaaatcagtgaatggctctcataagtacaaagggaattccaaagatgtgaaacctccagatctctggatccatcatgagagactggagctgaaacccattgataagtctccagacccaaaccccatcatgactgatactccaattcctcgcaactctcaagatatcacaccagttgacaactccatggacagcaatatccatcaaaggcgaaattcatacagaggtaccattttaagtgcaggttttttctcaaatgttaggaaactattttcatttaaatctttttttttttccctgagtttgccttcatttggcaattcctatatgagatcagatttagagaaatgtgtatgataagatttgggaacatatgatgaagaatacctagcttcttatgggagagagattctgtagccatacgagacaatcttgcagatcttttaggtctctcatcaggcttcagcagcgtgatattcaaggatttgaggctagctagcccatgtctgtgcatttcattctgtgtcttcagctggcttccagcttgcattgtggtattcagaacattcttggtctggaggctcttatagacaccctgtgaagtatggtgggcagcattgtgacatccacattgattcagcaggaactcttgtaatgctctaatgatcattttcctctttatttcacttcttacagaaatgtcttgtccccattatgctgtttgtgaattctgaatcccctactagaaatgtttcactgttgaggctgctcagtggcatagggcacatgctggtaactaacctccacgtttaacatctagggcatgagtcagaggacagcatgtctacactggctggaaggcgaggaatgagaccaaaaatgatgatgccctttgactcccagccaccccagcgtaagtagaagcatctcttttcctcagtgctaccaatctgttcagtcatgtaggggaacaactatgaatgatctttttgacttcacttgattctaacacaaagataatctaccaaagctttgacaccttgaaggaggaagtaccaaacacttgccatattttgcaacaaacattattcttgaggctagcgtcgttatgtttatggtaaataagctgaaaagccaatgtctccagattcccaggaataggggagtaactagtctccctaaaagtgcatcatatctctatgggagagatgggaaagcttccctcctccagactagagctaaggatggtctgatgttacaagttttcattacgctgcctgacaccagtgctgatgagcacctgtgaaatttatttttttaattaatagatttgaaggccaagcaagatggcccacacctataatcctagagttt

SEQ ID NO: 16467 - DNA, 1044 bp, Homo sapiens
ccagaagcagtgaagcttctcatgacagccctggggatgagatgggtagatgggagctgggtagcagcacaggtaggaacactcctaaccccggtgtactgaatggtggatggacattgatcatccagggacagatggtgctgtgggctttcctattcctgtcctctccctgaggaccttgatgacacccagacaccagcagagagaggagagtaaccttttcagatgatattcattcattctttttttaatccaccaacaaattattgagcattgtctatgcaccagaacagtcaaaagagtacttcaaaagatcacgacagggttacacagcattgtaaatatagttaatgctgccgacttatacacttaaacctggataaaatggccaacttcatgttatatatattttacaacaatgaaaaaaatgttgtggcagttggaggaatggactcagtttaactgggtgaaatggaatagtaacaaatgaaatatcctgtaaaactcctccccattctgaactccatcagaagaggatggcagaggtgtggattagcagcaatgagtgtgagtgacttctgatggttggctacagatttgatagtctgttattttgggttattttggtgaatggtgtgacatggctgctcaatggtgacttcgtcaaggaagatcaaatacttgcagggctttgataaggaagggggcagactcattctgtgtggtccaaggggtcacatgaggactgttgtgggctgtattgggagacaaatttgggctaagtataaggtagagcttctcaccgatgaacgctgtccaaaagcaagtggatagcccatgcaggccatgggtgcccatcacgggagggcaaacagagattgtgtgtatgcggtgggtggggggaggggcagggaaaggttccctgttctgatacttgatcattaatttctgcagtttccccagaatttgttctcatggcatcatctccctcagtgaccccacctttggttctgtcaccaccactgcacgaatgactgccatgtc

SEQ ID NO: 16468 - DNA, 1014 bp, Homo sapiens
tccaattcgccctgaccatatcataaatagtatactataccaaactgcagtgatctaactgcatgtcccccttccctattagaatctgctccttgaggacagacgtgtaccttagttatctctctgcccctagtacgtccctaccaggaactccgtaagtagtgaaatgaattactaaagacatgaatgcatgtggattcaaggactccttcggttgcagacaatagaaacttagttcaaactggtttaagggaaaaaaaatgattggctcaaatatctgggcggtctaggtctgcagcttgcttcaggcatagctggatccagggacttgtctgacattttcagaactttgtgtctttctgaccctttttgtccctttgtgggaagtgttgcccaaggagcccctgcggggattgggaggaagtagggggttaggaggaagtggagtgatgtgggtgattatggtggggggcaaggagaccctcttgggcatccccaggcccagggcattttggccctgagcccaggtgcagtctggatttgttgtagctttctgagggcacatcttgggtcatctcttgggagcctccctgtggccctgcttctgcagggttggatgcccttgctgtaccttaggctgaggacagcctgacccctctctcctgctgctctgtgaaagccgaaggtgctctgtggttttgggatagagcaggaaggagaaggacgaggagtgggcactggcaggtgactcaccgggacgggtggcacatgctgactccagggcaggtcccggctggggatgagattcccctttgtggaaaacatgggtggagggggtggtacgcaggcagcatgaggcctgcgtggctccacgtggctctgggtcccgggccgaccagctctgtgttcacaggacactctcccattctccagggagcacttcctttctgagctctgtctctttctcctgtcctcagctcctccaggcccagctgtcagcgtaggggtctctgg

SEQ ID NO: 16469 - DNA, 1051 bp, Homo sapiens
ccatattttgtggaggtctttgctcaatgtcacctcctctcaaggctctcctagctcccttgtataaaatagcacacctccgctcctccctccctatccctggcctccctgcgttattctgcctagattcgcccccacctggcgtttgcttgcttcctccctgttcaaagagcagggtccatctcagggccagagcggctgttgcatagtaggtgcccaataactgtgtagaataaacgatgtgactctccccacacggtgcttggcacacaggaagcactcaataataatagctactttaataacaatatcctcatcacatttcaaattctcatcagcatctctgctctgagacggcttcctccgtggggaagacaaagctgagggtctggcgccatcttgtggccataaagaagtgcctgtctctacccacggctgctctgatttctctagagcaagaaagggttttgtctgggtgacttaccaggtttcattcccccaaatgtcccctccaaggggcaccctggttcgactgacagggcatgagaactggcctggggcaccaggggtttcagcaagagatccaaggctagcttaagaactttagagatctctaggtactgcaaagattatgatactgagtatgattcacaataaaaataataaccataaagtcaatgttatttttctaaatgcaggaaacctttaatgagtgctgtattcaattagcattgtttcaaggttgatcttcccacattttgagtgtgcctgctttgctagtgctcgaagcacacaatctaaccattaccggagaatggtagtgccagggtgggggggttcgcttcccctcctcccctcctcctcctcctctttttttttttttgagatggggtcttgctctgttgccaaggatggagtgcagtggcgcgatctcggctcactgcaacctccacctcccaggttcaagcaattctcctgcctcagcctcctgagtagctgggattacaggtgtgttccaccacccctggctattttttagtagaggtggggt

SEQ ID NO: 16470 - DNA, 1900 bp, Homo sapiens
agtggagggaagtgtatcgggctgtgggcctgtgggtactgagagggggctgcgtgaggtggtccccctcaggtgccccggcgtgcctggcacctgcatctgtgtctgggcctccagggccgtggtcagcacgggggctgtccgttgggctgctgtctcacacacactccccacttgaagtctgaccaggtgcttgggcttctggcataatcccaaaaatagatcttctggcatctaatgcttttcccttcccttttttttcttcccatcatgaaatgaagatgatggacaagaaatagcctgaccatgaggaccagggagctgctacccctccctacagctcctaccctctggctgcaatggggctgcactgtgagccctgcccccaacagatgcatcctgctctgacaggtgggctccttctccaaaggatgcgatacacagaccactgtgcagccttatttctccaatggacatgattcccaagtcatcctgctgccttttttcttatagacacaatgaacagaccacccacaaccttagttctctaagtcatcctgcctgctgccttatttcacagtacatacatttcttagggacacagtacactgaccacatcaccaccctcttcttccagtgctgcgtggaccatctggctgccttttttctccaaaagatgcaatattcagactgactgaccccctgccttatttcaccaaagacacgatgcatagtcaccccggccttgtttctccaatggccgtgatacactagtgatcatgttcagccctgcttccacctgcatagaatcttttcttctcagacagggacagtgcggcctcaacatctcctggagtctagaagctgtttcctttcccctccttcctcctcttgctctagccttaatactggccttttccctccctgccccaagtgaagacagggcactctgcgcccaccacatgcacagctgtgcatggagacctgcaggtgcacgtgctggaacacgtgtggttcccccctggcccagcctcctctgcagtgcccctctcccctgcccatcctccccacggaagcatgtgctggtcacactggttctccaggggtctgtgatggggcccctgggggtcagcttctgtccctctgccttctcacctctttgttcctttcttttcatgtatccattcagttgatgtttattgagcaactacagatgtcagcactgtgttaggtgctgggggccctgcgtgggaagataaagttcctccctcaaggactccccatccagctgggagacagacaactaactacactgcaccctgcggtttgcagggggctcctgcctggctccctgctccacacctcctctgtggctcaaggcttcctggatacctcacccccatcccacccataattcttacccagagcatggggttggggcggaaacctggagagagggacatagcccctcgccacggctagagaatctggtggtgtccaaaatgtctgtccaggtgtgggcaggtgggcaggcaccaaggccctctggacctttcatagcagcagaaaaggcagagcctggggcagggcagggccaggaatgctttggggacaccgaggggactgccccccacccccaccatggtgctattctggggctggggcagtcttttcctggcttgcctctggccagctcctggcctctggtagagtgagacttcagacgttctgatgccttccggatgtcatctctccctgccccaggaatggaagatgtgaggacttctaatttaaatgtgggactcggagggattttgtaaactgggggtatattttggggaaaataaatgtctttgtaaaaagctttttctctgtgaagtgtttggaagcagggtgggcc

SEQ ID NO: 16471 - DNA, 1059 bp, Homo sapiens
aaaaattgcagaccagcctccttactcctacactgatcgtgtccactagcccccaactcaatcaacccttctttatccccttccaacatcacataatcccccagccccaagccctgcagaggggccaagagcccaagcctgcaggcctggctgctgacgaaatgtcccctgggagagctgcccagagaaggagccattgttccttcctggaaaaacataccagctatgggagggggtctgctattccctgggacctcggcaaggatcctgagggtgaggcgggggggcctggcctgaactcctgaggctgctcctttccagcagcttccccgagctgctgcctcttgtgtcacccccatggccatgagggtgtgacagaggtggagctcagagagggagtcacaggaggccctggtgattgttagagatgtagaacaaagaaacttacaaaataatggtaagagtgattccatttaagttctagaaaaggcataactaatctacagtgattagaagcagagcagtggctgcctggggtggcggaggcggggagaggacttacagggaaggggccagagggtgacagaaacaatccacagcttgattgtggtggaagccacacggctttatacatttgttagaacttatcaaactgtacacctaaaatctgtgcatttcactgtgtatagagtacagctcaaaaagtttatttttataaaaagagtgacaggaggagtcctgggagggcaaggagacctaggatctcctcctggggtaccccagctccctgtgtgaccctgtgcagatttatgggcctgagcctcagtttcctccggtgcttccaaagacattatgtgccttggtgtcttgggggcaggacatggaaaacactttgggttgcctagaacagtcattaaagaggctctcctgacagagcctgaggggctttggaccagtcagtcaccctcaaaacaaaagttgctccactgagggcgagtaggactcagggcctgcccatagaatgccatctggagcggaggagacacacacaggttagta

SEQ ID NO: 16472 - DNA, 1034 bp, Homo sapiens
gttccagggcacaggataagggggagatgaggccctgacaaagggctgcagccacccagaggggacacattttactaatttacaagactctgtggattgacctagcgatgactcatggggaacacgtgaaagttgaaaaactgcaaagctgagaatcagacccagtatcattttggcgccagagggaccaagcacttcaggaggttctcttaagccaccggtgtctcggaacagagaagtcaattgggacctggggttacggtagaagggggctaagaaaacctcctggggatggttggatgcttacccaaaaccatacagtggctcagtggaggagatcccttgtctgcaggatgacctgctgtctgccaacctttgcgcgccctgcctagtgttggacgcttgagaggtaaggagacacagactagtttctgatctcaaggagccagagccacttcacgtagctggagaatgagacagtgctcagctctgcaatccaaatccgggagatgtagcagctgtgtattagctggaacaggggggctttcaaaataaggggtagggggagtgtgccagagagtctccaggagtctttgactaaatctccaagctggaatgtgagctctgagcagctagtataggatgcccttactgggaaaggggagggaggctatggaatctgaaggcacctgggtagggtgccagtgacaaagagcttatttacttctcctggagctggacatgggtcatgaaggataatcttagagggcctggacctgtgccttctccacctaggtagtgaatgtcacccatattaaggaaatgaccccacagagtttacacagcttgccttgggtgttataactgggcaatagcagagagaagggttattttattctgaagcataagagatttagatttaataaaaaccaggctgcagataaggaagatcatggagctctcactatatgtagagagtcagtgagccggtagtgatggctttatgattgcgcacacttagccttgctgttggc

SEQ ID NO: 16473 - DNA, 1029 bp, Homo sapiens
cgtgtggtccatattaaggattttggtctttattatgagatagagacccactgaagagtgctaagggacatggtttggcatatgctgtatcaggatcattctggttgctgtgtcaagaacaaaatgaccgggcacagtggttcacgcctgtaatcccagcactttgggaggccgaggtgggcggatcacctgaggtcgggagttcgagactagcctgaccaacatggagaaaccccatctctagtaaaaatacaaaaattagccgggcatgggtggtgcatgcctgtaatcccagctacttgggaggctgaggcaggaggatcgcttgaacctgagaggcggaggttgcagtgagccaagatcgtgccattgcactccagcctgggcaacaagagtgagactccatctcagaaaaaaaaaaaaaaaagaacaatgctggagagaaagccagctaggaagttacactaatccatgtgagagatgatggtgacctgcccagcattgggaagtaggaaggcatgggaagtgcttgaatgctgagtgtgttttgcaggcagagctgacagaattttctgactgaccaatggggtgtgagaagtgagaggccaaggaggacacccagtattttgagcaactggaagaacagagttgccattaacttcttgttgactagaatttaatcacatggcataggaggcagaattctaagaattcttcctatgatccttgccttggcataatccctttcttcctttttgaggataggtagaaatcaacatgatctcactcctgagattatgttctgttataaagcaaaaggattatccaggtgggtgtaatctaatcacaagcccttgaaaatcagtttttctggctgctgggcagaaggggaagacagagagtgtattaatcagggttctccagagaggcagaaccaatagaaaggatggatgaatagatagatagattagatagatagatagatagatagatagatagatagataaagggggtattttttaaaaaaga

SEQ ID NO: 16474 - DNA, 1035 bp, Homo sapiens
tcttgctatgtttcttagacttgtctcgaattcctgggctcaaatgatccaccagcctcagcctcccaaagtgctgggattgcaggcatgagccactgcgcctggtctaaaaacacccttttcattcagcactataggttttaaaaggcagtgttcccataagaaataatggcaaagaaaggaactcccagtcacattcagcaaacctgttttcccagctacattcatgcactggttgatgcaggtaagtgtacaggggaggttgatggagagataggagggtcctggaaacaaaggaagactgtgacattagatgactgcaatcgtggagactcagatggtgcttgtactaccacggttcatcttttgagtatgggcatgtcatagtctggaccagaatctaaattctagtagcaaagcaggtagggtggttattgcataaggaggtatcacaacctgtcatttggggagggtgagggaaggactggctgtcacagcttagcctcaccaaggacgtatgtgtagtgccctctggtggcctgcaatggcacgcaagccagccaaatcagaatcccccatctctcaccccccacacccccaccctcctcccagccacccccatctcaggcaagacaaagccagagtcctaactggtctccctgcttccactcctgtccaccagaatgatttgttaagatcatcagatcatgtcactcctctgctcaaaattcagggtaatttcccttctccctgagttatttagccacagtactcacagtggtctccatggctgtactcggtatggcgcctcccagcaacctttctgtctccacttcctgcccctcttccggctgctcaccctgctgtagccacaccgggctgcctgctcttcctctgccagcataacccaccaagcacactcccacctctgcatttgctgtctcccccacctggaatgcacagatgactccttcatgtccttcatatatgtgtcaaatatcaccacatcatcttttgcactaaattaaaaaacag

SEQ ID NO: 16475 - DNA, 1035 bp, Homo sapiens
ttcatataagactcctcataaagtcaaagacatgaattgagggagagtaattggttctacagtggtagggaccatgggagtctgggctacctgctcatgcagctttcccaggtcctctggtcctacttgtgactgatactagacataccgcatcaatggttttgttttgttttggtttggtttttggttttttgtttgtttgtttgtttgtttttgagacagagtctcgctctctgtctttccatgctggagtgcagtggtaccctcttggctcactgcaacctttacctgatcctcccgcctcagcatcccaagtagctgggattacaagcatgcaccaccacatccaggtactttttgtatttttagtagaggaagggtttcaccatgttggccagtctggtctcaaactcctgacctcaagtgatccgcccactcagcctcccaaagtgctgggattacagtcatgagccaccacacctggcccatgtcacattcactattatgatggagtgttgctgtgcactgctgaccttatgaattggctgttctgagaggactcaaaccataacgggaaattccagctgtgcagtcatttggtcatgatccaccattttgtttcttctaagggccagtagcataccagagttgcttttctgtggtgttttgtttttgggacagagtctcgctctgtcacacagcctacagtgcagtggcgcgatcttggctcactgcaacttccgcctcccgggttcaagtgattctcctgcctcagtctcctgagtagcttggagcacaggtgcacaccaccacaccctgctaatttttatatttttaatatagacggggtttcaccatgttggccaggctggtctcgaactcctgacctcaagtgatccacccacctcggcctcccaaagtgctgggattacaggcatgagccaccacacctggcccggagttgtttttcaacagcatgtttaaatcttcactgcagatggtagggtcttgctccagagccccagtgccacttcc

SEQ ID NO: 16476 - DNA, 1034 bp, Homo sapiens
aagatcgtgccactgcactccagcctgggtgacagagcgagactccatctcaaaaaaataaaaaaataaaaattttgctgggcgcggtggttcacacctgtaatcccagcactttgggaggctgaggcgggcggatcacgaggtcaggagatcgagaccatcctggctaacacagtgaaaccccgtctctactaaaaatacaaaaaaatagccgggcgtgctggcgggtgcctgtagtccaagctactcgggatgctgaggcaggagaatggcgtgaacccgggagtgggagcttgcactgagccgagatcacaccagtacactccagcctgggcaacagagtgagactctgtctcaaaaaaaaaaaaaatttatagatgtagaaggtccctgaatcttcacagagtgccctctgaagtgcctgtcttatttaccaaggccttcagtgtattatccatctcttgttcatctggctcattaacatattgtcatcaatgcaatggatcagcatgaaactctaaagtatgtccagatagttcagaggtgtacaatcttttggcttccctgggccacattggaagaagaattgtcttgggccacacataaaatacactaacacgaacgatagctgatgagccaaaaaataaatcacaaaaaaggctagacgcagtggctcacgcctgtaatcccagcactttgggaggccaaagtgagcagatcacttgaggtcaggagtttgagactggcctggccaacattgcaaaaccccgtctctactaaaaatacagaaattagctgggcatggtgacgggcgcctgtaatcccagctactcgggaggctgaggcaggagaatcgcttgaagctgggaggcggaagttgcagtaagctgagattacactactgcactccagcctgggtgacagagcaagactctgtctcaaaaaaaaaaaaaaattataatgttttaagaaagtttcaaagctctcctgtgccatgtacagcctgcaagccgtgggttggacaaggttgagat

SEQ ID NO: 16477 - DNA, 1091 bp, Homo sapiens
acctcatcctcctgagtaacaaggactacaggcacgccaccaggcctggctaatattttatttttgtagagacaggtcttgctatgttaccctggctgatctccaactcctggcctcaagtaatcctcccaacttggcctcagcctcccaaaactctgggattataggcatgaaccaccatgcctggccaataagtatcttgtggggagatattttgagactatatcctgttcctcataaaacttttacccactaatcttagcatccattgcaaaaattacaaagtctttcattgaaaaagtatacacaagccaatggttaaaaaattcaaaacaatacagtgaacaagtatgtatacatactcactttttgttgtataaaaaaagagaaatagagtgaatagtatagtgaaaagtaaatctcctgatattagatcctcaggacccttcctcctgttacttgtttgtgtctttgtggtagacacgatgccatatgatactgaacctcatttcatttccttttttctgggcataaaggatgacaacatttcctgtcctgctttgcggtgaggctgagaccatgagactagttctggctcaagggctatgaacagaaatgatattgggcactcttgggccaaagcatttagtgccattttatgtctctccagctctctcttcccctgctgcagcaattgtgaaagccacgcatttagatggtgaagccacaaaatggaaacagcctggatccctgagtcaccagatgcagaaacagctgccctgaaaagttgtccatcttgcactatacatgcccatgtacgagaaatacaagccttttctggccgggcgcggtggctcacgcctgtaatcccagcactttgggaagccgaggcgggcagatcatttgaggtcaggagttcgagatcagcctggccaacatggtgaaaccccgtctctacaaaaaatataaaaattagccaggcatggtggcaggcgcttgtaatcccagctactcaggtggctgaggtaggagaatcgcttgaacctgggaggcagtggttgcagtgagccgagattacaccattgcactcc

SEQ ID NO: 16478 - DNA, 1123 bp, Homo sapiens
gcccaagactgatattgattcatcttatagtttcctgtgtaaatgcctgcagacatcagctaggttcttcaggcaagaatggaattttctattgtcatctcccattttgcccctgcttgacaggtcatggaagaggccattaaatattgtctagaacagtggtgggcaactgtttttctgtaaagggacaaaacgtaaatattttaggttctgtgagccctactgactctatcgtaacaacttaactctgctgctgtcacacaaaaatagcacaaatgattcgtaaatgaataggtgtggctgtgtttcaataaaacgttacttaaaaaaacaagtggtgggccagacttaactcattggccatagtttgctagcccctggtctagaactctagatgtagtccactgacatggttttccttcgggggtgaaatggtggctgtggtgatcatcatgatttcattttgtttttgattcaagatcatctgttgcaccatctgatgagacagccaacacacagtagagtttaaaattctggacaccagctagacagtatataaatacaacattaaaatatatgccaggcacagtggctcacgcctgtaattccagcactttgggagaacgaggtgggcagatcacttgaggtcaggagttcgagaccagcctggccaacatggtgaaaccccgtctctactgaaaatacaaaaattagctaggcgtgttggggggcgtctgtaatcccagctactagggaggctgaggcaggagaatctcttgaacccaggaggcagaggttgcagtgagcagagatcgcatcactgcactccagcctgggcaacagagcgagactctgtctttttttttgagacagagtttcgctcttgttgcccaggctggagtgcagtgtcgcaatcttggctccctgcaacctccgcctcccaggttcaagtgattgtcctgcctcactcaggctcccgagtagctgggattacaggcatctaccaccatgcctggctaattttttgtatttccagtagagatggggtttcaccatgttggccaggttggtctcaaactcctggcctgaggtgatccacccgccttggcctcccaaagtgcta

SEQ ID NO: 16479 - DNA, 1048 bp, Homo sapiens
taatcacctcatggttctgcaggctgtacaggaagcatggcagcatctgctccgcttctggggaggcctcagaaaacttacaatcatgacagaaggcaaagcgagatcaggaggcttacatgacagaagcagtaccgagtgtggtggggaagtgccatgtacttttaaacaaccagatctcatgagaactcactatcatgatgacagcaccaagggtgatgatgttaaaccatgagaaaccacccccatgatccaatcaccttccgtaaggccccacctccaacattaaggattacaattgaacatgagatttgggtggggacacagacccaaaccatatcacccccactgcggtaaactgttctatggagagcttttgtaagtgttcgtttgaacttttctggtgctacatggaggctgtcctcatggatcttataacccaatagtgtgcatagatgatggaattcttgaacctctccatgggctcatcatcattctgttgctaaaagaactcacttttaaagacttcagacagagcaacttataagtataaagatctgctaaagcatttcttctcatttttttaaagtgtgggcctctgcttaatgacagcaatttccaagacatcatgaaactcatttatttgttgtctatttttaacagggataccaattgagaaggaaaattttctgtttctttccatggtattctgaagccatggcccatgagtcagaatgttcatgtgtgttagtcattccttgctgtgtttaacaagatatagtaagagataagctcaggtaagaacatactgacttgcaggtgaaaggaaaaggaatagaaggagtccagcaatggagccttgtagggttggagaagctgctgaaccccaacaacaggaaaaaagactgaaaaggctttgagaaacacaggtccactaaggtatttcaattaaacagaggaattcagcactactgcaaagaacagtttaaaggtgttttctcttacctaaacctattgtttcctatggcctcactgtaactgccattaa

SEQ ID NO: 16480 - DNA, 1084 bp, Homo sapiens
acatcttctcagtcagtagaagtatatcgacttcattatttttaatacctttagtcattttttttggtaatcattcatttttaataaagagggattcttcaaattttttggttcttttttttttttaagggagtctcgctctgttgcccaggctggactgcagtggcgcaatctcggctcactgcaacctctgcctctggggctcaaacgattctcctgcttcagcctcccaagtagctgggactacaggcatctgccactacacccagctaatttttgtatttttagtcgagacagggtttcaccatgttggccaggctggtctcgaattcctgacctcaaatgatctgccagccgtggcctcccaaagtgctgagattacaggcgtgggccaccgcgcccggcctcaaattttgtgattattcatttaaattttgtaatcaaacattagggtgacgtgttggagctgatcccatactgtaggttcaggaaatacagtcattgcagacatcatcattaacgttaaagcaagcaacacagaggcttctctcttgggactgagaagggaaagaggtgtaggaaacatatacaaatgtaaaaactattctcctagtacttggcttctggaagtgaaactgaaggactgtactgtccatattaggaaatgactggctgctggatgaccacagtgttaagctttttgtccctttttgtggggagagagatgaaagggaattggtcaggaggacatcagatcagttagctttataatcaatctcttctcttccaacacaatctcagtagagttataagcattaggaaatcaaactttcactttaattagagagattgaaaatctggctccatttttaaaggtgagggttctaaattgtattcctaaatgatgttaactattgttccccgaaattgcatcagggttaaaaatttgtgttgaggttggtttgaattaatctaaatattcaacatgtgctcttgccataaagcagaaagcaaaggcctgaagtagacaagctttttaacctttctggcatttcatagatttcaccttaataaaattctgaaa

SEQ ID NO: 16481 - DNA, 1369 bp, Homo sapiens
atcacttctcaagacacttcttgctttacatttgccagtgtcctacaggacaaagcaagtcacacggccaagcctagattcagtgaatggagaaacagactccacctctgcattggagaagctgaaaaacactgtggctattctgttcaacccactaccctttagaagctaaagtagagattaaatgatattccttgtaacatgaatgggcacgtatctcagggtttaatcatctaggtttcagggcattctacattttctgttacttatatcatatttctgtgatgggaggagcatgcttttctgtttcagctactgaggtcaactagtagggccactttcctaggaccttttctataccttgagacagagataaaactgaagaggtaggcaagaagctagatcttcttagggccctgtaggccacataaaggaatttaggacttgatcccaagagcaatgcgaagccatagagcattttaaggagaaagatccgatcacttgagctgtagtgaagacaataactctagaagttttgccaggaaggggaattagtgagataaggctttagtcaacagaatgtgggattgagggaaaggcttttttttccttcttcttttgaaagcaaaagatgagtgaaactagagtttgcttgaatactaatgaaaggatccaacattgcaagaggttaaagggagatccctaagaattgtgaagggaaacttgaacagctatggagtttggcttttttgtttttagacggagttttcgctcttgttgctcaggctggagtgcagtggcaccatcttggctcactgcaacctctgcctcctggcttcaagagatactcctgcctcagccttccgagtagctgggattacggccaactgccgccatgtctggctaatttttgtattttcagtagagacgagatttcaccatgttggccaggctggtctggaactcctgacctcaagtgatctgcccgcctcgacctcccaaagtgctgaggttacaggcatgagccattgcacccggcctggagtttggcttttaagaaaaaaacttcatacaataaaattgactttatttttgttatatacagtcctatggattttaacacatgtacagattgaagtaactactaccaaaatcaggattcaaaagagttccatcaccctaaaaccgtcctttttgctatctctttagtcattccctccacccccttagctcctggcaatcactgacttactctccaaactataatttcaatatttgtatgtgtgtcatttgagactgacttagtttacttggcataatcctttcattattatgtagttataatgcctacttgttgtgtatatcaata

SEQ ID NO: 16482 - DNA, 1022 bp, Homo sapiens
atggtcagcaggccgggttcaaagctgcaggtagtccgttgtacccggcttggtggtccgggaactttaggggaaatgggggaggggcccgtgtgaagggatgaagaggtttagatttgagacataagttctccaaatgtaggcaggtggcattgtttggatcgctggctgcttagggactgcgggaaaatgggctctttgggggagggtgtgtgtattgagttgtagaactgagtcatctcagtcttactataagaggctgtgggagggacacctccccctctgctggggacagcattcagagaagatggtgccacaagacaagaagcagttgttcagtgactggcaggacttggttgagaagttattccgatcgtgattgattgactgtaatgactatgaggacatttaaaatgaacaccgaattatttgctttattctgtaattttctttgacccaaattgttttcattttaaatgaacacttttgccaactgaatttaatgtggatgtaaatcttgtcatgcttttttacactgtaagaagagctaaagcagaatgaaagtattgctgcaagcgtaactcacactttctgaagtgccaagagaggaagtaaaggcagtaagaggcaaattggaatgcgaatctttcacagaacacaaaaggcacaaacagggctataagataaacagaaaatgagaatttttaatctctactaattggcctagctttaaaaattgtacccttttttactctaacctggaaaaaatcttaaatccaagcagtttttattgctgaagatgtgattacttctccgtgaatttttgaagatactaaagacactttgttttttgtctttcgacccaatcctaaaacactggaacaatgcagatatcaagtcccaacatgtgcagtgcagcttctttcatgtgatgacaaaattgtacgccatgttgcaagtcctgttcacctaaaattgcccttgcatagtaatccattcagttatggagacttgctgaagaa

SEQ ID NO: 16483 - DNA, 1676 bp, Homo sapiens
cattgtagtatcacacagagtagtttcactgtcctaaaaattctctgtgcttcacctattcatctttccctcccccttaacccctggcagcccctgattcttttcctgtctatggttttgtctcctccagaatgttatatggtgggatcattaatgtagcctttttagattggctttctccacttagtaatgtgcatttaagcttcctctatatctttttatggcttagtagcttatttctttttgtgctgaataatattttgttttctggacataccacagtttatccattcacctcctgaaggacgtcttggttgcttcaaagttttggcaattatgaataaagctatcatacacatctgtatacaggtttttgtgtagatataagtttcagtttatctgggtaaataccaagaagcgtgattgctggattgtgtggtaagagtatttttagctttctaagaaactgcccaactgtgtctcaaagtgggtgtaccattttgcattcccgtcagcagtgaatgagcttctgttgctccacatcctcaccagcatttggtatcgttagtgctttggattttggccatgttcctttaactgaaatttttatttagctaattatagattcacagggagttgaaagaaagcaatgtcatgtacactttgtccagtttccctatggtaacagcatatacaggtatagtatgctgtcatacctggatattgatgttgacatcatccactgatcctacttagatttcttcttcagttttacatgtactcatttgtgtgtgttctgtttttaagccattttagttttacgttgaacacattttttgaaattcttgttacttaataaatgcattcaaggctatagagttttccctggatctcacttttgctgtaccccacaagttctgatgtgtagtggtttcattgttggctagtactaaacattttataatttcagttttaattgcttcttcaactcatgggttgttaaaagtattttttggttcccaaatatgtgggttttatctcttttccagtattattttatagcttgattacattgtagttgggaaacgagcatggtatcaattctctgaaatttaagatattctttatgttggccttatgtgtgattagtttctataaatgttccatgtgtgcttggagagaatgtatgttaatccatttcattataaggattagtgatacatttggatctatttctgccctcttttttttgttttgttttttaatttttatttatttatttatttatttatttattattttttgagacagagtttcgctcttgttgcccaggctggagtgcaatggcacaatctcggcgcactgcaacctccgcctcccgggttcaagagattctcctgcctcagcctcctgagtagctgggattacaggcatgcaccgccacacccagctaattttgtattttttttgttgttgtttattttttttgagacagagtctcgctctgtcgctcaggctagagtgcagtggcacgatcttggctcattacgagctccgcctcctgggttcatgccattctcctgcctcagcctcccaagtagctgggactacaggcgcctgccacaacgcctggctaattttttgtatttttagtagagaacggggtttctccatgt

SEQ ID NO: 16484 - DNA, 1099 bp, Homo sapiens
cgtggtgtgactgtgactgtgtcctccagctctggtgtttgtctgcccagtgaggatgggcaggaccatacttgccttgtggcacgacatgtgccctggccaatagagcatcttctgggtcaattagtggggtgtgagttcctgctttcattccatagcttgggcacctgacccagagtaattgcaggaaaacagtgaaatattagtcagctgattaccaaaacaacaaatctaagcttttggggaggtgatttcacaaaatatttatctccaaagacttcccaggtacacgggggaagacaagttagtggggagatggagggctttcttagggacacggagaggctcccaggggtttggtcacataggcctcactgtcctgctcaagcatggggagctgttctatgctgcttttctcctgacagaccctgctggtgagatggggcagcctcagtgggtttgtacaaaatgtgcttggccaggcaagctcaggactgaccatgactggaggttggctgtggccaagtgtgagtgttgggaagaaggctggctccatggaggcagtcagggattgacgtatgggtggagcaggttgctggcctcacatggccagctttctccgctggtggcagatccagcctggcaatttcatttggtggatataagtcctcactgaacagggatagtgaggtggggctcttttacctgccagatggctaaccctctggctatcctgggataggcggagggtaggatactagagccagagagctagaagaagggacagtaacggtactgttggataaaggcaaggcacctggcagggcactgtgggggtctaaaagggtgctaaatgggcctctggaaagaaagttagatgcgctgggtccacgtccccttgggttgaccctcaggagggctatggaatgtttgtgaggcctgtgtgcctctttctccaagggctgctcttctagtctcttgtggctcctcatgctcacttgtggtccttactcccttgagtggggtccagttcagggccctagccagacagcgttcagcttctcaaacttgagggctttgagccctcgcctcctgtgta

SEQ ID NO: 16485 - DNA, 1730 bp, Homo sapiens
ctggaaaatccaaccaaccaacccaccggctcctcaccgtctccacctctgcctttgactgacacctcaatctgtcaatcggaaccgcctaccatgcgattggtcggatggcgtttcggggggcggtgcatgcagagaagccaacagagcagtaagcgcagcagccggagtgtggaagatgacaaggagggtcacctggtgtgccggatcggcgattggctccaagagcgatgtacagccacctttcgtaaaactttacctctctactttctaccccccttgttagacgagacctctcctgcctggaggggcctctagtgcgcgtggtgccttagcggggccaccagtaattgcctgaatgacacagacactagcaacttccatttttaagagtgtagcagtgagagagaaaccttttttgtttttgagaatttgaatgctgtgaacttgcaggagctgccaaccccctgccctccagattctcatgcccaatttcttttctctcctagatgagattgtggggaacctgggtgaaggcacctttggcaaggtggtggagtgcttggaccatgccaggtgagcgagctgcggcagtacagctggctccggatgtgatcttcctgggaagagctggcctgaggttcttgagggtggcagctatcagagcttaacttttttctttttgaagggtggcatcaaagtagggttccgacctgtccatgttggggttttgctgaccccctgtaataagggagaaattcttgggtcctgcagttatgtggcatccctacccaagaattgttggtcagtgaaaggttctgctccaatctcttcacttctccagggctgtggtggtggatatcagaacagggccaaggccccggctcccctgtggcttggagctgcttcctgtgataacttttaggttcttggcttagcaaggggctaggagtaccaataagcccagcccaagcataagtcccattccctgagggtctgcctgagaggctgtgcagatctcagtcgagagaaacatgaccctgggctttctcaccaagcaggctgctgccttcttcagtgtgactagggtagtgtgtggtctccgctgagtgtgcctgggagagtggggtatacctgtgtgtgtcatgctgcacctcactctctcccaagcccaacagtacaatagttttttccccttaccattccacaagactagaacatttgcttcctctcctataggtctgggttggggaggccacctccagggagccagttgccaccctgccataggctctctagttggtttggcacttcagctacaaagtgcttgtgtcctcattggagccacatgccacccatatgtggccctctcgctatttcagagatgaataaacatgctcagggtttgcctgcatcatactccagttaacagcagagctggccaccactgcgctgtagtgctcctacattaaatggggtgttcaggtcattcagacccaggcgtccagcctttcctgtggccacgagatagactgagaggaagtgtccatttgctccaagttcctatgtaaatgcctgtacgactcagcgtggcccaagaggttagggttgggaccagtgggtggagggacatgcacaaccacaccgtggccaggtggagacatggcagactcaacagccgggatgcatgtaggcattctgggctgctcctctctcaggagctggaggga

SEQ ID NO: 16486 - DNA, 1048 bp, Homo sapiens
ccaaaccactagacgggatttccggtcccactgaaccattgggggcaggggaaaaaaagccagtgtgttgctataatttggtatttatccattaaatccgcccttctccttaggtcagggtgctgacgggagccccgggatgggggtagggcagcgtgccctggagccagagcaggcattcttctgttccttcgtaaccgccccgggaggtgtaggcatctccaagaccctggcgcccaattctgctgctgctcaccctgagacacctgtgcagtgggggtgctgagggaccaccagcgcaggctgcgggggtcagtggaagccctcgggcacccttccttgcctgatgtgtggtggggaatgtcacagtgcctcagcctggtgtcctctgcagaaccagaggtggagctgattttattgctgccaaacttgcccaactgctggtgggtgccccgccctcctcaggtgcactgccctttggaggggcgggcccaaatctgaaacttaattctgcctgtatctgtactatgacctgtaggccctgctcggaggttccctgggcccccatcctgaaccttcttcagtcttcattaactcgctctgtaccacagtttgcagtcttaatcctggtttacttcaaggcgcccctctctcagtcactttcccctaaaatccttctagctcctgctcccctcacccatcttcctggaagccttcccgggtggcccctgtctcacaatctattgaggcactgaacataccaggccatggctgaccatccagtaaccaggaggacaggagccgggtctgcattttgtggtggttcccagcatccagccctggcttgtgcacagaggagaggtgtgtgagtggtgaccttgggtccccaaaggcaggacctcttgagtcctttccttctccacccggatatcctggcctaccaagcatggctctgggcacacaggaaggcttctaaaacactggctcaaagaatgagaaggcaaggtggaccttgctgttgcctgttttgcctccagtggctgtcccc

SEQ ID NO: 16487 - DNA, 1050 bp, Homo sapiens
tgtttctctagtgtcctgttcaatctagaacattctccagccctttttttgttttgctcttttatgacattgacatgaagagtccgggccagttgttctggatttgtctgattgcttctccctggttggagtcaggtggaacagctctggcaggaacgcccccccgggcaatgcagagtcctcctccaggaggcacttagtgtccatgcgtcaccttgctggtgatgcttcactggatcacttggttccggggttgtccgcacgtctccctgtagtgcaggtgctccttcctgtttccaattagcctgtgggatgggacttggaagctgtgtctgttctgctcccctggcaactttttcttcaatgacttgagctggtgttttgccattttccatactctatcatggggagtgttcagtatcggcatctagagatctcccctggccccatcacagctagagctatgctgtcccctttcagggacatcttgtaatttatccacccagcccccaactgatggacataaaggctgtctccccatcatctcctgctactacagacagcactgcagggactgtcctgctgtgtttttttaaggcatgggtactccagaagcagttgctcagctgcacccccaaggttgagtggaagtccctcggtaaaggaggaggagagagtgtgaagggaatggcaaggcggggagggagacagggcacaggtgtcctggcaacagcagatgggaaacaggtctggctaaggtaccagaagccaacaagtcccagaaaggtcaagtgactttcccaaggtcacacagcaagttgatggcagagctgggtacaggactcagagcatctgacacccaggacgatgttcctgcactgttccatagagtagcccgactcttaagtttaaataaccccaggaaggaccccctctctgtgcctgacccccgctgggttgtagaggcctaagtttgcagtagctcctcccagccactctggctgtcagcctctgacctgcagtgggagggtctcaccttctggagatgtt

SEQ ID NO: 16488 - DNA, 1056 bp, Homo sapiens
gacctccagccctgctgctccccagttggttccacggcaagatcacacgggagcaggctgagcggcttctgtacccgccggagacaggcctgttcctggtgcgggagagcaccaactaccccggagactacacgctgtgcgtgagctgcgacggcaaggtggagcactaccgcatcatgtaccatgccagcaagctcagcatcgacgaggaggtgtactttgagaacctcatgcagctggtggaggtgagctggggggtacagagccttgctcccaccctcacacaccctaaacccatctggggccctggcttctagctccagccccactgcttctgcgtggtgaccagccatgtggggcaacttctgtgagcccttgtttcctcacaccttggtggagcagctgctgcgtgccaggactcacctctgaccccacagtgccaccatgaggaggggagccttatcctcattttatagaccaggagttgaaggttcagagcagttaggggacccacctgaggtcccacagatataatttggtgccaggactagaatctgagtctgtctgatcccagagctaactttcctccagccactcacagacctgcatgctcagaagcgtgtgcagaaacatgagccatgcgccttgatcgccagggcccctgaggctctcgcacctgcacggacatgcccacaggtccctgcagcttcccaggccagctctgccagccctggccaggccacacctggcatccggtagccacaggaagcctcccgtgtccctctgtattcactcttatctccctcccctactggcctggcttggcctgtggcaggtgagggtggggtcctgggcactcctggctagaggctggtttcaggactgagccatgggttgccctctgcatcagatacccatggggcccagagtggtagcagcagctgagtgtccagcaaccgcatgtagggtggcatgggaaatgggccatacgtcataatctgggacttccctaacccctgccctaccagaaatggggagccctccccactcagtgac

SEQ ID NO: 16489 - DNA, 1306 bp, Homo sapiens
ccgcccgcagtctatgaagtcatgaagaactgctggcacctggacgccgccatgcggccctccttcctacagctccgagagcagcttgagcacatcaaaacccacgagctgcacctgtgacggctggcctccgcctgggtcatgggcctgtggggactgaacctggaagatcatggacctggtgcccctgctcactgggcccgagcctgaactgagccccagcgggctggcgggcctttttcctgcgtcccagcctgcacccctccggccccgtctctcttggacccacctgtggggcctggggagcccactgaggggccagggaggaaggaggccacggagcgggaggcagcgccccaccacgtcgggcttccctggcctcccgccactcgccttcttagagttttattcctttccttttttgagattttttttccgtgtgtttattttttattatttttcaagataaggagaaagaaagtacccagcaaatgggcattttacaagaagtacgaatcttatttttcctgtcctgcccgtgagggtgggggggaccgggcccctctctagggacccctcgccccagcctcattccccattctgtgtcccatgtcccgtgtctcctcggtcgccccgtgtttgcgcttgaccatgttgcactgtttgcatgcgcccgaggcagacgtctgtcaggggcttggatttcgtgtgccgctgccacccgcccacccgccttgtgagatggaattgtaataaaccacgccatgaggacaccgccgcccgcctcggcgcttcctccaccgagcctgcttgtcctgcccggtcgtccctcccatgccatcttgtccatccccctgtgtctgtgagtggggctgggtggggagcatggctgggagatgtagccgccgctttgtgtcagctgcacgagtgagtgtccttgtgtctgccctccgggaagtgctcaccagttgccctgctgccgccaggcccagctccggggccccatctacaggatgctgcctgggggttccagctgcctcccctgctgttttcaagcctgccgcacaaggagggctacagctagggatgggagggagcccaggcctgcacagatgggaacggggttctagtcaagccccctgtgcaagagagagaaaaagcaatggtgggcccagtgggcttcctctggcaggaggagaagtgtctcatgcctgagaagatgctgacccggagagggacgggaaagctcctggtggttctccagtttcacccacgatgtcacagctttgccctgtccccacccctg

SEQ ID NO: 16490 - DNA, 1057 bp, Homo sapiens
acacttgaccccccttggttagggaatcaacctggaagggacatttgatatggtcattaaggtgactaggagttttccaccctgacaagataggtaaaggcatagaggcagagggaacagcatgagaaaaggcagggaggcatgagaaaaacataatattttagagaaaaagtggcaagttcagtaatgttggagcaaagggcaggacgagtttgtgaaattgggcaaagagatctgaaaaagtgagaggaggtcactagttttgcttggtgtgtgtttgctgaatgaacgtgcaccgtttagagatgtggggtgtgctaaaggcctcagcaatgagactgacaatctttgttggtggaatttcaagacaagaagagtccgtgtgggctgggatggtcctggaggaggagtaaaatgagctaagctttaaaaagcacaaggtagaaatgctcacaggcttcagcacatgcacaggagtgcagtggtggcaatcagcctggagccactaggacagaccttacatgcccagggggaaagcgtggaccatatgcagcgggccaaaggagccacagaaagtccaagaacagcggaggttgtggtgcagtgagtgtagcaaggcaagcatgagagtcctggtttttcaaaagcccataaaggagagacgcaagtaacctgtaaccttctctctggcagcaggcaggagctgaacaagagccttcaggagtgtctgtccacaggcagccttcctctgggtcctgcaccacacacccccagggccctggggattctgaggaggcagcctctccctgccagcatgcctgcctgacccacctcagagcctgctttgcatcactgggaagcaggcagtgtcttgggtgggggcttggtcagtatcctctccgtctgggtgcccagctcccacgcacacctgagctttcggcatgctcccacctcgttaaaggtgatttccctctccccatgctgtgatatgctggtcttctttccagcctcaccctaatctctgtgaaggcttccaccccttctgagtacctggctg

SEQ ID NO: 16491 - DNA, 1075 bp, Homo sapiens
ccacacctcactaacttttaaattttttgtatggggtcttgctatgttacccaggctggtctcgagtacctgggtttgctcaatcctcccaccttgccctcttaaattgctgggattacaggtgtaagctggagcagaagcctgggcagccggtagtgaggggctttgatgttaggctaaaggattcaggctcataatggatcttggatccctgcctacccaccacccacttcccttgtttggttctgctttgtcttaggctcagttctcatccttcctgtattgagcttgaacgtataccctgtctggccttgctttccttgctctgtctttagtctggttctgtgccagctccacctttgcccatatagggactggcaggtatccctgaaacctaaaactctgccctgaattaaactcatcagaggagacttaaacatcacaagctgaggctctttgctctgtctgtccctgtctttctggaggatagagaagctgccatttttctggctgtggcttacctgcttggctagtgccctgggatcttgaggctcagtaatcaaagcgtgtagccctataacctgcccacttgccaactctttttgctgctcaggagttcctgtgaattcagcagagcccggggaagtcaggtactacagctacctgtgcaaataggtgactccaacaggttctggttacagtaatagacttactggtttggaatttgatcctctttgcaagcaaatgaaggaatcctgccagccatcacccttcctggaattctcaggttgaactgattggacctcgcctccaaatgttggttaaatgatccactttctattcttcaagtatattaagcacacacatacacacacacaccctcttttttaggaaggtaggtaggtttgatccttagcacagctttgctaagcaggctaagtactgtatttcggactatagtgcctgctgtggggaagcagttgaagtcactaatacagattcctgccccaagtttaactgactgctttctgtaacctgtttcctaggaatgagatcagcttgatgtggaggaggt

SEQ ID NO: 16492 - DNA, 1037 bp, Homo sapiens
tggggttctggtgcagaagttcaaggctttaaacagcgtgaaatctaacagggagtggccccacttcctagttccacctccagggcccttagttggtctgtcttatcccccttggtctttgcgtggctgggccctgctaggctggctgccctctctgctcctctctcgccttttcacattctgtgcaaagccttccctgtctgccccagcccagcccctgtggttttggccccttcttttaaacttatttgacatagaactataggttgccttagacactgctggtgttactggcccctagtttttggtggggtcttgtgaagttgctgggccccaggcctggcttttccctcttgttatcagctgagcacccaaggtgcagtggccgtatctggcatgtccagcagggggcggtgcttactcacagatgaccacgtggtcacatcagctggggctgggctgggaagtgtttcacttttttactttccaccaacttccacccagaaagtcaccccatcaccccacccccagggctgggataagccatgaagctgccagccagggatgacagccaggccagagtgggggagggaggagagtctcgtggcactctgacactgggtgctgcacttttagggcagtgctgcttaggcccagccacccgctgtgtacccagaagcattggtaggagctgcccagctagagccgtgagggtgggaggcctctgccaccaccccctggggagggagggagccatgcagttcccttttcccatagccccagggcaagtgagtttccggactaggggtggataggggcggggagtcctatcccaggaaacagatgggcagcctcagagcggagggaaatggcaaccctaccgcttcctcccatcccacgcagccagcgtttggtgggaggggggttgtgaggaaagggttgcctggagcagggaggtgctccagcccaccccagggccttttagcctgggccccatgggatggcaggccatgtctggaacaggacttggcttcccc

SEQ ID NO: 16493 - DNA, 1433 bp, Homo sapiens
aaacgggaggtatcactctaaatcctcattccatttctcctgaccagacccaaatcaggattcctgatgtctcttcagcaaagaaaaggaaactagacttgccaactggtttcgggaaggaatctctatacatgctagataaaatgcaggcagcttatgtaatagggtctgtccaagcctcagtcacatacacaaagagatttagcttaaaactattagctgtaaaaacttttctcaggtaggctgagcgtggtggttcacacctgtaatcccagcactttgggaggctgaggtgggcagatcacctgaggccaggactttgaaaccagcctggccaacatggtgaaacactctttctactagaaatacaaaaattagctgggcgtggtggcgcacaactgtaatcccagctactctggaggctgaggcaggagaatctctggaacccaggaggcagaggttgcagtgagccgagatagtgtcattgcactccagcctgcacagagcaagactgtgtctcaaaaaaaaaaaaaaaaaaaaggaaaaaaacttttttctaagtggtgtcagcaggggactaagccgggagctgcctttcaggaattctgtagcatatgggggattcttttttaatgcccagcgctgcttctaccaggacccacaaaggtgtaagagaaagccaaggaaggctcctgccctcagggagtttctgccctgccagggctccttggcatttgctgggaaaaggtcaaggtaaatgagtaaacggtcagaattatttagtatcatagaagataacacatggttttatttatttatttatttattttaatgtgtacagggcccagcccttggctcccaggaccttttggtggagtgaatgaaaataaaagaacaaagcccatagggctgatgaatcagatcaagtgacatccctctaaaaccagaaaaactagtctgggcctgctagacagcactggggtcagtcagggtcacctccaaggagagtcagctgcttcagtgggtcagaggtggggcatcaggaaagacccgcccatcacatactcttcgcattactccttagtgaagaccttgaccccaggaggctccctaacaatgtgactgtaacctgggagggtggctagagagtggagcctctgagaggttaggcaaagagcttagagggaagatctcaagcagggtgagaggcttaacaggaccccgggtggagctccccaggggacagtgggggcctaaaggctctgagaccttgagtgacggtgtagggaaggaagaaagggtagagttgagagggaggcgagaacccctgaatcaagggcattaccaatttggggatgattctttttatttttttattgatggatgattgattgattattttttttttgtagagaaggagttttgccctgttg

SEQ ID NO: 16494 - DNA, 1042 bp, Homo sapiens
tatttgggtgccaaaagttgattggaaactctgtcttcactgccagggacttggtactcatctggtattgaaatgttttgttggtggacctctgaattccatatctgaaggtttccttccctaccacatctccctactgccagggttatttgttttttccagaaggaccctatcagtagtctcctgcctggttgaccttgcgttcttagggtcaagtaggggaagcaggcttgggtctctgtttggtctgtagatactcacttctgctccaggactcctttgacctctgttgtgctaactctgcaagggtagtatgtttggctgccttgggtgggaagaagacctggggggactttagctgttccttctacaggtcaggaagtcctcctgtattcagctatctgcctcatgctcacctttgtggtactcactgcctcaagtcctaggctcctgggctctaattggcttgtgtctcagttactgtgtaggctttggatattttcttttctcatctaatctaatcttatcttgtaggatctgctctgctagtgcttcctttcgcttccatcttctgaaagcgcattggcacgtcttaactgctgttggttcctcttctttttgttcttgagaatttacttcttttctttctttgtttttttttttttgagatggagtttcactcttgttgcccaggctggagtgcaatggtgcgatctcagctcactgcaacctccacctcccaggttcaagcgattctcctgcctcagcctcccgagtagctgggattacaggcatgcgccaccacacccggctaattttgtatttttagtagagatggggtttctccttgttggtcaggctgatctcgacctccccacctcaggtgatctgcccaccttagcctcccaaagtgggattacaggcgtgagacaccatgcccagccgttctcttctcttctattccttgacaaggtctcactttgtcacccaggctggagtgcagtggcatgatcttggctcactgcagcctcgacttcctggg

SEQ ID NO: 16495 - DNA, 1024 bp, Homo sapiens
tggcgagagccgatgggtggtagggagaaatggaagtccagctgtccaaagtgggcactgtcctaggcctaagatgcctccagggagctgttgcccttaaaggggagctgcctttgtttatatgatcgtcctgggaagatttgggtgtgatttctctcctccttctccctaattgccaccccccacctcatttattgagctttcgcctaccacgtactgtactggggtctgttctgagagcctcacaggacacagggagctcccaggctggaaggagaatgccaggcttgatcacccatgccgttgggaagggagtatcctctggtgaggggtacagtcctgaatgaccccagtcagtcctttctatggagtcaccaccttgcatagtgctgggcctgtggtagacatccaataaatacttactgcatgtatgcggtaactagcagttttacttttgcgagtagctgggagtttttcagagtttcatgtggtgaagaaggtggatgatgaagctgggacaggatgttttttggggtcacagattagtgttcttgtatacttgtcaatgggctcttaaggcactcctcaaagaatctgccagtgatttaagcatcatttgaataagagcacagggtgagcagaagaacaacttgtgtggccaggagcaggggtagggagtgcagagaagagagagcctgggtgcaatgtcatcaagaaggctttccctatagtcccagctacttgggaggctgaggtgggagggtcgcttaagcccaggagttctaggctgcggtgccccttgattgtgcctgtgaatagccagaatagccagtgcgctccagcctgggcaacatagcaagaccctgtctctagttaaaaaaaaaaaaagggaaaaggctaggcatggtgcctcatgcctataaccccagcactttgggaggctgaggcaggaaaattgcttgagcccaggagtttgagaccagcctgagcaacatggtgaaactccatctctacaaaacatata

SEQ ID NO: 16496 - DNA, 1050 bp, Homo sapiens
tcccagctactcgggaggctgaggcaggagaatggcctgggaggcagagcatgcagtgagctgagatcacgccactcactacactccagcctgggcgacagagcaagactccgtctcaaaaaaaaatagtttagcagagttgccagatataaattcaatatctaataaattaaagtttaatgaatgtatatacatcatcaagttagaaaatgcaaattaaaaatttacaatagcaatgaaaaatataagatattgaaaataaatctaacaggccgggcgaagtggctcacgcctgtaatcccagcactttggaaggctgaggcgggcggatcacgaggtcaggagatcgagaccatcctggctaacacagtgaaaccccgtctctactaaaaatacaaaaaattagccgggcgaggtggcaggcgcctgtagtcccagctactcgggagactgaggcaggagaatggcgtaaacctcggggggcggagcctgcagtgagctgagatcgcgccactgcactccagcctgggcgacagcgagactccgtttcaaaaaaaaaaaggaaaaaaaagaaaataaatctaacaaaagatgtgtaaaaacctttttttaaaagaagtggggtcttgctatattgcctgggctggtcttgaactcctgggctcaagcaatccacccacctttgcctcctaaagtgctgggattacaggcataagccattgtacccagtcctgtaaaatcttataagccactgtacccagccctgtaaaatcttttttttttttttgggacggagtctcgctctgttgccgaggctggagggcagtgccgtgatctcggctcactgcaagctccgcctcccaggttcagccattctcctgcctcagcctcccaagtagctggtactacaggcacccgccaccacgcccggctaattttttgtatttttagtagagatggggtttcaccgtgttaaccagcatggtatcgatctcctgacctcatgatctgcccgccttggactcccaaagtgctgggattacaggtgtg

SEQ ID NO: 16497 - DNA, 1035 bp, Homo sapiens
acaaaaaaattagtcaggtgtggtggtggtgtgtgccagtagtcccagctacacaggaggctgagactggaaaatcacttaagcccaggatgcggaggttgcagtgagccgagattgtgccactgcaccccggcctgggcaacagagtaagaccctgtctcaaaaacaaaaaaaaaaaaaagaaaggaaataacaacaataaagcaattatatgttaatataaatgacagttttgtaaaaagtaactatcctttccaaaacaaaaacatttagtgagaaaaatgactttgttttgcatttttgcaaatctctttaatatctgacttaattgaaaaatcttcattctcatatctgtttctgcattcgatctatcagaatacattgttttggttggagtatgtgaagaaaattcatgtcagtaagatatgtagttagaaaaaagagactttaaatagccttttgtgggtattctttgatagcacatcgactggacaagcagcagtttctcaaagcaatgtagaatctgaaaccatagcaatgacatattcatactgttacattaaaactcattgttccggctgggcgccgtggctcatgcctgtaatcccagcaccttgggaggctgaggccagacgtattacatgaggccaggagtttgagactagacaggccaacatgacaaaaccccgcctctactaaaaatacaaaaattagctgggtttggtgatgcacatctctaattctagctacttgggaagctgaggcacaagaattgcttgaacccgggaggcagaggttgcagtgaaccgagattttgccactgaacgtcagcctgggtgacagagcaagactctgtctcaaacaacaaaacaaaacaaaagccattgctctctcttgtccccccacttttttttttaagacagggtttcactctgtcacccaggctagggtacagtggcttgatcatagctcattgcaacctcagactcctgagctcaagcaatcctcctgtctcagcctccttagtagctggaa

SEQ ID NO: 16498 - DNA, 1033 bp, Homo sapiens
ctgtcttgtaccttaagtgaatcttttatgtgagtgtagttctgtaacattatgcatttgtcatttggaaagtactgatagagttatgcagatcatccaatttttgacacattttgttagacaatattgaaaaatcatgtgtgttaatatcactactaatctcataagaaaattgtttaagtaaggctgggcacggtgactcatgcctgtaatcccagcactttgggaggccgaggtgggtacatcacctgaggtcaggagttcaagaccagcctggccaacatggtgaaaccccatctttactaaaaatacaaaaattagccaggtgtggtggcgtgtgcctgtaattccagttactcaggaggctgaggcaggagaattgcttgaacccaggaggcagaggttacagtgagctgagattatgtcattgcactccagcctgggtgacagagcaagactccatctcacacaaaaaaaaaaaaaagaaaagaaaggaaaaaaaaagtgtttaagtacttagaagcttgttaagctcacaatggtggatacacattttccaaaattctaacttttgcttgaaagctcaaattttatcattggcaacaaatgctgtcagttgcttttatggagtgacagtttcactttatttattgttaagaaatgtctgctaaataccagtcggaataaccatagtttgtcagtctttcaagtaaaaatggtgttctatgaaaaaagcagctagtttggctgacaactcagacaatcacacaagcgcttttccttagagaagcccatcatcctttggtaagcagcagaagtgctttctacatactcctcctttcatcacacaaaatatcaagcatagaaagatatatactgctcacagattgagagttaataaaagtattttttactgttccatcaaggtcattcataaatgaaatgtttttaaattgcaaatacatggcaatgaagaatacaatgctagcctgggcaacatactgagacaccgtctctacaaaaaataaaaaaa

SEQ ID NO: 16499 - DNA, 1086 bp, Homo sapiens
aacgaaatgaggggacagatcaaggagcccttctccagccccctaatacactagtgctggacaggggaatgccggcacctactgtgtgccagatatttgcaaacacccttttccaagcttacaccgccaccgctatgaggaagacagaattccacttttgcaaataaggaaactgaagctcagcgaggtcaagcggcaggcgcaaggtcacatcgcagcaagtggcagtgaatgaacgatctaagggagcgactgagggcgcgtgacgggcccgccgggcactggttcgtggagcgtggcggttacgggcggtgcacagcgcccgcagcccgctcctagcgagctggccccacgcgggccctccgcacccgctgcccacaggagcgcaggctcccagaggcggggccgggctcttccccaaccctgcgagtcgccccgcccccgccccgcccccagcccgccccgcccgggaccgcagacggcgcccagcggcggcgcgaacggcagctaggagggttgctccgggcttggtgctcactgcgacttcccgcgcagggcccggtcggactaggacccgcggcctgagagacgctggaggatgcggacgcggaggccgcctggggtagcggcggcgggagtcctggcgctctgcaggtaggagctcgcccgctcggcgggcgcggaaacttgggccgagtttgcgggcggcgcgtggagaaggggcgggtggcgctgccccagggcgcccctaccggccggcccggggactgagggagccgcgcctgggccgaggggctgcggcttctggctgccgccggccccccgcgaacgggctgcggggcaggggtggcgctgctgctccgactttccccggacttcgaggctcccgggacctggtagcgctctgggtctccggcggagaacaggcgcctaatctggcgagaaggaactcaggccgagccctccggcctcccgcaggaccctgtcacgtggattgctgggggatggcgttgaggaggaggtatggggacaagggggcactggagggctgggcctgggggcgccgggcgctgaggcaccgcgggg

SEQ ID NO: 16500 - DNA, 1029 bp, Homo sapiens
tctgggtagaactgttacagcctccccattgctggtgaccatgcatcccactgaccttagcttggagggtggggggtagtgtgctgggcccaccctctggagaccctgcccctgctgggctctgttcccccagaggcttgttctcagggcagctaaggtggcttcctgggcctgtcttcccactccccctgggccaggggccagtccactggggcttgttggacctgtgtggcatcctggtggtggtcactgagcccagctgcactgtccctcctgtgccagcctggccttaacactaggctgggatttggagtggcagctgccattgtccccttccattgttcatataggcccaagaagagctactgggctgtgaagggataggtaaccacaacacattgtggctgctgcagtgacaaccagggtggagggtccttgggtcccagaagaggtgatacctgaattggaccttgaagacaaatacaaaatcacatgcaaagtggggtctgggtagagagagccgcacgtgcagagtcttggtgagtctggaacaggaaaatccccaggcgaggctggagctcccagaaccagaaggggcaggagcagggcttggaagcctggctagaaatccagcaacccagggactcagtcccacaacctgaagaatggggatgtgagccacgtggaatcatttgacactactacagggaggaaagaattgcagtggaggtggagtttctgaactctgggccccccgggccctgggcagccatgggcacctcgtcagccccatcagtcacatccatctcatcgtcagcaccttaatggagtgagcgctttattccttttccttcggtcctcccttcccgccgtcctctcctctccctccctcccttcacacctgtgcccctgctgtatgcctgacacacatcttaccaatggtgaccaggcagagtgagggctcagaacaggtagggcttcgcacctgggttcctctgtggccccagaggactcagaatggtgcagagg

SEQ ID NO: 16501 - DNA, 1034 bp, Homo sapiens
ctctttccctctgtcattcctggcctcattgatgttcctcttcccgtgagtttgttctcactaagggggttgagtcgagccagctgagtcttccctcaaacctcctttggggatcctcggagcaggacccgactctgacctgactggctgtgactcttctcatcctgcagttcctgtgccggagaagggagggccgaaccccgagcccagcctgctgccccagctggtggtgggaggcgggccatggggacgcttcagcccgtggacatggccttgctgctggctatatgctgtgctctctccatgggcagctccccaagaccccacctccagacaccccctcagtggggagcacccagtgcagctcttctggagccctgtctgcccaggagatgggaatgggggaatgctgccaagcccctcctgtctctcctgctgcacatggaccccttttccagggtggcgggaagctgggggcctccttgaggacgctgctgcctccatggggactccaactctggatgttctagctatggcccactcagaggtgcctgtgtcgatgagccctccacccctcctgccacagcccctagcctcagcctgcctggccactgttcctcccacaccctgcctttgtccaagaggggcccagcttccaggtccctgtgatttcttaggacaattggaacccagggtcctaggaaggggtgctgagccccttggaaggacctcaaggggcctcttctatgatttctgggtttgtcaggggatcccttgcttcttcaagagcctctgataaggcatctgcagacccttttcctcctcagatttggatgatgggaccagggcaggcccctcctgtatcccctagctcctctccatataattcagaacttggggtcccaagcttggctgcacctcctcaaaccctgtaaacctcttagacccaatcccactacaccctcagaggggctggggcttcagcttgggccctactacacagaaagctagtgcttctctgcctcctgctgagg

SEQ ID NO: 16502 - DNA, 1234 bp, Homo sapiens
gagaagctggggctcccacccacaatcccacaccacctctcagggctcccaggaggctaagaaggtggaggggctttaatatggtaagtgaggctgagcggaattgtttcaaggggatggggaggggactatctcatgacatggcttccgccttgggctttgtggtctcccacatccggcctgcccagtattctgtgtcctgtggtctcctctgcgccacttccctgcctgcagtagggtgtaacagccccacctgggatgtgatgcaggtcacctcacatggcacagtgttggccacttcctttcctctgaagaggaaacgtgtatgagtctctgcttcatgccaggccttgttctaggggctcggggtacagcagtgaacaagatgaatgtggtccctgctcccacagaactgatgttcacataggataggggaatgagaaatggacccatgccttaggaaaacccaacaggtgaaggaggtagaggatgacttggccgagggtgggggtacattagcaatggccactctagggaggtttgagctgaggcctgactgatgagaaggagccagccagaggaaggcattggaactggcaagagtcacaaatgcagaggcctggagtagggttggcaagttctccctttctgggggatgctgtgcgtccgttgacccttaggagacttggatacctgtgggatgggttggagatgtctctggtgccttagaagaaagttgactcctggccttcccctgtgtgaactccaagcacatccccagggaaacatctgtctttggtcctggattcctcccacctcagccttcctggggagtcacgccacaagttaactctgccagctggctctgaagtttctctcaaaccacgagcatttgggctgttttcttagtcccccagctggggcgtgtggcaattggcttacctcagggatcagggcacctcccaggctacccttgtaccttcaccccagaactctgtcttctgacccactcatcacacccattagtcagtcttgccatgacccttttccgcaaagaaacaagatgcacatcctcttcacggtgaggaggggagacccatgacccttggaggtggggtgggggctgctagggccctcactggtactccacatatctcctgcacagagccagacaatgtccaggatcttgagaagaatggaccctaccaatggcaaacccacatatggtctctaa

SEQ ID NO: 16503 - DNA, 1035 bp, Homo sapiens
aagaacataaggaggaactaacttcatgctttgaaaagaattgtcacttctttttttttttttttttttttttttgagacggagtctcgctctgttgcccaggccggactgcggactgcagtggcgcaatctcggctcactgcaagctccgcttcccgggttcacgccattctcctgcctcagcctcccgagtagctgggactacaggcgcccgccaccgcgcccggctaattttttgtatttttttagtagagacggggtttcaccttgttagccaggatggtcttgatctcctgacctcatgatccacccgcctcggcctcccaaagtgctgggattacaggcgtgagccaccgcgcccggccgaattgtcacttctttaaagaagacattatttctttataactaagaattaccagctttagcactggtctctgagctgatttttaattcccagggaattaaatttttaatttcagcaacttcggaagaatcactggatattaaaactgaaggccgggcgcagtggctcacgcctgtaatcccagcactttgggaggccaaggcgggcagatcacgaggtcaggagatcaagaccatcctggctaacaaggtgaaaccccatctctactaaaaatacaaaaaattagctgggtgtggtggcgggcgcctgtagtcccagctacctgggaggctgaggcaggagaatggcacgaacccgggaggtggaggttgcagtgagccgagatcgcaccactgcactccagcctgggcgacaaagcgagactccaactcaaaaaaaaaaaaaaaaacaaaactgaaaatgacccagagataaagtatacacttgggggaaaattggaatagcaggaagaacaaacccggaacactatgttgtgagccattgctatagactgatcatttgtgtcccccataacttcaaatgtgtaatcccaaccccagaccctcaatgtaatggtattaggagatggggcctttagacaggtgattaggaccatgaggacagagctctca

SEQ ID NO: 16504 - DNA, 1082 bp, Homo sapiens
gcaattctgctgccaccgcctcccgagtagctgggattacaggtttccgccgccacacccggctaatttttgtgtttttagtagagacggggtttcaccatgttggccaggctggtcttgaactccacctcaagctcccaaagtgctgggattacaggagtgagccaccgttcctggccgtaaagactcttttaaacatggatgactgttttgataaaatgacatggcttgttcatgtcgataccatttgcttagaagggaaagatcaagggaaaaatggggttggatttcaaatgatttggtttgatcgatgatttgttattctctaaagttgtaactctggaaaaggtaatgagtttgacttattctttaacttttcctctttagacagttcaaatatttgaattctacatgctaggacttgttttctttatacttaccaagaaacatccttatgcagtttctctaatgtttgagaaactaagttgttttttacacacgtgcatgctagttcctgaagagtcctgtacaggtgctctgctggcttttcctttcaggtttctgtatcagctgtatttctccctgtagaatgtgcccctgacctccaccccttaaccttaccccatttgtctttatatgcctgaccatccgtcaaggctcttctgggtcatatttagttcatgctgttatttccccttcctcccttctttagtccttactatttttgctttggtcatgttttcttatgctgtattctgtaagcctttaaatttttctttttatggtggcaggggagaatattttataattatgctttgtgctttttatcttccactcaataaatgcttcataaatatttgagtatatagcgctattctagctgtattgtatttgaacaaaaatcttaactgccttgtaagttaactgctaagaatttgtcaaaagtgcagagataacatcaataacttgtcatggatagtacaaaaaggtctctaagggcttgatggaagtctgtaaattgacttcatatgagagtgtaagaagtgaaaaagaccaaaacagagtagatgttttactctgta

SEQ ID NO: 16505 - DNA, 1408 bp, Homo sapiens
ttgagttgtgtttccctccattaagacagttttatggtggggatggtagtggtgatgaacttgtttgaaatttgtccacttacagtaatgtttatggtagcttcacagacaacttcattctcacaggccttagaattactataaaactaatagaatggatgaggaacaaaggacctgagtaattagatgcttagataattgttctgtgttttcataactgtggtgaaaaagagtggtgctagaagcacttaaacattctatgtacgggaaaactgcctgaatttgtattgggatttttgagcaccattcactgtttaaaaactgatataccataggtcatatttattttaaagagaaatagtaggcaaacttatcttttcaagatagatataaagcttagttaaccttatcaaaattacaaaacttaaagcatgtgaaagattgaaaatattaatacataggtttaaatattggtcattattttagatgtctttcaaagtagattctctcttaaatgttaaactgaacaaaccttgaacatgatgtagagtttgtgctgaaggttaagtttcctggcgtggtggatattttataatatggaaaacaaaaccttcttattgtaagacattaaaagaaatttagtcaaaactaggagatatgattctaccactcagaatataccactatcagaattttgtatctttccagttatctgctcatctcttttctccgatgcttatgtgtgttccctctcccttaaaaaatcagatttttttgtaatctgctttttcactcaacaatattgtagatccgtgttataacttactccttacgtgtaggcaagatgaattctgaccaccccaaggtggccatccttgtccctgtgattccagatctcccagaactagaggtctagcttcagggaaaacccagattttcttggcttagcccacctgacagctaatcactggaaatggggtgggctggtagagtcctttggtcaggttttgtgtcaagagagggaggaggaaagatgggagggaggtagcaaaactggtctcaatggaactatgtaagttaatatagaatggcaaagggatgtttcttccaaggaaagaattctaaggaaggaaggaaagtggaggggaaggcagcagttctcaaagttttggggtcaggactcctttacactcttgaaaatatattcagcacttaagggctttggtttatgtaagttacgtctattggtatttatcactacaagttaaatcagaaatatttaaaacattaactctttaaaaactcatcacatattattataaatgtgcttttacgaaacaaaattttctaagccaaaaaatagaatagtagcacagtcttaaattttttgcaaatttcattgatgttt

SEQ ID NO: 16506 - DNA, 1143 bp, Homo sapiens
ggctttctctctggaagcttttaggagtttgtcttttccttggtgtgctgaaacagcacaacagtatacttagtgtgggtcttttttcactcattgtgctcagtacaccaaatggataggcctatggataggctctttcaaatttggaatcttgaatcttctcataattttgttaactttctcctttccattttatttgttcattttgaagtgtccgttaatgggattttagacctcttgtcttgagtcttgtatctcatattatttctaaattatttttctttaattttaaaatctgaaatatttttctttcaacttttggaaatgttatttggacagtcatagctttaagttttatttattgttgcttaaccaattatcccaaaacttaatggcataaaacaacaaatttgcctatctatcactattgtatggcttaactggggctagttggacaggttttctgctggtctcatttggcagctctcactatgtggtttagacggtggcagggactggtcatctggatgctcagctgcagtggaatgtctgagacgacttcttcacccacaggtctgctgccttggtgtttcttcatctggcctttctctctgcatagcgtctcatcctctcgggcctcttcatgtggcttctctttctccaagaggatagtcagttcctatttttggcttccagaagcacagaagtggagctgccaggtgttcttaaggcttagatctggaacaggtccaatataatttctaccaaattctgtaggttaaagtgagtctcagggccaacccagactcactgtgggatgggcccatccaaggacgtgatgacaggaggtgtggttcattgaggaccaactcccaagatgagccctgagttctaagaaccttttcttcgctggttattttttattcatattctatttttgttccatggttgtattcataagtgtctttaaggagctattttgatactctttggccctctccctagcatctcttttttctttaataaatttttttcttagtttattttggtctttttttttttttaaacctttcctcaggtatctattctatgttgctcatcatttgtagtcttttaattcccttttttgttcatatttgagag

SEQ ID NO: 16507 - DNA, 1086 bp, Homo sapiens
tttgccccttcccggcctgtttatgctgttttctctgcttaccttcctctcatgggatctgtatattcaaattcatcctctccgacaaaatacaattcaagttctttctccttcgtgaagctgactttggtctgtcctgctctgacccaaccaaaagtaatttttctcttttgacttaacatccttttttttttttttttggatgaagttacgctctgtctcccgggctggagtgtggtggcatgatctcagctcactgcagcttccacctcccaggttcaagcagttctcctgcctcaccctcctgtgcagctgggattataggtgtacaccaccacacctggctaatttttgtatttttagtagagacagggtttcaccatgttggccaggctggtcttgaactcccgacttcaagtgatccacctgccttggcctcccgaagtgctgggattacaggtgtgagccactgtgtccggccacaacttaatatctcttttacgtgaagcagcaggatgtgaaaagaacactgagtctggtgacaaacacacaatttatggtttcactttcctcagctctaaaatatggctagacagtacataccttttggatgattgctatcaaaaataaatgaaaatgatgtgtgtatatatataaaatgctcagagtagggaaacatcaaatgattgtctgaacacttactactttttgccttgtgttagagctattgaccaactccgtgaaatctgagtagcagttactttgtcttgggcacaggttccccaaaacagggaatgaattgttaggtaagtagatgccaaatgttgaaaacaggtagattactctccctccttcagtctaatttatatattaatctaatttataatttttagtagagcaaagaaatttagtcaagcccccatatcttgattacttaaaaaacaaagtttgtcatttgaattaatgatgactgtactttatgtcttgtgatcgattccagtttgagttatagtcaaaacaactataagttactgaacacttttgcatgatggatactatgccaagtactttatacttcacatatct

SEQ ID NO: 16508 - DNA, 1045 bp, Homo sapiens
actttaatttgaaaagatagcattggttgggtgcggtggctcacacttataatccctgcactttgggaggccaaggtggtcagctcacctgaggtcaagagttcaagaccagcctggccaacatggcgagcgaagccccatctctactaaaaataaaaaattagccgggtgtggtggcgcacgcctggtgatccgagctactcagtggtctgaggcaggagaatcacctgaacccaggaggcagaggctgtagtgagccaagattgcaccaccgcactccagcctgggcagcaagagtgagactctgtcaaaaaaaaaaaaaaaaaaaaaaaagggttatgaccgattcaattctagcattatgaccgattcaggaattcttagcgtgagcaaatcaaaattaattagaatttgcttaaagaataaaaacaaggaaaaaatccttgctttgtagtgtgcaggataagccaaacttgtttctgagttgttagaattgtgggtgtccttacggttttttgtgtaagaagtctaaaagtttatctgtagaaacctaataaagtacaaacatttgaatactggttttatttttaaatgttaaataatcatttgtttcagcattgtttatatagaaaaaaaaaaacagatactgggtggaatttgttaaagcatatccataaaataaactaccacagagtcattaaaaagattgtgaataggtttatgtatactaacttggaaagatgtccctgaaagttgaagagagattataaaacaacatacgtagaaggattccatctttgtagaaatgtgtgttcatggaagaaaagtcttaagtacatatgattttgcataatctttttttcagtcagactaaacggtaagcagtttttcaactcattaaagaatcttctcagttgatggctgtaattatctgttaagggcataagatactcagctgcagtagtgtaatatttactatatagcttagttgttccatgttttaagagcaaaatttctagctttcgttggctatttagtgtataca

SEQ ID NO: 16509 - DNA, 1045 bp, Homo sapiens
tatttttagtagagacggggtttcaccatgtttgccaggttggtcttgaattcctaacctcaggtgatctgcctgcctcggcctcccaaagtgctgggattataggtgtgagccaccacacctggcctaataagtattttaaagatgctaaaaataatggttaaagaatagcaatggaatctagaaaaaatgttaatgatttttttttttttttgagacagaatcttgctctgttgcccaggctggagtgcagtggcccaggctggcgtgtggtggcacaatcttggctcactgcaacctctgcctcccgggtttaagcagttctctgccccagccccccgagtagctgggattataggcatgtgccactatgtccgcataatttttgtatttttagtagagatggggtttcaccatcttggccaggctggttttgaactcctgacctcatggtacacttcccttggccttccaaagtgctgggattacaggcgtgatttaatatggatctggatgagatgtaatggtttaaaatctgtggatatatgagatattttgatggaaaaagcaatacttcctttgtacttacaaaaaaggtagtaattttctaaaagcttcttacgtagcttttttatgtgtgtgtttttgcttggggatatatcttatgattgaactttcttgaagtgacccaaatgtcagtattatctctcacttttgttattatagaaactgttgtggttgtcaactgggttgtcttcctaaaatatgagtctggtatatattgactgaagttgctaatggctacatttttactaattcatatgggggaacgaataaagcacccaggccaaaaacaaaaaacaaaacacacaaaaaaggaaggtatctttctttttaaaaaattgaattatatgtccttatgcctaacaccaaacttaagaaatagaaccttttttttttttatccgtccctgtggccccctgtgtgcccctcccttgtcacttcctctttgagaggtatctttacgggaatatgaaatattggc

SEQ ID NO: 16510 - DNA, 1025 bp, Homo sapiens
agtgctgggattacacgcatgagctaccgcaccccacctagtggtttgttaatagatgtttgttttgaggggactgcaaggttttgggaaaccaggttcagaatatcttttaccaaaggacttcttggaggcttaatgctgttttctatttttcccaaatttgtttaataatttacacgatagcatctcagaggacggtgtcctctggcttactctctgggaaaggctgttcttttggaaatctggagttctgagtgattcccatgtgttttctgctgcagagcaggaaatgctgaaggattccttcgtgagcagatgttagaggtttccttttgacaggtggttacaaagttgatcacaaatatactatcacagtgagtggaaatcccaggttgggtgtgaaatagttgtttagaattgtgtacagttttcttttgttacctttaaagcttccgtagactgtttttggatcaggcagtaaaattgctataaaaagtacttcttttgtcataaaacctcatgatcagttttggaagtggaatgttaggtaacccagccaaatatttacatatacaaaataaacacaagactgaaaaatagtaaatttttaacctttctcttgctgacaccaccagtcttttactagccaccaagtcatagttcttacgtttttcatagtttaatgttaaaatatctttaacgaagcctttactgattggggagaaatgacataactattgtgttttagttttttttttttgagacagagtctcactctgttgcccaggctggagtgcagtggcgcaatcttggctcactgcaacctatgcctcccgggttcaagccattctcctgcctcagcctcctgagtagctgggactataggcatgcgccaccatgcccagctaatttttgtatttttagtagagacagggtttcaccatgttggccaggctggtctcaaactcctggcctgaagtgatccacccacctgggcctcccaaagtgctaggattatggcatga

SEQ ID NO: 16511 - DNA, 1056 bp, Homo sapiens
atctttttcaatgaacaacacttcaaatactgaaaaacagaaaaggacagtgtcattctctgatcttagttaaatctataagttaataataaaaccagaaaacagatacttctttctggaattgtataactcatgcaaacagcctttaggtcaaacagggatttgaaattaaaactgcagaatatctagagaatagcaataatgcaatcattacttatcagagactaaaggagagctcagaggaatgttcattgccaaatccttgtgccattaagaaaagaatgaaaatgaatcaagcctctgattgttagaaaggacaataaaaaaaacctgaaggaggccagggacagtggcttactcctataatcctagcactttggtaggctgagatgagtggatggcctgagctcaggagttcgagaccaccttgggcaacatggtgaaaccaatctctgtaaaaaaaacaaaacaaaacaaaacatgaaaattagctgggcatcgtggcaggcgcctgtagtcccaactactcaggaggctgaggtaggagaattccttgaacccaggaggtgaaggttgcagtgagctgagatccagccactgcactctagtctgagtgacagagcaagactccatctcttaaaagaacctgaaggaaagcagaatggggaaattattaaagatatacaagcagaaatcagtgagttagaagaataggaagggctagacccccagtacagtaaagtctctgcagaaacatttgtttaaactgggcttttgagtaccttgctactgataattgagactggggaaggccaacattcttattttctccttgtattctgggtggtgggcagtagggttggaaagtgactgcttcacagtcatttgggagtttcagggtatgtatagtttttacgtccagtttgtttcttttatttttgtcctttttgtgaaagtactaaaacaaaaacttttttgcctgtaatcccagcactttgggaggccgaggtgggcggatcacaaggtcaggagatcgagaccatcctggctaacacg

SEQ ID NO: 16512 - DNA, 1025 bp, Homo sapiens
tgcattttgctcattttagatatcttggactgagcagtggggcctttactgtatttttcctgataaatacacatactggccactccttatctctttttcttgaaaagtgaactttttaaagcagccaagtcaacatcaggctactgaagttgaggctttagggtaactttcctatattgagcccatgggttacaaggatttgcaatatattgttccatttacagccaatacaggtttaatcgatgttcaatattggtttaggaaatttaaggccttctaaatcataatagctctttcatgtctaaaaccattttatgatattgccaaaatgtgataggaaacctactcattaaattgttaaactttttaatgactatgtgaagatatgaattgtttcctgaagataatactcttaattgagttgtattgtacttcttaggcaaagcagtgtaaaactgtatcaattaaggcttgtgagtagtgatttccactggggcatcagagtcttggctgggctgaatctgctgcttgttggttcagtgtttcttatgaacaagagccacagtacagagcttcaagttatttaaaatactaagtcatcttacgtttccattttattaacgggatgttgcaatcgtttgtaaactaataaacttataaagtgattggcacaaagactccttgagcaaaagctgtgcagttaagtacaaaaagatacttaatttggagactcttacagtaatttttgccatgtcaaaacaatggcttttacattgaaagattaatagaaactctacatatgttaatttttttatagaacctgactcaaatcaaggtactctccattttattgccttacctgaatcagtcctttttggttggtaatagatttttttatacacccacgtttgatttaaaagtaaattctagttcttaagcacttttaacaaatccagaagcacatttttctgcacaaacaagttacaaagttcaaaagtgtttcttgtgcattagctttgagattc

SEQ ID NO: 16513 - DNA, 1113 bp, Homo sapiens
catgagatggtatctcattttggttttgatttgcatttctctaatgactagtaatgatgagcttcttttcgtatgtttgttggccacataaatgtcttcttttgagaagtgtctgttcatatccctcgcccactttttgatggggttgtttttttcttcaaatttatttaagttccttgtagattctggatattagccctttgtcagatggataggttgcaaaaattttctcccattctgtaggttgcctgttcactctgatgatagtttcttttgctgtgtagaagctctttagtttaattagctcctatttgtcaattttggcttttgttgccattgcttttggtgttttagtcatgaagtctttgcccatgcctatgtcctgaatggtattgcctagatgttcttctagtgtttttatggttttaggtcttacatttaagtctttaatccatcttgagttaatttttgtataaggtgtaaggaaggggtccagttttagttttctgcatatgactagccagttttctgaacaccatttattaaatagtgaatcatattcccattgcttgtttttgtcagagttgtcaaagatcagatcgttgtagatgtgtggtgttatttctgagccctctgttctgttccattggtctgtatatctgttttggtaccagtaccatgctgttttggttactgtagccttgtagtatagtttgaagtcaggtagcatgatgcctccagcttttttctttttggttaggattgtcctggctatacaggctctttattggttccatatgaaatttaaagtagttttttctcactctgtgaagaaagtcagtggtagcttgatggggatagcattgaatctctaaattactttgggcaatatgggcattttcacgatatcgattcttcctatccttgagcatggaatgtttttccatttgtttgtgtcctctcttatttccttgagcagtggtatgtagtactccttgaagaggtccttcacatcccttgtaagttgtattcttaggtattttattctcttagtagcaattgtgaatgggagttcactcatgatttggctttctgtttgtctgttattggtgt

SEQ ID NO: 16514 - DNA, 1037 bp, Homo sapiens
tattctgtaagcttttctccacctttaattttttttttaactttttaagctttttgttaaaaactaaaacacagtcacacacattagcctaggcctatacagagtcaagataatatcactgtcttccacctccacatctcgtcccactgcaaggtcttcagggcagtaatacatgtggagctgtcatttcctatgacaacagtgcctccttctggaatacgtcctgaaggacctgcctgaggctgttttacagttaacttttttttttttttaataagtaggaggggtaacctctaaaattacaattaaaagtataggatagtaaatcataagccagtaacatagtcattcattgtcattgccaagtatgcattgtacgtgattgtatgtgctatacttttatacgactggcactgcaataggcttgtttacaacagcatcaccacagacatttgagtaatgcgttgtgctacacattaggcagtaggaattttgtagctctgttaatcttctggcaccactgttgcatatgcttactgtgcgtgtcaccacgcctggctgtccttgaccaaagtgttatgtggtgcttgactgcataatcataacccaagtgagtatgtgaggtgttctgtgagagcagaatgggtagattgctgtaggggttctgccagtgggagggatcaaggaggcttccagaagcaggtggtatttaagcccttgaaggatgggaagcatatgagagatatggatgagtaatatcactggctgaaggaacatagaaacacaggcacagagccaggaaatcccagagcatgttggagaaatagtaatcattttgcaagcaaaggttatgtgcagggaagtcatgggaacaaagggtggggcgcattcaggccaggctaaagagtctgggcttagctcctgtacacagaaaatggtagctgttactcagatgtcatcgagcagaggtgaatgtggccctcctgtgtggggagacactggaagcgggagaccactttagagtccaggcaagaaat

SEQ ID NO: 16515 - DNA, 1018 bp, Homo sapiens
cttgatacagagatcgaagaggatataaaataagataaaaaataaaaaatggaaaatttgatagcttaagccactaaattgcccttaaggtggagtgcaagtcagtaacatttcattttgcagcatgtataaaataatttctgttttaaggctgtctttaactgttgctcttcatttctctgcaggtcttttagataaccctgaacttcgtgtggtccttgtctttggttataattgctgtaaggtgggagccagtaattatctgcagcaagtagtcagcactttcagtgatatgaatatcatcttggctggaggccaggtggacaacctgtcatcactgacttctgaaaagtatgtcttgtgtgcttctgatttcgtctgtgaatgaagggaaatggtctcaggttttgtcactttggggttaacaatttaaaaaacgtgtttaaagaattattaagataatagttcattccattttgtagtagacattggctaaggggcttactgaacataattctgcttacggttgaataattacatttttatatatattgtccttcaagaacttccttgagtcacattctccttaaaatttgacattgcctgttgatctttcctttgacagatgtggtactctgtgtgacctcaatgtgtcacctcctttctagtttcctcctttaaaggaaacacatggttagagtgtatctttatggcaaaacttctcagagcttctaatatgcccagtgctgtggaaatctggaaggagaatagcattacctgtgacagttcccaaatgtgtttggtcacaaaacttttttccacagaatgtcttgcaagtcgtactggtttttggaaattctgtattagatcttttgaaaggctttttcaagcttaaaaattgtggatcttttttgttactaaggcttttgctttcaaagataaaaatatttgctcttctgtcttgggagccattacttcctttccatcttgaatgaaaatacatatcattttgagtttg

SEQ ID NO: 16516 - DNA, 1670 bp, Homo sapiens
tggttggactgtcatttagtggacaccgaatccagagtgccactgtgctcctcaacgaggacgtcagtgatgagaagactgctgaggctgcgatgcagcgcctcaaagcggccaacattccagagcataacaccattggcttcatgtttgcatgcgttggcaggggctttcagtattacagagccaaggggaatgttgaggctgatgcatttagaaagttttttcctagtgttcccttattcggcttctttggaaatggagaaattggatgtgatcggatagtcactgggaactttatattgaggaaatgtaatgaggtaaaagatgatgatctgtttcatagctatacaacaataatggcactcatacatctggggtcatctaaataataattaaagtggctttcataatatgtaacttttgggttctgcctttttcagaaaatggaaacttgggccatgtgtatttcaaacaaaaataactttagatatatcttttttgtagctttgattgatgctctaagatcacatgagggtagtatttaatatattagatgaaggacaactttggacataacactgactaggagttgagagcttttgcatcaggcagaagcaaactgattatagttgtgttgcaccagatcatgtagctgctgtgtaacatgaccttaaatagtcttcctgcataggaagagcaaaagggtattcatcaataggatatagatttaagacattccctgactaccccttgcgttgttaggtgatgtcttttagcagaatcatgaagaccttttttctcccttaataaaggagaaaaatatactgatggctggagaaatttttctctgcctttcagttttatgaattttttcagaagtaacaatattattattgactttttacttatttgataaaaattaaagaactatttttgttttggtcagataaattgacaagactaatcagtattttattataagtaaaagatttttcttctttccttaaaaatatttttttttcacctaggtctaaatagctaactaactggtagaccagagtattacatcatcttattttggttttataccaataaaacatagcgtggaactcattcaggtaatgttttgcatttcattgcttttggatgaacaaaggaagtaaactaatcctttataaatgaaaacccagaatagttggtatgtcagctagtcattcctgtcatattcccagtagaatgattttcaagtttgaatttctgtacaaatatctaaataagagatgtgcagagagcaccaattttccttcaatatccattctttacttttcacataatgatagaacctttgatttttcaagtgggtatgcctcctagaataaagactacatttcccagtctcctgtgcaggtatgactgtgttctggacaatggaatgtgaggggaaacgattttttgtgtccttaaaatggcatgaccatttatttgcccctttctccatcctgttgcttggaatgtggatctggtagtgagccatcttggaccctgaagaggaggcaacacaccattgtagaagaaaaacaacagaaggatcctggtccctgtacgacctcattgaagaaacaccataagtggcgtggactatctacctccagactgttttacaagagaga

SEQ ID NO: 16517 - DNA, 1821 bp, Homo sapiens
attgtccctgatattaaccagaattggttgaatagtagaggaaaagggatttttaaaactgaaaatatgaacaaaatgagccttagaattgaatggattattttaaacaaattaatactcatataaaatgttttgctgcttctcaaagagtctgatacagggtaatttcatacaatatttgatgttgttaaagcattcctttttatagctgagcctttggagcttgttatgaacagtaaaatcatttagtcacatggttgtaaccttagtgcaaagtaaaaagggaaaagttgacctaatagaaacaatagtagtattgataagaacaaaagtcatcctccctgcctctcagaggccctgaagtcctgtgaggaagggaaatagtaatttaaccaaagttaaatctgtgtaactcatttattacaattttgaaaggcttgtcttagaagcattaaaggagtattagctaaaaacaaactaaattcctagagatgacaatcattgtagtcctctgtgaaactgaaaatgatcacatgaaaaaaatgtgagcataaaaaagagaagtaaaggtgtaccattagcctacatactgagctgacgatcagatcatagaatactttatttaatcaagacatttaaaaatacttatttcatctacatactttcaaagcaaaataatttctggggctagtttcctttgtataaggcttaagcaaggaatatatttccatgccctttgatccaagtaaaatctaaggaagagggaaagtaaaccttgaaattaagacctagaaatagatccacccttgcagactgataaaagtgggcaatctagtaggccagttcacattacagttatctcagttttgcttaaagcaaaccctaaccctcaacctacgaggccagatagcaaaagacgtgcaactggtttatattgcaaatttaacaaagtgaacatgcaaagaattacaatagaaataaacttttacaaatctgagaactttctttttttttgagacggagtcccgctctttagcccaggccggattgcaatggcacaatcttggctcactgcaagctccgcctcccaggttcacgccattctcctgcctcagcctcccgagtagctgggactacaggcgcccgccaccgcgcccggctaattttttgtatttttagtagagacggggtttcaccgtgttagccaagatggtctcgatctcctgaccttgtgatccgcccgcctcggcctcccaaagtgctgggattacaggcatgagccactgcgcccagccacaaatctgagaactttctatgcaatctgcagaaatttttaagaatataaatatgcttttgtcattttatacccagtctggcccaggtttgcactgccataaattcagttttaatgggaacagaagactccagatcctcttgatgggaagaaatcatgaaattttagatgattgacttggttttcatttgtagaaactgggtatgagttggcttaatgaaaatcctaaaataataaaataagcattagtaataatatccttgttaaatgaacaaagtgaatacgatataaagaatgtgataccagaaagttactttaatattgaccctatatagggaagaataatcaaatatttgcaaaatatgttatttttgttttatatatttaacttctaccctatgccacaactgaagacaggttacaagaacatgtgctactacaaagtaggaaactggcagaagccaataagtatcacttaatattttggtatggaaacttttttttttttgagagagttttgctcttgt

SEQ ID NO: 16518 - DNA, 1639 bp, Homo sapiens
tagaaaaagaaaagacatctaagttggaaagtaagaagtaaaatcctatatgttcacaaatgatatgatctttagacaacccgaaagattccacaccaaaaaaaaaaaataactgttaattcagtaaggtagcaggatacaaagtcaacccacaaaagtcagttgcattcctatacactaacaatgaacaacctgagaaggaaattacaagaacagtcccatttaccatagcgtcaaaaagaataaaatgcacagaaattagcttacccaaggtggtaaatggcttgtacaatgaaaactacaaaacattgcttcaataaagataaaaataaacggaaatacatctcatgttcatggattggaaaatctaatgttaatatgtcagtactactcaaagtgatgtgcagattcactacagtctctatcagaatcctaggatttttttttttttttttgcagaaatagaaaaacccatcctgaatttcatgtggaatctgaagggatcccaaatagccaagtcagtcttgagaaagaagaacaaattggaggacttaaacctgcagagtttaaaacttactataatgctacagtaatcaaaacaatgtgattctggcataaaggcagacggatagaccaatgggatagactggagaacctagaaataaaccctctcatatgtaggtaaatgatttttgacaagggtgccaaggctattccaaggatagttttttcaacaaataatgatgggaaagctggataaccacatggctaactaacaaagttgcaacctcactcatttgcaaaaattaactcaaaatggaccaaagacctaaatgtgagagctaaaaccataaaactcttaggatgtggcagtggtttcttggatatgacaccaaattcacagacaacgaaagaaaaaataggcaaattatacttcattaaaattttgtgcatcaaagaacactatcaacagagtaaaaagattacctatggagtgggaggaaataatatgcagttcacgtacctaataaggattaaacatccagaatacatacaaaactcccaaaatgcaacaacagtgtaaaaacctgatttaaaaaatggcaaaggatttggatagatctccagagaggacatgcagatagccagtgagcacaggaaaaaatgcttagcatcactaaacagtaaggaaatgcaaatcaaaaccacattgagataccacttcatacccactgggatagctcttattaaaattaaaaaaacacacaagtgttggcaaggatgtggagaaattggaactcttattactgatggaaatatagtggtatgcagctgctgtagaaaacagtatggtgattttccaattaaatatagaattgtcatttgattcagcaattgcatttctgggtatatacacaaaataattgaaagcggaggcttgagggtatatttgtataccagtgttcactgcagcattattcaccgtagtcaaaaggtagaaacaacccaaatacccaacagatgaatggatagacaaaatgtgttatatccatacaatggaatattattcagccataaaaaggaaatccttctacatactacatcatggatgaacctttcagacattaagtaaatcaca

SEQ ID NO: 16519 - DNA, 1070 bp, Homo sapiens
tttcgccttgcaaagtcaaaattggacccattaaacacaaaaactctactcctttacagctttgcactacccccactttatgatattgacacttcaaattaatgcttatataatattttattttataatatgttttaatgtattatatgtcgtctttgctgtggacatcaaagaggcctgtggaatgagaatgtcgagattaaggggataggaaataaactggaaagggagaatttagggccttgtagaccatggtgaggatttgaatttcataaaatttattgggacaccttggagtattgacagcagaggagtggcatgactgagatggtttgagaagagtcacttggctgtgatgtgatggtagaccacatggggtgaggaggagacagaaaggcacttagagggctgtttcagtaacccaggtaagagatggggtagcttgaaccagggtgctgtcagtgtgggacatggggttggattctggatatattttgaaggtggagctggtaggatttgctgatggattggttgtggggtgggagagaaagaaagaagtcaagattaacttcaaggtgtttggcctgaacaattggagggataaaattgccatttattccagtggagatagaggaggagcagattttaagtagggggaaataaagagttctgtttcaatcatgttacattttacaatctgtgagacatgtaattgaagatgtcaagtagacagttggatatgcaaatctgaagttctggggagaagatggggctggagacagaaattttagagccagggtatgtggatgacattttgagccatgacattgaatgagctcacctaggccctgggagagaaggtagatggagaagagaaaggggctgagtaatgagccctagggcatagcaacagttagaggtcaagaggaggaggaagacccagaggaggaaattgagaaagaacattcagtgaagggagaggaaaaccagatggtgtggtctcctgaaagctaggcaaaatagtgtttcaaggagctgtaagtgattggttgtgtctaatgcacctaaga

SEQ ID NO: 16520 - DNA, 1032 bp, Homo sapiens
cccagtgagatgaaccggatacctcagttggaaatgcagaaatcacccatcttctgtgtcgacctcgctgggagctgcagaccggagctgttcctatttggccatcttgccaacaatcccaggtgctatttttaaacccattttccaaataaggaaactgaggtgtgaagaggcgaagtagcctgcccagagtcatagagctggaaaatggaagcattgagattggcaccctggttgtcaggccccagaatgtacgggtgtgctctgctgtcctgccttcatgggagaggcagggagacgtatttgattgccaacagcctgggttagtccattttcacagtgctataaagaactattcttacctgagactgggtaatgtataaagaaaagaggtttaattgactcacagttctgcaggcttaaggaaacttacaatcatggtggaaggcaaagaggaagcaagcacatcttaccaccacaaagcaggagagggagagagagaggagacagaggagagagaaaaagaaagtgccacacaaatttaaaccgttagatctcatgagaattcattcactatcatgagaacagcaagggggaaatctgcccctgtgatccaatcacctcccaccaggcccctccctcaacacatggggattacaagttgagatgagatttgggtggggacacagagggaaacatatcactgcctcatacgacattctagagggcaggagatactcacccaagttgacgtagtaagacaagtgaattgtaaaagtaacccaaggtggtttcctctgcaggtcggactagagatgggagactgggaggaaaacttatattttctgttattttatatactcctgaaccatttgaattgttattactatgtaaatggattactttcataatttaaaaatcctatccctccttcaaggccttgttaaaaagtttcctccaaaagcttctctaattccctcactaaaaaatgggttctccatcctttgagctcctgtggagtttgatttctcc

SEQ ID NO: 16521 - DNA, 1079 bp, Homo sapiens
cttttcaactttgagaagactgaagcacagagctgcatgagctgcaggtttgcatataagcccagctgtgagcagtggctcattcctgtaatcccagcactttggaaggccgaggtgggcagatcacctgaggtcaggagttcgagaccagcctggccaacatgatgaaaccccatctctacaaaaatacaaaaattagccgggcatggtgacacacacctgtagccccagctatttgggagcctgaggcaggagaattgcttgaacctgggagacagaggttgcagtgagctgagattgcaccactgcactccagcctgggcaacagagtaagactttgtctcaaaaaagaaaagaaaagaaaagaaaaaaaaagtggccagctccatttcttaatgagatattttcaccctttatgacgctccccagcctcttgaatgaggttgtgtttcgccatgaagcctagagccagggagagagcccgggaggagtgacgctggtgggtttgagagcagggctttggccggggtccaccctcttgtcccctcccactctgagcctctcttctccccacttttgtccccacaggtctaactggctgaagccgtgctgtgggaagagagcagccgtgtggcaggtatttttgctcagtgcaagtctcaacagtttcctggtagcctgtgtaatattggtggtgattctcctgactctggaacttctaatagatataaagcttctccagtgtgagtagcaagagagatacatatgccaatacatatgatgtcaatattcaatgtgcatctgcattcatcaggggtccccaacctgcaggctgtgatctgcccccgccgatgctgctgcccagcctcaggccctggggctcatggggatggccgctggggaggaaatacatctggcagcttctctctctgtcacccccagcctcagtttgcccctctctgcccaatgtggcctctgcagtcccctccccagcattccatgatcagaaactgatgagatgaaaaacgttggggacccctgtatgcattttttttaattgctcccatttggaattttcc

SEQ ID NO: 16522 - DNA, 1030 bp, Homo sapiens
ctccagttgtacctgaggccatttgattatgtctcacgtttctcttagatcctactctgctccactattcattctctctctctctccctgtctccttttttaatggctgtaagttttgatgtttttctatagacctgtcttcaacaaccctactacgtccaatctcctgttaaacccatccaaccaactactcaatttcagatactgtatatcaagattctaaaagtttgatttgattctttttatagagtctaactctctgctgaaacactacgctcattttgtctgtctttctcccctatttttgttcacatattaattgtagttattttgaagtccttgtttgttcactcaaatatttacccaggtcagcttctattaactgttttatggcttgataaccacatgtttttctgcttacttgcatgatgaatgattctcatggtgtgctacacatcattgatgatgcattttagaggctgtggattctgttatccttctctgaagagatggttctctgggaacggggcattttggcagggagtagaggatggccctcaagacagcagcaagccttaactgcacttacacttcattccctccaggtggggtcctggagctggtacagagctcgtcattgacttggaattcagtgagtccatttgccttattggacacacagtgaaaccaaggcccggggaagaaaagaggctcacccaaagtcagggcaagggaggggtgatgggccaagagctcagcctccagcccctgcttttccctctggtgactttctgttctcctggcccctgctaccatcaagctgccctggattctgttgggctgagtcacttccatcttgcttataaggctgcaagttccctggctcaaggtcttgggggctagaagccaggggcgtgggctgtggcccctgctttgcttctgaagcaccatgtggtcctggcctttcccccatcctccctcccagcacaggaggctccttcccacctccgggcctcagttccccatctga

SEQ ID NO: 16523 - DNA, 1048 bp, Homo sapiens
gcccgggaatgcccgcaggcgggtcaccgcagtctcctggtggccacaaagtgtcctgggcgcgcgccggagccgtagcagccagggagatgagggcggccgcaggcccagcgctgacaccgccgcaccttgggcccgcaggctgttcggcatcaagtgcgccaagtgccaggtgggcttcagcagcagcgacctggtgatgagggcgcgggacagcgtgtaccacatcgagtgcttccgctgctccgtgtgcagccgccagctgctgcctggggacgagttctcgctgcgggagcacgagctgctctgccgcgccgaccacggcctcctgctcgagcgcgccgcggccggcagcccgcgcagccccggcccgcttcccggcgcccgcggcctgcatctgcccggtaagcgcgccggggcctgtgccggggtgagcggggtgtatgtgcgtgcgtgtgtgtaggggtacgcttgtgtccctaacgagaagttgtcagttgtgtgtggttccgtctgccgggatagtgtttttctgtatcagtgcggaactgtgtgctgggaacaaggctgtgtgtattctcgtgtgctcgggagaaactgcgtgtgtatgagtgtgtgagcacggagaattgtgcagaatcgtgttctccatgaccaggaacatgcagggcacagtgctaggagcagaagagtggatgacaacagggaatcttaagtggtgtccgtcttggggcttgtattaggaatttcttggaggaatatgtgttattgtcagagggtaaggtttgcccaggggtatgtgtgtaagtaacacagctccaaactgggagctgggcaggagcttggtcagccaggagccaagaacccaacaaagaggggtttttgccatcttgttttgaggcccagtttgatgaacaatttagccaggttcttctgggggagggggagtatcaatgcatagtggactgtcactggaatattctgggtcctaatcagcagctgcccagagatggggtctgagtgtataatgggcaggtacggctgaaca

SEQ ID NO: 16524 - DNA, 1063 bp, Homo sapiens
gttaaattctttgaagattcataaattaaacttattttgatatctgagtataaaatggagatatccacttcaaataaaccatgacacaatttaggtaaataaggtgattgatctatatgtatcaatctatctgtagtataaaatatatgacatatattttaaccacaatccagtttgtcctttaacatattcagacattaacccctatataaattacaaaaagatgtttttggactccacaatgagaaaaaaattagcaaccaggcaagcacagtggtgcgcgcctgtagtcccagctatttggaaggctgaagtcgggggaatgcttgagcccaggagttagaggctatagtttgctatgatcgcacctgtgagtagccattgcactccaggataggcaacatagagagaccctgtctcaaaaaaaacaaaaaacaaaaaacaaaaaaaagaacaaactaaaatgacagtcctatattctatccttaagttagccatgaaaggggaaaactgtatgtaaatgatgacgttttctgaaagtctatttaatttaaaacatgaatgtagttttaagtatatctttaaaattattcaaatatagcacagcctatctaacaaagcagtaggaatgaatgataggagctttactggccagtgacataggtaaagtaaacaattgcagctagacaggcagtaggtatttgaaaaccaaaattcttcctgggcaataggaatgtggtattaccaagagctgcttttatatttaaaggtttacctggacaatgaactcaaaatatcttgagacattttatgaggacttaatctaggcaaaaggggaacaaatacccaaggtgcaaactggcaacttaggcatcatcattaaaaaaaaaatcaagcaacatattatgagctgtcattaacatagtgatgaccctttctgagcaaaggagagaccaattccccctttgctgttctgtgggttaagcctactgtaactgggggaaagcatgaaaatcagggaagatggtcccttggaaaagaaagaaggttgagacttccacag

SEQ ID NO: 16525 - DNA, 1037 bp, Homo sapiens
gcttggacttttctgaacctcagtttcctcacctgtataatagtgatgattataattgcattgttttgaagattagaggcaacatgtacagaggaacctgataaatggtatactcatgctgtcctcacaaatattcgtgttcgtccctccctttgtttcctttaacgtagtttagtaaatatttttatgaatagttttttgtttttttttttgaggcagagtctcgctcttgtcacccatgttggcgtgcagtagtgtgatcttggctcactacagcctctgccacccaggttcaagtgattcttctgtctcagcctcccaagtagctgggattacaggcactggccaccatgcccggctaatttttgtatttttagtagagacggggttttacccgagaccaggctggtctcgaaatcctgaccttaggtgatccgcctgcctcagcctcccaaagtgctgggattacaggcgtgagccactgagcccagccaaatagattttttaaaagttgattgaaaagtgaacatttgaattttagaaactttcccatgccttcaggtaccaagttaagacagatagctgttgcaggaagggcataaattgctacccataacttcgttaaaatttactccagatgttttaacaacatatttaaaggtaatatactgaagcagtattctcagtcacttgaataccttttcagaatttaggccatatctacttaaccatctattattttcttactatagttttaattcaactcacataaaatttattttaaaggaagactttatgtcaccttcataaataaaaaacactgttttttctcatacatactaaaataaatagctatcaaaatatttatgcttcctgagagatctgtggtagttagcaaaggttttctgcaagattttggataacattttttttaaaagtaaagtgctattttggccagttggtaattcattcaacaaatacttacagagccaggaactttccaggcatttgatgtacatcagtgaacagaacatacc

SEQ ID NO: 16526 - DNA, 1028 bp, Homo sapiens
cccgtctctactaaaaatacaaaaaattagccgggtgtggtggcacatgcctgtagttccaactactcaggaggctgaggcaggagaatcgtttgaaccgggaggcagaggttgcagtgagctgagatcgcaccactgcacactccagcatgggtgaaagagcgagactccatctcaaaaaaaaataattaaaagcttcatgagctcttctaaacagcctttcccacttcctaccccatttctattaatacaactaggccaattctcagtatttgcaaacatcaaagattttgccttttcagagaaggtttggaaatccttactcttaagtatcagaattaacgtcacatgcgttgtgttctgggaaattctcataggtgaactcagttcatggattcagatgtcttttaagcattatgctatgcaagaagcaaaacaacagtttgttgaatatgataaaaacagtgatgatactgtgacttgggatgaatataacattcagatgtatgatcgtgtgattgactttgatgagaacactgctctggatgatgcagaagaggagtcctttaggaaggtgagttcatgtgcacaagctgtttcttttgatcatgtcagttcactttaccttcctgcatgaatgagcacattgagggcctgaggtcataagctggattgtcttgttctctaggaaatcacctgttccacttcagcagtcattttgatggtttcctttctggccagatttaggactcttattctaaattacctacatgatccttctatctgtttttctcggctgcatcatttaattgtcctcatttccagagttgctttttaaatgtgttttgaatgagtatctcaatattttaatatcattgaataatcagttttatctttattaagaaggccattatggcccattcccatttttaaacacatagttttatatactcacttaaaaaaactgcggtttccacatctgtggattcaaacaactgagaatcgtaagtatccaaaaaagtaagtat

SEQ ID NO: 16527 - DNA, 1611 bp, Homo sapiens
atttggtgctgttgataggaaaagaagttcaaaatcttaagccaaagaaagaagtaatggagttatttgggattgatgcattactatgttttgaatttacgaactgtttagattgtcagggagacgaggaagttaagattgtgtcatgtattaatttgagagtacagtgaatagaataatagtttgtatttacctacagggactcaaaacaggttataataatttttcattgccttgatatatcctggattggatttgagtggagagagacagaacccagcagaaatgaagaaaggagataatgggaaaagcagtagacggacctggttacaacgtgtaacatttttagatacttaaacaataatgagtacttgtacacctggatgattttgacaagtcaaatcacattaaattgtgaacatcttgctgaaaatacttattacacttgacacttttttgttttattttgaaggcgcttcatctaattgatgaaatggatttgaatggtgacaaaaagctctctgaagaagagattctggaaaacccggacttgtttctcaccagtgaagccacagattatggcagacagctccatgatgactatttctatcatgatgagctttaatctctgagcctgtctcagtagagtactggctccttttataatttgttaccagctttacttttgtgataaaatattgatgttgtattttacactcttaagtcttaaccacagtcagaattatcttaatgtagattataattttggtcttttaggaaaaaaaaacaaaaatctgatatttatttcaaaatgtattgaagcaacaaaatattaatattgtgccatatgacaacaaagtctttcctaaatactccatctgtttagtactgtattgtggaatatttgagttctatttccatacttgaaaacatggaggattttagagatgcctgaacaatattatttaagtagtatgtgaccgagctataaatttttgtttttgttctaagtagatttaatttgggaactgacaggacaatgtttttaggtttagcattttgtttaaaaacctttaaagaaacctttagaaggacttagacctcacatattaatgttgagaagttctgcttaattttaaaatggtttctataaagggttttattgtatgaaatagaactttatatttttgcatatgtatagatagtaattatatttaatgtataactatagcattatggtgagtggaatttgacattgtccaaacctttttcatttttgagtgattaaaaatgaaatgtcctttgtatatgtttgtttgcttttctttaactttcagataaatattgaatttagcataggttttgtggtattgtacattatcttgcctcatccattcctttatgtggatagttcccaaaactgtcaaattattcttgctgcattttcttattttttttttaaataagagaatcatgttataatataattgaatgtgcacctgacacattttaataattggtgttgtagcaaatgtggttttgctctttggggctataaataatcttgagtaacgcaggttggaattaccaatagagctggtcagttatcaa

SEQ ID NO: 16528 - DNA, 1026 bp, Homo sapiens
ctcctcttgtttgtttttattgcgttgttgtaggtagagtttatgccttccctaaaaggctgcagactaggtcttattccactctgtgctgtcatacctggcacaagaccattcacatcataggtattcagtaaatatttgtggacgtgagctggctcttggagtatgacaaaactgatcaataacttttgtccacaattatgcccagcatcagcacaatggctatcatacattagacactcaaatatctataaaatgaaagagtgaatagtaagtcatcattctctcatttgggagcttcttagggtgtcagataagcatatattaagcacctcctatataactggagctgtaagaactgatctctgctcctcaatttaattggaaaaaagtaaattgttactaatatctgcagactttgaagatggtaggtgtttgagtagggatggcatggagagcttaatatagaattgtttgcattgtgagagataccctctgctacctgaactcagaaaccaaatagatttttatatcaaatatttggacacttaacttgtatttccactcctaggtatatatccaagagaacttaaaacatgttcacacaaaaacttgcacacaaatatttgtagcagccttatttgtaaaaggcaaactcaaatgtccattaattattggatgactaaacaaaatgcgatatagccatacaatggaatattattcagcaacaaagagaaacaaagtagcaatacctgctgtaacatggataaaacttgaaaatattaaagtgaaagaagtcacatacaaaaggcaacctattatgtgattccatttatttaagatgtctagattaggcaaaactaatagagacagaaagtacattagtggatgggaatgggagtgactgctagtatggagtttcctttggaagtgatgaaaatgtgccagaattagatagtggtggtggttgcataaccttatatactaaaatatcttgtatactaatatacagttgacacctgaaca

SEQ ID NO: 16529 - DNA, 1049 bp, Homo sapiens
cactggtgaattcttacaaatatttaaagaagaaataaccccagtgttactcaaactcttcaatagaatacaagtcgttttatgagatcatctaagccttaatgccaagagctggcagtgatattttgagagaagatatttacagagcaatctctttcgtgaacctaaatgtgttacttgggaatataggaactctaaaagaatctatagacaaactattagaattaataagcaaacttacacgagcaaccaacagttagaaagtgaaatttttaaaatgccatttacaatagaatcaaacaaatcaaatttaagtcttgtaagatctttacacagaaaactataaaacatagagagaaacaagatataataggtagtcatagattggaagacttggtattgtaaagatatcatttctctccaaattgctctatagattaaatggaatcctaataaaatctcaggtgatttgtgtacatgatggaaggagggacttacaagttgattctaaaattcacatagacatgaaaaggactaagtagtcaagacaaacttgaagaacaaagttgtaagactttatcagataacaggatttattataaagctacagtaattacaatgtggtaatggcgcaaggatagacagatctgtggaacataattgagagcccagaaacaatcccatatgtatgtaatcaatttatgacaacagtagcatccaccacagtaggggagggatggatttttcattgaatggtgcctggttttgtgtggaaggggcagggaatgaatcttgaacccttacctcacaacatatacaaaaatcaggtctagttggattatagagctaaatgtgaaagaaaaatttagggagaaactggaaaacacctttatgatcttggagtaggtaatgatccgaaaaggaaggagtttatgaaattaaaaacttcataaactcatgaaattggagtttatgaaattaaaaacttcataaactcatgaaattggagtttatgaaattaaaaacttatcttcaaaagacattatgag

SEQ ID NO: 16530 - DNA, 1024 bp, Homo sapiens
tcccacctcagcccagcctccctactagctgggatcacaggcgcgtgcccccatgcccagataatttttgtatttttggtagagatggggtttcgccatgttgccccggctggtctcaaattcctaagatcaagcaattcacctgcctcagcctcccaaagtgttgggattacaagtgtgagccaacatgcccgacctgtatctattcttttaatatacttataatccatatactttctcataaatgtttcattgataactttgtaatataatttttaaaatagctttcacattcttttattgtatgcagagcttgtaaagaaatatttgatcctcacggtagccctttgaggtaaatagaataagttttagccccattttacatataagggtattgaagcagatgctcatataacgcctctacttggtactgtggtagacttctgttcatgacagaagtacttgctaacacaggcaaatgagtgcatttaatgttgaaagaacaaaacaaatcgttctgtagattcttattccctggacttagtccttccttcctgggctaagtgaacccttgaacagcactaggcaatgctgaaaatacagattttgtcagattttagtaagtgctctaaacaccaagaatcttgaagtgatataatgaaagttacagctaatgtagttttaaacttgttttttctttgttatttcaccttgaaaaaaagaaacaatcagtagcttttaaacaaaaaagattaaatctaaccacttgttctgaattactatggtagggtgagaactgaggctctgtgtatggaagttgaagttttatcatgttgagtaggttatcaaaggagaaatgttcctaggaaactggtcttgtagagcttaaatgtgtcaaatgtgaattctatggctatgtgtaactttctgaagtcctgagcattgttattaggtttcaaaggcaaaatatagcaaaataattctgagtttttcaatttatttctgtttaaactgtaaagcatgt

SEQ ID NO: 16531 - DNA, 1074 bp, Homo sapiens
gttcggggtaagcagtacagtagcatcaccagtgcacctgtgccagctgttaacaacaaacaatggcaagttgaataaactaattatcgtgtgccagtgtttttattgtgacccattacgtgaagtcccatgtggaatttttgtattttgtattttcatacaatgaaggagagttcttgttccacatccttgccagcatttggtggtatcagtgtttgggatttagggcattctaataggtgtgtagtggtagctcactattgtatgaatttcctcttgggtcatcaagtgggcactcaggaaatttcagattttggagcattttgaatttctgattttcagattagggatgctcaatttatatagccttttcagattgacttctttcacttagtaatatgcactaagtttcctccatgtctttccatggcttcataactcatatctttttagcagtgaataatattctattatctgaatgtatcacagttcagccactcacctactgaaggacatcttggttatgcccaagttttggcaattatgaataaagctactataaacatctgtgtgcaggtttttgtgtggacgtaagttttccattcatttgggtaaatattaaggtaagaagtgcgattgctggattgtatggcaagagtatgtttaattttgtaaaaaacttcctgtcttttgaaatgtctgtactgttttgtatccccacataatgaaggagagttcctgttgctccgcatcattgtcagcacttagtggtgtcagtgtttgggattttggccattctaataggtttgtagtggtagatcattattgttttaatttgcagttatagttggccctgtgtatccttgggttctgcatccacaaattcaatcagtttggggtggaaaatacagtattcgagagacacagaacctatggatacagggccgactttttgtaatcatgggttctgcagggccaattgtgggcatctacaaattttgagctcgcagtgtactggaacagacaaaaaacaagataaaataagtaaaatgaaaaaagatacatagtttgaag

SEQ ID NO: 16532 - DNA, 1888 bp, Homo sapiens
ccctttcagtgaaagggtaatcagatccttatgattttaatcctttgagctatccttggagcagcttaagtacacccaagcccccagaaggatcctctccatgccgtgaaatgtgctcagtaatggaagagcgctgatggtttttattaccactcttccattaagtagaatttctctgttacctttcagagactgaacagtttcattgaattgctttaatgtttcttattttgtgctctgagaatctgtaccaaggggcagtgtgttaatgcacctatgtggtgctgtcctctgcccttacataattagcttgatttggactgctctggcaaagaagagaaaagattaccagtctgaggagagtcaagactttggaggagagggatctttgtaccatggtaatgggagccaagcgtctccactttacccatctaactggcagatattgagacgtatagcttaggtaactgatctcatgtaactgcagttaagttggagattgaataagataggatgataatgtcctaagtctttatgctgtcatctgtggacttatgtttatatctgttatgccttgtgcatgttgggattgtgtgtcattaagttttgttttcctgcagcagcccagtaacagttaaagcatatgggaagccagcaaatttgagagaaagccactgcgaaatatggctaagattccttctggaaccagcctttcttgttcatacattagtttccattgaaatcccctaggaactggctcgaggtagagctttgcatgttgaaacttgggactttcgattgataattttgttgttcattttcaaattattctgggaaactttgctttcttttgttaggaagaaaaatacaagtagaaattaagtgctctgaaattacatagcttttcagtgtctttcttgctcagctgccattggcaggtggttcacacagcccagcccccttactaggcggccaccgttatgaatacaggagctcgggtgtcagatttccctcttaagctgtgaactgcttagcttttctactgggcaccaagtcatttttgtgttcaaagatttaaaaaactagtggaggctgggcacggtggctcaagcctgtaatcccagcactttgggaggccaaggcaggtggatcacctgaggtcaggagttcaagaccagcctggccaacatggcgaaaccccgtctctactaaaaaaatacagaaaattagccaggcatggtggtgggcacctgtaatcccagtgacttgggaggctgaggcaggagaattgcttgaacctgggagacagaggttgcagtgagctgagatcgtgccactgtactccaccctgggcaacagagagggactccctctcagaaaaaaaaaaaaaaaaaaaaaaaaaagctagtggtgacaagagtaggaaagatacattctgtctagctttaaacaattgtttataggaatgaaatctaggtattatgtttgcatgtttttcatgttataaaggtcctgggatcttaagatttcactagcagtttcttcatttctcacttcctgccattttaccacctttgttatggaaaattttgaacattatgccaacacacttaaaattaatattcacaatgctttcaacttcaaattcattttagaaacgacagccaaagcatcttgagttattgactttattcttaaagatcattgtggaatatattttgcaatgatcttgtgaggcttttttatttttaatggcttattggtgaattaattttaggctttgttattcttttgtatctcacataatcgtttgctttctaatttttagagcctggttatttctgatttctcggtctcatgtgtttgtttgtttatttttcctgtgtct

SEQ ID NO: 16533 - DNA, 1042 bp, Homo sapiens
ctaggggaagcaggccatgtgcttctcctatttctctggacatctacttggctgtctctgccagggtccacagacttggtctgctctccccactacttagcaaggtttggatgaaccacaaaatgggaggaagccccatcctccaggcctaggaatcagcatcatccatttgtacctctctgaagcccagtggacacctttgggtgctgctacatggttcgagagggcccctctttatcaggactcagagatcaagatcagggcttaggctcaggtggggagcagggttcagtctgtaactagcattggggttcagtctaaaactaagatcagaacttcaactcaggccaggatcaaggatcagtctgtaaccaaggtcagggctcaggctcaggatggaatcaaggttcattccattaacaaaaacagggctcagatttcatcatcatagaagtcaattcatatctcagagcctcggtttcttctccattcaaatgtggaactaggtattgccctgcttgcttcacaaggctttttagaggaatgaatgaaaacaagagtattgggccgggcacagtggctcatgcctgtaatcctagcactttggaaggccgaggcaggtggattgcctgtgctcaggagttcgacgccagcctgggcaacatggtgaaaccccgtctctgctaaaaatagaaacattagtcaggtgtgatggcacgcgcctataatcccagctactagggaagctgaggcaggagaatcgcttgaacctgggaggcggaggttgcggtgagccgagatcgcgccattgcactccagcctgggtgacagagtgagactctttgactcaaaaaaaaaaaaaagagtatctttcttttctataacaacttacactttataaattgcttgcacatactttatcttgtttggtcctcatgataaccaccattttaaagacaataatacaggctcagagaggttaggaagcttattcaaggccgcacagcctgtagacacaggcaggaagtaggggctgggccca

SEQ ID NO: 16534 - DNA, 1037 bp, Homo sapiens
atttccgctacaggggttacttagttttgaaaatttatgcatttaaactgaataaggcctggccatctgtgaaggtaacgccattcttttatgaagtaactactcatagtaagatgttttattcatttgggacatttttttcccccagtaaaaaacattaaagtattactggatgatgccaaataacagtatctctatttaatcttcaactatatatatcttttgcttaatttttacatttgtatatttatttatttacttaatttttttgtgacagagtctcgctctgttgcccaggctggagtgcagtggtgtgatcacagctcactgcagccttgacctcctgagctcaagcagtcctcccacctcagccgcccgagtggctaggactacaggtgtgccaccatgcccaactaattttttaaaaagttttttgtagagatggggtctcactatgtttcccaggctgatctggaatacctaagctcaagcaatccttctgcctctgcctcccaaagtgctgggattacaggcctgacttagccactgtgcctggcctacatttttattattattttaattaatacatgtttaaggccataattcaaaaatactagcatgtggtagatttaaattcagcataggctttatttttatattttttgagagtctcgctctgttgcccaggctggagtgcagtgccgtgatctcggctcactacaacctccgccttctggattcaagctattctcctgcctcagcctcctaagtagctgggattacaggcacacaccacaacgcccagctaatttttgtatttttagtagagacagggtttccccatgttggccaggctggtcttggactcctgacctcaagcgatccgcctgccttggcctcccaaagtgttgggattacaggcctgagactgtaggccagagcaagcataggctttaaagccacagacagaaccaacattgaatctcatctctgctacttactggctagaaggcttgggcaaattttttattcttatt

SEQ ID NO: 16535 - DNA, 1027 bp, Homo sapiens
ctccctgcctccctttgcatcaagagcaccttattctttgcagagtgctgttgtatacactatgagattggatcccgatcctcctgggctgggtagatggtggtggagtggttcctcactttgaaatgaggaactaaatgaaagagcagccgagtaacttgcccaggtggcatctcactgagggctttaaaatctccttggtttagtttagtttgcggatacatcttttatttttgctttttccttttctcagagcttgacaaaagatttgggaggcaatgcaaaatgctcagacttcacagaggaaatctgtcgccgagtaaaagatttagattaacacttctacaactggcatttacatcagtcactctaaatggacaccacatgaacctctgtttagaatacctacgtatgtatgcattggtttgcttgtttcttgacagtacatttttagatctggccttttcttaacaaaatctgtgcaaaagatgcaggtggatgtccctaggtctgttttcaaagaactttttccaagtgcttgttttatttattaagtgtctacctggtaaatgttttttttgtaaactctgagtggactgtatcatttgctattctaaaccattttacacttaagttaaaatagtttctcttcagctgtaaataacaggatacagaattaacaagagaaaatgtctaactttttaagaaaaaccttattttcttcggtttttgaaaaacataatggaaataaaacaggatattgacataatagcacaaaatgacactcttctaaaactaaatgggcacaagagaattttcctgggaaagttcacatcaaaaagagtgaatgtggtatatttctaaatgatatggaaaatagagacagatttgtcctttacagaaattactgagtgtgaataaaaacttcagatccaagaaatatataatgagagatataatttttgttaataagacaaaggtaatatattggatacaaagacacaaatgtattgtgtgttcaattatt

SEQ ID NO: 16536 - DNA, 1026 bp, Homo sapiens
ccctcaggccccgtacaccgaggaacagccagggcaaatggagccatggaagccaccctcaggccccagggcctggagcatccctgaacggacctgcttacaggcagcctcgggcccaacctcgctcactcgccctctggcctggactgtcaacggccctaatgaccccaatccccaacggccctgcgctccaactcaccactgcactgccaggctgcacgtcggaagccgggctccgcgcgactgcgacgcgcaaagatgagctatcgaaggggcggggcatcgcgccggccccgccctcacggctcggagcactccgcagcgcccgttgccgtcgctatggcgggcgcggggcagacgccgacgagggtgggcggagagaggagggaggaagccaggtcctgcttccagaggagtggtagttggaaatttgcttccggaagcgcagacgtttagcttccggcaactgcaggtttagaggtttgtgttgcaatttcattttgtacttttgagattggactaaagctaataacttctgttgctgaaataaattcagtgaaatcgagctttgtctttcaaactgctagtcatgacccattaacgtgacagatatcagtttaataggttgtcaactgactttttttttttttttttttgagggccaggcagagtagctcacgtctgtaatcccaggactttgggagccgaggtgagaggcttgcttgagctctgggtttccagaccagcctgggcaacatagcgagagacctcgtgtctactaaaaataaaaacaattagcacatgcctgtagttccagttacttgggaggctgaggcaggaggatcgcttaagccctggaggttgaggctacattgagccgtgatgacgccactgcactccagcctggggaacagaactagaccccgtctcaaaaaaaaaaaaagagatggggctgggtgtggtggctcatgcctgtaatcccagcattttgggagtcggagtgggtggatcacttgaggttaggag

SEQ ID NO: 16537 - DNA, 1064 bp, Homo sapiens
gagtgctctgacatgatgatagctcactggagccttgaactcctgagctcaggagatcctcccacctcaccctctcaagtagctgatttgggtgactctcttaagtagatctctgaatttgaaactattgctatttttaaggagtggagaaatcagtggtgtctccatgtatgatggaggacagttaacatcagagaattagaatgaacagcataatggaaacatgaatgactatgttgaatgaaggggaagatggtggagagactggcctggctggagtgaaaggtagttttgagagagtacctgttactgggcaacagggcctctggtggtgtaaagcccccaggcaccctttatctcaggtcatcttattcaccctttcttttgtccttcctgtctgcttgcctttttaaccacagtactgcttagtcctccagtagagccgggacttagtgtccaaatcctaccttgcagcctttggaagaaaatcctgtatttaattttttaggagagtttttatcatttagaagaatcacaaaaagacaagaacattgcagatggtacagaaagtctcatttttatgtgtatacaaaaatatatgtaaatatgctacttttaataaaaataaagtatatgttgttttgtaaccctttttttcacttaatatatcatgaacatctttccatgtcattgaatacaggtatcccttgctatctgaatctacttggtttctgagtcagggagcttgagttcaggtagaaagggatacctgtacttctctgtggcttctaatagctgcacaatattgcctgtatgaatgcattgtggtttagttaacagacctttgaatattgaggctgatagtaacttttctctatttataaataaactttgtatgtgctaatacttacatttttgtgcaaacttatcattatatagaattgttggattgaaagtatgttatttcctccaccccatcacacgcttttatttttatactttcactatttactgttggttccagtctttatttttttttttttttttttgagacagagtcttgc

SEQ ID NO: 16538 - DNA, 1026 bp, Homo sapiens
cctagggtcaagtgatcctcttaccttggcctctcaaagtgctgggattacaggcatgagccactgtgcccagccagtaaagttagttttaaaaaagagagaatagttcttaagcagggaggtgatgtggagtggaccagctgcggggacggggtgaaaaaagaacaggattggtgttttcttgggcaaatggggtaaaagaacaaagaggaaataaatgtagggtttggggaagtgagagattgaaccacattgaccctaactgcctaagtaaggaaagcgtggataggctggtgccaacgagtaaggagaaagtccccacagtattgaagaacagatgtggtaagagtggggatcagagaggttctgaagtttaggaagcttgcaagatggtatagttggagcacaagagcgtatgtagaggtgagatggggagagtagggaggaagaaaggaaataaatgggccttcctgaactttatacctgtttgaaagtggggacgtagaattaatattgttgaaaaagcaaaccaaggctggacatagtgtctcctgcctttaatcccagcactttggaaggccaaggctggaggattgctcgaggccagaagttgggagaccatcctgggcaacataggaaaatcccatctctattgaaaaaaaaaagaaaaaaagaaaaaaaccagagcatatgtccatttttcacatctgctaatttactctctattgttgtaactcttctactggaatatctacctgtaggtttaatttaagggttaaatggaataatttatataaagcacctctgcatctgccccttagtcctaaataaacaactgcagatgatattgttggaaaagttgaggaagaaaagatatttgttatctattactgcataacaaaccaaaagcaacagtaaagatttatgacagtcacagtttctgtaggtcaggaatttgcagtggcttagtcgatagtcctggcccaaggcctcactcacatggctgacaggctggcgctccctgat

SEQ ID NO: 16539 - DNA, 1029 bp, Homo sapiens
tttggggaatttttatgtttctgattgaagtaaggatggaaactaatattggttaagtgccaactatttattgtaatttgagagctttacatgtaccaactagatagacgaggtaaggaagatattcttcacatctctgttaggtagctgacagtcccattttagtgagaaaatgtatcaacttagtcactttccaaaggccatacctgtagtaaatacaggctttgaatctagtatttctgataactgtaatcctttttctactttacgtacaactttatgggtctttgtgtgtgaaaaatttcaaacatgaaagtagggaaatacacaacactaagagtgaaccctaatgtaaactgtggggttggggtgattgtgatatgctgatacaggttcatcaattgtaataaatatacagctctggtggggaatgttgatagtgtgggaggctacgtacttgtgggagtagggagtatatgggaaatctctataccttcctctcagttttgctgtgaacctacaacttctctaaaaaaattaagcctctcattatgttggccaggctagtctcaaactcctcacctcaaatgatcctccagcctcacctcccaaagtgctaggattacaagcatgagccaccgttcccagctggtcatcatgctttctcagaggtgccttcaccactcaccccatctaagggtgttattttctgtcctgaaccctactcacctccctcatagcacctgccactgtttctaaatatttatttgtttacttgtttatggtctgaatctcctagtaggcgccagcttcataagagcagataccacgtctcatttgttcacctagtgctggaacatactagaaaagtcaataaatatattcgttttgttgttgttttttgagacagggtctcactcccatttcccgggctggagtgcagtggcaagatcagccttgacttcccagcctcaggtggttctcccatctcagcctcccaaggagctggagccacactctcacaccagg

SEQ ID NO: 16540 - DNA, 1065 bp, Homo sapiens
ctaggctggagtgtagtgatgtgatcatagttcactgcagcatcgacctcctgggctcaagctgttattgtatgcagctattatagtacttacgatactattctttaatcattatcttccctaaaatttttttgagagccagaactatgtcttatttggccttgtaccattggtgtctagcacactgaaggcatttgataaatgcttgttgtatagttggctggatagatgggtggatgaatgtaaaatggcaaaagctactgtggatagctttggggcaacacgaaggcactagggggaaggggctggaactagggaaaggggaaggtgcatcaaaaaaatacatggcaagagtttcacaggcattttccctgaagttcgcttatgcctcaaaaattatctcttattatttttggcatatttgcccaagtacttcagttctcagataatgtttaatgttaattcttattaaacaggatactcctaacttataaagtacattatgaaaaatgaatgtaaactagacagggatactttttaaaatatgaaaatgaaaaagtttatcatttattaagcatgtataaaaaacaatttggactataatttgaccattctttattttttagtggaataccagcaatggtggattttgctgctatgagggaggcagtgaaaactcttggaggtgatcctgagaaagtccatcctgcttgtccgacagatcttacagttgaccattctttacaaattgacttcagtaaatggtacttcaatgcagatatttatagacagccatgcaagttaattggctggaaatgtgtcatgtagaggaaaaggaatagagataatttatggcagagaaaagtatgctaaatttagtattggctagtatataaaagctaaaactggtgaaaagtttatggagtggtggggtttttttcatgttcttgtatttctgctgccgtttttgatagaaatgaataagcctaggacctgctttttggagtgaacctctgtattcagtctttgtttccttttttgttttttaacctacttgtctttcag

SEQ ID NO: 16541 - DNA, 1028 bp, Homo sapiens
tgactttgcataggctatttcttctggaagaatgctttctgccgaccgtgactttgttgaaatgtggctactattaactcatccaagactggcctcagttatcttctgaaagtcttaactcccttgctgagttcagtgtacctcactttgtaagcttactctttcacagggtgttataaatgttgatttttttgtgctttttcattagactgaacttgttgaggttggcagggactggattctgtttatatctgtatcttgaatacagtgcagtgcctaacataatgaatacttaaactaatgttttaacttgaatatacttaaaactaatattttaccttgaatataaaggtaaaataatagtttttcgaccgtgcgagtggaatcatttcttttgggaagccttgggttcagtgtccacattaatagcaatatagcaactctgcaaagtactgtgtaagataagctcatgaaacacctagagattcagatgttacagagataaatgatctttaaatatactgtgctaatatacctgtctttattacgttaggggttggaggcattgaaacagaagcagttatgcttggtctgccagtttctcttactttaccagaggtggttggatgtgagttaactgggtcatcaaacccttttgttacatccatagatgttgttcttggtattacaaaggtaagttaaagttgtggtagctctatgacttactgaacattatttttataaaaattgaagagctctatgagagcagggatttgggttcattactgcatcctcaggtctcttgacgttagccacatcatcatagttatcatagtaataacaacaaacagagcatttagtttgtactaataaatacaaagaaatttgttgtgttcacttatgttagctcatttagtccttataacaagcctgtgagatggatactattactattctcattgtaactctgagaaaactaaggtacagtagggtttagtgacttaccaaagggtcgaaggcctgagtag

SEQ ID NO: 16542 - DNA, 1060 bp, Homo sapiens
aactgcatttggatcctgatttgaacaaaccaacttagtttggaaataatcagtgacaatattgactatctgatgttaagaaattattgtgattttttttttttggtgtaaagatttttttttaagagtctacatcttttagtgaaatgtactgaaaagtatgctgttaaaattatctcagttttgcttcaaaataatctaatggggttgactgtagaagaaacggagcatctgttaagttatagcttggtgataggcgcatggacattcatggttttgttttcttttgtgtttgaaattttctgtgataaaaaaatttttcaataggtcttacagctcaatagtatgtgattattttccacatgtaatgaaaactgactttcattactttcttgtagccttacccctcgtgaattcaactcttacggagctcgaagaggtaatgatgctgtaatgacaagaggcacttttgcaaatatcaagctttttaataagtttattggaaaaccagctcctaaaacaattcattttccatcaggacagacggtgagaatgcaaacaaagtatttagacaatttataactggatcaaaatttgtattaaaaaattttgtgtttgttttaatctacagctagatgtatttgaggctgcagagctgtaccagaaagaaggtatcccactgattattttagcaggaaagaaatatggttcaggaaactccagagactgggctgccaaaggaccgtatttactggtattgaatcttaaaatttatcatcttaagcttcaaagagttttaactgttcccttttgtcagtaacatcctgtcaaagtttatctggattttttatagttatttgaaccttataggtatagagggttttgtttgtttgtttatttcagtgatctttggtaatattttgtactcatctagttagtatcattttaatactctgagtttggtaaaacctacatcagtcttatgtgaagaagtcagtataatagagggaaaggaaattctgttttaaactattgttttataattatttatacctattga

SEQ ID NO: 16543 - DNA, 1052 bp, Homo sapiens
gacagggtctcactctgtcgtccaggctggaatgcagtggcatgatctcagctccctgcaacctccacttacaacctcaagtgactctcctgcctcagcctccatagtagctgagattacaggtgtgcaccaccatgtccagctaatttttctgtttttagatagagatggagtttcaccatgttggccaggctggtctcaaactcctggcttcaagtgatctgcccacctcggcctcccatagtgctggcattacaggtgtgagccactgcatccagcctattcttgttactttttattgtattttttatttttatgttttgtagagacagggtctcactatattgcccaggctggtctcaaactcccggcctcaaataatccttctgcctcagcctccaaagtactgggattataagcatataagccactgcgcctggccctatataccttctttattcctttattttagtggcatttcaagagtgttgaaaacatatgttagatctggcatgtttaaatagaaatccttctgagccctactttggggtcaagggagccggcccatttatagagctcttatgatgtggtaggcagcggcagtacttaaccctagagcagcagaaagggatccgaataatttagagagctccataaaaattcagaaaaataatctgtaagaaggttctgtaaatactttgataaaatattgattcagtatgagatattagactaaaagtatttagagaaaggccaaagtagatttttgccccctttaaatgctcaataaataactttcagaagtgattagagggaataaaatgcacatttattacagggtgtgaaagctgttttggccgaaagttatgaaaaaatacacaaagatcatttgattggaattggcatagctccacttcagttccttccaggagaaaatgcagattccttgggcctctccggtagagaaacattttctttaacatttcctgaagaactgtctcctggaattacattgaatatacaggtatctctaaatttttcaaatatatgat

SEQ ID NO: 16544 - DNA, 1080 bp, Homo sapiens
gcccagctaatttttgtagttttagtagagatggggtttcaccatgttggccagatgatctgaatctcttgacctcgtgatccgcccgccttggcctccacaagtgctgggattacaggtgtgagccaccacacccggcctatattgttttgaaagcatactctatatatagttatgggcagaggcacaggcatcctcagcagctgattcaggagatgatggtaaagctagctaactatgaattaaacattcacatatccagtctacctggtccagtaataatacaagcaaatcttgtatttcaggaacaaatcaaggttctcttaattttttggcttatatacaatgaagtaaaaacttgataaacatggtttcaaattgaggaggagagtcttggatgtatgttttaatatgtataccttataattctgcctctagccaaatgctatgtttgcaaaatgtggcatctgttagtttttattgtctgtgtcttctttgtttactataccttgggtaattttgtgttaccaaaaaaaaaaaaaaaaaaaggaagtgtaatgtcagacacacaagaaaagcaaatcagtgttgtaagcttaaagtacaatttcaaaggtcactaccaacagcagggttttttttatactttgaaaacattatgctacatatcattgccattttcatattttggggttttgctactcttatacaatggaatcaatggaaatgtcatccagccactgaattgccattattatatctaaaaagtttctaagatgacagttatcactattttgttttatctccatgctgacatttgaaagaaggtactagtatccctctagccagattgcttagtttttcgttggtaatcaaacaacagttgtactaaaggaaagtaaagctaggacctaaatcagaatcatagttgcctgcatatatggtaacaaggtcgtgtgcatttgctttcacagtgatgagtgagaggatgagaagaaattatttgacatttttctgtggttgaatagaagacacctttcttttgtctttaggtttaggaggagatactaagatactgga

SEQ ID NO: 16545 - DNA, 1052 bp, Homo sapiens
tccctgctacacacacacacacacacacacacacacacacatgcacactcactcacacacactaggaggaacaaatgagatcattcacatgaaagcacttatgtttctgaaatttaagggactgtggtttttatctaggttgacctctcaagctaaaaactgggaaccagaataatggactgaaacttgggtttcacttccagaccagtgttgatcctctgaattgatgaaactgtatagatttccctcttgattgcccctgctaacatggatttcctttcactcaattcctaatgcaaatattgctgaccactgtttagatgtttacatgctgcattacattgatattttactatttggtgtttgttctaacttgtctccaatcaatcaatttcatgtggtttatataaactctttggtggctgtgatggttagttttaggtgccaacttgcctggattaagggatacagagataggtagtaaagcgttattcctaagcatgtctgtgcggaagtttccagaagagactggcatttgaatcagtagctgagtaaggaagatccccctcaccaatatgggtgggcaccatccaatctgttgagggcctggatagaacaaaaagacaaaggaaagatggattcagtctctctcctgggacagccatcttctcttgccctcagatagcaaaactccaggttcttggccttcaaactccaggacttaaccagcggcccctcaggttcttaggtcctcagcctcagactgagttacaccatcatctcctctggttctcaagcctttagactcaaactgaaacacataattggcttcactggttcttcagcttacagacagcaattgtgggacttcctagcctccataatttatttccataataaatcccctcctgtttatctacctatccatccttccatcccattgattcggtttctctggaagaccctaatataatacataaattaaatatttattttactttactttcaggacctagcaccgtgccaggcccctagaagacccagtaaagatc

SEQ ID NO: 16546 - DNA, 1062 bp, Homo sapiens
taccctttgttcatactttctgctctgtgtggaatgcccttctttcttcccctgttctttctcttagacccaagggttctcagccttatttctgcctctcccatctctgatttactttcattttctgtatcgatttctcaaaaaatactttcttgattctttcatcatcccttttcccaccctacccccggttcctctttccacattataatctatgactgcctctctcacctaactgccagtattagcttttcaggacaggaactggttttacacattttggtattccagcatctagcataatgcctgacacttagctgaataaagggagtaaataaaacagatttgtaaagtcagcaaatgctttttaatttgtgaatcttattttaatgatgatctgattttctttttacaggaactatataaagttcagaaaacatggtgagttaatacacatgccaataaacggttgcctgataaacagtattgcttgtactcagtttacagacttgagtgggaaaattgaaatagaaggaaagcagtgagaaggtgccttttttcttgtcagtttcctctcacctattgaactttgtataccaggataggttttgtaagatcatttgtaggcttgcaggagttggcctactttcagtgggtaggaatcactcatgtgtttttcctttgcagtctcgaagatatgactccaggaccactatattttctccagaaggtaaaatagaaattgtttaatctgcctcaagtttaaaaataaatgtgttagacttttagaaaaaaaaattacaaactttttttggtagttgcaaagttcatcctttttgtactttgaagcaattatcatcaccaggttgattataccatagaagagtgaaagtggaaatttgtttctagcttgcttcattgctgatttcttttgggccagtggtgcaggagcacagaggagagtcttggcttctcactgcttttgttttgtaggtcgcttataccaagttgaatatgccatggaagctattggacatgcaggcacctgtttgggaattttag

SEQ ID NO: 16547 - DNA, 1021 bp, Homo sapiens
aaaacattgtgtattccttaaatgtgttaaaaatagtttcaaaaagttagcttgaaaggagggaaaagaaaataaatttttaagtttaagagaaaaagtccaaaaatagagtgatagattcttaggaactaaaagtatcacaagagatcattatcttgggctcacacttaaaacatttcagaaatttttctatatgacgttcattagtagaataagttcccttgataaattgtacttattgtcaagagatcctatctatttaaactaaaacattcatgctaatttttaaactagtttcttcttgttctgaacatgtaaatcaataattatttccctgttgtgttcccaaaataaccaagtatatgtatatttatatatatgtatgttttaaaataacatttatagatgtgctttatgttctgattacagaagcaatgcgtgatttttgtagagaatttggaaagtgcaaaaaatacaaatgagaaaataaaaagtgactgtaattctactacccggagatgactaatgttaataattagttgtgtttcttgccagtctgtctttgtgtatatgttacaaaattggaataatattttagaaataattttgattactgctttttctctactatgacatgatgaacattttcttatgtcattacatactctccaaatataatttttaatagttacatatttcatctataatttaagcattctcccattttgaacagaagcttgtttccaatttttcttattataattaacaatgatgaatatatttgtacacaaatgcctgaacgtctcctttccttaagaaaggcagttagtgaaccaaaggatatacctttttcaaagtctattgctatgtcatctaattgcttccagaaaggttaatgaatatatgtggactgtgtgtgctcagcccttagctagtcaatatggggagattttaaatgaaaataggaaagtggaaaagtaaggtggtagccaggtgtggtggttcatgcctgttatcccag

SEQ ID NO: 16548 - DNA, 1050 bp, Homo sapiens
gttgttgaagattggaaattcatagcccaggttcttgatcggatgtttctgtggacttttcttttcgtttcaattgttggatctcttgggctttttgttcctgttatttataaatgggcaaatatattaataccagttcatattggaaatgcaaataagtgaagcctcccaagggactgaagtatacatttagttaacacacatatatctgatggcacctataaaattatgaaaatgtaagttatgtgttaaatttagtgcaagctttaacagactaagttgctaacctcaatttatgttaacagatgatccatttgaacagttggctgtatgactgaagtaataactgatgagatacatttgatcttgtaaaaatagcaaaatattatctgaactggactagtgaaaaatctagtatttgtatcctggcaaataatactaatttataatccacagtaaagttcatcctttgactgtgctggagaattccagttgtatttgaagactgattttaaaacttttctgcatttggtaaaggtatgtaaactttcctgtactcactgagtaacagctaatctttaatataatattatactgctatatttaaaaagctgactacttgatataattacttaatgtgatgcttgatataataattacttaatgtggccgggcacggtggctcacacctgtaatcccagcactttgggaggtcgaggtgggcgtatcacctgaggttgggagttcgagaccagcctgaccaacgtggagaaaccccgtctctactaaaaatatgaaattagccagggtggtggtgcacacctgtaatcccagctacctgggaggctgcggcaggagaatcgcttgaacccaggtggcggaggttgcggtgagctgagatcacgccattgcactccagcctgggcaacaagagcaaaactcagtctcaaataataataataacaacaacttaatgtgctgctgcttttccataaccaacattttaaaaataaatgaaaaacaggaattgggaactcctttaaggcttac

SEQ ID NO: 16549 - DNA, 1034 bp, Homo sapiens
agatcatgccaccacgagagtctgtctcaaaaaaacaaaacaaaacaaaacaaaaaacacacaaaaaagaaaaccagaagaaacataagaacaagcagtctgggtgtgatggctcacacctgtaatcccagcactttggaaggctgaggcgggcagatcatttgaagtcaggagtttgagaccagcctggccaacattgtgaaaccccatctctactaaaaatacaaaaaattagctgggcatggtggcacacacctgtaatcccggctactcaggaggctgaggcaggagaatagctggaacccaggaggcagagattgcagtgagccaaggcactccagcctggccaacacagtgagactctgtctccaaaaaaaaaaaaaaaaagattttcatggaagataaagaggagccaagaattttacacccagccaagttacctaaaagtattctctaaaaaggttacaatgaattatgaacttgccagaacacagagtatacagtgtccatgaatactctgaggattctgtcagcaaatgaactttagaaaacaaaatatcacaggagaaaggctgggaatgatggctcacacctgtaatcccagcactttgggaggccgaggagggtggatcacaaagtcaggagattgagaccatcctggctaagtcaggagattgagaccatcctggctaaaacggtgaaaccccgtcgctactaaaaaaatacaaaaaaattcgggtggagccaaaatggccaaataggaacagctccggtctacagctcccagcatgagcaatgcagaagatgggtgatttctgcatttccatctgaggtaccaggttcatctcactagggagtgccagacagtgggtgcaggatagtgggtgcagcgcactgtgcatgagccaaagcagggcgaggcattgcctcacttgggaagcacaaggggtcagggagttccctttcctagtcaaagaaaggggtgacagatggcacctggaaaatcgggtcactcccaccctaatactgcactt

SEQ ID NO: 16550 - DNA, 1119 bp, Homo sapiens
tatttttgacaataaaagtctttaagataacataagactaatcacttagtgaatcttacattaagtgccaaactcttaagccatttctaaaaatgatttgaataatctgcttttggactctggcagcttagatttggaatgctgctttttgaaaataaaaagttttcctttttacagaacagacttccattagatcttcattttagttgagaatatatttgtagtgccagttcatcaaattacttaagagaaatccagtcttgcctcttgatctcagaaaattagttggagaacagagtatttttgagttaaattttaactttcctctttttcagttgggatgaatgggttccggagagcagagtactcaaatacgtggacaccaatttgcagaaacagcgagaacttcaaaaagccaatcagtaagtttgttttgtgaactgaatattaaggagaaatgcctgtagattaattctggacatggaatgaacaatggagatcatgttggctgccctgcctataaaatgattcctggtacctttcagctgctgtgttacagctttgacttcaagcgatcaagccatatctaggtaaaggaagtagcatacctgccattacttgagcttatcttagacctaggtagaaaacagcagaatgttgttggaaattgctataggtatgaactcactgataaaaatctttattttcgggggctctggaagacaaatttggtggggaaacaagcaaacgaggcatttcctattctgcttttcatctctgaaagcacgggaaaagggaccctgaaagactctatgatttatagggtaatctcaaagttgaaatgtatttttaaaaaaattaaaacgatggctgggcgcagtggctcacgcctgtaatcccagcattttgggaggccaaggcgggtggatcacgaggtcaggagatcaagaccatcctggctaacacggtgaaaccccgtctctactaaaaattcaaaaaattagccgggcatggtggcgggcgcctgtagtcccagctactccggaggctgaggcaggagaatggcgtgaacccgggaggcagagctttcagtgagcggagatcgcgccactgcagtgt

SEQ ID NO: 16551 - DNA, 1030 bp, Homo sapiens
aaatggtaatgggaacaaataaaacactgggattagtgaattccaaaacaaatggaattttcaatgctatgagaacagtctattacagtcactttttattacattgattttaattgagccttttgctgtttcttgagtgttttgtttgatttttgtggaaatatctctgtccaacttgttaaaaacttgttgccagaatttgaatgtaaattcctaatggaatcaggctgacaatttttttttcacataaatgctcattttatgttgacattactgaaattatttttgaagggagcagtatgcagaggggaagatgagaggggctgccccaggaaagaagacatctggtctgcaacagaaaaatgttgaagtgtaagaagctctttgttttgattttgcatactatatgtgaagataatattttatgttcattgtgtgttagactgtgttgaagtggaaactttggaacattgttggaaccagtaagaatcccattcctcaggtatcaggtcgttaaagtagtttaaaataacgtattccttaattttcctcagcaggttccccctccctttaacttgtgtgtataaatatatgtgtgtgatgttttctcttacaaagatagtactagtggttataagttttgagataacttttggcaagccttttcaaacctaaaaagcaagtgctggcaagtgctaaaaatacatacgaattaacctccactttggtgaaactcatggtaagaatatgtgagaagttaaggtttcaaataactgccctcctcatccccacccctaagaaaaccattgcttttttttgagacagagtttccctcttgttgcccaggctggagtgcagtggtgtgatctgtgctcactgcaacctctgcctcctgggttcaagtgattctcctgcctcagcctcccaagtagcggggattacaggcgtgtgccaccacgcctggctgatttttgtatttttagtagagatggagtttcaccatgttggtcaggctgacctcctgacctca

SEQ ID NO: 16552 - DNA, 1034 bp, Homo sapiens
ttgcgttatacttacctgttgaacatcccaaatccaaaatgcttcaatgagcatttcctttgaatgtcatgttggctcagaaaattgggatttttggagcattttggctttgggatgctgaactcatctatattttatagatcttttactttagagttgagatcacctgtcagtattttagttttatattacagaggtgagtgggtaaaggattgagtgtgaagactattggtttctcttggtctccacatattgacacgtgcaagtaaagttcatggttgactttgaccgagaaatacagtccaacagatttttacaaaactaacagacaagagaaaacctatacacagatttttgtgtttatatccaaacataagttaatttgaattgtcaaaccttaagacctaaattaaatgaatatatttaattaataacatttataagtattatttaaagctacagaaaagtaaaaaatccaggtgttatagtatctttccatcgaaagtaatccataatcatgggctctataaactgtttcctttgtggtctagaaataataatgtaaaaaagcaaaattaggccaggcatggtggcacacgcctgtaatagcattttggaaggccgaggtatgcgaatcacttgaggtcaggagtttgagaccagcctggccaacatggtgaaatcccgtctcttaaaatacaaaaatgagctgggagtggtggtgggtgcctatggtcccagctacttggaaggctgaggcaggagaatcgcttgaacccgggaggaggaggttgcagtgagccgagatcacccaacagacagagcaagactccatctcaaaataaataaataaagcaaaattagcaatttaccatttgacagtatataagtgacgtgaggtaagttgctgttagagatgataatcaagatgaggagacttaaaacaaaaaaattacacaaatctaaaaatattttggggaacaaaaataattggaaaaaaattttaacctttgacaccttttttttttggtggg

SEQ ID NO: 16553 - DNA, 1048 bp, Homo sapiens
gcccctctttcctcgacacagcatctcaaccactgagggcttctctgcatggtttgcacatctcatactgtgacttgccagcctcaggctggtatctcaggactccaaaattacatggtatctcaggactccaatagtgagggttcaaagagataagaaatggaagctgccaggctagttaagggctgtggttgaaagtactggtttttttttttttttttttttgggacagagtctcactctgtcgcccaggctggagtgcagtggtgcaatctcggctcactgcaagctctgcctcctgggttcacaccattctcctgcctcagcctcctgagtagctggcactacaggtgcaagccaccatgcagtagtctttacacttatttatttcttgacatttagaatattggaaacaattaagaaaatcagaattgaaaatgaggaagaagaaatgtgagatgaatggttggtttcagaagaacagaagcatgtgcgtttgtgatgcagccttgggggagagagagaagggcagctgagcctgggatatgcttccagtcctggggaggggtttgggtggttgctggtggtgtgtctaggggtgattaagtttagacaaacctctgagtgtgtgcgtgtttgtgtgtttgtgtgtgaagagggaagtttggtatgtccttgacctggtgctctgtggcataaagttaccatgggcagagctaatggcagattgtcctgggcctaggaatggtctcagcattgcaaagctccctggtgaacctgagcaataaaggtagcacgtttcctctatgcttgtgacatatgtgagggctacatggtttccttcaggaactaagtcaacctgccctttctgaccccagagccggagacacaaggactcactctgggtggactgatctgggaccctggaggttcctggtacaacctgtgtccacttgggacacattcttgcacttttacttttccagaggattgtgcaagcctttacttccataggcagagaatctcatccttcccccttgatcaccct

SEQ ID NO: 16554 - DNA, 1026 bp, Homo sapiens
tcttgtgtaaccttagggaatttacttaaccttggaacctcagtttcttcttctgtaaaatggaaaggattaggctcattgaaaccctgcagagcaaacttgggagtcaggcaggcatagattcaaatcttagccctttcactttcaagcagtgtgaccacagccaatttatttaaccttgctcagccttagtaaaatgagaagtggcgtagcacctgccttagaaagttttgaagatgaagtgacagaaatgtttgtagagtctgatcacagtgtctggttggcatttggtaagtggtggttgctcctttgataacagcaatttttttatggttgtcaggtcatcactggaggccactacgatgttgactgctatgtggaggacccccaggggaacaccatctacagagaaacgaagaagcagtacgacagcttcacgtaccgggctgaagtcaagggcgtttatcagttttgcttcagtaatgagttttccaccttctctcacaagaccgtctactttgactttcaagtgggcgatgagcctcccattctcccagacatggggaacagggtcacagctctcacccaggtgagtgaacattagcagttcggggctgctgaaccccctagcgtgttcctcttcattggcctctgtctaggctggtggtgggagtcatcatccatccagctcccagtctggaagtctcagggttggttttgtctctttcttcatacctagtcctaaaggatgccatgctcttctttcgatcttcctttccactctctaaccaggtccctgcagtactttcctctgacattcctgtctctactctttcattcccactcagtcttttgcacagtaccactttcgaagtacctgtgtcatgtgtctctgcttatatgatgtgcctgtatcataaagaccaaagtcctactttgtgtggtgtattagttaaggtaacacaaggtgctgtaacaaaataaacaccaaacatcaatggcttaacagaatagaagtttattctc

SEQ ID NO: 16555 - DNA, 1023 bp, Homo sapiens
ctccccatcttcaggtcagctgtgtcatattaacgtgatgcagtcacagaggtgacagctcatcatattcacagctttctggaattagggcgggggaccttggtggtggtgggaaggacattttcagacttctgcctaccacactgaatatttttgcaggtaaagaaagttatgatgtagtatgtgttacacatgagcgtatgtgtctatgtagtgcctgtttatatatatgtgtctttgcatgtgtgtgcatgtgcttacatacatgaagcgtgtgtcttcatgtgtttgtgtttatacataaaactataggcagcaattacataatagaatgagcatgagcagtggattcagagtccaaacacaactgtggtctagttcacactttgctgtttattagttgtatgactttgggcaattcgtgtagcctcttggagcctcagtttcctcatctgtgtgtgggataagccctcgttaacagtgagggtaatgatccgtgcctatcaggagtattgtaaggattgaataagagagtatagggcagtgcttgaaagcataggctcaggactcagactctaactcagccacatactaactgtgtgactctgggcaagttacttaacctctctgagcttcaattaggcttgttgtgaggattaaataaaaccacgtaaaacccttagcacagactcttagttagcattcagtggatatcacctaggatgttgacaacagcatttgctgtttgctggatcccacatttgtctatgggttagcagtgtgactgcttttctcttcctgcccagatggagtccgcctgcgtgaccatccatgaggctctgaaaacggtgattgactcccagacgcattaccggctgcgggaggcccaggaccgggcccgagcagaagaccttaatagccgagtctcttactggtctgttggcgagacgattgccctgttcgtggtcagcttcagtcaggtgctactgttgaaaagcttcttcacagaaaaacgacccatca

SEQ ID NO: 16556 - DNA, 1020 bp, Homo sapiens
aaaactaagtgtgagcgtcctggagacttgtgcctttatttctttgccctaaaggactccagagcttactgcagagcatgggtgtgtgcataaataattagaatgtgacatagagtacctagagaggtgcatggggtgctgtgcagagatgtatagagtgggcaagaaatgactcctcccaggtgactgaaaacaaaataggaagtctcctcgcatgctcacaccatgttgtacaacggaactttgcaaatgctgtttcctctgataataccttctcccggatatctgcatgccctgctccatcatttccttctgacccaaaggcacattatcagtgaagtccctcccaaccactcttcaagatggtactgtctcacttgcccttagtcctccttgcccattagtaagaaatgaatgcataccaatcagatgtctgtgcagtaggtctggagggaagatacagtgtctccgctgaaggaaacctatcaaatctgaaatcctgcaccgtctgacaggcgttaatgcattgtaggaaaggaagcaaaataatctctttaaaaggataccccataagcctcacttatttagcttgattgaaggataaatgttgcttatctttcatatgtttttgctatttcttttctcttattttagaattaagtactgggtatatataaaaggttacttatgaaatatgtctaaggtgaaatatgtctaaagtgaaaaacaatacaaaaatcctatgctcctgctacctagattaagcactgcaacatgacccattgcttctggaatgttctctacctgcccttctccttcaccctctgagggaaccaccagcctgaatgtaatgcttatcaagcactgagaaaggagtttaaagaattgaaggacacagctttactaaaactcacgttgtcttccacttttttatggaaactaggttctttcaaccttaaaaaaaataggattgctggtgatacctgttttatttatataaccttgtaatcatttatccat

SEQ ID NO: 16557 - DNA, 1044 bp, Homo sapiens
cctgttttcagtaaaatccctttaaatttgaggcctgggtggaactgacaggtggagtttgaaggcacatctgctagctcacataggaaacagaatctcccagggaaaagacataggacctctgactctaactgaggttctggattattatgagagattttcagaaatggtctaatggtgttggcttgctccataccatagattttaagagacagtagagcttctgcgatgagattcccccataaaataattatggatctgcactggcaagctggtcttggctccaaagaccaagagttggtttgtggtgctgattctgaacccttgcgatgcaactgtctggtagtaaaatggctttgtatggtaagaaagctttaatcctcgaggcctagacaactttactgcagggcattctctacaggatgactttagtggggaggtgatgttttctttgttgaaagataattttccaaaaaaggataaaatcattaagtgttatataaaatgaacacgtgtattagggttctccagagggacagaactaataggatatatgtatatatgaaagggagtttattaaggagaattgactcacacgatcacaaggtgaagtcccacgataggtcctctgccagctgaggagcaaggaagccagtagaggctcagtccgagtccaaaaacctcaaatgtagggaggccaacagtgcagccttcagtctgtggccagaagcccaagagcccccagcagaccactggtataagtccaagaatccaaaggccaaagaacctgcagtctgatgtccaagggcaggaaacatccagcacgggagaaagatgaaagccggaagactcagcaagccatcttatcccaccttcttccacttgctttgttctagcgctgctggcagccgattgaatggtgcccacccacattgagggtaggtgggtcatcctctcccagtccattgagtcaaatgttaatctcctctagcagcaccttcacagacacacccagaaacaatactagctatctaggcatctttc

SEQ ID NO: 16558 - DNA, 1050 bp, Homo sapiens
acaggaagcatagtagcatctgtttctggggaggcctaagggagcttttactcatgaagccaacacttcacatggtgaaagcaggagtatgagaccaagaggggaggtgccacacacttttaaacaaccagattgtgaggacagcaccaagaggtgctaaaccattcatgataaatctgcccccatgatctaatcacttcccagcaggccccacctccaacattggggattacagtttgacatgagatttggtggggacataaacccaaaccataacacagtgaactgatttttgacaaaaatgctgagaaccttcattgggaggacagtcttttcaataaatggtgctgaaaaaactgaaaatccacatgcagaagaatgaaagtagacccttatctttcacccaacacaaaaatccactcaaaatgatcaaagacctaaatgtaagaccccaaatgttaaaactattagaagaaaacaaaggaaaaacacttcaggacattggtctgggaaatgattttataaataagacctcaaaagaacaggcaaaagaagcaaaaaaaaaaaaaaaaaaaggataatatcaaactaaaaagtctacacagcaaaagacacagagtgaagagacaatctgaagaacaggagaaaatattttcgaagtattcatcagataaaggattaatatccagactgtacaaggaactcaaacatatcaaagataaaaaataaatccaattaaacaatggacaaacaatctgaatgaatatttctcaaaagaagacatataaatggccgacaaaatatatgaaaatatgctcaacatcactaattatcagagaaatgcaaatcaaaaccacaacaaggtatcatctcaccccagttaggatggctattttgaaaaagacaaaaaataacaaatactggtgaggatgcagagaaaagggaactcttatacactgtggaagctgaggtgggaggattgcttgaacctgggagacggaggctgctgtgtgctatgattgtaccactgcactccagcctgggtaagaa

SEQ ID NO: 16559 - DNA, 1023 bp, Homo sapiens
gtaaaaaggaagatccctgtcttcccccgacatccagttccttaaaatcaacccaagcaaataagagtaaaatagaatttaaattactgaaaccaggaaagagccatagtcaaaaatcactagctatgaagagtggctgtcaaatgcagtgatatttgaactaaagggaaggagaggactagaacagtcctagagggttaagactttcctaaaagaagaaggttttggtcctgaatggccaaatggtggagcttggaatggcagcatctaggggccatgtgtgagcagcaggggtgaccccttctcttttcctcatttcagagtggcagggcaggtggggtcagaggagaagcttttcaggcaggtgtgcaggagatgtggcaggtgaaggaagggtcggggggagctttatagccccaaatctcaggagaactgatgagaaaggatgtggagaaggcacctctgactcgcagcttgcttctgcctcaacttctccccacacagtgtgactcttcagcaaatcagtgacctggatcacaaaaggaaaagtgacaattcaagaccaggatcacggcaaagtaacaaatagaaggcacgcaggaaatgtatttcggaagaattactccaggaagtcaaacagtgcacacattttttccctcatagtcttagaaaaaggaaaaaaattaaaaaaggcaacaagacttcagagaaggttacaagaaattgtagaaggggttataatacaacaaaagagatgaaaaggagctgtccagtctcagggaatatgtggaagaggaaacatcatttcagaaatgatagttaactttaagatgccaaaatgagaacaggcactgcactgctgaaatcaagggagggacactaaagaaaggcttgagaagactgtctgaaaaacaaatggaaaacaaaaagaacaaaaagctgaaagttattagggagagccagacagctttgtacaacaaggatatccatcatgcaggtaattggtgttcctgaagaagaaaa

SEQ ID NO: 16560 - DNA, 1030 bp, Homo sapiens
cagtttaaaaaggtaccttgcgtttcaggaaaaaataaagcaaaatgattaacacagacagattctggtgatattcctgggcttctgggaaaaataaacaaacaacattgaagtttcatcaaacaaacaaacaacaaagacaaaaaagcaagtaacctgtcagagggagaaatcatgtgaccccaaactatttcttgacatttactgggataagaccctggaatactgtcctcagggaactctgggagagacagtgtggacccagggaaatgatacactgctaatttgtcattcagttacaaaggccacaggtggcctttctaaaactagaaggaattcagggcacagagcacctttgaaccactcttgaatcagctaccccaggaaaaactctactgagtaaggaaaggaaaggggccatcacaaaaagggcaggttttcaagcatttcatccattaaaatatacagctgaggctagacaactatgaacaatctagggactataaatgttatgaagtctaattatttaaaaattgcaatacagcaaattgaaattgagaattaggaggtgagggaaggtaagagaaaatgtaaacgctagctttctaacttttcctgatagaacattaatgactacaaaagaaattacattgagttcttgctaggcaccaaccacagttcttagtgcttttttgtgtggcatttcattaatctctcacaacagctcagcagcataggaaccattaatactcccatcttacagatgaggaaactgagacacagagaatttaatcttttcccaaggctatgcagctagtaaggaaaataaggaaagccatttggtcatctcaagaggccctgaaaactaagtttgtaagatcaatacaagccattcctgatgaaaaattttgataaaggaataattggtcagggataagggtggcagctgaagtgtggctgtggagtctggagctacagattcactcctttcttattctggtgccacggaggtggggcatttcttatacat

SEQ ID NO: 16561 - DNA, 1059 bp, Homo sapiens
tctgtccatcactacagagatctcttccatgccagtcctttatactcatacacactgccctcccttctaccacccttggtgcctgttaacaactaatctgttctccatctgcgtacctttgtcactttgaagatgtcacgtagatggaatcatgcaacatgtggcctgttgagatcatctgtcttcgctcagcataatatatgctctttcattttatttctgagtagtattttatgctatggatgtatcacattttatttagacatccatacactgaaagatatttgggttgtttctgattttcactattacaaatcgggcttctatgaatcttcaaatttgtgttgatttatatttcaaagggtcactatggctgctttgtgggtagtagactgcaggggtaagagtggatgcagggagtgaggagctactgccatagtccaggcagacatgacaatggattcaaccaactggagaggtgaaggatgtgggacaggctcttgggttgaatatgaggcacaaaagaaagaaaggagtcaatgacaactttgtgaatttgaactaccaggtgaaaggtagtctcatttactgagatgagcctgactgtgggaaggagagtttggggatggagttttggtggaggcagatctagcactctgttttggccatgttaagttggagatcgctattagaggtcctgcagagatagcaattcaacagccatatgagtctggaattcagagtgtaggttgggctggagagaaaactttgagattccataaatatgtagatagaaggtgaaataaaaacactcggcctacgtagttcaccaagtaaataaagacagaaaagcaggtctagatcccatgggcctccaacttatagaagttgagaagaagagaaggtcaaatagaaagtgagagggagcagctggaaagacagaaggaaccccccagagtgtggtggcccacaaggcaccagaagatgccttttcaggagtgaggagtgagcctcggtgtcaaatgctgctgctgagagctggtgttggcgtcctaggat

SEQ ID NO: 16562 - DNA, 1075 bp, Homo sapiens
ggagtttgagaacagcctggggcatatagtgtgatcttgcctctataaaaaaaaaaaaaaaaaattagccaggtggtggcatgcctgtccagctactcagtcttcctgagttccagctactcaggaggctgaggtggtaggatttcttgagcctgggaggttgaggctgtatgagccttcatcatgccactgcactccagcctgggtgacagagtgggactctgtctctaaaaaaagtttaaataaaaattaaaagttaatataaaatatttatttatgtataagaattgatatggtttggctctgtgtcctcacccaaatctcagcttgaattgtaataatccccaagtgtcatgggagggacctggttggaggtaattgaatcatgggggcaggtttttcctgtgctgtcctcatgatagtgattaagtctcatgagatctgatggttttataaatgggagttccctgcacatgcactcttatctctgcctgctgccatgtaagatgtgactttgctcttcctctgtcttctgccatgattgtgaggcctccccagccatgtggaactgtgagtccattaaatctcttttctttttaaattacccagtctcaggtatatctttattagcagcatgagaacagactaatacaagaataattgcaaacattctaaaaacaaaaaagagggataagataatgtgtgctatcagataatgtagcatttccaagttacagtatgaaaattgtttgattaggggtagactgactgacaaaacacagcagtccagaatcagatgcaggtatacacagtaattcattagatgagaaaagtttatgtcagagggaaacaatggactagtgaataaatagattaggaataattaggtaactatttgaaaaaatagttttatgtcttgtatcatatatgaacacaaattccaggtggatttgaatgtttaaaaaactgcacacaacagaaaatataggtaattgttatttacacatcctttatttcagaaagaactttctaatcatacaacaaaggtagaaattataagaacagattaatagac

SEQ ID NO: 16563 - DNA, 1050 bp, Homo sapiens
taggggaacagtcaattatgtgtctgtctggtgctcagtaaatcagcactttacgtaagataaggtgaacgtagagtagctatctgtggagatatttaaccttttatctgtagctctctgcttaggagcaaaagaaaaggcagcttcttgcatgactcagctttcagcttaattttttccttttggcacagagatttggggttccaagtttttattttcctttcacagcagcaagaatccagtcctctcggtccctccatatctgaggtctgtgtgccagcagatccatttggtggggtccgagtttctgaagaacaagtcagagacatatgttaagatgttatcttgtgtggagtcctaattagggaaaaggagtcaggctggcaggaccagaggaaagcaaagagataaagcagacaagctataggtctgcctttcttcgtggttcaggacatataaacaaaaagagggtgagataagctataggtctgcctttctttatgacccagcacatagggccctcctgtgtaggtaatgtatatagctcacaatatcatcaaacacctaggttgatggaagaatgcaagttaccttcctgctaccttggcgttatcagtactgtacacagcactctgcagcccaagaactatcctataaaatctccgggaagcctttgtttctttgcagtcagctgctctcttgctgattctgcccattgctctcttgcaacattatttttatatgttcctaatgaatctgcctttctttatccacaactgccttggtaaattcttatacccctcagccactggcccagatagtcaccgctcatccgcaacatttagtttctatagagaaccaaacatctcatgattaacttccatggctgttgttataagctattaccttcttgctaatcaaattgctcccttacttctcagggcgagctaggtgcctggaatttcccttgaaggaactaaagattttcctttatttccatgcttggttcggggatagtgcccagcaggctcctaagaggggtccctgctc

SEQ ID NO: 16564 - DNA, 1081 bp, Homo sapiens
aaacaagataggcagtggcaggtcattgtttatgcctattctttagcaaagttcaagcctctaccataattctaccttttcttgtgaatgtggcgtcaatctctgaacaagaaggggtatcagttttccttgtctcaaagtttaactatcaactaaattcttctcatagttttcttggcctccatgctagaataagcaaaaacaaacaaacaaacaaacagaaaaaccttagcctgtgggttaaaagcaagatggagtcagtcacgttaggtttctctcattacttataattctgcagtggcagtttcaccaagataggtagggaagttgtaaagtaagtagaaggcttattggtccaaaggaaatggtggagataggcaggggtggatgtctttgccagggtggagaatttgtaatgtgggatgatgcaggtaaagaggttgaagtacaggtatgttgaattgaatgaaattaacttttattgttctaaggtcctcaccttctctgcagaattttctgtaatcttccatatctgagacttctcctctcctctccctccctgtattagtctgttctcacactgctaataaagacatatctgaggctgggtaatttacaaagaaaagaggtttaattgactcacagttcagcatggctggggagtcctcaaaatcatggccggaggcaaaggaagaacaaaggcacatcttatgtggtggcaggcaggagaacatgcacaggggaacttccttttataaaaccaccagatcttgtgagactcattcactatcagcagaacagcatgggaaaactagcccccatgattcaattacctcccactgggttcctcccatgacacatggggattatgggagctacaattcctgatgggatttcagtgaggacacagccaaaccatatcactccccaaccctgactctaccgttcagttcccagctaggtagttagaattgaacagaatcctttagaattctcctttcttatcagtgccccttctatacccgtaatgtgttcctgtcttttcaagtcaaatttcaggcaatgtctgaaaaatgagctt

SEQ ID NO: 16565 - DNA, 1031 bp, Homo sapiens
gcaacttcccagttctctgatgctgggccttgaccaggaaggaggagagggtctggtctgtcccatgctcctcaggccaccaattagcacaatgtcccacctctgcttggtctccttctgtctggataacaactaacattccttgtgtttacctatctctttcttggttactcccagggacttcctctgtgatggttgggaaatgagagtattgtgtggggccaaattccactgtcatctggagaggttagagtttacattaatccattctcacattgctataaagaaatacctgagtctgagtaatgtataagaaaataggtttaattggctcacggttctgcaggctatagagtatccacttctggggaggcctcaggaagttaccattcatggtggaaggcaaagtgggagcaagcatgtcacatggcgaaagcagaagcaagagagagagggaggaggtgccacatacttttaaatgaccagatcttgcaagaactcacttactatcgtaaggacagcaccaagaggatggtgctaaatcattcataagaactccatccgcatgagccagtcacctcccaccaggccccacctccactccaccactggggattacatttcagcatgagacttgggcagggacacacatctgaactattcagggtgcatgattttatgtgacatcagaagcctttcagagaaggaaggtgagtggtgatggtcagacctgttgtcctgtcatcctctgcatccaaggtgaagggcaaaaatatggcagccctatgctacatagggttagagttgggattatttaacctagcgatttactcttctactatgcctcctttgcttatcacttccaagtcaggtgacataccgtatcaaaacttacttcatctattctagagaaaggtttttttttttttttttttttttttttttttttttgagacgaagtctcgctctgtcgcccaggctggagtgcagtggcgcgatctcggctcactgcaagctccgcctcccgggtt

SEQ ID NO: 16566 - DNA, 1026 bp, Homo sapiens
tctttgtgtggaggtggtggagagaatttacggggaagtgttaatttgtcagggctgcttgcagagtgtgttacccagagcagaacacactgttgcaattgttatttgactagctcagatagatgaaaaacaacccctcctttgttctggaacctaggctttcattaatgtctctaaaatagcattaaccttttggcagtctcactgaattgttaacattgggttactatccatcataacctcaaaatatcttttgtttagcatttttattgttggcgtttgttttattgttttttagttggtgctcagagtttgttcccccttcctggaatcatctagctggtctagatttgggtcagtttggtagtttttgcagacctccaagacttccattcaaatagcctcaggtaacaaggccagttcaggtacgtgatgtgctcagtggctccttcagtcagtgggaggtggggtcaagactgtgactacttactggtaggtcttcatgaagctgagaaaacctggaattagctgttggcattgccactttgggaagaactagagggataccagggagcagagattacaggtattacaggtgtcataaaaaagtacagaatatctaaatgaacaagatcactcttttatttgcaattttaggttgagccattttcttgctcacgtgggcctattttcttttctacagtgggcctactttctagggtgaggtggatatgtcatcctaggtattcaaaatagcaaaccctaagtggagagtgtgtgcatgtgtgtgtgtgtgtgtgtgtgtgtgtgagagagagagagagagagaatgtggggagggattttcaagtgcaggtgtggggagggagttttgagtgtaggtgtgtcttatttttgtacttttacagtctctaatacagtgtctgaagtatggagagtattcaataaatgcacatgtagtgaatgattataaagatgtctctaacttcagatacagatctgtcacttgccaattcatgctttaat

SEQ ID NO: 16567 - DNA, 1026 bp, Homo sapiens
gtctctggctcctgcctgctccctggagtggaaggcccaggtctgcagtcactggttgggtgcctgcagctgcacccaagagggcagatcctgcctgttcctggcaacctcgaagagcacaggtaggctcagatccacagccacagtttgggcaggggtccattctgctccctagagcgggaggcctgggtctgcagccacactttgggtagctacagtggcacctggggagctgaacccccaacttagaaggggcagagctcccactggcttcatggagtgtgcagtgccagccgcagccagtgtgatagcagcagcctctgccatcattaggtactatttattatcttgattttacaaatgataaaacaactgttggatttcagcccaggtccaccagaatccacagtcttcatttaacccccatgttctacaacactagaccaggggagaaatttgcacagaaagtagtatgaataatggaggctgggaatcagagaaagtagacagagaaaacaggcttaaaggactgaatgaattacagataacctgtattttccaagggctgggggctggagggaggagcaattagattttaatgggtacggagtttcagttttgcaagatgaaaaagttctgaagatctattgtctaacaatgtgaatacatttaataccactgaactgtacacttaaaaatggttatgagggtaaatttaatgttatgtgcttttgaccataataaacaaaacaaaataacttgtattcactctctgcaggtgaggggccacttttcagagcactctcctcatctctacctcactagggctttgcagcaaaaagtttgtctgatcattttatgttattatatgctacattgttcctcattgagtatatgctgctgcttctttgactatatgtcctcctgcttggaggtttggcttttcattctctaaaaggggtattttgatgaataacagtttttaaatttttttattttcaagatggagtctcactgttgcccagg

SEQ ID NO: 16568 - DNA, 1052 bp, Homo sapiens
tttcaaagaaccagctttttgtttcatttatcttttgtattttttttttcatttcaatttcatttagttctgctctgatcctggttatttcctttcttctgctgggtttgagtttggtttgttcttgtttctctagtttcttcaggtgtggatgtcagttagaatgtcagtttgtgctctttcagtctttttgatgtaggtgtttagggccacagactttcttcttagccacacctttgataggttttgtcattattgttgttcagtttgaagaatttttcaatttccatcttgattttgtttttgacccagtgatcactcaggagcaggttatctgatttatgtgtattttcataattttgaaggttccttttggagttgatttccagttttattccactgtggtctgagagcatgcttgatataatttcaattttcttaaatttattgaggctcgttttgtggcctatcatatggtctatcttggagaaagttccatgcgctattgaatagaatgtgtattctgtgattgttggatgaaatgttctgcatatatttgtcaagcccatttgttcaagggtataatttaaatccattgtttctttgttgactttctgtctcgatgacctgtcttgatgacatctagtgctgtcagtggagtattgaagcccccactattattgtgttgctgcctatctcatttcttaggtctattagtaattgttttataaatttcggagcgccagtgtttggtgcatatatgtttagaattgtgatattttcctgttggacaaggctttttaccattatataatgtcccttgttgtcctttttaactgctgttgctttaaggtttgttttgtctgttgtaagaattgctacccctgcttacttttggtgtccatttgcatgaaatgcctttttccaccctttcagtttaagtttatgtttgtccttatgtgttaggtgtgtctcttgaaggcagaagatagtttgttggtgagttcttatccattccgcagttctgtatattttaagtggagcatttaggc

SEQ ID NO: 16569 - DNA, 1031 bp, Homo sapiens
aatttggatgagggctctacttgattggattgtgaacagaggcaacttacagagggtgcattcaggccaggttccttagggctggctggatctttccctctacatcactctaggggctcacgtctgagtgtgtcaaagccataacaaaagcagcactcccagaaaaggtcaagaagcatgaaacagaaattttaattacaggcctgtatgctgagaacatagagacctggagatagctcaggggtttaacaaacaaaattcccatggtgtggcaggaaaacttatttgtgtgtgtttagtaaggcaatacttttaaaaaattatagaaaaaatcatcaactattactttcccttctgctccataccttccaattcttgttcatatgccaaggtagatattttctttgttgcaatggtaatacacagtatatgattcctttgaagtttttgttcacatagcgtatcttaaatttgtttctctttcagatattaatttcattttagtggtcgaggaacacatcatcttagtgaatatagcatacttttcaaaattcttttcttaacaccggaaacttgtttctatcatagccaaagctgccacagacaccactatggacagctttcagaaaatgtctctcttggcttcctattctgcctttttataaatcagtcttaaagttatcagttcagccctgaattggcagctggtatggaaatttcttgcctggcacatctggaaaggaggggcttgtttgtgatcgaacagatttcttggccaaaaatattggccagccaggatccactgcccattatgagaaattcctagcttgccagcaatgtgatctctttccaggggtcgtaagtctcatcttaccaggacagaaccacttcattaataatggcaatccagtctgatggggccattttcttcagcttcatggtagtgtagagatcttcaaacatcttgtggagtttgatctcttcaaggcaaatacagggctgagggggaaactcattatgcaaataatctg

SEQ ID NO: 16570 - DNA, 1044 bp, Homo sapiens
ggggagcggtggcatggtgagagggcaagacctcgcaggaaaagggatagcagggaagctgggaggcagagtatttcctgccccgggattattctcagactgagctgataaggtgggaactaactaatcaggggagccctggaatagtttctggtgtcctggaactctcagaagcctcatgactcaagatagtctccactgatatttaaactgaagtggaccaccaccagtgtcagatggtgccagacttcaagtgggatctgaatgggcttggactttgcagttgctgcctgtgactgtccactggccagctgcgtgggtgtcccccagcatgccctctagagataccaggtttctttttctatctagaaatgactgcaagtggaagctggtaacatgtaaccctttatgaagaggggactttgctgtctatgtgcaacagcttcatgtcctctctccctcccccagacagcacatagttaggacagaagaaagatattttataactaagaagatcttggaaatgaaaacatgaatgctaaaataaaatgttcaataaacgagctgaatagaatgactagaatcaaagagtaaattaataaaatatatgactgaactgaggcattctctcaaatcatggtttaagagagaaaaaatacatagcataaagggaatgttcggagacatgcaggatgaatccaaaggcccccaaatctacttaataacaattttagaagaagagaatagaaagaatggtggtgagaagaatacaagatctgagaaaaaaaagcttaattgtctacaaccatagaaaagattgaacaggcctactgtttaccaactagggtgaattaaaaaacaaaccaacaaacaacacctgaacaaattgtagtgaaattttaaaacatcaaagacaaagaaaattctttaaaattccagagaataaagatagactattatgtatgaatgaaaatcaaatttgtctcagtaacactaggtggaagaagacaatgaggaaaaatctttaagatgctgagggaggga

SEQ ID NO: 16571 - DNA, 1050 bp, Homo sapiens
cctcctttcttccccctccctccctccttcctccttccctccttccctcccttttcttccttccttttgttttttctttcagcctgccattttcagtcacaaacttttgcggaatacctgttatgaggcttccactttccatttatctcatcttcccaaaaactctatgaaatctcttattacacttttatagatgataaaactgaagctcaagagaggttaagaaactatctcaagtttacctagatagtaggtgagctggagacaaaatctttatataatgatgctatatccagtgcccttttctaatagttcaatacatctaaaatgtaccacaggagatctgattatgatggattaaaaagtattaatgtgtcagtggtcacagtcttctcccctacctctatcactaaagagaattctgattttgcccacagttttcctttccccttccctcccctaaagacaggagagagaaaatgcatagctctacacaatgcagaaaagtagagaggaggtaggaaaggagagatgaagaaagatgtgtgttatgtatttagagagaatttggggggcactggagaaagaggagctttaaagcagctgagataagaagggcttagagagagaggaggatgttagtctctaagaagttcaaatgaaggatttgattaatgatacatttctcttggctgctggactatgtttcattgaataggacacttattgagactggatcacatggacctcatcaatttattaggtttcataatcaacctccgatcctgtaagatggaaaccgtccatgtttctgggttcaaatattaaatttaagtagaaccctccatttaaatgctagaggaccaaaaccaggtcaagtgatttgtccaagttcacataggtggtttatatcacttatcaaatgtctaaaaccatgtcttcacattccaaactcaaggctgtttcttttacaccacattgggttttcacaccattgccaatgatattatgaagtgaaatttcggatctgagtgggacaccactagaaac

SEQ ID NO: 16572 - DNA, 1026 bp, Homo sapiens
tgtggtatcaaaactggaagatgtttctccaagttctctgatccttccagggatggtagatgacctcttttcttgttttgaactatgtcttattaaatgcagccacagttaagacctcaaacaacacttcaagattggtctttaatccttgttttccaatgtggaaactcagagaggggcaggaatttgctccaggtgacacaaccaggaaatgacataagtggaaatctaattgtcatgattttaaggctgtgctcttctactgggttttatactgtaatttgtgctaactgcataatgagcactttaaaatactaggtactttaaataagtcatcctacttgattcctaaaggaatcttgcaagataggttttggttctgttcctattccagtcacattcctccaacctatcaaggattggcaatgacccttatattatcaccattctatagaacacagaatcaggggtgaacagtgggtaaatgtcagactgcatcagtaaatatcagaacactgggctatctgtttgtagaccacacacacactacactgcatgttccaccatatgaatgtcttcagaagcccagtcacaatgtccactcgttaaatgtgtgaacagtgctacctctcagctgcattctcctcacctacacctgttcagctacgttttcaaacctggctgtaggacttcagttttttgtttttgtttttgtttttttcttaatcatgacattgaacacatcagacctggaccagcttttacagttttggcattaagacacttgccattcagaattaggaggacagcagcaaaacactagcacgtgagagccgagaagtgttagcttcatccctttgtgtttcctctgccccttggtgaggggaaggaacgagtttcttgacgactgagcaaaattgtatctatcactgaggaccagaaaaacacaacttttatttttattcttgacgatgaaggtaatgccttatgtggcccattctctttagggtctctcaacatcacttc

SEQ ID NO: 16573 - DNA, 1170 bp, Homo sapiens
atcttctttcttcatttttttattctgcctaggctccatgatctgtcactctgacatccctcttcccgatacccacacttccttgtctttttgtgtttttccctttagtaagatgcacatagattgaaagaaccagattgttatttgactagtaatgaaaatagcagtcttctgcccacttaccgcacaattccccactcctcagataagcaaccagttttcattctgttagctcattctttcggtacttatccctgtgtctttatagaatacacttatttgctctcaattttttcatcttaggcttgtctatggacatcccactacggaaaatgagaatttaactctctttcattttcattctctctcctaatctcccgccccatgcaagtgttccttctggctctccactctctaatttagttttatggtaatttagcttagttcaacatttagtgtttacataattatgagaatgtaagtgctattcagactgagtctttcctgcaaaatatgcttgaaattcatccttaacttttctccctaactttgtttttctgtattcctcactaaagcaattctaaatgtttcaaaatttcaatacatttagatacttcaggtctatccattgaaactccttggaaaaaaaaatctctgtgataatctggactctgggctgattgtcctcctcacctggggcatagctattgccctgggatcacacctcaccagcatcctaggaatcccttcgtttctctcgtatagtacaagcccctgaataccaggccttcctacctcttggcatcctcctctctcctattctcacttcatggctgcaatatcttcccttcttctctgaagatcttaatgctagataatgttagtttttttttctcttgcagatcttgtctccttcagtttccttgcattcttcctctgctgtgtttcttttagtccctatattttatgttggcatgtttcctcatatatctggtatctcatggttgcctgttcatatttaaaagtgggggcaataagctgaccgatgctctaagcactttgctgggatgagtttcaccttataacagtccagctggtttactccactggacagccccattgccagcacctttatgccgttcctcccagctggtcttctaactcccagct

SEQ ID NO: 16574 - DNA, 1084 bp, Homo sapiens
ccactcactaaacacaagtggaagttattaagagtggaggttccctcctccactcttaataacagtgatccagttcgtgttttttttttttttttttttagacggagtctcgctctttcgcccaggctggagtgcagtggcatgatctcggctcactgcaagctccgcctcccgaggtcacgccattctcctgcctcagcctcctgcctagctgggacaacaggcgcccgccaccgcgcccggctaattttttgtatttagtagagacggggtttcaccgtgttagccaggatggtctagatctcctgacttcgtgatccgcccgcttcggcctcccaaagtgctgggattacaggggtgagccaccgcgcctggccagtgatccagttctattacacctgggtgtggactcatgccacgactgatttgcttctaccctttagcttttctagtgccttagtttccttgcctagaatatcctgcctgccatagctgattcgttttcttaaaacccgtactcgctcattcattcaggaaacctcttcctgaaaattccacaaaaatctaattattctttgtattctagcattacccgagccatagttttcaataggtgtttgcactttttaaaaaattgcattattttctaaaaattattttgtttgtttttgtctgtttacttgatttaaagacaccatttttgtttaccatgtctagtacactgacacagtggatactcaatacttggtttgttgaaagttaagtagaatgtaagttcttacaggccaaagaccaggtagatgtttattcatagcaaaaaaagtattgtgttaaaagtttgctggctaactgtaagtcgagtattttcctaactatacagacctagtcaaagtgagaggtgacagcgtgctggcagtcctcacagccctcgctcgctctgggcgcctcctctgcctgggctcccactttggccagcttgaggagcccttcagcctaccgctgcactgtgggagcccctttctgggctggccaaggccagagccggctccctcagcttgcggggaggtgtggagggggaggcgtg

SEQ ID NO: 16575 - DNA, 1093 bp, Homo sapiens
gtcagaacttacacgttttacacttcaaatatgtgcagtttattgtcaactatatgtcagtaacgtttttaagaagtaaccaaaatatatttaatactaccaaaaaaaaacacggtaaagtataagcagataaaaacatcataaatccttgatgactccccccaaacccaaaactggaacattactaaaacttgcatttgtctatgagtttcttatctgtgcagtggattttgtgtatgtcacttccttgactttttgaaaaatagttttatcatatatgtttgtatgccgaaactgtgtggcatttaatttgtttttcttttgagctttataaaaatagtatgtggctgtagtttatttcattgctttatgatatgttaatctgccataacttatgggcacttcgaccgtgtttttattgttttttattttgttttgttataagcagtcttgctctgtgaacatttcttgtttccggctcttggtacacaagtacaagaatttctctagagtaaatacttaatgtggattgcattagacggtattaggtaatcaggactagaatagattgaattacttagaaataagatgaatgaaaaacattaggattctctattatgtttaaatagaagattcatagccgtagtgattgaactagttcaacctagttgaacatttgcatgaaaacccaaaattcctgttaacctatgtgtaatgactctcttactttgaagtcacattgtaaaaagtctggcactgtttggtatctccttttcaatgcaaaaatagtatagtagaaaaaacgctggattgtatgtaaaataaattatcctttctgctgttcctctcctcccctctaatctctagcaaattacttaaaaatttctcttgtgccttagcatactcatgtaaaagaaacttgtcctaagcttatccttccacttttgcacagactttaattaaggaaaacacctgtcaaatgtcacaccctttaagggaaagcattaggaccaaggtgttattctgtggaattaaattttgtatcctttggaacatttttggaaaagttgtgtggtggttcaggatttgttaa

SEQ ID NO: 16576 - DNA, 1050 bp, Homo sapiens
tcaagtgctcggtagccacatatgactagtggttacccacatggacagttccatcttataaaagtactataacctagttatctgttgggtgtaacttaagtttattatttttttcttattattataagtagtgtgataaatataagagctactactatgtatttgtcattgtttctttcggatctagtctgtcttacaatcactgaatcaaagcatatgaacatttcttaaagtcttttcataaatattgccaaattttgtccttaaaagtttgactaacatcaaactttaatatcaaatttgactaaaaatatgacagaatacacatttcttgtatatctttaccagcattatctgtctatccatctaccctccatctttccttccctttctataggaatcatcatatatttctttaattaattatgatggtaaataaacctggatattggacatcttctagtttatcttttgcccattttggctggtgttttatatttgtgatacccttttaaactttttatatttttaggatttaggatagcaactctgctatatactgcaaatatacatatacacacaaatatatatacacatgtatacatacacacacacacacacacacacgtatgtttgggttttttaaaatgttttttgagacacggtcttgctctatcacccaggatagagggcagtggtgcagtcatggttcactgaggcctctacttcctgggctgaagtgattatcccgcctcagcctcctgtgtaactgggattacaggcgttccccaccatgcctggcaattttttgtggagatggggttttaccatgttgcccagaatggtttcaaactcctgggctcaagcaatttacctgccttggcctccctaagtgctgggattacaggtatgagccactgggcctggcatgcaaatatttttcctggctcttcatttacctaacagtgttgtcttttctcttgctctctctctctcccccttttttttttttttttttttaacaaaacaaaaaaacaggcaagggttttt

SEQ ID NO: 16577 - DNA, 1032 bp, Homo sapiens
ttatcttaatttatagtcctgtggctaatggctaccatattttatttaaatagtcacatctgactattgagatatggcaagtctgaactgatgtattaagtttgaaataggaacttgatttctagtaccaaacaatgaaaatatctcaatttttaaaatattacatattgaagtagtgatattttacatgtattgtgttaaaatatactattactgttaattttatttcttaattaaaaaaatttttttttcttgagacggaatcttactctgttgcccaggctggagtgcagtggcacaatctcggctcactgcaacctctgcctcctgggttcaagtgattctcctgcctctgcttcccaagtagctgggactacaggcgagcaccaccgcgcctggcctgttttttttttttttgtttgtttgtttgtttgtttttgagacatggtgttgcctttgtcgcccaggatggagtgcagtgatgtgatgttggctcactgtagtctcaacctccctggctcaagggatcctcccacctcagcctcctaagtagctgggactacaggcgcgccaccatgcctgtataatttttaaaaatttttaaaattttttgtagagatggggtttcactgtgttgcccaggctggtcttgaactttttttttgagatggagtctcgctctgttgcccaggctggagtacagtggcacgatctcggctaactgcagcctccagcccccgggttcaagtgattctcctgcctcagcctccggagtagctgggattacaggcgagtgccaccacgcctggctaatttttgtattttaagtagagactgggtttcgccatattggccaggctggtctcgaacacctgacctcaggtgatccgcccactgtggcctcccaaagtgctgggattataggcgtgagctaccgcgctcagccggtcttgaactttagagctcaagtaatctgtctgccttggcctctgaaagtcttgggattacaggcgtgagccaccgtgcccagcc

SEQ ID NO: 16578 - DNA, 1060 bp, Homo sapiens
tatatacccagtaatgggattgctgggtctaatggtagttgtgttttaagttctttgggaaatctccaaattgttttccacagtggctggactaattgacattaacaccaacagtgtataagcattccattttctgggaaacttcaccaacatctgtcatttttttgactttttaataatagccattctgactggcttgagatgatattttgattttgatttgcatttctctaatgattagtgatggtaatgttgagcattttttcatgtatttgttggctgtatttatgtcttcttttttttttcatttgctcaattattttattttattattattatactttaagttttagggtacatgtgcacagtgtgcgggttagttacatatgtatacatgtgccatgctggtgtgctgcacccattaatttgtcatttagcattaggtatatctcctaatgctatccctcccccctcccgccaccccacaacagtccccagagtgtgtcttcttttgagaagtatgtgttcttttgctcgttttttaatgggattatttgtttcttgcttgttgaattctggatattagacctttgtcagaggtgcagtttgtgagtattttctcctattctgtagattatctgtttactctgttctttctttcctttttttttggagacggagtctcgctctgtcgcccaggctggagtgcagtggcgcgatctcggctcactgcaagctccgcctcctgggttcacgccattctcctgcctcagcctcccaagtagctgggaccacaggcacccgccaccacgcttggctaattttttggatttttagtagagacggggtttcaccgtgttagccaggatggtctcgatctcctgacctcatgatccgcccacctcggcctcccaaagtgctgggattacaggcgtgagccaccgcacccggcctactctgttctttcttttgctgttcttttggtatacattaaataataaaaatgtaaaataatgacaatagattttgaatgttataatagatttatgtgatatataat

SEQ ID NO: 16579 - DNA, 1944 bp, Homo sapiens
ttataaagttttctctgaggtggatatgggatagaaaaaatgatggtggactgagcacctactatgtatcctatacatatatacatatgttattttatttatttatttattttgaaatggagtctcactctgtcgcccaggctggagtgcagtggcgcgatcttggctcactgcaagctccgcctcctgggttcacgccattctcctgcctcagcctcccgagtagctgggactacaggcacctgccaccacgcctggctaatttttgtattttttagtagagacggggtttcaccgtgttagctgggatggtctcaatctcctgacctcgtgatccgcccgcttcggcctcccaaagtgctgggattacaagcatgagccaccgcacctggcctatacatacgttattttaaacctcccagccctgtgaattggtggtggtattatccataataataaattctgcacaggtttcttaagcaactactgggtgctatgctaagaacttatgatatgttggggaaacatgcagagaatttatattaaatgataatgagggagaaaagagaccagattatcattggagcagagtcagagaagactgtaaagtggctgtgctaagacttagaaaataaataaaagttaaccagagtgagtgaaagggatgttaggtaagccttgtaactttagagaaaagcgtgttcatggagatgattaagcatggaagttaggctgggcacagtggctcatgcctgtaatcccagcacttcaggaagccaatgtcaggagtttgagactagcctggccaacgtggtgaaaccgtgtatctactaaaaatataaaaatcagctgggcatggtggtgagcatctgtaatcccagctactcaggaggctgaggaggttgcggtgagctcagatcatgccattgcactccagcctgggcaacagagcgaaattccttctcaaaagcatggaagttgagagctttagggcccaggaggaaaaatggcaggagaatgaggcttcatagacaagatgagctaaacctattctcttagtgatggaaaacctttgaattactgatttggggcgtggtctgatcaccctgagaggatttaaatatcctcttaggcagtaaagtggcatgggttcaagattgtgcagctaagaagaaacagctcagatctgaatccaggccttgtctcagtattatagcactctgcttcttatgaagtctgtttaagcctagatcagggttaggcatgattacagcacacacatagttgctgcaaatcagttcagagaggcaagagattaagtgagatttacgaagtgtaggtcgatcatcccaaattcgaaatttgaaatactccaagattggaaattttctgagtgcagacacgatgctgaaagaaaatgttcattggagcatttcagattttggattttcagattagggatgctcaactgttaagtatataatgcaaatattccaaaatacaaaaaaatttgaaatctgaaactcttctggtcccagacattttggaaaaaggatatacttcctaataactgaggcctaactggccaagaagtgggagggaggagggcctaaaccagatgtaatggcataaaagggttagatgaggagtattgatttaattactaatttacgtgggggcagtgtgtcagaaatgaccaaggcgttaagccgggttggcagagagatgatagtttccttgaaaacaatactaagttaggcaaagctatttcttggagcaagttcctgagctatgttgaattttgagatttaggattttctcttcaagtcattgaaggtttttgcttttactaacctgcagatttgactctgtattagactctgaggatacagagataaataatacatgctgtcccagcatctgaggaccaggtgagtgtcatcc

SEQ ID NO: 16580 - DNA, 1099 bp, Homo sapiens
gagtttgagaccagcctgaccaacatggtgaaactccgtctctactaaaatacaaaattagtcgggcatggtggcgcatgcctgtaatcccagctactcaggagactgaggcaggagaatcgcttaaacccagaaggcggaggttgcagtgagccgagatcgcgccattgcactccagcctgggcaacaagagaaaaactttgtttcaaaataaataaatagttagatagataacttaatttggagtttttagcaaggagacacacttgctactgccttctcaatggaagaatagcagagctttactggagaagtcttgtctctgttctttaattccagtgtagtttcgggaagggtgcagtagaataataagattgggaggaggtagacattcacctgacttagatctgtgagtcataccttatcatcagtggaaaggtttatgtcatttggcacttacatttggtattttaaactggagcactatttattataactcagtcatcataaatcagtttaaactgctgttggattggatggagtttgtgtgtggaaacaagataaggaatctggttcttttagctatttagaatccttggaacatgaggttcagatgcttaccaggttttattttgcaataattcaaatttatggaaggttaaaatagacatgtatttcctatcccagtccctgggctggcaactgaactaggcctggtactagtctgtggcctgttagaaacctggctgcacagcaggggagcgcgtgggagctggcattaccacttgagctccgcctcctgtcagatcagcaacactggattctcataggagtgcgaaccctcttgagaactgctcatgagagggatctaggttacacactgcttatgagaacctaaggcctgatgatctgaggtggaacagtttcaccctgaaatcatcccgcccacccctaccccctaccccaaaaacacacacggaaaatttgtcttccacgaaactggtccctggacctcttagtaagattaacccattgttaacattttgtgctatttacttattcattctctgtcatattatttttttctgaatcttttggg

SEQ ID NO: 16581 - DNA, 1060 bp, Homo sapiens
ggattttttttttcctgtccagaatccaacccataatcattcattgcatttagttgccacatctctttattctcctttaatcaggaacatttcttcagcctttctttgcctttaatgacactgacatttttgaagagagtgacagaccatttatttgtagaatctcccttaatttgagtgtatctaatgtgttctcatgataaaatttaggaatgtggttttggcaggaatgttacacttgtgtgcttttcagtgcatcacattaggaggcacatgtccacttgtttccttatcagtgatacttacttagatctttaggttaatgtgatacctgccaggttcctctacttaagttaatatttctccttctgtaatacataatttgtgggaagacactattagactcaatatataccagtcctcatcaaactttcattcacaaagagttttaacattctttggtaactttgtctaaatcaaattattactagatggtaataattcagatatttaatggatttagatatttaaccgggtttaggtatttaattgtaggagctcagtaccatagtaggaaccgctttgagctgttggattctttagcattataaagtgctttgtgttgaacaagaatgtctcctgagacttctatacactgtttcaagttctgtactctgtaccacgtgagatgagcctgctttatttgtgtctctctaactgcccttcaaaatgtgttcttttttgtcttttcgataggttacttgctttaatttcatatagtcacttcttgtaagagatgactttcctgaatttataaccatcctgttggttttctgataacattcattcatcagtatcacacttaacatatggtatccaaatctggatactaattccagatacagtttgatctatcagtacaatggatcactgtttgcctgtaatctagctttatgctcaagagcaccaggttttggagacaaatagatttggcttcaggtcctagctctgccacttaactagctctgtgatcttgaaccagttcctaacatctccaaac

SEQ ID NO: 16582 - DNA, 1049 bp, Homo sapiens
tctgcaagtattactaccgtgtattaaaaaaatacagtcttgtcacacattatctttgtttaatatcatgatgtagtactcatatttgtttatattgtaatgtgtatatatatattttttaactctgaagtcacatcatttagaagcctgcatacagcaatactggtttcatttttattctgcttttaggaaccaatatattaagttcctacactggggttccttttttccagttcatgataagatatgttcagttttgctatgccagaatatcatttacagctttgtcttagggttctttaagcatgtctttatcatgctagttttcatttagtgaattcatgtggtacttgaaatacacaaaggacatatacactgttgctttgtttccaaggcagtaaaattctggtccaaattagtctctagttttaaagctctatgattatgtttaagttattaaaaaaaagtatgtctgtgttctcatcttaattatctacttagatatgttgaactcttactgtgtcacattagttaatattcatgtgtagagatcaccttttaaaatgaaatattttgcttttctagccctgtatcaaatcagtcacttttatcagaatctgtagcatcttctcaattggacagtacatctgtggacaaagcagtacctgaaacagaagatgtgcagggtttgtatatgaactagcatgtattttgttatttgagtattataggccagacactatcctaggtgcatgtataaaaaaattgccagcttaaaatacatgtttttctgttttccctatgaacacaatactttatatctttaagtatttaattaacatgttggggagccatttcacacttacatgtaattttatcatcagcataaatgttgcaaattcaaaatttgtttagtttggaaaatataattaaatgaatgtgtggcagtgttacactgttctcttttactattttggccgtttcagtctatatactactctgtaagaaaactggggctgctggtttgaggggcatctctttcttttgtg

SEQ ID NO: 16583 - DNA, 1025 bp, Homo sapiens
gtgttcgtagcagtattatctataataaaaaatagaaactactgagatggctgtaaatagatcattggataaaaaaaaatgtggtatatccgtacagtagaatattcagtcacaaagaggaaggaaattctgatacatgccacagtatgagtgatccttgaaaatatgctgaataaaagaagttaggtacaaaaggctacatgttgtatgattttatttatatagaatgtctaaaacaggctagtcatacagaaagattagtggttgccagaaaccgtgggaagtggggagtaattgctaatgagtacagagttttcccttaatgtgacttaaatgttctgaaagtagatagtggtaatagttttataaccttgtgaatataataaaaaccactgaattgtatactttaaagagtgaattttatggtatgtgaaatctccccaccaccccaagacagtgaagagggcttttgctggaggatgacttgtgagtgcaaacgcatacaggtaggaaaaatgaaatttgagaaagagtgaaaagactgtttgctgaagtgatcagttcaggcagttatatgttgaaactaaagctagaaaggttgtttggaagttgataaggtattccttggtcttaaaactcacataaaaactgaggaaacaggatgatttctgggaatcatagacttttaaaaatagtactatatcatcttgtccgtgaattcatttggtgactgttgaaattcaggttgtcagctattagtttcaagtaagctgaggttaccttagcctcatgggtatataatcgacatttattggtcccacatttgagttatagcatataagcttttagatagccttctgatccttcactttaaagactgcatttgcctcagttaaaaagaaaccattggccttctttggggctttagggttaatactgtgaaatgtcttttgagatatgcagtagtatttgtatgcatagaagatagatgtattttcactcttctccatttccagatcccattc

SEQ ID NO: 16584 - DNA, 1045 bp, Homo sapiens
cccactatttatgtctgaatcatttgtcacaagagagtgtgtgctgatgagattgtaagtttgtgtgtttaaacttttttttgagcgagggaagaaaaagctgtatgcatttcattgctgtctacaggtttctttcagattatgttcatgggtttgtgtgtatacaatatgaagaatgatctgaagtaattgtgctgtatttatgtttattcaccagtctttgattaaataaaaaggaaaaccagaatgctcccttgtattactttttctcttattctttctggtagttaattttattttttggtcttttagttttctactttcctaattttgtaagagaactaccattatttgtcttgcatctatttgtgactaagcttatgatcatgaattgtaattttgtattcctctgagttgaagacctgagcatatcttcagaggcaagcactcctctctgttacttaaatgtattttttagtccttgtctgattcccttttctacactgtcacactcaattaacatctaatagaagctttttcttgtaggattggagaaattttaagagtataattcaaactgcagggcaattgtagaattgcggagtagaaagacccttgaaagatcatttgtcctgtggttttcaaatgtgtctggtagccaaacgtttttaaacatgaaatgtcatataaaacagatgaaggcaataattttacaatataaatttctcagtttaaaattatttacttacttgcatgttctatttaaataaaggatggtttaattatcaaaatctgtaaattgatcacattaacagattataaagagaataaaccgttatgactgtcttaatagattcaggtagagtaatagaatttaacagccattcgtgataagaaaaattaaacttgacaaattaagactagaaaggaatttccttaagctgatagttctatgtgaaatcaacagccaaacaaacaaaaccaagcatcagctaaaaagaggaaacttacttccttttaaagtcagaaacaaagatgactgccc

SEQ ID NO: 16585 - DNA, 1045 bp, Homo sapiens
gaatgagctccccgctgcggcccagccttggttatctctcaccacaccctgtgtttccttttgcttctggagagaaggaaccacgtcactgttcccagggcctcagcagcctttgtgtaatgctggtactgagaagatgctctctaaatctttgtggcatgaatagcgtctaccctgtgtctgttcttgtggtgagagatttacagatattaattaaattctcacaataaacctactgtgaagttattgtccccattctacagatgaggaaactgaggtccagagaggcaaagcatcatgctccagatctcacagccagtaagaggcagatatggggttgatccccacatctgtcagcctcccaatctgtaaggtccagccctacggggcttagcgggttttctccctgtgtgcggaaacgagagattgtaagaaataaagacacaagacaaagagataaagagagaacagctgggcccggggcactgctaccactgagacacagagaccggtagtggccccgaatggctgggcacactgatatttattgcacacaagacaaggggggcagggtagggagggtgagtcatccaagtgattgataaggtcaagcaagtcatgtgatcatgggacgggggctcttccctctaaggtagccgaagcagagagggaaggcagcataagtcagcattttcttctatgcacttataagaaagatcaaagactttaagactttcgctatttcttctaccgctatctactacaaacttcaaagaggaaccaggagtacaggaggaacatgaaagtggacaaggagcgtgaccattgaagcacagcaccacagggaggggtttaggcctccagatgactgcgggcaggcctggataatatccagcctcctacaggaagctggtggagcagagtgttccctgactcctccaaggaaagggagactcccttttgcggtctgctaagtaatgggtgccttcccaggcactggcgttaccgcttgaccaaggagcgctcaagcggcccttatgcgggt

SEQ ID NO: 16586 - DNA, 1044 bp, Homo sapiens
gtgcgctatgcttgcaagctgtcctgccttgagtagggctggaacagccaaaccagctggacatacagttgagcccaatttctctatatcctgtccttcattgaatctacgagcccatcagttgcaggacacatcattcttttatggacttataagaaaaaaatgagctgatggcattttggctttcatcaaaagaaagaaaaaaaggaagaagtgatacctgaaaaaagagatttatttattccttcagtatatatttattttaattaattaatgaattttaaaaagttaatttttaaaggctccttttttagggcagttttaggttcacagcaaaattgaaaggaaggcacagagattcctcatatatcccctgcccccacacatgcacaacctcccccatgatcaacattccccagcagagtagtacatgtgttacaattgatgaacctacaatgacacatcattatcacccaaagtccatagttcacattaggattcactcttgatggttggtagacgttctatgggttggacaaatgtatatgacttatatctaccgttataatatcatgcagagtattttcactgccctaaaaattctccatgctccacctattcattcctcccacttccgaattcttggcatccactgatgtttttactgtctccatagttttgccttttccagaaagtcatgtaattggattcatgcattacgtagccttttcaaactggcatttttcacttaataatatgcatttacattttctctgtatctttcagtggcttgatagctcatttgttttggtgccgaagaatattccattgtctggatgtaccacagtttatttattcattcacctactgaaggacatctgggttgcttctaagttttggcaattatgacgaatgaagctgctaggggctaatacttactgagtaactactatgtgccggggactgatcttggttctgggatcactgtggtgagcaaattaggtataactcctaccatcatgctgcttgctagcaagacaaata

SEQ ID NO: 16587 - DNA, 1027 bp, Homo sapiens
attttgggctttttggtgggggttgggggaagatcaggcgtttggttgagtttaaggcaccttgagctcaagacctccaagggagatggggatttgccagaaacctccaagttgcttcatttccccctggagtcagaactttgccttccccctgcccactctccactgctgtgtccccaacaccttcagtaaggtctggcacacacttggtgcttaaaaaatatttgttaaataatgaatgaatgactgaatgaattggtctccacatcctccagatcccaaacaaatgaaaagagatgtgtccatcacaaggttttgtgtttttggtaatgttttatgttgaacttatttcaagtttacagacaagttgcaggaataatacagaaagcacttgtatacttgtcccccagattcccccattgtgttgctattttaccatgttggctttatcagttttttttttctctgtctctctctctctctcactgtgccacttgagaatgagtggcatacacaatgtgccttctaactctaaatgcttcaaggtatattatttcctaagaataaggacttttcccacgtaactacaatttatgacaaaaatcaggaagttggcattaatgtaatagcattatctaatccacagaccttattcaattttcaccaattgttcctcataacaaaaaaaatgatttttcaagttcagggtttaacctaggattataagttacattaagttctgatgtctctttagtgtcctttaattctggactaatttctcagttttttttgtttgtttgtttgtttttttctttcattaccttaacatttttgccaagtataggccagttattttgcaaaatatctctcaatttggttttgtctgatgttgcctcacaattgcattggagttgcgcttttctaaaattttaatttttttggcaagaataccccaaaagtgcagttgtatcacagggttacttttaacaatcatttaaaagtgagtctgttgatgaagtcaaggtcg

SEQ ID NO: 16588 - DNA, 1030 bp, Homo sapiens
ttccacttggagtccgatgctgggcttctaaaatagcatcactgaggaaaaactattttcaagttacttatagccaatggactattttcaagttacttgtagccatctccctctaaggtaaccctgggagctgctggaatgtggtcaaattgcaggtatatttatgtaagcagctgtttctcttggtgaacttttatgtgctagcattgctgcagtctgggctggccagtccaggctctgaaggaggagcattttccagcagcccttgacacttcacttgttgcagaagctttgggttggcccaggatcactcctttactgtcactgtgggaccagcccttttatctcactagagcataagtgacttctgtttagaggctcgtatttgatgaagcattattatgattacagtcaccgtcagggagcttcacttcactcacaactaactgcaagttcagaaatgcttatcatggctttctgtcgaggcaggcattcaggctcatcgacggaaaagtacagtaaaatgcattttcagccccctttttgaagactcttctatcatccattcactgtgttgaattaaagtgagtacaataggacttaaaagtcatattttgatttctctcctttattatccagatgctgctgtgtaatagagacacatacaagatataaaacaaaggatgatttacttagacttatagaaaagaaataggcacagcttatggtagtcctatgtaaagtagagaatccaagatggtgatagcagtccaaagcagcagcatcttggcaggtgtggctctaaaagatcctttgtgtcctccagggttgcattgttttccatgttgctgatgagccagtgagactgttttcgggtggattgagtcatcctgagtatttaaacatttgtgtcctgatttacctcctggttcgcctccgaattcctagagctgatggctgtacacatgcacaggtgtgaggcacaggatctgggtccctaattttcccagacaaatgctggttcccaagt

SEQ ID NO: 16589 - DNA, 1032 bp, Homo sapiens
tcatccattcaacaaatacctgccttgcatggctgtagaaaggttatgtgggatgcagcttaccttgcgatcagcctctccttcccctatctcctatatgcaggaatccccagctgttgttgaatgaatggacccccatttgccaactattccagccgggattctttgtgataatttgtagagagcctgagccaggttggtccccaagggatctggctggaaagttcctgtgcatgattcacatgtcccaatcagctgtgattaagctttcctatctccctgagagcttcatggaaatccagagatattttcagccttggatcacaggatttggctaggctgtggtctgggcacagatagcagctcacgagaacagctcaccggggagccattttcagccagctctgcagctctgctcatatacctttcatcaggctgcatttccatgagagtttaaagatggtgcattcactgaagagtctccctgcctgggagagaggacgtctgtgggacactcggtgcatgttgcatttattcttctcattaaaccatcacagctgggtgggtggctcacacctgtactcccagcactttgggaggctaaggcaggaggactgcttgtgtccaggattttgagaccagccggagtatcatagcaagaccttacttctacaaaaaaatttaaaaaaattagctgggtgtggagtcatgcacctgtagctgcagctactcaggaggctgaagtgggaggatcgcttgagcccaagaggtccaggttgcagtgagccatgattgtgcctctacactcgagcctgggtgacagagcgagaccctgtctcaaataaacaaataaataaataccataacagtgaaatattaatagctgtaatgaattcttttacttttttagatatagggtctcactacattgcctaggttgttctcaaacttctggcctcaagcagtccttcagcctcatcctcccatgtagctgggactacaggtgtacaccatcatgcctggctcattttt

SEQ ID NO: 16590 - DNA, 1083 bp, Homo sapiens
attttatctagtgaaactcagttagcttggccaaattaaggatgttttattgtctcacttctcccaacatgggaaaagggtggttcttctttactcaggaagcagagaggtaccacctctgtgccaggctcatgtgtggcccggccttgaagaaaatagggaagcttgagaaacgggagtaaaggtaagcagggctcaggattccatggtgcttcctttgttcaacagatgggttatggagggtgctgagcatgggcctttcaggagctcttgagacagggtaacaggatgtgctcactgacctgaaggagccaggtgcagggcggtgagagccccaaagggagaggaggaggaaaacaccatcctggatctgcttagcatctgttcaagacatagctttaaatgccagcctggatctgcttagcatctgttcaagccatagctttgtcccaggctcatacctcctgtcatggccccttgctccagccactccaggctaagacttgagctcccataacgttcttgagctccaagaacgtaagaaggggcagacgggagggacaggtagaatgcaatgggggcagagaataaatacttccccgcagggcctcggagaaagcatccccaggaggtagcactgcagtggggtttgcaagaaaagtaaagatccccctgtgaaaaccagccccctggctgaggttttgctttatttttctgaaagtcaggcagcactgagaaaacagaaaagccatcttgtacagggggtggcctacgtagttcctccagacaactgcttttgcagcttgtgaggttacacggatcaggatgccccctcagggcacagttacaccagaagcctcaatctgtgtctctgaactgaaaggtcctacactggtgaagttggttggaaaagtctactgtggacggtagagggcagtgacaatcagggatgtgaactggccagctcttttttgaatttgtgaggcgaaactttgccagcagtaggcagacttgttatggaaagatccttaaatgctctgtgctgaggggaggggatggcgagggtggagtgtgggcaatttg

SEQ ID NO: 16591 - DNA, 1050 bp, Homo sapiens
gaagcgcctggtggtacagacagtgcctgccgaggagctaagcagggtcagagatttagcctgcaaaggccatgcagagagcacggcacacagcaggggcctaataaagacaaactgagttaagtcgaaggtgaactgaaggtgggaggggtaaactctgggtagcaggactaggccccatccagcaggttttcattgagaagcttttctttccgtttaaaactgacagcctgcaacctatttcctgaatccttaagcctcataggtgccccaaaggaacaaattaaccagagcacaaaagagtgagtgaacagtgggactgatttttattctaagaagcttctctctttctgggaaccaaatcatctgctgagagcagaggatgtacaggcataggataggggctgaagagtgcgtgggagaccctggggagaacgaggagaggaagtaccagactactagacatggcaggactactcagcagtgtagaggaagccctgaagggagaggaggacggccaaggggctttgaggctcacgatgtgtgagtcattttctctagtgacgtgctgcatggagagagagccaggaagatggcccagggcagattgtgtggttggctgggcacgtagactcatgcaaaccaggtgtgtcctcgggataaatgcattttcctcttttctagctcttcagtggttcatgtgcctggagtgaatgatattcagtcctcttcttccacgggccagaacatgtcccaaatctcccggcagctaaaccagagtcaggtggcatggacagggagtcgtccgccctttccgggacaggtatgggcatctgtgagggcatctcccctgggtgaccagagaggcagagcactctgggaagtgttttctttggattgcggttctgaggatgggtcggctcctagctggaaccaaccaccctaacagcagctggctactcaggagcaccatccaccctcagggctctcggagagccaggtgcccagcctgcaacttcagcagccttttctccttacagccatgccctg

SEQ ID NO: 16592 - DNA, 1075 bp, Homo sapiens
cgagctttcaggagtcaagccaaagcatttcttccatttcagacctttcacgttatcttgagctttactgctgtcataattgtgtttccagtcttagtatcattttcattttgagtccagtcacagcaaaaacctagccatttgaaatgtagcatccactaggaaactacacagtcccattacttaagccctgaaaaatccaagcatttattcccttaacaaagtaagtggggaaagtgttgtgcctgtagggcccagtcaggagacagaaaccatggcagtaatttaaacaggaaaaatttaaagattttgtgactaattaaaggtggttaagaaggaccctgaggaatacaggaataataaatgtgggcagcagcttctacctctaaggctaagggaaagtagacaagacaggaactaagaacttggaagaggagaccccaccccacaaaacctgaggttcagcccttgttggagaatgtgcatctgtcttggtaacacactgtggatgctctggactgcagtgggtctgtaaaagcagcctgcccactgactgagacactcagtagggggtgcagatggaccagaaatggtctacacacccaccccaccaggtggccaagaatttccccagggagtgcccgcaggtaaaactgactcacaggaggcagcctctgggtggtagagaaatgtgctgaagagggagcaccctgacatcctgcacactgcgttagacacactgcaggaggaaagaaacacctgatccaggaagagaagccacttctctgcagtacctcgcttgtctctccagcgtcctctgctgagaaagcctaacgctgcactcgctgacaaaggagaaatgtttgcagggtgtagtttcagtatcatgaaacagggcaaagaaggatggatttagagccaagaggcaataaattgataactggcaagaatgtatatgacctgaatcctcaaattgctcagtttcttttcatctcaactactgccaggcatctgcttgttgatattaccttgtttcttggagaaatgcagggagccaagtgcacaggttgcttaa

SEQ ID NO: 16593 - DNA, 1047 bp, Homo sapiens
tgttttcagggacctctgccttctcccacaccccttacactagtgaggactccttcggcctcttgtgtttccttccttttgtgaccattacgccccctccctgtttcttatcaccagcccatcagcccactgactcccatatggtagaaaaggtaccgtggctgctgcagggcacatggagggacctaccctctgggaaagcccttgtgtccctcccagagtccttcaggtaggccctcgcagatgctgcttgctcagaaacaacccgtgcatccctgcccatggattctgcaggacctagaagagtggcattggttctaggaacctgagagtggagtgaggccagcatgcaggaaggagtttggagagagtgtttgctgtgatccattgaaagctccacattaaaccccagccctgtctggccagggagatccatgtgctcaatgttgctgggggacctacaaaagtcaaacattgctcagtaaaatgcctttggctggtcgccagctgtgcatgactgcagttcctagactctaacttaaccccaactttgcagtttctagagctttttgtctgtaatggtgattgggtctccactgtagatgcatgcagtgttcactccaacctcagaggctttcttgcttctggggaaatggcaggtggttgaaaccctgcacatcctcccagggccagccccagaatgggcctttctctgcctgccctgcccttggggccacctctgcctccagcaggcttgagcttgccccaggccttgggcataattatttccccccaaaaaaggcacaaaaataggttttggatcaaagaagtgtttctcagtgaaatgaaaacagtctttttatagcctttagcttgtgagtttggaagtttggggggtcttatgtttgttttgcctcttctgtttcttggaggagagttgaggcttttcttaggtgcatacacagacccaggtgaacacgctgactgtgaacctgccctgtatccggagctgtgctgggcactgaggggatgcaacaaaattaggag

SEQ ID NO: 16594 - DNA, 1110 bp, Homo sapiens
gtccagggtgcagtgaactcagttcttggcccttgggtgaggattcatggatgaatgaaagctagacctgatggggaggcattatgactaaataggcccagcctccttcccttccagctctgtcctaggagcataggcgggaaatctgagtagagtctgactgcagtttttgcttatgatttgtaaaagccgtcatggggtcaataagaaaataggggtgatggagggggagaagcccaggactgggagaatcgcacatgccccaggggttttcaccaaggattttcaagacaaactggagtaagaattaaagccccagaggatttaattatcctggtttgcaaaagagcctcccatgccagtaccgcccagccttggaggccggaatgctcatggcccctgtggtctgcttgtccttcagcccatgcccagcagatacctctctgactggagacgggctcaaagctggattagaaaggggagaggcacttgtgactttgtttgactctgtgactcacttcctcgctcacaccttgtttgaactactggactttcaactggctttccttaggtcaggcaagcagacagctccccactgaagaggtctgtacagtgacaacccgggccggcagcaaggacacagatgcagccacagtaaggctccatcaggactgggtcagtgatggcaacaggatggccaaggatggctctagaacactctgtccatgcgtcactccccccagttttatttttagctttggcttcagggagtgacagccatcacaaatagccacattctgctctactctccaacataccagattctacactgttgttatttcatgagacgtgaatgttgcagagagtggggggattctggttgttaaggaacttacactggggagctttactcttccgtgtcaacaatgtgactacatgttctccagattagccacacatgcaaacatcagtgtccttctagctttagccgagaaagaaaccagtcccagggaatgaatggtggtctccccactcccggcagcactttaggcagcccataagctatgcgagaatgtgaacgctcaccttgctccgtcacggttctgacct

SEQ ID NO: 16595 - DNA, 1049 bp, Homo sapiens
gcctgtctgggaaaatggcttgtccaacagggaagtacttaatatttgctctatgttgcatgtttatgccctcctgaagtcctgaaggggatgccctcattgggattatagcttttcgaaagtggcttaggcagatgagaatgtatcatatgcagatgcattgggtcagagtctgtaagtagttaaaagccacctgttccagtaaagggtttcaaaagtatgtgtcacacacagtctatagcttgctagaatttgctgttggcaaaggtattaaaaataaggttggcattagatctttaaaatttgaaacatgaaaatcctaccttgagtagattttttaattgaagagtttccatagaacattgcttctgtgtgtgcatgtccacattacaatgaaagcctttcacatggctcaccctttgccccaaatatacaggtgtgtctgtgttacagcttacgtggagtgtagttatttcctggaaacttttttttttttggtcatatttagttgaattaaggggcgttgttttggataatgttgaattatctgatagtgtatcagttgaattaagggtaattgtttcggataactttgaattatctgatggtatgtctaaagattgcccatgatttatttaatgttataccagaactcatatctaagttaatttattcacctgtaaaaaaggttagaatttgaaggctgcatgcgaagcttagaatttgaaggaaccttatagatcctcatgtcttgtgcttttcaaactgttttgactgtaacctcacagtaagaaacacattttacgttttgatcaagcacacatacacgtctgtatccacatacctgaagccaatgcttcacaaaacagtaatttttctatgggcagcacacatagcagaatatgttgttttatttcactttttttttttttttttttttgagacggagtcttgctctgtcgcccaggctggagtgcagtggcgccatcttggctcactgtaagctccacctcccgggttcacgccattctcctacctcagcctcccga

SEQ ID NO: 16596 - DNA, 1043 bp, Homo sapiens
cattcttctgttactgggtcagactctgttttccaccagccatcccccatgtcttctttgggaatctttatctttcctgccctcctagttaaccacactccccaggacactgattggagagcttgccttgttctgagtcatcttcatctctgtacttagattattcccccaggaggactgtaaggtgcagtgccctgcaggccccaaagccccacactcaggactttgccccactcttctgctcacatcgtcttttgtatctgcccttctcctgtgctaggaacaatggatcctgactggatcttaattggattaggagaccctttgtgttccctgtgcacctggtactcagcccctttgcttgagttatcacagtgttgctgtatctgttatttaactgtatctccactaaattggaagatctctgagggcagggacactatgtcttctctattcctgacagttggcaaaatgtcttaaaataataggtagtcattggtatttgttgaacgaattgcacataatgggcgccccataaataagtggggtaaagttaatttttcctaagttggactcttacaagtacttggatcttattttatcttcggggtttaatatccatgggtacaaccatagacaaaaaaaaaagggccagatgtattggcttgaggcctcatccactttgtattcattgtattggtgttcttgtgacactgaaatgtctgtattgaagagaagaacaatactaacccatcctttgtatgtctctacatcttttatccattacctatttgtgccagctcctgcgcatgctagagtgagctgtccagcccttgaaacagatgtaaatactaccagtgtgcagacccctcatgcatggataaagacagtgaatccccccagatgatgagtattaaggtgggcacgtaatccagagtaagggtttcaggaggaagtagatttggtaagaaaggtggttgttgccgtttggccaatagatgattattttaaactcttgaaaagttactgaaaagagtgtagcg

SEQ ID NO: 16597 - DNA, 1028 bp, Homo sapiens
aattcactatgtcagttttgtgcagctgtaacagaagatctgcgactggatagtttataaagaaagaggtttctttcccaatttctggaggctgggaaatgcaagatcgaggcacttgcatgtttggtgtccgatgatgactgctctgcttcctggctggcttcttgaaccaaaggcgggaggaaggctcttgctcaaagctttcctccagaaaagccaaagggcaagcgaaggaggggagagaggcgcagactccctctttgataaagaagcttctctgagataaggcataagaatggagcccacatggcctgatcacccgttaagggtcccacttcttaatccagttaccatggcaattacatttcaacatcagtttgagagggcacaggcattcaaaccatagcagcccccttaaacaagacacttcacacttctgggcttcacattccactgtttgaaacctggaccagtgaattgtgatccaactgtatggcttctgaggtgtcttctggtaagtctgtgttttgtgacttttagggaaaccacctaatgtttttgaatttgctttttcttaactacactgggaaatacggtggattcattctggtacagtggatctccaccttagctgtactttagaatctcctaggtagattttttttaagtgtgcagtctatgtatatgagtgtgcgtgtgtgcacacacacagccagagttgagacacactagcctagaaatgtccaagagccagtgagtatattaagatcagccccaattataatttgttaagagttgaaaaaaatggaatgttagaaaagattttttatacatttatatacagctatccccccttacctggtgggggatacattccaagacccccagtggatgcctgagccttggagagtaccaaatctggtttacattatgttttttcctatacatacctatctacaataaagtttaatttacaaagtaggcacagtaagagattatcagtaacaggtaataataaaatagaacaa

SEQ ID NO: 16598 - DNA, 1032 bp, Homo sapiens
tgtggattttgtagtgttttaaaacacacacagacacgcacaaatcgggagcacctgctctcatttttatggaaaagaatgcatgattaaaagttgagacaccagtgttctcaattcatagtgttacttaatatatttttggatttcttttctcagaaatacagtatctgagcatgacagtaaattaaaatgcttagaaattgcagtctttcaacaaattgagtacttgatatatgtcaggtgttgggctaagtgctaggtataatcttctgcagtataaaaaaatacacagcgttagccaggatggtctcgatctcctgacctcgtgatccgcccacctcggcctcccaaagtgctgggattacaggcgtgagccaccgcgcccggcctacacagtttgcattttaaaagattactttgtatacccctagagaggttcccccccatggaattctatattgtctaactgttttctgatgacataaaatttctcctgagtctttggaaatcaattgaaaggaaggaaagaattgcaatggccattcagattcctctcaccatttggattgggtggttctgaccactttaccattttttatgttgattctgatcagaggaagatggctgaggattagtaaacagaaacctggataactgtaggtgggcctaggttaagagcaaggacagtagagccagaccacctgagtttgaatcctgcctacactgtttaatctctgtgcctcagtttcctcttctgtaaagcggggaaatgataattgtgaatatagtaggattgttattcatagtaaatgagtgagtgtttgcaaagtgcttacatgtaagttggatagaatacatttttaaaaaactgaaaggaatgagggaaagatatgaatgaatgaatttatagtagtagacagctttcaaagatttgaggaagagcaacccacctatttctaaatgggtttgtgatcttcaaagcgctttcacgtacactctcttggttcctaagaacggttctgtgcagcccac

SEQ ID NO: 16599 - DNA, 1033 bp, Homo sapiens
gttttctttgttttcaccattggaatgaacaaccaatagaagtctgtttgtgaaattttacttagtataatgctaaaaaattttccaaatctacaaacgtgtttttgttttttttgacagttcctcaaaacaaagttgtattttaaggaacaataagtacattttaggtgattgatgcttttttcctcctcttcctcataattaaaatataaagcacgtttgttaagttttggctaaaaggtttgcctggggcaaaagtattccacatgaccgagggactgtgttttctggctggtcctatttacacacctgcttcccttgcatagtcagtctttttattctgaggcttttctctaaagtttaatttttatttttttaatgtttatctaaagtttataaagttagtaggatttctcagtatcctcagacctcatccttcagttaacattcacgttaccttgtgtatttatcttcttcctatgtcttaagatatttccactaggaattctaactctgaaatatttaaaatgttgacttcaaagtcagtggaactgtgccaagcgtgcttctctgaagataaatgggagagctcctgacaaaggacaaagtcaaggcccattaacttaaacaggatgcagtgtgtctcagggaggccaggcttgttcatggttgtagaaggaaaagcaagccttacattaaaacaaaaacaaacagattttaactttataagtgatcgttcccatgagacaccatctccttggcgctgtcagcctccattgcaggaacttcctgcctcagtgcttcctcttgctgctgagatggctgccaaaccctcggtttcagggtgctcttgggggcatgtcccattcccatatgctgagtgggaatggaaacccaaattcgtgctgatcaacctgtactcagcatagcctgtgactgcaaaaggatggtagacattgggagaggctgagagcaaaaacttgcaaaggggattactgcacacatcgcactgcccgtgacaaagagtaatgat

SEQ ID NO: 16600 - DNA, 1031 bp, Homo sapiens
agtgactacaagtgtgtgagagacaaaggggagagaaaggtgaaaaattcatcctagttcccaagcccatgagatatagggcatggtgattgatagaaacagaaagattggggaacgaatatgaagtgtcaagtttgggagatgttacatgtgaagggatggggtgctcaggaggaagcatcaaaagaaaggaagggtggggaggctagagttcagatgaaatactgggggcaaatgaacaaacattttagagagtctggccactcatttattcatttaacaaatatttatcatataactactatatgtcagccactgtgctagatgctggcattggacaagttctattaatacaaggaaatcaatttgaagacaaaagatgccagaaaggggtgaggattgagctttgagggatgccaacctgttgtgtgggagaagaaagaggagtgaccaaaggaaacagaagaagagtgcccagaaagagcagggtagatctagctaatgtggtattaagggaaccagaggagaacattttcagaatgacatgatgtagtcaacagcagatatttattaagcaccttttgctgatgcagaaaatactttgttcttcacctcatcccttcaaaggtagagaagcctcccctggcccctgaaaacacagcctacctgtgagctctctttcatcctgactgccaggttccacaggcaacaactccattaaccatgccttagctactgccctacatgttgaattttgttttatatgtattttaaatcagaatccttcctgattttgcccttgatatggtttagatatttgtctcctccaaatctcatgttgaaatgtgacccccagtgttggagatggggtctgttgggagctgtttgggtcatgtgggtggatccctcatgaatggcttggtgccctccccatggtaatgagttctctttctgttatattagttcatatgagagctggttgcttaaaaagaacctgacatctctcttgttctctcccccaccatgtgaca

SEQ ID NO: 16601 - DNA, 1965 bp, Homo sapiens
tttagaaatggaggacggatgctgtttttgttataatcttttatttcctctcttctgcatgattcttaatagtcccctgccggatctcccagcttccttttcatgctgtcatctcctgcctgccattgtcacctcacccttggacactccagtggccgtcatctccaggacagcccgtaaccctttagcttccaattcacgctatcctagcacatcccctgccggccggcccagtgctttcctgctgctgcattgggtatgcgttgcacgtctcccatagaaagtcctcacctccatgtgtttaattcctgtctccatggcacagcccaggtgtggtgctctccataaagcatgttccaatgccctgaattctttctttagggcctccattcttccatggagtttcgtggagcttggaggggaggaagttgggctgaaatcctgccatttccatcagctgtggattgatagttcttttcactgaacgccgttatcagaaagcatttcatattgtcctgtaagctgcaatacgtatttattccgaaaaggagaattgttggctcacgggcttcaacttttccagataatgttgaattgttttcccaagtgcttgtactaatttacaaagtaacagcgttccacttttccatgtccttgccgtctttcaacactgtctggcttcttcatttttgcctatcgtttgggtataaaatagtaactcatggatttaatttgcatcttcatgttctagtgaaattatcacatctttctatgtgtgtattagacattcgtcttcatttctttcgcctatttgtctttttctttttcttttctaagcactctttagatattctggacatcctttgtaggataataagagagcatgtattttcccgggttccttctattttgttccaccatcatatctagggtgccgcatccttctgcatgggctgaggtggctcactgtgatctacttgccaccaccaggaaggcggaaggcatggggaatgcacaccattcactttaaagcatgacctggaggttgctcgtgtcacttctgctgacatgcggttggctggaacttaggtctctgcacgcaccaggctgcaagggaggctgggaaatgaagcctgtattccacacagccctttacttaactaacaatttgaagagaatggattggaacccactgatggattgaaagacttggaagggtttaaccctgagggagactaaagaaaatataattgtcttcaaactaattgtctcccagtaaaactttttctgataaatgttaatatattttgtatcatgataactttgcttcgagtttttaatattgcaatttgccaaacttgcttttgtttttacttcagaagtgtgtttatgattagcaaagaaaatataaagggggaataataggaaatgagatgaccatctttgtagctactgaaatgaaatttataaagcatatatttaattagccagaaaaataatatcatgtttattgttttttgcaaatgttgtggaaggcagaatcatagtcacttagtaccaaaacaggcccctaacaattgtttttgtcaagctcacattcatcttaaactaaagtgtacaagttagatgatatggttttaagctggtggatgtgggaattttatgggtttaagaggcgggtttctctgtccctttctctctttcttcataccttagctaatggcatacaacctctgatttctccaggtatggcgtgagtcccgagaacattatcctctatggtcagagcattgggactgtccccacggtagacttggcctcgaggtatgaatgcgcagcggtaattctccattcccctctgatgtctggtttgcgtgtggcttttccggataccaggaaaacatactgctttgatgctttccccaggtaagttcatgcttgtccaacaagtggtaagtcagccaa

SEQ ID NO: 16602 - DNA, 1034 bp, Homo sapiens
gaactcctggactcaaataatctggccaccttggcctcctgagctttgattttgtgacagttgtaaccagtatgatctcagggaaagaggaaagatacaggcaacatgttctatgaccatctaacaatgtgatttggggctataacaacttctctggctattaggtgagtgggaagtttcacttgtgtgagtgaatggccaataccctggaagcaaagcatctgggctcaggcctttcagggaccagggtgggaggaggatggctgatggaaagcagtagcactggtgaaaacagtaaggtgacaacaggaggctccaaggaggagagctcagtcacagggctctaggtgggcctttccattgattccttaacagtgcaggatgggtgtcagctgcaaatgagattcttgtaaagggcaaggacaggaacaggctaaggtttcaggggcagaggaagaaggagcagcagagggaggaggaaagatgaaaaaatgcctctagagaaacagtggagctgttggagcagaaatggtggaggcacagagagagcaacctgagtaggaattcctagcctgcagtggggctgggtccactgtgtatggtgcagacatggagacagcaacccaagtgagctccaagcctacagtgggcctgtgtccactgtgtccatagcagatggtgcaggcatggagacagcaacccaagtgagttctaagccaacagtggggctgtgtccactgcagatgttgcaggcatggagccagcagcccagataagctccaagcctacagtggggttgtgtctactgcagatggggtaggcatagagtcagtaacccaagtgagctccaagcttagagtggggctgatctgggggagcctccagaacttgacagcctcactactgatttattttggctctgtggtcgatgtaaaggaagagaaaagtgtgagatgacctggaaggagttgagaaggcatcctggggggactggaaatacctttgaggctaagcctaatgtcatcccctctgtg

SEQ ID NO: 16603 - DNA, 1022 bp, Homo sapiens
tttccttcaaagccacccaagagccataagagatataatgattgtgcaagaaaagtttttcattaaggactttaataaaattaaattaaataaaatttgagaatcaatacaatgatgataggaatctgtggacatgattatttttggaaaaaacttgctgatctcatatgcacgaatctttaagtcagactttgcacccagaatgggttgaaaatttggtctccattttgagtttgggcaccaattaatcatctgtacatgtgcttttgtgcttggctaaatacgatcagctcacagaagtttgttagtgcatatttggtttcattcatttcccacattttgagaaaagggtgccttggtttggtgagataacagaagagagaatggtaaaaacaagtgtgttcgatctccctgaaatgatgctctgctgttcttcaggctctgtgacctagaaggctcctcttctgtctttttcctcctggaatgtgagaaaatctggcaaagtgggagccagagaggctaggccactaaaagcctgtgtgcgaaatgatctgtacacagcgaattgactccacctttcacacattactacttaaatcatgaaaggagcattgcaaggaggaagtattttaacagcagaagaaaacatgcctccaatgtcaagaaatttcagcacaattttgtgcagccaggaccagatgaagggaaaggccaagcaatatgttttgaggactgaatatctatgcttccccaaattcatatgttgaaatcctaacttccgatgtgaagatatttgtaggtggggctttaagagataattaggtcacaagggcagagcccccatgagtgggattagtgctcttagaaaagggacccaagagggctgtctctcttgccctctttccgccatatgagaatccaatgagatggcatcatctgcaaatcaggaagaggatgctcaccagacaccagatctgccagcaccttgatcttggactcctcagcctctagaactgtaagaa

SEQ ID NO: 16604 - DNA, 1033 bp, Homo sapiens
agtgtttcttaaccctctgatcatagaactttgttctctttttaacaaaaatgcacatgtgcacctaaagcaattatctgaatgagattttaggagactcttgggcatatgttctatccgtgaacacttcaagataggaagtttcttataccttggtaaacatcagtggcttcagaaagcaaaataattgactgcttgtgagctttcagataatgaaagaattgaattggccttgggaagaaaaaaaaatacatattctatgtagtgacttgaattttaaatagtaaaattgcattgaattttactacctaccccagtttttcaggattttcaaaatagcaaaagacagacccagtgatttttcaagaccgctgaaaaaaaagtggtgttggaaaaagttatccaacacttggaaataaagccaaagtatgaatgcatgtccttttgatgttcaatgtcatgtgggggcattgttttacaatcctttccctaaggattatttcactagtagcagagtacacctgagtttgactgattatttccacttgattaaaacccacacactgtgaaattacatgttaatttgtagatttctgcctggtaaaaagatttattctgttattattttatcaccctgtgagacactatatagttttatatctgttagcaaattcatttcagcatttttgaactaactctgttgatacggtttagctgtatccccacctgaatctcatcttgaattgtaatccccataatccttgcaagtcaagggagagaccaggtggaggtaattgaatcatgggcgtggtttcctccatgctgttctcgtaacaagtgagttctcgggagatctgatgttattataagtgtttggtagtttctctcgcattcattgtccttctggccgcctggtgaagaaggtgccttttttcccctttgccttccaccatgattgcaagtttcatgaggcctccccagccatgctgaactgtgagtcaattaaacctctttctttataaattacccagtc

SEQ ID NO: 16605 - DNA, 1026 bp, Homo sapiens
tcctcccagccagaccatattcccattcccgtccaggcagcagttctttgggatccgcctgactgaaaagtcagtaagtagtccctaccctgaaatctagaatccaactgtgagtcctgcctaacaaccttccatcacctgtaaacacagtcctctccttcctcagcttcactattgacccagggattagatcattatttgctaagtaaatatgaacgttgtcaatccctggtgtatttgtaatcccattcaaagaaaacacctacatgttgatggaaagcagtttttttaatagtctcataataaacacagttcataattatatatagattaaaatatcaacaaattaactttgggtgtatgaatcctcagactggtgtgcaggagaaaatttttacttttctcctaatttatattcaacgcaagttcctttctcattcaactgtaaggaaattcagtcttcattatgttgagggccaccattggaatggcgtgattttacttcttgtttgtttgttttgggctgtggttgttagttttgtctttttaagggtttatttttattttttgacaatgcaataaatacacaagaagtatcataaaaatctaagcaaaaatatctataatattgtaaaacgccttcataattctatcttccacagataacaaatgttctttaagacttgttttacatatgcattgatttttttttttttttttttttgagacagagtctggctctcttgccaggctggagtgcagtggcgcaatctcggctcactgcaatctccgcctcccgggttcaagcaattctcctgcctcagcctctctgagtagctgggattacaggctcgtgcgaccacacccagctaatttttgtatttttagtagagacggggtttcaccatgttggcctccatctcctgacctcatgatctgcctgcctcggcttcccaaagtgctgggattacaggcgtgagccactgcgcctggcctgcattgatttttttttttttttaacaaaaa

SEQ ID NO: 16606 - DNA, 1032 bp, Homo sapiens
gccacacccattcatttacatattgtttaacagagaccatatgacctacagaccctaaaatatttaccactttgcgcttcgcaggcattttgctggctactgctgtggacaccaattttaatttaggtagataaacttttttgtagcttctgaggttttgcattaatttgctcaggcatataggttggtggaagtgctttctgttccttctcccaaaccaatcacacagccatataacttcatgcctgagtttttgtgtggtcctctatagtgagtgagtttttacatacttctttgcagcagcatgaatttcaaaaatctcaacgcttttgctcttgctaatctttgtaaactttgtacacccagtgctggtacattctgatgatagtgcccacactgcactctatgaagaaaagactgatgattgtttatattaaaatgcaggaagagaattgtagcggcaacttttgcttctctaatcagcagcatcataagagacttactatgtgtgggcaggggggagaacgttaatttatacattgagatagttgtattaaaattgagtgactcttactgtgacataaagtgaatgtgtctcttatacagcagaaaactattaaatttgttttttctcagcagtataaaataaagtggaaaatgtgggaagaatacaaatccttaacttctgtgcttctgcttatttcacacccctcaaatttctgattcctttcaactgtagctggctttactactgagtggtgaaattgctgaacatacttaaaactacatcatttaagactttgaattttgacatctcctcctcttcacagtctttcaaatactaggcaacctgtagggttccactgtgtctgtcatgtgttgtccctgtgttacatgaaagcagccccagtgaacttgtgaatttgctcagtcatttcactggctactgggtgaggaagaagtaggattttctctcttaaaattccttggtgaaatcattggatgggcacggtgtgtttctttaattttcct

SEQ ID NO: 16607 - DNA, 1032 bp, Homo sapiens
ggacctgtgatagttgggtataaaagacaaaaaaggcatgtccctgtcctctgggaagggacatgatagtcgaatgggacttttatcagattgttttctcctgttttgatcttatcaccctgccttggtctcctccgatctcttcttccttgtcctacttctttcttctcttctcattctgtgctttctctgagtaatctttgactcccattacttaagtcatgacctgtgttccagggactcctaaatttgtattcatctccggagtttcaaacccatatatctgtctgcatatcatatatgttagggaatctcgcttggagtgacatgggtgttcaaaatgatggtatttaaattttcatgtattcacctcctagcactctatcagccccatcatgtgtcccatcagtaattctccttgtcattgtgagtgggacaaaatgaaataatcaaactagtcacccatgcctcaacctgggaactgtcttagcgttcttttatatgctactgttctctgacctccccccaaagtacgtttctaagacctgtccttctaaatgtctcttactattttccctgtgatctcagtttcttcttcccatccctcaaatgctttttgtgtgtgtgtggtgggggaagagagtaaaattgaaattcgtggaaaatgtactaccctgtctttcttcctttctttctttctctctttctctctctctctctttctttctttcaatgaagtctcgctcttgtcgcccaggctggagtacaatggcacaatctcggctcactgcaacctccatctcctgggttcaagtgattctcctgcctcaacctcctgagtagctgggattacaggcacctgccaccatgcccagctaatttttgtatttttagtagagatgaggtttcatcatgttcaccaggctggtctcgaactcctggccactaccctgtctttcttgttgcttggtatgactccactaccctgctccctctctccccctgcagcgggataatttaggaatcagagag

SEQ ID NO: 16608 - DNA, 1032 bp, Homo sapiens; identical to SEQ ID NO: 16607

SEQ ID NO: 16609 - DNA, 1098 bp, Homo sapiens
tctctctggaagcttttaggagtttgtcttttccttggtgagctgaaatagcacaacattgtacttagtgtgtgtcttttttcattcactgtgctgggtacaccaaatggataggcctatggatcgtctctttcaaagttggaatcttgaatcttgtcatatttttgttaactttctcctttccattttatttgttcattttgaagtgtctgttaattggattttagtcctcttgtttgagtcttgtatctcacgtcatttctaattttttttaaattttaagttctggaatatttttcttattttttgacttttaggaaattttatttggacagtcataactttaagttttgttttggttatttattgttgcttaaccaattttcccaaaacttaatggcataaaactacacatttgtctatctgtcactactgtatgagctaactgggggtagctggacagtttttctgctggtctcatttggcatctctcactgtgcggttagacggtgtcagagactggtcatctggatgctcagctgctgtggaatgtctgagacggctgcttcacccacaggtctgctgccttggtgtttcttcttgtggccttctcctctgcatagcgtctcatcctctcaggcctctttgtgtggtttctctttctccaagaggatagtcagtacttattttggctactagaagcacagaagtggagctgccaggtgttcttaaggcttagacctggaacaggtccagtgtcatttctaccaaattctataggttaaagtgagtcttgaggccaacccagattcactgtgggatgggcctgtccagggacatgataacaggaggttaggctcattggggaccaactcccaagatgaaccctgagttctaagaactttttcttctctgattattccatattcatattctaattttgttttattcatgtaatatattcacaagtgtccttatgaagtgattttgatgctcttttgtcttctccctagcatctctttgttctttaataaatttttttcttagtttattttggtcttatttttctttttaaaacctttccttaaatatctattc

SEQ ID NO: 16610 - DNA, 1098 bp, Homo sapiens; identical to SEQ ID NO: 16609

SEQ ID NO: 16611 - DNA, 1047 bp, Homo sapiens
agatgaaatacatttagcacttggtaagcactctataaatatggcaatatgatagtccctgactcatcttcctctctgttgccctttaaacaggtgagcacctagccttgttggttttatgtgctcaacagcagttgactcccctggctcctctcacccatgctactgcgtagtcaagccctccatagtctcctctctggtctctgtttcccatctgcctttgcctttccctctccctccccagctcacgttctaccatgcactggaatctttctgaaatgtaatctgatcttgttcccctgctttaaatcctccaataattctcaccacatagaggataaaatcctaactttttgtgtgtatactggactttctccgactttcctgcctcatcttccacctcttcccgtcatggatcctataccgcagacataccaaattccttatatttctccaaacatgatctttccggcttctttcatatgtacatgtacaaagcaattatctgccttgaactttggaacagactcactccatggccagttttccatcaggagttttgctgtaaggtaccacagtgcaggagagagagcactgggctaactggtgggagacctgggtccttgtttctgttctcccactagcccacagcatgacccctgtgaagcaggagaacagggtctgggggcagggaacctaaggacttcctagaactaaattaaacggaaaaaccccaaccttctaagtccaagtaaatagctttgtatttcagcatggcaggaaacatcctcttcatttgcatagggtgtacacccagtaaatgactttgtaacttcactttagccacttcatatacatagggtgtacaccaagtaaccagtgggaacctctagaggatatttaaaccccagaaaattctgtaacccggcccttaagccgcttgcttggcccactcccaccctgtggagtgtgctttcgttttcaataaatctctgctcttgttgcttcattctttacttgcttttttttttttttttttttgagaag

SEQ ID NO: 16612 - DNA, 1038 bp, Homo sapiens
attctggtttcccaggcacccagcactgtgcttggcatatggttaacactgcatcatggagtgtgcatgcagtagaatccagtgtgtctctgtccgtctgttaggatcataatgtctctgaggtcaggggctgagtaccgctattcttagtacagtactgggcccatagaaggccgtcaattcagccaggtgcaatggctcatgcctgtaattccagcactttgggaggctgaggcgggtgggtcacttgaggtcaggagttcgagatcagcctagccaacatggtgaaaccccgtctctactaaaaatgcaaaaattaaccgagtgtggtggcaggtgcctgtaattccagctactcaggaggctgaggcaggagaattgcttgaacctgggagttggaggttgcagtgaaccgagatcatcacgccactgcactcctgggcgacagagtgagactgtctcaaaaaaaaaaaaaaaaaggtccttgatttatgtttatgagcaaacaattctgactagagctgaaagtgttaactgctgttaaccccctaacagctgcctattggaaataatccaatgtatttaaattgtactatacagaaatataagctcataattgccactgtctatattgctgcggttgccaaccccatgtcagtccagtgggcaagagaagtctttaggatgatgcccatttaccaatacaacaccctcacccagatgaggccaagttgtccaggttatcttcaggctgcagctctgggccagaggggcacttttacttatgcattcaataaatgttaactaaactccttaggttccaggcactgtatagggaggccctcagaaaaaacaaatgtagttcctgccctcatagagcttacagtctagatgggaagagcagcattcttcaggcaatcactggaaggaatgtaagatggtaaccaagacaagttgatagtgtgctgtagtgtataatggtgggggcaggatggcttttgagcagagctctgaagaatgctgaggaggtaactggat

SEQ ID NO: 16613 - DNA, 1045 bp, Homo sapiens
ccttcttttgggtccctttcgctgcatacttagtgcatagttgagattaaactttgcactctgcctctccatttaatattataaaagtgtctttttttttgaaatggagtttccttcttgttgcccaggctggaaccactgtctcccaggttcaagcgattctctgcctcagcctccccagcagctgggattacaggtgtgagccaccatgcctggacaaaagtctccatattattaaacaatcttcagaagcacagtgctgaatgactacagtaataatattcttacatggatatatcatacttttcttaaccattcttgttttattgggcatttttgatggaggatgataacattttcatatttaatcagtatttaaaattgatgtattaaaagttgagaacatgaaggtttcttttgtttagttttgtttgttgggtatgtattaaatatactgtcctgacttgagctttattcacatttgctttctaggttattcaaggacacggaaaagccaacaccatggtagcattaatgaacgtttaccaagaggaagatgaagcataccaggaattggttaccgtggcaaccatgttcttccagtacttattgcagccatttagggctatgcgagaagttgcaactttatgtaagcttgatattttggtatgtttttttaaaatttttactttatcagatttactatttgtcataaattatttctttatttacacttaatgttcaatctctgtttgtactttgtttgggtttaccattatgtttatttatttacttatttattgatagagatgaggttttgccatgttgctcaggctggtttcgaactcctgagctcaagcagtctgtccaccttggcctcccaaagcacagcattacatgtgcctagtttacccttatatgtacatattgagtttatatttaaaattgatagaaaatgaagacatttacgttggtcatcttaatagcttaagattcctacagatttgaaagagttaaatgttttttctggtgatgaatttttttt

SEQ ID NO: 16614 - DNA, 1026 bp, Homo sapiens
aacagcattattcaatatgtggtcctttcactcagcacaatgttttcaaggctaatccacgttggagcaaatatcaggatttcatttctttttattgctgagtaatattcattgtatggatatattacattttatttatcagttgatggacatttgggttgtttccactttttggctattatgaataattctgtgaatgtttgtgtgtaagtttctgtgtagacatatgttttcattgctcttgtgtatgtactaaggagtaggattgctgggtcctgtgattactcaatgtttaaccttttgaaagactgccagacagttttccaaagtgggtgcatattttatattcccaaaagcagtaaatgagggttccggtttgtccacattatcaccagcacttgttactgtgtgtctctttggttacagccatcctagtgggtgtgaagtggtatctcgttatggttttgatttgtaattccttgtcggctaacttgtacatatttcttaggctttgtagaagaaaaattgcatattggatgacatagcagtacacgtcttagttcaggctgttataacaaagtaccgtagattagtggcttataaacaacaaaacttttttttcacagttctggaggctgggtagtctgagatcaaggtgctcacagatccattgtcttgtgagggccagtttcttaatttgtagatgactgtcttgctgtgtcttcgcatggtgaagagcagagaaagagagatcctgtgtctcctcttctttttataagggcattaatcccattcttgagggttccaccctcatgacctaattaccccccaaaggccccatcttcaaatatgatcacactggggatttaggcttcaacatatgcattttggggggagtccaataccagtacatgttataagcatgaatatacagatactatattttaggtgattatattacatatccctaaaagaaacagtaacaacagctaatacttaagtgctgtgttccaggccctatgctga

SEQ ID NO: 16615 - DNA, 1060 bp, Homo sapiens
aaatttaagtatatagattgcaatgtttaaattataaatttaaggaaatacagaccatattatcaattactttttgtaaattataacatctgaaaatttcctaaagttttccttcagtggtttattattcaaataatatattcattgttaacacatagcaaaacaaagaaagaaaaatgattattaccccaatcccatcatctagagatgcttagtggttggctgggcacagtggctcacgcctataatcccagcactgtgggaggccgaggcgggcagatcacttgagattaggagttccagaccagtctggccaacatggtgaaaccccatctctactaaaaatacaaaaatactaaaccctgtctctactaaaaacacaaagtccagtgtggtggcacgtgcctgtaatcccagctgcttgggaggctgaggcaggagaatggcttgaacctgggaggtggaagtttcagtgagccaagatcgtgccactccactctagcctggacaacagggcgagactccatcttgaaaaggaaaaaaaaaaaaagatacttcgtggtaacaatttgctgtataactttgtagattttaaaatatgctgatatataaaaatataaatttttaaccaaaatatataaccagttcagtaacatctttttaaacaatttttaatttttatgggtgcatagtagatatatatttttatgggttacatgagatattttgacataggcatataatgcataatagtctctttttcatttaatacataactgtctttctatttcagtgaataataaaagtatcaaaattttaatggctgcatagtattccattatatggatataccatgatttccaaatttcaggtgttttgaacagtagtgtagtgaactttacacatgtctttgagtataggacagattatttccttggaataaatttctaaggatggaattattgggtcaagggcaatgtatattttacattttgatacataacagtacaataatcatctgagatacatttttcctcacctccatattattttctgattt

SEQ ID NO: 16616 - DNA, 1022 bp, Homo sapiens
gggacgtagagatgagagtttcacacaccagcccataggtgggatgtcaagacccatcggaagtgtcgctggcctaagagaagagcacttatttctcaccatggctgatctagaattgttccctgattctgaaagaagtttacactacactggtaagcagtactattagactactgactgtggccttctgtgcatatggaataatgatttctcagatttgtaggcttgaatgtgaatgttattttatcagtaatcagaataaattgcttatattcaggagttattttaaatatttaaatgaaatttattttaggcaccaagcactacataaactcataataactatttgcaatgcattagcatcactcacggggtaatgaaaacataccttagctgctgtaaaagcaaagtcttccgtgtccgggtgggctgaaagtttttaataaaattttagctaaacatttgtttaagtgaatactaaggatggagcaatagtgttattttcctcaggaactgaagtctcatgctgaagtattttctccttaaaattaaatttttaaaatcagggaaggggaagggactgatgcaaagcagtccgttcatttctcagactgcgagcatccctactaacctcatcaccctcactctggtgatattactcctgggtctccacagaacaaaaggaacgcacctcgtttacaaagaaagtcctgattgatatagaacagaaatcttcctacttcagtttttttgtttttttttttgagacagagtcttgctctgtcaaccaggctggagtgcggtggcacgatctcagctcactgcaacctctgcctcctgggttcaagtgattctcctgcctcagcctctcgagtagctgggactacaggcgtgtgccaccacacccagctaatttttatatttttagtagagatggggtttcaccatgttggcaggatggtctcgatctcttgacctcgtgatcctcccaccttggcctcccaaatgctgggggttacagg

SEQ ID NO: 16617 - DNA, 1050 bp, Homo sapiens
aaagaaaatatgatacatatacacagaatagtatggatccataaaaaagaacaaaattatgtcatctacagcaacatgaatgtagctggaggccattatcctaagtgaattaatgcagaaacagaaaatcaaataccataaattctcacttataagtaggagttaaacattgggtacacacaggcataaagatgggaaaaatagactctggggactggaaaatggggaagggagggtacagggcaagggttgaaaaactacctattgggtactatgttcactatttgggtatcaggttcaattgaatcccaaacttcagaatcatacaatatatccatgtaaaaaaaccctgcacaggtacccctaaaactaaaattaaaaaaaggaaaaaataataaattgatcttaaatacaatttgtgtgtagctttaaaaaatgaataatatttggaacacaatgtatctaaacttgggggatgagctaaagctgtttagggaatcataaatacatatattagaaaaaaaggatgaagaacagaaagttaaaccttacaaaggagaacgaaagaatgaagagcagaaattaataaacaataaaaatatttcaaagagagaatcaaaaatgcccgaagttggtttataaaaaaaaataaattggacaagcctctgtcaagtctgatcaaaagaagtacagaaagcacacataacaaatatgaagggtgaaaaagggcacgtcatttcaaatcttacagatatttaaaataacaaaaaggccattgtggaaaattttaagttttgagtttcattaaaaattttaagtttcatttgaaaatatacgtgaaatggacaagaaaacacatcttaactaaattgacataagaagaaagagaaatgtgaacagtcctaaagctactaaagagataggttttggctgggtgcagtggctcacatctgtagtcccagcaccctgggaggccaaggtgggaggatcacttgagcctaggagtttgagaccatcctgggcaatatagtgagaccctgtctctataaa

SEQ ID NO: 16618 - DNA, 1004 bp, Homo sapiens
gtatatacggtatatagtatactgtatatatactatatacggcatatagtatactgtatatatggtatatatattatatataccatatatagtatattgtatatataccatatatatggtatatagtatatatactacatatacataccatatatggtatatagcgtatataccatatatatggtatatagcgtatataccatatatatggtatatagtgtatatactacatatacatactatatatatggtatatagtatatataccatatatagtgtgtgtgtgtgtgtgtgtgtgtgtgtgtgtgtgtgtgtgtgtatacaccacaggcttaggcaaggatttcatgaccaaaacccaaaagcaaacgcaataaaaacaaagataaatagttgggacttcattaaagagcttttgcatggcaaaaggaacagtcagcagagtaaacagacaacccacggagtgggagaaaatcttcacaatctatacatctggcaaaagactaatctccagaatctacaaggaactcaaacaaatcagaaaaaaacagttccatcaaaaattgggctaaggacatgaatagacagttctcaaaagaagatatacaaatggccaacaaacatatgaaaaaatgctcaacatcactaatgatcagggaaatgcaaatcaaaccgtaatgcaataccacttaactccttcaagaatggccataataaaaaaaaattaaaaaacggtagatgttggtgtggatgcagtgatcagggaatacttctacactgctagtgcgaacgtaaactagtacagccactatggaaaacagtgtggagattcctaaaagaactgaaagtagaactaccatttgatccagcaatcccactactgggtatctacccagaggaaaagaagccattatacaaaaaacatacttgcacacgtatgtttatagcagcacaatttgcaattccaaaattgtggaatcaacccaaatgcccatcaatcaaga

SEQ ID NO: 16619 - DNA, 1147 bp, Homo sapiens
acctgcagctcagggggtgaggctggtactggagctacagatttttggtgatttccagcctaagcggagatttaaaaatgtatgtgtagacaaaagtgagaaaaggcacagcgagttaaaggcagactctagacagcacccccatttagggacaatgtttagcccagtaattgttgagcagtgaccactcaataaatatttattgaatagatgaaattttggggtggcacaacacaggaaagaaagaactcgtagatgacaggagagagaagaccatcatggaagggggacatttaaaggcaggagcaatcaacaagtgcttcagtgagctaggtattgtggagtgtcctcagctggtacagccaggaggccgagtgctgctgtgagcagagcagagcagagcagtgccagagtaatcgctggctgtacttgttacattggcttccttagcactggcaggaaatgaacctcctcttttgaaaacttttcctttattgggtatggacttcacaggggcaaatctcaaagataagcaaatctcagagataacgtaagcccttgggtgatttaagttggtttctgacagtaaccagaatgaatggttgaaatccttggaagttattggcactggagaaatattttgctagtcatgggtagtttggtttaactacctgtaatcagtacattaaaaatgaaatgaacagaacgtcttatttagtctttttttttttttttttcgcatgagcggaaataatttatgactttacctgaaaggagaggcatcacagattctctctgggcttcatagccatgttttgtggttaaaagtactcagtagatatgttttaatatgttctagaagtctttctaaaaaatcttgcaatgcaacaatttggtggagaaatcagaccggtttaatataatatgagggagctcaataataaaaaatgccagatgtttttctcagacaacattttaacagcaggttttaattcatacagaacttacctggggcaggggaagggagccccagatgatgtcaatggctaaaataatttccagggatctaggtctggctcagccactgaccagctctgtaaccttgggaacataacttaacccatctggaccttggtttctatctgta

SEQ ID NO: 16620 - DNA, 1034 bp, Homo sapiens
cgattccgtgggcgtaggaccctctgagccaggtgtgggatatagtctcgtggtgcgccgtttcttaagccggtctgaaaagcgcaatattccggtgggagtgacccgattttccaggtgcgtccgtcacccctttctttgactcggaaagggaactccctgaccccttgcgcttcccaggtgaggcaatgcctcgccctgcttcggctcgcgcacggtgcgcacacacactggcctgcgcccactgtctggcactccctagtgagatgaacccggtacctcagatggaaatgcagaaatcacccgtcttctgcgtcgctcacgctgggagctgtagaccggagctgttcctattcggccatcttggctcctcccctcagaacccaaatttttcaagtgcatagttaaatattttttctcttgacaagatttttttgatagagctgtttactcttctggtagagatgtagcttgagctattataaataaatacaaatagcatagatatggcattgtggtttcttgttaaacgtggtacctcaccaataaaaatatagcttacaatatttacatttgtgttaccactcactgatttgtatttgtatgcttatttcatagtaatttttcttgacagcatttattgttgaagaaggaagttcagggcacacctatgtgtgttctgacctggaaagtactaatagtcatattctttccatttctggaccttcttgtcttccagggtccttgttctgcatcccataaaagtccagggaccagtttcatctcttctcctcctctccttctctcccaagactaaccatctactgatgacacttgtgggctccatgttaaatttacttctttatgccttttaacttctgtcatgtgactcagcaacacatgccagaggttaaaggacactgcttgtagggcagaaagaaggggagcctctaacacagtgcttttttacaacttttccccctttctcttttaatgcattagccagaaaaatgataaggggtcatgaggggcct

SEQ ID NO: 16621 - DNA, 1068 bp, Homo sapiens
cttttttttagtgattgtaaaaggtattgtattttcttttctttttttattttatttttttgagacggagtctctctctgtcacccaggctagagtgcagtggcacaatcttggctcactgcaagctctgcctcccgggttgacgccattctcctgcctcagcctcccgagtagctgggactacaggtgcccgccaccacgcccagctaattttctgttatatttttagtagagacagggtttcaccatgttagccaggatggtctcgatctcctgaccttgtgatctgcccgccttggcctcccaaagtgctgggattacaggcatgagccactgcgccctgccaggtattgtatattcaatgtaggtgtccatgtatttattgctagtgtatgaagatataattgtttttgtacgtttatcttgtatcctgtgaccttgcagaacttatttattagttctaggagtttttgtttttgttttttagattccttgggattttctatgtaaacaattatgtcatctgtgaatagggacacttttatttcttcctttccaatctgtaggctatttattttcttgccttatttcactgtctagaacttccagcattatttgaataagagtagtgagagttgacatccttgccttgttccccatcttgggaggaaattattcaatctttcactattaagtgtagtgttcactgtaggatttttgtagatgctcttaaccacagtgaggaaatttccctgtatttctacttttctgaatttttatcatgaatgagtattgagttttgtcaaatgtgcatcagttgatatgatcatgtaatttttcttctttagcctgttaatgtggcagattgcattaattgattttcaaaaactgaaccagcaaaacccacttggtcatgatgtataattttttaaagatactgatcaattctgtttgctaacgttttattgtatttttttggtgtctatatccatgagggatattggtctttagtagtgttttttttttttttttgtaatttgtctagttttggtaccttaataaaattaa

SEQ ID NO: 16622 - DNA, 1074 bp, Homo sapiens
acagcggcgtgatctcagctcactgcaacctctgcctcctgggttcaagtgattctcctgcctcagcctcccaagtagctgggattacaggcatgcgccaccacgtctggctaatttttgtatttttagtagagatagggttttgccacgttggccaggggttggtctccaactcctgacctcaagttatctgcccaccttggcctctcaaagtgctgggattacagacatgagccactgagcctggcctgaagtttgttttttatagacagcatatagttaggttatgctttttaatctactctacctgtcttccttttaactggtgcatgtagaccacttacatttaatgtaattacttatatgttagcgctaaaggctgccattttattttgggggtatttgtttgttactctgtttttaatttattttcttttctttcctgtattcctgtgtgttaggtgaaattttttagtattccattttggtttatatagtgtttttgagtacacctctttgtactgcagttgtcgtggctgttcacatgtgtgtgtatacatacacacacacgttatcaaagtctactgatgtcatcattttaccagttcaagtgaagtgtagaaaactaacctccctttgtcttccattggccttccctatttataatataatttcattaaatatttcttctatatacatttagaaacacattagacagtattatagttgggctttaaccatcaaatatagtttagaatacttatggaaaggagtctattatgtttacccatatttttgcttatcatgtacttttttcttttctgatgttccaagattctgttttttattgtttcttttagtttagagaactttctttagcccttcttttagggttggtctgctggtaacaaattctcttagttttccttcatctgaggatatcttgatttctccttcatttctgaggatatttactttggatataagattctgggttgatggttcttttctttaagcaactgaaaaatattctgccactttctcctggcttttgtaaggttaaattaaataagc

SEQ ID NO: 16623 - DNA, 1030 bp, Homo sapiens
cttggaaagggcccgcttcctggcttgcagatggctaccttctccctgtgtcttcacatggcagagagagagagagagagcactctggcctctcttcctcttctttataagcacaccggccccatcatggggtccctacacttgtccctcttctaaacctgataacctccccaaagccctgcttccaaatacaaccacattaggagttagagcttcaacaaatgaatttgggaggacataaacattcagtccatacaatactcatgtgcaagtatttgcatcatattttcaattatttggggtatataccctgagtggaattgctgggttattcttaaatgttttaatcttgaagaatttttaaccggtttacctgttttttttttttttttatctttcttgttccttcttgttcttttcctgcaatgacatcaatttgataacatgactagttcagtcgtcccatcttttggcttggcctgattgtttcctcttgttcttcttcagtatgttcctctgtgccttgcatgtcttataatttgggtaccatgtttttattttctctgcagtctcttttttccgtctgtttactgtttgatatatttgcctcttctgtttggtatgtggactattttgggggaatgtgcccttattttctgttgtgaacccaaagaagtttctatactttcctgcaataaatctatgtgcaagaatgtttttgctcttttttttgaggaacggtttctgtcctcttgtgcttcaaattctggtcataggcatcagactgttgtgtttctccttccttatctgtgaatagacctagtgttggcacacagatgtgatacactggccatttgcagtgtaccactgaccctggcacaatgccttctcatatctgaggccaggggctgagctggtggcaccaccaatgggacattcctagtctgtggccccatcccaggaagctctttttggctgacatagtttttctcttctctcactatccatttttttttctttctttttttaa

SEQ ID NO: 16624 - DNA, 1040 bp, Homo sapiens
cctatctggacagctctacttggacacccccacacacctcaaattagttttcaaaaaatatattttttaagtccatccaaacattttcatcactccaatttactagaaactataaaaccagccttcatctttgggcatagcactctggagctgattacctccccttcaatcctgactcctctcttgattagctgggtgagcctgggcaagtaatccactttccatgtgtcttagtttctggaaattaagcatatcttccttaaaggatggacatgaagataaaattagataataaaggcaaagctcttggcaaagggctcaatatgtagtaacttccaccaaatgctgtgttttgttattgttgccattattctattcatcattcattcaacgcttctgagtatcctcagtgattcacttggcattgtgctagggactcactccacacccttatctctctacattctgtagatttttacctcttaagtgctctaagatctgtcaatctctctctgcaccaccatcactcctcagggtggggccacattacttattatctacactgccacctctcccacctattttctctcctgctccaggccatcttcctcactgtggccagagggatcttcctaaaacaggaatggtcaccccctactgaaaatccttcagtggcccttcagtataaacttgtactgcttccatgttgtcaagcccttgtgtctgctggcctagctctagccatctggagctacttggaagtttgcacactatgccctgttgggttatccctttggaccaggtccatgttcttccttctgctgaaataagcttctcctccacctccttctattgtcctcctggtgttttgctttctcctcctttaagattctgttgaagcattacctgctgctgtaaaaattttaggaatttttacccgtttccttcctcttcccccacctgctgaggtgggggatgggttgctttgttctccgtgttcttacagcgttttatacatatcttgcctctcatgatcaggg

SEQ ID NO: 16625 - DNA, 1075 bp, Homo sapiens
ccgggtcagagggtcggagacaaatgactttgccagagtatcggcatcttcttgtgccagttcccagagcccaaattcctacagagcaaatgtgtagagggtcaggtgacttgtacacctggagtgaactgtgttagaggtgaggagccctgaggctagggaacccaaatcttttataatgggctgtaagcttgcctgacctttgcccagagggagaaattgtctttatatactggacagtaaacaagtctgtcattttccttggggagagacactatatcttctaagactgtttgccatacaaatatcctttgaagagatagcaaagaacaaaaaaaagcagagtgtctgccttcaagacttgcagaaacatgagggatttagggaaaactgtctcccctaaggtgtaatccacctgttagtaatttgcgtgtggtgagaggtaatttccgtcattttctatgctgaaactcaattatcccagcatcatgccttggaaaagtgggagaaagctgtcttccaagagataggtgctggtgaattagactgaggttgctgcagtggaggtgaggagtgggtacagactgagctacatgcttcagagatgacagagctccatgggctgttgggttgttgaggaaggggctgaaggaaggacaagtgtcaggagtaagagtcttcttcgttgagtcttaaaatgtattgtgtccctagagaggaaaaacaatcatttaaaataggcctttactgtattgaatactggaaatttgctaagatggtagattttagatgctcttacctctcccacccacccccacaacacagataactatgtgagatgacagatatgttaattggcttgagtgtagtaatcatttcactatctatatgtatattaaaacattatgttgtgtatcttaaacatatgcaataaaaattaagcaaaaaataaaaaggcccgtatttctcttaacctgttaaatactcggtataaatttgaatttagaatctgaagtggatcatgcacctggaattcctgcgtgtccagctggcctctttctgaggtgtgtttcct

SEQ ID NO: 16626 - DNA, 1034 bp, Homo sapiens
tggcttttcttgcagtattaggaagtgaatatggttggtgtaagagaaggtgacagtggatactatacgcagggagctctgtggagccttgcagccctgcaagtttttatttgcaaggtgttggttgaatcagcctttcctcctaaaagtttcagcacatacaagttgctgacttattggctgttttcttcttttaacccaaattctgtattcttagttgtgttgtcatgaaggatgcatcttctcattttcaaagtgaaatcaaatggatccatgcctttcacatgtaactttctgttcaactgcttaaaattatttttattgatccataacatttgtacatgtttatggaatacatgtaatattttgctacatgcatactgtaatggtcaagccagggtatttagggtatctatcgcctttgtatttatcatttccatgtgttgggaacatttcaggtcattctcttctagctattttgaaacatacaatacattgttgttaattatagtcaccctactctgttatcgaacattaaaacttattctatctaactgtatgtttgcactcattagctaacctttcttcatcccctcaccccgcaacacacccttcccagcatctagtaactgtcattctgttctgcctccatgagatcagttgttttagctcccaaatatgagtgagaatatatgatgtttttctttgtgcctgacttattttacttgacataatgacctccatttccaaccatgttgctgcaaataacaggattttattcttttttatggttgaatagtattccattgtgtatatattccacactttctttatccatttatttgttgatgaacacatgattctgtgtctttgccattgttaatggtgttgcagtaaacatgggagtgcatgtatctctttgatatactgatttcttttcctttgaataaataccaaatagtgggattgttggattgtatggtagttctatttttagttttttgagaaatctccatactgttttccataatggc

SEQ ID NO: 16627 - DNA, 1151 bp, Homo sapiens
tttagagtgtgggtacagtcttcagcctggggacaaatgccccagttgcctgttgcttagttgataatattaatggctaatatttaatgagacttaacagtgtcagatactgttctaaatactttccatacagtaatacttacaaggcagatactgttataatccacattttgtagataaggaattggaagcacagagaagttcacagttgcagtggagcagagatttccaatcaaggtgctttaactaaagaatttgcctttgggtatagagatggcgtgtggggatgggggtggaggggctctgttgatccttattgctttccaccatacagttattttattaagtcccctgatgattccccaggctcactctgttctttttatttttacattgtttagacttggaatttctctgtatcaacttttatcttgggagcagttttctactatgcatatattggttggctttatcctcagctctctaatcccatctgctctctgtcttctaggaatttctcaccatttatgatctgtcactggcaccctttcttgtttttcagccctgttatagatgttatggatatgcctctctctctatagatatatctatatagatatatgtagagaggaatgtggtacacagagaagatgtgtgtatttggtccgccatcttgattcaatttctgtaatatttattatatgtgttttatcgatttacttcctggaagtgagattaattaattttttatcgtgctgctataatgattaaattttgaagtagcatttagcgtgcagggagtacagtcacaatgtaatagcccctgggatttttgttctcttgagtataggttattagactctgtatggctttgttgtgattctgctaaacagagacttccagatgcggattgtcagacatgaacattatttctactattcaaacagatagggacgaagtggtccagcattgcttgttaaacttccttctagaagaataaatcaggataaatgcaatcaatgtaaatattaaacacattgaatgcagggcttatggaaggggtagtttaatattttaaaaattgaaataaaatgtacatataggaaagtgacagaccacaagtgtacagtatgatgtattttaacaaagtg

SEQ ID NO: 16628 - DNA, 1059 bp, Homo sapiens
ctaatgttttatgtctatcttgaaaatttcttcccttttgtataattgtttgctcttcattaatagaagttattcctttatctatcattttaataatatcctaaacacacattaaaaagtctatattgtttcataaaaccgttttctctagaagtgaattcatgttatgttatgtgattttgtcggctctctttcttggtgttatattttattcatgtgccttggaatttagatctaggatgaattttaattccaacttcttgtgctcacttctctctagtgattgtggcttcttccacccagcttcccaaggccccagtacaaaaccgtggtttctgttctgtggtgatattggggctatctggatccagtcacagagctggagggggtggggatgtgacttgactgattctttgttcttcagtctccttgggcctgcagattgccacatgtggtagcatcagacaggggtttacatctgaattttttttcccagcctcatttgcttttccatccccagctgtaagcagaacttgaacccagactctggtctcatggagcacttttagatccttttgtactcagcaggaaccagactgctggctgtcatagcctgtgtgcaggcaagaagcccagcaggcccgaggcttcaaccttgttcatcatgttgtgtttctgttcattttcagattcacaaaaatgtttattctgtttttgagcattgcttatctttctggttttctttttttgatatttaatttatccttgctatgtattcaaggcataaagagtgcatattttgatatttaatctatccttgatttgtattcagagcatagggagtgcatcggagttgaatttgaatagtcatcttcaccagaaatagaagcttgagtatttatatttagcttccagcacctagaggaaataaccttgtaaccttggaaggaggccaggtgccctgtaggaatcacgtctatctttttttatctttctatcccaagtaccagtcatgtccctgcacatagtagatgctcaacaaacaatatttgttcattg

SEQ ID NO: 16629 - DNA, 1030 bp, Homo sapiens
atagctgggatcacaggcatgccaccaaaccctgataattttttgtcaagatgggagtttcgccatgttgcccaggctgatcatgaacccttgggctcaagccacctacccgactcagcctcccaaagtgctgggattacaggtgtgagccaccacgccagcccctgactcaatatcttaaatcttgaggagtcctgtttatcccaggattgcttcagaggttgtctctgaagattgctaagtagactggcttttgtatgtgaggccataggatttatggtttcacaggagaatgaaaagtcgaggtcatgtagtaatttgccattttgctgagactgaaaagtacttggcaaggcagatggttaagggagaacagctctcttatctggggggcggacagccgctgtcatcccccagctctctggtgcctttacctgtcatagcccacattgaggacacaaaagcatgacccaaatttttcagctgttccatagtggtgcttgtgggctcgggaattgtgaaggtctcggatcttatccctcagaagtgccaatcttctattgtactgtggttcctgccatttgctttgatttgatttgtccaagtaaagtcaaatgaaatggaattaaggaggacggtgactcctgaccaggcaacacgcagctgggggtggcctccctgctcggccttgggtttaaggggccattggcactttgactgcctgagtggaagaggtgtcagccacctgcctccctccggagcccctgccctcagcctggcttcagcgatgccaggagctgtctcagccccagcattagtatgggacctaattgttaagtttttaaacctgtgggaacaagtcaggaggtttatttatcctcaagaccatgtcgtccttataacagtttatttaaaggtacactgaggtcttacatcctttgagtcaagtcaaaatgcattgagcaccctttatttaccatggtgatgtatggaggaattatgtccaatactaacaagacattcatcctgg

SEQ ID NO: 16630 - DNA, 1071 bp, Homo sapiens
tgcttgaaaattgtaaaatacagacctcctggtcaactgtgctgaaggacatggcctgggcctaaagtcctgttggcactttcccctccttgcaccttcggtggatgacagccagctctaggggagagcccgcctgtcttaccacccagatacagcctgagacgctgaagctgggtgagtgggagccttgctggccccaaccctgcagagccagtgactgaggcagagcaacccatcctactaactagggagcacccccaacctcatccacaagaggaggaagaggagggcctggcgagaggacttagaagcattcgctccaaagagaaagtgaataagcagagaagcaaatgaagggaaatcctctgagatgggtgtgcttggtgctcttgtgctacctgtccatctctgtttggcactgacaattcaaagaccaaaatctcaccctgggggaagagctggtgccttctccagccctcatgtctcatcatcctggctaagacgcaataaaagcttcaccggggaatgcctcaaaagaaactgtttgccaaaactctgactgatgtgaggagaaccctgactggagttaacagacttggtctttcctgggtctccagatgtagtacttcctagggttttctggccaacaggccatttgcagggatttccagggtgtggttgttcactgtcctcacctctgcattctcccaactgagaaacaaacccagggagccacatgagatcacatgccagccccttgctcagagagcagggctctctagaaagccatgttggaaggggcagcttgggcctgggcccacagtagaagtccagtgagctattcctggcctgaagtctagaccttggagcccctgcagagagagcgggtgcagagaccacaaagccagatgacacacgatcttgtggccacttcacaaacccactttcttgagaaatccggagcccagagccaggcccctactgcctttccttgcagtgtctaggtaccctggttattagggccaagtgggtgccactcccgtaatctcaccagttagatgaatcaccaaa

SEQ ID NO: 16631 - DNA, 1060 bp, Homo sapiens
taggaaggcccaagggactgcttcgggaaggccattgacagcaggaaaaagtgacaggtcgcagccagactacaagggaggcaagagaaaaactataaaaagcaggaacaaaaacactcaaaagacacagcagtctgggggatttactaaaagacaaagagccctactcaggtcagtagcttctgggagactccataccttgtaccccaacagggacttatgttgacagcgttgtatgaattacttctctctccatcccctttgccccttgaaataactatgggggtggggtcatagtttgcctttcagtggggatgctctgaccgaatgcttccaggtcatgaagttcccaaagtcaaggccagcaaaggagcaagcacagtgggctccttcggtggtctgaaaagaacccaagttccacaaaagagctgtgagttttagtgcaacagagagaaggatgccccttgcgccactgaccactctttccaccttcacctcccttaaagtcagggttagagatggagccctggagaacaggcttccagatcctggcatgtgggagagagagagagagaaaatgagaaggccaggctgcagacacgccagtcccttctgatgccatctctactctggtgtctaatccaccacctggagtgggcactgtttttaactgaagcctgagctgctcactttgaagctggaactcaggctgaagaaggcaggacagagactaagtgcctggaagttatccctcaagtgcgacaggcaaggctaggtgggacctggacagaccttcctggggatctgcgtaggatttaggtagagaatgctcttagagagccttcaaaggcctgggagcatcctgaggtatgctgagctgaggacccaaaggctcattccaagcccagctgatgggccaccccattgaatgggattggctcagaaatggtgtgggagaaggctgggcgtggtagctcatgcctgtaattccatcactttgagaggccaaagcaggaggatcacttaagccctgaagtttgagaccagcctgggcaacata

SEQ ID NO: 16632 - DNA, 1031 bp, Homo sapiens
cttttgggagatgggctgggcacgacttctctgcctgggagtattgaaaagatagactctgggctcatggggttggcgcaggcagctgggagagctgaggcagccagagaccacaaacggcaccgtgagctgggtggagctggccttgtgggaaggaagcaaggcctgctgttaagggtctctctgagcttttccacatttccaatttcccatggataatccatcatgttcatctgtactttttgtctccatatcatgtggacaggttctaacattcccatggaccagccctgctgtcgtggtctctatgactttgagccagaaaaccaaggagaattaggatttaaagaaggggacatcattacattaaccaatcaaatagatgaaaactggtatgaaggaatgatacacggagaatcgggattcttccccattaattacgtggaagtgatcgtgcctttacctcagtaaatgtgtaacacaaactctggacatactttcgtaactgaaatgaattcacaccagtgtgctctcagtgcggtgttctgtgacatcctttgctctctgaccaacttaatgacttttgtatgtgtgctctctttataatgtattttatatcactttaatttgtataaatgattttcttgtccttgctacatgaaaatattttcttttttgcttcctgtcctaaaagtcattggttaaatgtatttgcttcctgtggctaaaaataagtctcacccattgcagttatgtcaacgaatggcctatattcctcagctgcaatgaaatggtaacatttgaaactaagaaatgctaaatattttgtttctcgacattcctgatgacgtctggtcttttcttttcattgtattttaagcttacctgtgaatagcccaataaacatgacacactgtgttggcaaaaggccttggttatttttaatgttgaattgttgatttttaagcacagtcttccagctgcaaactcacaccccatggccaaccgaagtgtcacagcgcagatgctta

SEQ ID NO: 16633 - DNA, 1048 bp, Homo sapiens
tttttttttttttttttttgagacagagtctcgctctgtcgcccagcctggggtgtagtggtgtgatcttggctctgcctccccagctcaagtgattctcatgtctcagcctcccaagtagctgggactataggtgcatactgccacgcctggccaatttttgtatttttgtatttttgtagagacggggtttcaccatgttgcccaggctggtctcgaactcctggactcaagtgatctgcctgccttggccttccaaagtgctgggattacaggcatgagccatcgtgtctggcctgtctacttacctcttgccaattccattttcactttgtgattcaaatgcattagtatagactaggtttatgctgcagtaacaaataaaatttcagatgcttaacagataaagttaatgtcttatgcatgtgaaagctggcataggttcgctgactgcccatggtagctgtccttcatggggtggttcagggagccaggatcctttcatcttgtggctctgcatgccaacacacaccctctgtgttaactgcccaaggggaagagagagcccggagaatgcacagtgagcttttcactgcgtcaaccagaaagtgatacggatcacttccatttttattttattggctagaatgactcaatggctctgcctaactgcaagaagactgggaattgtaaccttcctaaagcatttggtgaacactttgctttgcctctgccacactaaacacaacggtatgaataccaggaggtgacagtcattggggccctgctagaatctgtttaccacagataccctacaatattccctcaattccttattaggctgaaggtgtgtgcacagaaacccatatatgggaacaatatgaaagtgagcagataggatttgttctagaacaaattcattctttcctagacataccccacctcccagccatttattttgttttatttattttttttgagacaggattttactcccgtcacccaggctggagtgcaatggtgcaatcttggctcactgtaacctccg

SEQ ID NO: 16634 - DNA, 1918 bp, Homo sapiens
aaaaaaaaaaaaaaaaaataccacacacacaaagaagcaaggaaggaaagaaaagaaagaagaaagaaacacagcatgcatttgtgacttcacatacctaagaaggaattattggtatgaggtggttcatattaatgtaaaataagtgaactgatctatatttgctacaggacttgtaaagaggagtggcctggggagtagaccttgaaagacagtgggagccggtatttgggggctgggagtgttgcatgctgggttttccagggagcagaccctgagaggagtttaacatgcaagatggttacttgggagtttcttgggattgacactcatggaaggaagagaatgaagcaggatgagcagtgggaggtgtcaaactgaaatgcagccccaaagaaagccttggcacagcccacaagaaactctggaacaagaatagcatttagagttgtcctaagttggactgagctgtcctaagttagacccctgctttgctgagtcactgaatgtgtccacaggtgtgagagaagggctggatgctgtgcctctctcacagttgcagggcagtagtggaaatgactctggctgaaggacattctccaaggttagcttttaattttcccctggccagggatgtgaccctcagagagatgccttcctgcaactaagtcaaccaccgaaaagactgatggctaaaggctgtttgatagtacactcttgcagctaaggcaacgagagctttattgatggggattctgggcagctgtcaacatgtcaccataggaagaatggcataagcaaatgcatgcagaacagttctgatgagctgtgatggacagaacaattggactgcagtggctgttacatttggaagtgcagtaggaggtgatgttagagtgttagtaggacgcaggtggaaggttctaactgcccagctaaggactctgaactttgtcctgtggacattaagaaaacactagatggtctgagcagtggggaggtgttactaaggtgtgaaattgtgttttaaagggatacatctggcctagatgtagaggatgaatagtagtggcaggaggtccaaggcaggaagatggccatagactagtaattcatgaaagcgaatagggtgggtctcgaaaagagtcctgggttgcaaggtgaaataactgagttctcattcaagctctttgtcattgacttgactgtgtaggtcttcctcttggacctcaattttgccatctgtaaaaatgataagctcagaagtccctttccagatgtaacactttgtggttctaccttaaagtgatctgttcgtttgtgttccttcaactgcgtgctcattgaaagatgttgaagactagtgtagtgtgaaaccagacttctggaaactttattttggatatttgtttattaactgattcctccactctatggccttgcaaatctttgtatttacacacaaaatttgaagccaatgaattatggattcaagctgaaccagagtcacgtatcagctattacaagcctaagggttttgtttcttaatcaattacagtatatctggtaactcaacacagctacctggaatacagaattagctttccgtattgcacagggatggattgtcttcacctaagtttctacttaaataataatgaaaacgggattaaccctggcagtaaagaaatgaaccagtttgagcccatacttgttgaggacttaagtaaattatatttctttttcccttgtaagttttgcatcatagcttggtgtcatgcccataatcagcagataatttagggaaaaacaaaagataacaaatgacaaagataaattcactgatcagaactctggtccccttctttttcaaaatggttcacagacagatttttgcatgggggagacttttttttga

SEQ ID NO: 16635 - DNA, 1039 bp, Homo sapiens
catgtgctgccatctgctcctcattccctaatccccagttacactggctttctgggagattccagaatgtcaggtgcccattcccccgatgggcctttgcaccgacccatccctgaacctggaccatgtgtctccctgctcttcaacgtagttacctctttctcaacgttgagcacaagtgtcgcctcctcagagaggctttctttgaccactctacgtaaagtaggcccttctcttttctgtttagttcttgcttagcctttagggaaagaagtggttatttcatttatttgtctagtttgcctctcccactagtaagctttgcaagagcaggcaccatgtctatgatgtccaccattttattcctagtgctagtgcagtactgaacacatcctaggagctcagttaatgttgaacaaatgaatacatggccttcgctggagatgattctgcttcctgttatgatttcagtgggactaaatgatattgtgcaatagaactggactggaagccaaagactggggtaataacctcagtttggcctctgacaatctatcttcttaggcaagatgcttcacttactgcgacctcaactttttcatctgcacagtgagcatggacaatttataagaaatcttctagctctgaaaatctattaagtgtgtgtaatttgttcattgttaaaaaaaaatagatcttaggattgaatggagtttagagaaagaagtcccaggaacttatatgaagcaattttccaaacttttaataaagggcttgacagtgatggcttgtctttattcttaaagggcccaggaaattttagatacaccacaagaatgagttggtgtgaggtttcctcttatctcccatgaactgctacttggttgccttttaacatgttattgtcacaacctgcaagagggaggtttagtttttgcactgaccccctcattggtatgtgagctcctcaagaacctcatgcacctggcccagtacctggcacccagtatgtttccagtaaaggtgtgtcgacttgacc

SEQ ID NO: 16636 - DNA, 1056 bp, Homo sapiens
atttaaattgtttaaattctttgaagaatgtaaacaagcaagaacctgagaaacatcactgggttagggttagtgttagggagatggccaaacagagatggcttgagcaaaggcagtaatgacaagaagtgactcaaagttgaagatttgaagagatgacccatgatactaagaactggaagattaagagattgaagagatggcccatgttactaagaattgggagattaagttggaaatgctgacacgacatgaaagtgtgtgtccttgatccagtagccactaagaaccttcacaatttttgtgaagacataatatattttaagtaattgaggcaagatagcctaacattgggaaagaccagaggcgggcagcctatttagaaatcatccgtggggtcaagttgtatgaaaaaagaaaacagaagaaggaagacacctcagaggtataacaaggttcatgtcaaattagcgtagttttcactttctaaagagatgactgagtaagcctccagaacaaataaaatgcagccggattagtcaaagatgaaaaatgcagacattggtatttaattatttaatcttaatcctttaattttctagagagtgagatgtagttgactcaagtttctccagctttcttaagtgatttctgcacacttagttcatcatatatgtgcattaatatatctattcatatatttattcaatgggtcagctaccatactaagaagtaaatacaacttgctccaaccacccaaaagcttagaatctagttgcacagacatgcatgcaaacaaagttgtgttacagtattgtattgtgcatgagtagtgtcatgtgcccagtacttcagaggcacaaggtggaatgattcactccatctgaaggtgtcaggaaagcttcagaaaggaggtagcacttgaacctgaaggacaagtgtcaggtaaagaccatattaatctttttctgatatccccagactaaacatcatcaccctgtaagaactttattcaaacttgctggggaagaagttaccaattaatttttggtcaca

SEQ ID NO: 16637 - DNA, 1035 bp, Homo sapiens
tttgaaaaggaacaaagttgcaggactcagacttctgatttcaaaacttaccaaaaagctacagtaatcaagatagtatggtactgacataggatggacatatagatcaatgaaattgaattgagtccagagataaacccatatatatatatctcaattgtttttgtataaggttgagaaaccattcaatgggggaagaatagtcttttaaacaagtgatgcaggacaacttccaaaaaaggaagttggaccctttacaccacatacgaaaaaataaaatgaatcagagaactaaatttaagagctcaatatataaaactattggaaaaaaatataggtgtaaattttcatggcttggattaggaaatggcttcttagatataacaacaaaagcataagcaacaacaacaaaaatagataaattggactgcatcaaaattaaaaacttgtgctgcaaaggaaaccatcaagaaagtaaacagacaacctatagaatgggagaaaatgcttaaaaattgtatatcaaaaaggagattatctctaaaatatgtaaagaatacttacaactcaataataaaaacacaaataaactatcagcaagatatgcaaatggccaataagcacacgaagggatgctttccattagtcattaaaaaatgcaagtcaaaaccacaataagatacaagtttaggctcactgggatggcattagtgaaagagatagtgacaaatgttgatgaggatgtggagaaattggaaccttcatgctgctgatgggaatgtaaaatggtacagacactttagaaaacaccctagcggttcctcaaaatgttagattagatctattatatgacccagaaattccacccctaggtatgtatccaaaagaaatgaaacattcaggatctatatcctagggcaaaaaaatacaaataagaaacggaggccgggcgcggtgactcacacctgtaatcccagcactttgggaggctgaggcaggaggatcatgaggtcatcctcgctaacatggtgaaac

SEQ ID NO: 16638 - DNA, 1100 bp, Homo sapiens
ttgcatagctttgctgaagttcctaaagtgcaataaagacttatcttgaaggaaaaaaccctcatttgcttactccaacccagttgtagtaattatgcatacccataacattctttaaacagaatcacctgtttataccacacaaaattgcatagagtttagttgtatgtagtctgtttaataaaggtaactataaatatatacaaagattcttttgctataaagtagattcctatgtttagatttggatactaggtttcattggttgttatagtttatggcctccacgggctatattacaaacagtaagagatatgggtaaagttcctgaatttctttgataaataagtgttttcttgagacagtttaactagcaaattccagctgaggccatgcatggggaagtatggcagaagagtatgttcaattgtttattgatgatgttttacccagtatgcgtttcagagaaaaaaaaattactgcattttgtcattctgtgctgtcaggggcttaatttgataaacatggtcatggttctggatatgggataattgatgtagtaattgtgataaacttgatcaaattcttagaggacaaattatagtaactgtgtaaaactcatcaggtattctatattttgattggtttggtggtttgccctatcacggaaaagtgtgtttttctctgtataaagtctgcctcaatttaagaaaaattctctactttaagaaaagttgcttgacaactttcagatgaggttgattagatccacagggttggagataagattccagcattagagagtgctagcatctgtgtccttccagatgatagtctgttcaagagtctaatcaaactcttttgtctttttcacctagcataggtaaatagaaaatctttactaaaccaattgttatgaccagattttaaatctataggtatgatccatcccatgacccctttttaaaaagacatagatttgaatcgatgttgctgttttaacaggaaaaactactctggctgactgtcttatatctagcaatggaatcatctccagccacctagcaggcaaggtatgttattattttataaatactcgt

SEQ ID NO: 16639 - DNA, 1024 bp, Homo sapiens
ttatcttatctccaaatttctcatttcaagggtattacagaaatggaatcaaaacagtatattatagacatggaaccaaaaaaatacgtaatattttttggattgacttttttcacttagcatgattctctagagacttatccaagttattgcatgcattaatactgtagttggttcctttctgttgctcagtagtattccatggtgtggatgtaccccagtttaactactcacccattaaaggacatctggtgttgttttttttttcctttttgggccattatgagtaaagctgctgtaaacattcgtatgtaggtgtttgtgtgaacataagtttcatttctcttgaataaatgcccaggagtgcagttgctgggtcatatggtagttgtatgtttagtttttaaagaaactaccaaactgtttccagacggactgtaccattttatattctcaccagcaatgcatgcgtgagtgatccagtttctccaaatgttcacgtttggtgttgtcactgttttcattttagcagttcttttgggtgtgtactaatatgatattgtggttttaatttgcgttttcctaacagctggtttaccttgaacatcttttcatgtgttgatttgtcatctgtaggtcctcttgggtgaaaagtcttttcacatcctttcccattttcttattgtgtttttttggtactcctgggttttgagagattttttctattctaaacgctagtcctttgtgctttgcaaatattttctcccagtctatagtttgacttcatatactctaacagggtctttcaaagtgagcaaagtttttttgtttgtttgtttgttttggtttttgttttttgagacagagtcttgccctgttgcccaggctggagtgcagtgacgcaatcttggctcactgcaacctccgcctcccaggttcaagcgattctcctgcctcagcctcctgagtagctgggactacaggtgtgcaccaccattccccactaatttttgtgtttctttta

SEQ ID NO: 16640 - DNA, 1034 bp, Homo sapiens
gttaatgcttccaaatgcctcctaacttgtcttcaatcatttttctttgcccaggtaccattaggcttctcagctccaccagatggcctcccccaagtcccccacatggcatactgtgctctggaaaacctgtatcttctgatgggaagggaactggaatatctagaggaggtacctccaggaaatgtgctaggtagggtgatgctgtttattttatccttactccattctaggagattatctaacatgtcactgaaaatttagtgaaatttttgaagggaataactttattctttagattgatagtttttttttctggtatctttaacttagtacatttgagtaactaacatggagatcagttacttgctgtgaattatagtagttctgtttttaaaatgtattgcttaagtaatttgtaaatgctctagcctaagctggagttccatctatttcagagtgagaggagaaattcctgttcacataaagtcaatctagatgactaaggcatttctggttctacagattagattctaaattgttggaaactattctgatgtaaaggtctatttaaactcattgcttttatcctttgagtattgctttgctaagattagttgattgtcagtttatatctgtaaatattattcttcatctccttagtgttgtcacttgtttgacttctgcccctcatttgcagaattcactttttcagtttcttagtgcaaccttaaagactcagattaagaaatttctcttgcatccagagtgtattatagaatactgtatcccattgtactgttagattctgaaccttaaggtcattgtcagctatagagctatttattgagtgattgcttggtttgggaattctccgctttttagaaaaaggtttaacttttttaaaaaggtctagtctgttggtccagaatagctaatggtttgtctggattttatagacttgaatccaagaaatttgccaaagcatgttgccgttcacctacagagatatattcttttctttatttaatttt

SEQ ID NO: 16641 - DNA, 1035 bp, Homo sapiens
cttctctatctgtggattgctttaagtgacattcagacagccagaggtccagaggccatttgacatagaggaattccatccttccaaagatctcttctcataagcaggagttttttgttttttacacaaaacaaaacaaaacagttatcctgattggatccatgaggactagctcacttggctgtgcctcaggagaggtccagaatgactttcttggacttgaacgagctcagaagcattggcactttctcgtttacactggccttgattttgggtagaggttgagcaggctgaagtcccctctctgaagccatcattggatggtaaaatgcatctgcagccagatgttccagctctagcagggtcacaactgcactgagatgaacacaagggggcagtctttcccacagaatttcgtcaaatcagagcggaattgagtgcagtttcaatgtgagcgcatgcgtgagcctgtgctctgtccacactagtgctcgtgtgtaaaacgtgtagcctgtaactctgtttataaagagcctcagggtgaagggcatatgaatgctgagtagattttgtgcttcactgtgctacagtttcgttaacacaacccaggcctcctcagtgtaggttatagactatatccccctgcctagcccagagtcttacacatggcaggcaggcaggttggtaggtagggcaggcagcaggtaggcaggcaggcaggcaggcaggcactttttattattggaggcttagagatgactgaatcattaatatacaggagttgaaattgatttagcctgctgtttcaacctgaagaatgacttcaaagcagtcatttaaatttatttttgccttttttttttcattctcctgcccctcctacctctcttccaactactaaaggcattgtttcaattgtatatcttttcttttatttttgttttctcttcatcttggaaattgagttatggctcctttggttgtttgtagttggaaaaagcattattatgaaaatatatgctgtttagtgaacaa

SEQ ID NO: 16642 - DNA, 1030 bp, Homo sapiens
cccagggctctgccatgcccatcttgcctaccaacctgttggtggagaccagcgccgtggggcaggatgtgaccgtgctgttccatgtcaccggaggcctgccgttcagggagctgcagaagcagggggctggtggggtggaggatgctgagtggtgggtcacacaggcgttccaccagcaggatgtggagcagggccacgtgagatacctgagcactgacccacagcactacaccgaggacaccgtggagaacctggatctgcaggtgcaggtgagctgggaaatcctgagcaatctgtccttcctagtgaccatccagagagccactgtgtggatgctgcagctggagccactgcacactcagaacacccagcaggaggccctcaccacagcccacctggaggccaccctggaggaggcaggcccaagccccccaaccttccactgtgaggtggttcaggctcccaggaaaggcaaccttcaactacagggcacgatgatgtcagacggtcagggcttcacccaggatgacgtacaggctgcagaggtgacctatggggccatggcacgtgcctcagtggcagtggaggacaccttctgtttccatgtcacagctccaccatatttctccccactctgtaccttctccatccatattggcggtgacccagacatgcctgtcctcatggtgcccgagggtggtgagtgtgtcctctctgctgaccagctcttcatcaagagtctcaacagtgccaggtacctctatgaggtcatggagcagccccgccatgggaggttgacttggcgtgggacacaggacaagatcactatggtgacatccttcaccaatggagacctgatgcatggccagctggtctagcagcatgatgactccgagatcacagaagatgatatcccatttcctgctgccaccaggaccagagcagtggtgacgtggcctgggaggaggtatggggtgtcttctgagtggccatccagcctgtgaatgaccacgcccctatgcagacc

SEQ ID NO: 16643 - DNA, 1034 bp, Homo sapiens
ggtggctgtcaggggcacattctacaggggaaaaatagatgatacagaagcctgaaaggaaagcgggcagagcacctggacaggactcttacctgctgcatccagggtacaatgtgcctttccagaacacagcagcgacccgggatagagggatcgctcaaacagcaccagaggctgcattccaacttttcctccatcaacaagcccgttttcattgttagtttctccttaaacacgattggctgaacatgcgggaacaaggaaaacctgactgaagaacgaggcatttaagcttaagggccttggatctgggcgcggtggctcaggcctgtaatcccagaactctgggaggcagagatgggtcatttgaggtcaggagttcgagaccagcctggccaacatggtgaaaccctgtctctactaaacaacacaaaagttagccaggcgtggtgtcaggagcctgtaatcctagctactcgggaggctgaggcaggagaatcgcttgaacccatggactgtcaagagacggaggctgcagtaagccgagatcaccccactgcactccagcctgggcgacagagtgagactccatctcaacaagtgcctgccaccatgcccggctaatttttgtatttttagtagagacagggttttaccatgttggccgggctagtctagaactcctgacctcaggcgatccagctgcgtcagcctcccaaagtactgggattacaggaacgagcactgcgcccggccaaaaccccgaaaatcttgaaggcctttccccttccccgcccgggctcaaacaacagccggagacgccctgccacgccccgtcgcggtcccggggagcaggctggctgactgagggcgaccatgggccccgaaagggctgcgggcgacgcgggctcccacctcggggcgcggtgactggggcgagaggtgccggcagcccccaagccagccccgcagcaaggagccagagagacgcgccctccccctcctcccacccaagcctcccgcagtcccggcga

SEQ ID NO: 16644 - DNA, 1150 bp, Homo sapiens
ccttgctgtcttcctcttgccctgtgttattttgaggccaattccaaatgtcacatcattttatctgtaaacatttcactatgtgaaggctcttaatagtccatttgtctaatcataggaaggcacatagggacatgttaggttatcattcccttggatcaccagggacatacaataggcacatacagaacacctggatattggatccgttgccatgctggattgttggtgaaaggctgctttggctggggccctactttcttgctgaaggctggcttccctcaggtctgagcagtcatggtgaaagagcacacccagatctctgttgagaggggaaggagagaagagggaggaagagaggcatgagggagagagcaggagctggagagttggggggcggatagagagacagagagagagaggacaggggaagagaagagagggagagaaagtgtaccgtggaggaaggaatagagggagagaggatgagaaagagtgtgtgtgtgtgtgtgtgtgtgtgtgtgtgtgtaagaaaaggggaataagaacagaacacttgggagagaaactttaccagccctttgactcaccagctcgtaaactcctgtggtgatctaaggcaaccatagggatgcctctaagagtaatagcatgctcctcgtgtccctccagacctgtcagtttaggaagctttggaactgtaggttgtctgtggtagataagactggtggcaccctcaaaaccaccaaagaaagagtgatcctgtgaaatggccactttctgttttctttttgtttttccgagatggagtctcattccgtagcccaagctggaatgcagtggcgtgatctcggctcactacagccttcgcctctggggctcaagtgattcttctgcctcagcctcccaagtagctgggactagaggcgtacaccaccacacccggttaatttttttgtatttttagtaatttttttgtatttttgtagagattttttgtatttttagtttcaccatgttgcctgggtggtctcgaactcctgagctcaggcgatccgcccgcctcggcctccgaaagtgctggaattacagatgtgagccaccgtacccggccaacactgttttctagggtcctttgcgtcggaagttg

SEQ ID NO: 16645 - DNA, 1048 bp, Homo sapiens
tccccagccaaagaactgtgtctttaataagttgttgttctgccctgcagtgacacagctgttcttgcagagtccttttgtggaaactgcagtagggccaatggcagggctgggataggaggaaggagagtggacagacatgtggggcctgtggcagaggtttatggagcctccttctttcaactgcgttctcaccactccaggaaagcaactgtgcttgtctgcttgttttgattcttggttatgcttgatgagattcatttaaaaaaaaaaaaaaagccttctgcgctgagaataccctttggcaccttctgtgtctatgttatgtgttagtggtttctctgaagaaagaggcctccagaaggtggttctcttcatgacatagccagacccacccctcatggtgcttccctaagctggtgctacagaggcctgggaggaaagtaaaacagctctttttgcttcagttcagccagggttctgtgcatgtgttggtagctgttgagctttgcatgtgttccctgagtgcccactgtgcatgggctgggggtctatgccaaccaggggatgccggcagaagggagtctaaccttcaggagcttacagtggcctagcaagggcagtggtcaccacccaaacagctacagtatatggccaactgagagtggggctaaaccaaggttataaacttagttgcgcagagtgccccagagggactaattcacgatgactccatgcgtaaggaagatgctgtgtggaggtgaaatttaagttgggcttgcaaggatgagtttggaggagtaggaggggcaagggtgttttgagtatagggagcaaaggaatatgagagtgcagagtgggtttgaagaagaggacattgttatgcatgaggctggtcttggaaatattagggtagaggtcagaggttgagtttggcgggcctgtagggcttctgcagaggactcagccccccaaaggggccagaaggtgctataggatcccactgtggcctctcatctcctcctgctctgtttcagtttgcattttt

SEQ ID NO: 16646 - DNA, 1407 bp, Homo sapiens
ttttaagtctttttggtacacacccagaagtggcattgctagatcatatggtacttctgtgtttaattttctgagataccactgtactattttccacagtagatgcaccattttatattcccaccaacagtgcccaagtgttccagtttctccatatcctcaccagcacttattttctgttctttcaaatagtagccatcctagtgggtttgaggtgacctcctctattagtttaaatgttgtcatggctcattgatttttatatattcagtatatttacatattcagtcattctttttaatgctcatgttatcctatctttggtcagtggcaagccccttcgagctggcttctatatccctctagtcagctcctctgaccccacatcagtggccacctctgtgagtaggacaggtgtcccctttactaagaagttaagaagggcctctccagcatgcaggcaccagcgaagtcttttactttttccctctgggctggctgcttgtcagagctctgcccatcagagcgtaattagtctggttgtagtacttgtacttcccctggttttctcctggggctgggaacaaaggagctgctacctaatctgcccttgtctgtgggtatgtttgcttagctgtggctcagggaacccccgccacccatcccaccccccaacccccacccccgcaactctcctaacctgcagagtgggcaaacagggctagagcaatggaaactgacaagaccactcagtcagtctttattgagagccttctgagtaccaatcagggtggtctcagatccactttggaagtcactgatccacctgactcgaggtgctgagcaggtctctaccaggccaatgttgggggtagatggcaagaactgcctctactgagctgtgacagagaccctggtgggtctagcagtgcagtgaggtcttagaattcaagatgtgctttaggcctctgcaaaggaaaagctggtcctctgctaagccacaggaaagaaacacagtcctggggcggaactggtctttgagagaatagggtcaggtctgtctctgattaatagggtgtcagacaaagcttgcttgggtatcagtatcagcactggaaatgaggtctaggggtgtcagaagtgtccaggagagttggaagagagagtggttgggggaaggggttattctgacccatgtactagcaaaccagacagccctgattggagagccacaggcctatggcccctgcatgatctgctttcttggtgttctttcctagacctgccaggtatgccaaatgctgctgcccaaccagtgcagtttctgtgcccaccagcggattcatgcacacaagtccccctactgctgcccggagtgtggggtcctctgccgctctgcctacttcc

SEQ ID NO: 16647 - DNA, 1031 bp, Homo sapiens
gtgttggccagcctggtcttgaactcctgacctcaggtgatccactcacctcagccccaaatatcaattttagaattgaaatttacaataactgaataaaaagacttactggttgagcccaacaacagagtgataggtgacagggagaagacagtgaacttgaagttaaagcaatagaaattattcaatctgaacacatacgcccatacacgcacagagagagaggaagggagggagaaacggggagagagagagagagagagagagagagagagagagagagaggaatcagaaaaatcaatgaacagagcctcagagacttggagtgctgtatcaaaaagtctaacatttgtgtcactggataatcagaaggagaaagagaaagacagtgatgcagaaaaaaatatctgaaggaataatggctgaaaactttcaaaatttggcaaaagtcaagaagttcagcaaaccctaaacaggaaaagcccatagaattccacatccagaaacctcatagccaaactgttggaaagtaaagacaatgaaaaactcttggaagtagccagagaaacataatacattatttatagggaagcaatgatttgaatgactatagatttctcatcagaaacaatggaggccaaaaggaagtggaacaacatttttttttaatgctaaaaaaaagaactttcaacctataattctacatttagcaaaaatatctttaagtattgaaagtgaaataaagacattctcagataatggaaaaaacaagacactacattgtcagcagacctgttctagaagaattgctaggctgggagctgtggctcacgcctgtaatcccagcactgtgggaggctgaggcaggtggatcacctgaggtcatgagttcgagaccagcctgaccaacatggtgaaaccttgtctctactaaaaatacaaaaaaaattagccaggggtggtggggggcacctgtaatcccagctactggggaggctgaggcaagagaatcacttgaacctaggaggcag

SEQ ID NO: 16648 - DNA, 1048 bp, Homo sapiens
gcagcccgctacaggatacgtgatggacgcccagagacaccgccctccagctggtgggggaggagccccagccaccaagaagttaagtgactggcccagttcacacagcaagctagtggctgtgtgcgtgtccggggtcctcatgggccccaggcctgcaatgcgtacgccccttcccctggctctgcctttggggtctcggacgcccgactagcactttggttaaaatgagaggaggacgggcgcctgcagcctgcccggtgctgtagctttgcggccgccccggcgcctgtgtaatccgaggcgtggcgcgccaggttttggcctgcgagggagcgcacgtgggctgcggcttctcgcggacgcccaggccccacccacccgggacccggcgcgcggcgccccagtttgactttcactacccccaaaggaggtctttccaccggcctcttttctgggtaacagctccagggctcacacttggtgaccccaccgaggtcaagtagccgctaagttacggagccggaattcgaatttggcggtcgggcttctggtggcctcgggacggaggtggctgtgtgtccctgggcaagtctctttccttctctgggtagcccagtcgggcgccccgcctgtcgtcgccgcgcatgctcagttgcgggcggcgtccggaggaggtggcgggcgccccagctgctttgcattgacgccagcacccgctggaggtcaccgctgggggctcggcgcggcacgctgccggcaaaacccggcccggatcacggagccggagccggagccgtaccgccagcaactcctgggtgcgcgcagccgtttctgcgcttctcgacggtgcggccccaggccccgctggagccgagctgctcccctccctaccctggcggacgtggcccggccgctccgaggggtttccctcggaccccgcgcctaaaccccggccagcgggagcgtctaaggctagccttgtaccccaccggcactcggcctgggggggcttttccgcgaggcggcggcccagcgggcggagcgg

SEQ ID NO: 16649 - DNA, 1021 bp, Homo sapiens
ggtctggattggtcataaggtatagaaagaggaaaggagggagaggtttgacctgggcttaaaagactgggaggatgtggataagtggaaaatatatctctggataaggggaaggaagggtacgggggttgggtgcatgttccaattatgaggaggctgaccagagataggacgggaggtctaaaagccaggttgaggagtttgaagtccatcctataaacctcagagaactcccaaaggcatttcattttcagcggggtagtcaaaggataaacatgtttcatgaagattaggtttcaggcaaaaattgcagtaggtggggtgagggacagctagaggtggggcactatgcaggacctattgcagtggttcaggcacaaggtatgaccaggtatgactaacttagtgcagtagtttgggagaggagggaatgagagaaggaaaaactgactagtgacaaattggacttggtgagtgaaagggcggagagtggagggtgactcagaggttggggtttaccagcttagaaggactgtgataacatgccacaatttgtacagtgctttatggtttaccaaatgctatttttgtacctcatctcatttgatgttccccaaaccatggggaggtggaaaggagggattttattttccctgtttaaggcctaaagaagcagaaattcagagattgaatgacttgttcaagtttgtggtgaccacttacagaaacaggttcactgtaatagcataagggagaagtcacaggaaagcgaatttagggagtttttaaaaaacctttcttgtcttttggttctgagttcatcttataaaaataaacttttacttttcctgattgtaaaagtcatattcattgtagaaaacttgaaacatatagaaaagaacaaggatcggctgggcgtggtggctcatgcctgtaatcccagcactttgggaggccaaggcgggcggatcacaaggtcaggagatcaagaccatcctggctaacacggtgaaaccccgtc

SEQ ID NO: 16650 - DNA, 1026 bp, Homo sapiens
aagacccccattctctataaaaaaaaataataataaataaattagctgggcatggtggtgcacacctgtaatcccagctacttagactgaggtgggaggattgcttgaggctgggagtttgaggttgcagtgagctatgattgtgccactgcactccaacctgggtgacagagtgagaccctgtctcttaaaaagcaaaaaacaaaaatattttttaagcagttttgttttttagttctaggaaacatttaactattatttatttaaatgttgtccccttaagttttctcattttctcttctgcagctccctccaaaagatagattgagacgcatcttgatctgtcctccgtgtctcttcacttttcttttacttcccctctctgtgctatcttctgggaggattttttagctcaatattttaagtcacgaattcattcctcaaggtctactcagctctttagcccactgagtttttaaatttgagtttttgtcttcagtctatggtttgctcttttttcttaattgcttattcatgttttatggttgcagcatacttccttatctctttgaggatattaattacactcactttaaagtcctattctgattgctgtattaaaaacactttttattgagttataaatgtaatcagccaaggtgtacaaaatccctaagtgtacagcttgatgaattttcctcatgctcccatgtaatcaccagccaaatcaagacagaacatttccagcattccagaaggctgccttgtggctgtttactgttttttagtatttttaacattttatgaaaaatctcaaaatacagcaatcttgaaggatttttcacagggtacccctgtgtacccaatgcctgtattttacattagcattttactgtacttgctttatcacatatatccatgtatccattcttctacctatcatactcctttttctttgatatattttaaagtaattgcaagtgaggacgggagcggtggctcacgcctgtaatcccagcactttgg

SEQ ID NO: 16651 - DNA, 1904 bp, Homo sapiens
ggccaaacccttttctgactccaggccccaagggtgcgagcctatcacctgatatgaacttcctccctcctctagtctgcctgaatcctccattaccaccttcatcccaccctattccaccttgcccctgtctgctgagccatctgcatttgctgaacctcgctaaggcatagtctgccaacattgtctgctgggggtacagagagagcctccctctccctgtgtctcgagttcagcacctattccaccttagtaagcctgtgaggctttccaggcatctctcccaagctggtctgtcccttgtcttcagggctcctgttctgacactgggcccatgggaggtacaagttttgagtcctgtaaaaagaaaaaagaaggaagtgtccttcacacaacttctgacctttttcttcacttcctggtgtgttagtgtgtgagagagagagagagagagagtgtgtgtgtgtgtgtgtgtgtgtgtgtgtgtgtgatgtttagggtctgaggatattcaaagtggaaaagggtataagagctaggtaatttttattttgtgactaggcaaaggcagtctaaaaaactgacctatggagacaattttagttctcttctacctgttaatgtaagagatgtaaaaactaaagtctttcttttcaaagtgactactagaaaatccttttggactgtaggtaatacagaatgtttataatcagaccaacaaaatactattcctacacattgttttctatgacctagaaataaggatgttacagatccttctttgtaatggaatttgttgtcctaagatcatacccattgtaaaatttaggacttttcgttggtaaataataaaatttgtggaaagaagtactcacaaggatttcaggctggagaagggactattggccattgtatttttcctggccagttttcatcaaaagtttagattttctccggactgtggtaggttatcttgtctgttatgacaaaaactaaccaaacaaaaaacaaatgtcacatgctgttagcaggaatgtaaattagcaagattactttggaaaactgttggcaatatttactgaagttgaaaatatgcatgttctctcaccaccagttctacttccagttatatagccagcagaaatgtgtagatatgttcaccaaaagtcactactagaatgtccattgtagtattagtcgtactagctaaaaactagaaataaccccatagttcatcagaagaataagctgtaatataagcatataatgaaacactttatagcaatggaaatgaaagatcattgctacatgcaacaccatgcatgaatttcataagcatcgtgttgagtgaatgaagccagacaaaaaaagattacatgctatatgatttagtttatacaaagttcaaaatcaggcagaactatggtgttggcagttaggacagggctcacctttgaggaaggggaggggtagtgatttggagaaggcttgagggcttttgaatgttctatttttgacctaggtggtaattatatgggtgagttcactttgtgataattaaccaagctgcacacttagggtttatattcttttctgtaagtatgttaaccttcaataaaaatgtccatcaaaaaaactttcagtgtttattatacttgagccacatgttcatatgcacctgtcccttctggtcttagggacttagcatgtgctttagcctcagtctcaaacagtttgacttcctttttgcaaaataatactcatcattttggaaaccttatctgataagctgcttccctctcttccttacacacagaagggagtgtgtagtttccctgttatatcctctgtgggcaccatgtcctgaaccacagctaggagttcacatgtctgtatgtatttga

SEQ ID NO: 16652 - DNA, 1035 bp, Homo sapiens
cttagctgcccaaaatttcccagtagtttgcccatgcatttcattcccctattgactcttactgagtgacctatgtgccaggcaaaaattcggacttgttcattctagtttctctgcttctagtgtgtctcatgctggtgtttgttggctcagatgtgttaatggggctgccgctgctgttgtggttgttagtcattcttttgaacagcggctttagcttaccaatgctccagatacagtttttcagaaactcaatgatctgtgtgcattacacattaaaaagtgcattgaacaacagcatatccagattaaaaacaaacaaattagatttatctggtgtttttccattatgggttggagcaaacatgctgtgtataaatcagataaaccttttctttcactgtttcagactgagaattgtttgttcttgcttttgtggtcaccaagaatgtaatataactatgctcttcacatcctaaggccaccataagtcctggatcagacctgtttttttgaagtcacctgaattttgacttgaggctcccccaacccttactcccactacccctttgaactggatcactttgcttttaaggggcactcccttgaagccagttccctgaagtgacctactttcttgaggtgcttgaagagcttccctttcatttgggaggcttcctcagtgcccccattcccaggcgttttttcctgggagtcctgtcctattcatgaatttcctgttttttccaggggggtgggtagggggtgtgggggcaggcagtactatgttattatcgtaactagtgacatttaaagaaagaaacccaaagcccagttaaccaattacacttaaattctctgggcccaggcctgctggatgctctccatctaccagaaatgcttcttatcatcccccctcttttttagactgctaatccttaacagattaatctgagtttatatttagatgaaagttattcattaatagaaaaacctgaaactgtagtgagggctgacagtgttgaagtggataga

SEQ ID NO: 16653 - DNA, 1047 bp, Homo sapiens
aagtgctgggattacaggcgtgagccacagcacccagcctgatcactttctttttgcaaatgtaaccatccagattaaaaaagagcattccaggaccccatgagatgcccttgtattcccttttgattacctctcaccccacaaaatatactatagattagttttgcctgatttgaactttatttaaattgatcatttttaattactgaactgagccttaattataatgtgaaatgagcagaaagatatttcaaaatgtttcatgatggttctttatggccagtatttttgtatatcctgtagaaatatgtcattccctttattttcaaacctcatttgtgagattttagggatacgaatgcctttttgggactggtgtggctgtgttcttcttattaattattactgaagtaaagaggaaatgatatcagcagatgtgcagagcttttatttgcactgaatacactattcatttagacaaaaagatcatttctcaattcaaatcagaatattctaatttaaggctgaaatcagttgtgtcataatctctatggaaacaaagctttctactgtgtagtagttgcataagtaactcatttccccttgtagatatacaaattgtagatgcaaacacttctttttccattttctcccaacaatactcttgaaatagaagatactttagtcatatttgttacgttttacaaaatttaaaatatctgttcaaatttcctgctgacatacattttaataaaattgttaaaacttaaaaattgttgatgagctcactttcttttgctagttgaattcagaaaaagaagattgagttatccttcttagctcttgcgtattagtgtcatctaactctgcaaggctctctccaattggggggtgtgtgtgtgtgtgtgtgtgtgtgtgtgtgtgtgtgttttactaatctgcaggcattcttcgtatattgtgggtatgagctctttgtcagttttacgttttgcagatactttctccaacttcgtggcttactttttcattcctttacatgggtct

SEQ ID NO: 16654 - DNA, 1055 bp, Homo sapiens
gtcaaaggggatcggaatgagagtaccaagattaataaggaccagtacagggttccacgtgtagggaagataggtactttatagacaaaatgaaatgaatgattagcgggcagagtgtgagttagcagagaagtgctgctgagcagaggtgtttgaaggctggtgtggtatacaaaagagatttttacgctgctagattttgcaaggaaacttaaggtagatggttgcccttgggcctgcttttttcccactcctgggtcatctcagcctggctgcagcactcccacagtgaattaggctactaccctctctcagaggagagtagaattttggagcagtaggtgatgttggagcttattttatccaatcaagaatcagaaactgagacccaaggaagttaactgacttacacccaagatcttgtaagcagcaaatggcaaaaatagtgctttaaactgaaatctgcattttcgaaactgcattcattctttcttccatctctaaatctgactgtaacctcaaaccttttcctcctgtgtaccttagctgtcatctaccttgtggtcctaaactaaaacccctgtctcttctacatacgtccctaaatccagtcactgaccaagtccaattgatcttactaatttttggaatctgtccacttaatcttcatctctactgctactcttagtctaggtccctctctttttacctggattattgaaaccaccagttagtctccctatgtctagtcttgactccttcttcattctccacacagacgtaacacaattccatttgtgttcctgttctatgacaccccagataggcacccactgcgttcaagatgaagtccaaactccaaaatgtagcctacaagggtctccatggtctgtacactgcttacctctctgtcctcatctcccatcatgccctgctttgttctctgtgctccagctggcagccaaattatgatgtccattatacagggagatataaaaatataaagggaaaggaaatgtgaggctagagaattgggagaaatagagtcttgttct

SEQ ID NO: 16655 - DNA, 1819 bp, Homo sapiens
tgtttaaaataataggtagaaatgattgccttctctttgccaggctctgtgcagtattcttgactctattctcttatttagtcttcatgaagactctaaggtggtgaaagggaaggcttgatggggttcagtcacttgcccagggtcccacagctgctgaagagctgtgatttgaccgtggtatgtggccaccctggctcactggcccaatgtgtctttccttcatattggaaggaaagataccgcagtgtgtacatagtggtgattccagtggaggggcttgcaggggggtgtttatttctttttatgttttaaaatattttctcccttccttataaatcggacaaaaaatacatttaaataatgtaataacccaagattttattttgtagtatttacattaatcattcctttttttgtttactcataaagggcttgtaactcagtattcactgcattagaaaacagtgaagatgcaattgaaattacaagcgaagaccgttttatacaggtttgttattttggaaatctgtctttctggatttcttgttttgctttttccaacttttaggattgaacctctccaatatgatttttttttttctttttgaagtttaggagaccagtttttccttcgaggattatcagaacaaaatcaaatatgtaatttaaaataagctctctatagattagaaaacatactaataattaaggtgctagaaaatgcctgtagaaatgccacatttgcattcattatttccactagtttgtttatttaacaaggagagactcactgaaaaggatgattgctgggggcttgggggtagtgctgttgtacgaaggggaatgccctgaccataggtctgcaagtacaagtctttcacctttctcactgtttttgaagataatttgcacttacagaaatatactagaaacaactaaaagtttcagaaataacatacctagtaagtgctgaataaattacacattattagcaaagtgggtttatatgagtgacttaaggcaacatagcttaatgttttcagataacagcaaaaaagggagttgcaccagaaaaagacattcattttgtctgagaattagctccactttggagctctccagtctttcttacttctgggctctccagtctttcactttaatatgacttgtgacttccttgttgaagaggtgatggtgttgactttgagttggtgccctgagaggcagcgtgggccagtgtttgagggcacaggctttggtgtcagacgggcctgggctccatcctgcttcagctgaacaactttgggcaagttgtttaatccagctgaatctgctttctcatctgtggaaatggaaataatattagtaagaacaacagcctgccttttgtaaggatgtcatgaggactaaatgaattaatgtatgtgaagtgtttactatagtgcccagtgaggaaaatggaccctgacagatagtatcaattattgttttatcatcatcatcattagcacgtgcacagttttcccatgtattttctgcttatcttacagtcatatctgaaacttaaccataaagccttacatttgtaattacttcttagttcatagcctgctttccatacacatcatttattcgaaccatatgaaagagacaagagaactgtttcattcccatatccggataagagtctcagagggattaagtgacttgctgaggtcaatgtgtggagggggaggacagcctgagtgttttgcactctacctggtgctttattccatcatccccccacccccacccccatctaaacagccctgtt

SEQ ID NO: 16656 - DNA, 1502 bp, Homo sapiens
gcaacaagccatggttgtgccactgcactccagcctgggtgaatggcgagaacctgtctcaaaagataaagaaagtatactatttggtggttcttagtatattcacagttttgcaaatgtcacaattaatttcccatattccccttgatagtgagctttagaagtaacccttagacctgtctgctgaagccttccttctaaggtagacatgcaagttgtggacatggaggacaacccacttatttctgcctagggaaccctgtttagtccttggtggctttggactacaagcctcgtcctgtgggctgagctccccctcagaactgtaccaaggcccatacctcccttctactccagtgtgacctaaggactcagctgggctttctggctgttttttgatatagcccttttttggtgcccattgttttcagaattatatcagtaagcatcagtaatcatcctttgattctatcggagtattctggtttctttttgatctgctttcccagaggagtctgaagatgagctcttatcattggtatttggatgcaggttgccatgtaccaaacaagaatatttcagaattgacctggagtagggctctggatagcaaacctcagctaagccaacaaggctgccatggtgcttaacacccagcctgggtcaactctaggtcctgagggactctggaaggctaagaaaggttatggaataccctaggggttcagtgtcctgttgtgggttttagggatttccatagtttaagggccttggtgattttcttggaggaattcataacattttaggacggtgacaaaacccagctccatcctggctttccctaccaccccaagataaagggagtcaccacagcccggttctcttgctgtggtcttgttctgtgtagccctctttccccaggctgcacttcctgtctgaaagaatccccacgttctgtgtctgatcaggagagcacagctaatgtgatttcagccctgggttttgaggtctcgtcgtttgttttacttgagcttggtcctggctgttatctcatcctccacaccctatatacagggggtgaagccttcacacatcccagaagggcctcaagccatttagttcacctcagaagccggtagtggccacataatggtcccttctggcccccagtctggctattcttcccctcccaaacacaggggcagaggctaagccccctcttccacttcagcaggtgggagttatgagaggaggaagtaagggggagtgccctttatttgggggtccaggacccctcttgtctgcagatggccactgaaaatatatgaccacttagactatggtgacctgacttttgtcagcaactcagaaggaggtggactttggaagttaagaaagaattgtcctattacctgaaatcagtttggggttgggatcattttttatcttaattgctttagcaatgtaagtgaatcagaactgaagtggaaaatgttcttggg

SEQ ID NO: 16657 - DNA, 1101 bp, Homo sapiens
ttcaaggtggatagagataggaggtgcagacctcataggactctgggtgccacactgaggagtttgaatcttatcctaaagacaaggatgagccattgaagtgttttgattgagagatctggttggatttttgttttacaacgatcgcttggctgcctgcagagaataagttgaaagggataaggttggtgttttagaaccaatctgggaggccattaatccagggaggatgacaaatgtctgagcttggacagggatagagcaggggatagactggaggtgtttaggaggtagaatccttagatttggctgacccagtggaaggagaggggagggggagaagtgatggatgacttctgtctaccttatggtacatgctgttcagtgatctgggttaaagagcagatttggagaaagataaggacttcatggtggataatgaattcatttgcagtgcctgaggagtgtctaagtgaggtggtaaatggtaagttaagatgtaagtctggagctcaggagagaggcctggggtaagatggcaacataggaattaattaaaactataggaagaatgagatctcccaaggaggttttgttgactgagaagggctaaggatagaaccttttgaaaaaccacctttggaaacaccaggggtactgaggaaggaggaaatcatgaaagaaactagaaaggagtagtaagaagtggaaggaaaaccaggagagtgtggactctgcaaacagaagtgtccagaaagggatcagttgtgtctagtaccacaatcaagtcaggtcaggtaaggattgagttgtagccttcagatttagcaaaaaggaggtcgttggtgaccttgacacattcactctttagtgcccacagagaagaggatttagtttaattgggcaaagaagcaaagagcaagtgaagagccttttcgatggtgcaaaggaagtgctaagggcctacattcggatcctgtacatgagcagggagagaagttccaagtgaggaagccaagacaaggcagagaagctactccatggctgtgggaagagctgagctcagcgcccaccctgctatgcactcatctgcaaagcagc

SEQ ID NO: 16658 - DNA, 1063 bp, Homo sapiens
ttgtcagcctgcccctgacttcactctctttccaaagacttttaacagaggtgcctgtaccagcctgttttattggctcctgccctgccattctggatagggctcattgtcacctggccaccactcctggctgacctcatgccacagaaggaaaccatacacccagcagacttggtttcctctgtctagtctggacagcccctagagctgagttctctgctccacttaacattatggttctcatctctgttgtcggtacatggggttacttctgagagactgaaaatcaatatccagtgggtcagagcaggagaaaggaagatgaaagagaatagtttccaggctggcagtatgaaactatagtcacactgcaggtattaacggatctgaagaaagaagggtcagcacagagctggtcacagtggaaacctggagtgaggagagctactgaagtgtcaccggtgtagtattcattttggcactctccaggaagtgtgggaagcctagagtcaggatgccacccgtccatcttgatggcagtctgttccctctgagctgggaccatcagggcttcttaggctactgctattgcatattgaaatatatgactaactcctttggaatgttgcttgatgggcacagaatcagactgaggagacctgcttgcctttagtctttttcattgctctctgccccaataccctctaacctgaattctcttcagagagcctacaaatagtggttctattacatcataaattgatccatatccagtggggatccttggatgcagacagcatgtggtactgtgagtggaaggcatgctgggactaaaggcagaactgaagttcttatcctggctcggctggttgctttggacaagtcacttcacctccctgagtctcagtgtcctcatttgtaaaatgtaataaataatacttttcatgcttaccattagatcttcttgtgagtgcagatcaacagagaatgactgttaagtcctttatccatcaaatatgttaggtgttatcttgggaatctgccctatcacaggactgggttg

SEQ ID NO: 16659 - DNA, 1323 bp, Homo sapiens
tataggcaagtatttgtccagacacttccccaaagaagctattatgaaaagccaataagcacatgaaaaaagtgctgaacatcattagtcatctgggaaattcaaattaaaaccacagtgaaataccactacacacccaatgggatggctaaaaatgggaaaggctgacaacaccaaatgttgaagatgtggagcaactagaatgcatgcatttgtgatagatgtgtagaatgctacagtcactttgggaagcagtttagcagtttcttttttcttccttttttatggtaaaatttaccattttagatctgggttttcttcccttcattctcttcatatggtatatcacactgatcttcatgtgcggaaccaatcttgcatttcagaaatagattccacatagtcattgtgtataatcctttaatatgctgctgagtttggattgctagtattttattaaggatttgtgcatcagtatttacaggggatattggcctgcaattttcttgtagtgtctttgtctggctttattaggataatgctggcctcatggaatgagttaggaagtacttccttccttttcagtttttctggaagagtttgagaaggattgatattaattcttctcaaaatgtttggtagaatttaaccagtgaaaccatcctttcttgggaggtttttgattactgattcaatctccttgctagtcattggtctattcagattctgtttctttatgattcagtcctggtaggttgcatgtttctaggagtttatccattgtgttggcattcagttgttcatggtactctcttataatcctttttatttctatgaaacctggagtaatgttcccactttcattctgattttggtaatttgggtcttgtctttttttcttagtccatctagccaaagatttgtcaatcttgttgatcttttcaaaaaattatcttttggttttgtttttttctgttctctatatacctctgttctttattatttccttccttttgctagcgttaggtttagtttattctttctgtagctccataacatgttaagttaggttgttgatttaaaatcttgtaggcatttacagctgttaatttcccccttatcactgtttttgctgcatctaataacttttggcatagtgtgcttcattttcatttgtctcaaagtattttctaatttcccttatgatttcttctttgaccccttggttgtttaagcgtatattagtccatttgcattgctataaaagaatacctgaggctgggtaatttataaagaaaagtttattttggctcatggttctgc

SEQ ID NO: 16660 - DNA, 1043 bp, Homo sapiens
atgtttagagcatagaatagtgtgtatgtccagtctagagaggttttttgaggtcattttctataaggtgtttttgaaaaagtaaagttactataaagggaagaagaaacttttgtgtgtttacctacgtgttatgttatctacattctcttaattccttacagtaatcctataagacagatattattctttctcccttttttgatgaaaaaactagggtttagagatttaagtttgcttctctcaagtcaatgaactacaattttgatctgggacattgtgactacaaacataactctagttttattatatatgccataagtcacatttttttcactttgatgtaattatatccaaagtagctagtttaaaattccatcttgttcttggtgtaaatagaaaatcattgattgtggtctgctcttaaagttttcctagaattcttaaaaacatgctaggcttccatgtttgtgccttgaaagtagcagaaacttgccaatagaattgtggaactgtattttccttcacatacagaagctttgtggatggacattaataattaacatttacacatttgttcacatcttcaaagtgttttacaaacatttaattagttcatgtgtaaactatataggaagttgaaaaaccagttttttaggttcattttagtagtactgaagtgttagggggagaaggagtaagcaagccctcagtaagaaaaatacaggtatgcaccatgaagttctaaacatcttttcttacctgcctagctttcagcccagtttggctcatatcaaacatgttttttgggtgtatatcttctctgtaatacaggggagtggattatgtggacccaacagaagacagggtggaatggttggggaaagacctgggtcatgtaatgcaactttctcttccgtagtcccttaaatgtgaattgtccttgattcatccctttgagcattttgaaggccaggatgttgttggagcagagactctggcaaatgaatggagcatgcatgttaatttctagggaaaaaatc

SEQ ID NO: 16661 - DNA, 1034 bp, Homo sapiens
agtgctgggattacaggcatgagccactgcgcctgactgttaaagcttttagttctgggccaggctcagtggctcacacttataatctcagcattttgagaggttgaggtgggaggatagcttgaagtcaggaggccaggagttcaggaccagcctgggcaacatagtgagagcctgtctctacaaaataaaaattaaaaaattagctgggtggtgatgcatgcctatagttgtagctacctgagaggctgaggcggaaggatcacttgagtccatgagttagaggttacagtgagctatgatcacactgcctttactccagcctgggtgacaaagcaagatcctgtctctaaaaaaaaaattaaaaaacaaaatttagttctgaaagtacaaatacgtataatccacatatgttcctcaaatcacagttacatattgacatcatggtttagataatcaagaaaacaagcaaattaaacattgaaactgtgttcttgactttaatgtaggcaaacctttttctctgagccaaagattagtcaactggtctcagctataataatgattttcaatcataatatttgtgaaggttttctgtattataagtaggaagaactagttgtataggaagttgtaagtcaggtagctgtgtaaggtgatctcttggcactgttgatacaccagcttgtctctgttttgttgaccattcttaggagtatcttgttgatattcagcctatttctggttacagagaaatagctgattaatcataatttagtagccatatatatatatatgtatatatatatatatattttttttttttaaacagagtatgttgctcaggctggggtgcagtggcacaatcttggcttactgcaacctccgcctcccggattcaagcgattctcctgcctcaacctcccaagtagctgggatcacatgtgtgtgtcaccatgcctggcttattttcatatttttattggagattgggttttaccatgttcgtcaagctgatctcaaactcctgacct

SEQ ID NO: 16662 - DNA, 1030 bp, Homo sapiens
caaagttgggaaagtttttgtggatgataccctgaaacatattttctaagttgttggcgttctccccttgcctttgagggatgccagtgatttgtagttttgtcctctttacataatttctcggaggttttgttcattcctttttattcttttgtctttatttccgtctgtcttatttcagaaaacaagtcttcaagttctgaaattctttccttagctttggtttattctgctgttaattcttgtgattgtattgtgaaattcttgtagtgtgatattcagctctgtcagatcccttagggtttttttttttttttaaatactggttatttcatccttcagctcctgtatcactttattatgattcttattttccttgggttgggttttgtcatcatcccgaatctcaatgatctttgttcctatccatattcagaattatatttctgtcattgcagcccatttggcctggttaagaactgttgttggagaactggtacagtcatttgaaggacatatgacactctggccatttgagttactagagttcttgtgttggttatttctcgtcagtgtgtgtgggtattactttaactgcagtgtagattgagtatggtcaatagacttctttactgcatgttttcactgagttgaggttttgtgtagggtgtttatttgaagctgacttcttgtttctggtttcagaggggagggtatgtcaggtatctttggtgttaaagctttggggtatgatccagcaggtggctcttaggcttattggacagctggtggactaaacagttgttcagttgtgtggctcccctatgtttcctcacagttgtagccatgttccctctcagtgtcctgaaagtatgggtttctctgccccttgagtgctggctgtagttcatgacatccagtacagctctggggagatctcagtatttatgttcctcccccagcttacaggctgcagagggagagatcttattagtggttttggccaagggttgtttgcttgattcctggg

SEQ ID NO: 16663 - DNA, 1539 bp, Homo sapiens
gtgggacacgaggcatattctccccctcccacagtgcttctctaaattcctagatttcacctagaagcacagacaaaagcatgagcggcgggaggggaattttagtcacactctttatacttatagccaccatgacgtctcaactcacatttcttcagtttgttcacagcaataacataggggatttgggcataggttttactcaaattcagacacagtgtttttagttttccttagtctctgttaccaatcccttggatgataaaatttattttaaaaaaagaactgtggtgtgtcttcttgaaggtatatgctgagcttttagattattgcttccctttcaaaggcgcacagtccatccctttaacaatttgtgtctgacaccgagataaaactcaatagattacagattgttgaatctagcttcttactgcaaactactgtaatccctttgtaatcttccatctgttttattcttaaataatcttcttctgggacttaggatgtatctctttctagcctgggactaactcctttaagtcagatagtgtgacttatttattctatgttatgtaccctgaagttcattctcattgattgaaaaggaggacataaaatagaaaaagcactcttttatatactttcacacatcaccactctgagccttaagtcttagatcttccttatttgtcttgctgcaaacataattagaaaatcagaaaagctcttttttgtagtccatggcatttttccaaggtacagttcagttttggagtaaagaatcataccctttctggctttccactctaaacttctgcaaattcattcttcttcttgtaagcaaaatcagaggtgtttaattgtttagtcacttggatatatacactgaacatttttagttaaacagacctttctgctttgaattgaggatgactgttaataaggtgttagaaatgaaaatcaatcctgacttcttcttcttaatcagaatccaaataataaggactgcactgctgcagtctctatggggacacccactgctctcacttttctgttttcttctttttaaaaaattttattttttaatttaattttatttttttactgttccttgcagagcagggctaccccaaaggcagtgttcccagagtagcccactttctgtttttttttttttttttgagacagagtcttgctctgtcgcccgggctggagtgcagtggcgcaatcttggctcactgcaaactgtggcctcccgggttcacaccattcttctgcctcagcctcccgagtagctgggactacaggcgcccgccaccacgcttggctaattttttatatttttagtagagatggggtttcaccgtgttagccaggatggtcttgatccactttctatttccttatagctcatgttgacagcttttctctccaacatgggtctactcatctcatgtaaaattattactatacgttcttgttgagatcatgaaccttctctaaaaatttcatgaggttgtggatttggagaagtattcc

SEQ ID NO: 16664 - DNA, 1042 bp, Homo sapiens
tttggtggagaaggattttgagttgactacattgcttaattgtaatgactattctgtttgacctttctaagccagagcttcacgaagagagatttgaatgtttgctccgtagaagtaggtctcttccaggggtgaggcactgtcttaaaaagttataaagaggccgggtgtggtggcttatgcctgtaatcccagccctttgggaggccaagtcaggtggatcatgaggtcacgaaatcgagaccagcctgaccaacatggtgaaaccccgtctctactaaaaatacaaaaattagctgggtgtggtggcgcccgcctgtaatcccacctactctagaggctgaggcaggagaattgcttgaacccgggaagcagaggttgcagtgagccgagattgcgccactgcactcctgcctgatgacagagcgagactccatctcaaaaaaaaaaaaaaaagttgaaaatactaacttttaattatcccttaaaaatagatattccagtttttctgatttttagtaatacatgtttgttacggaaattctgaaatatgtagaccttaacttatggaaactttagaatataaagtagaaaaatgaaaattacccataattgtaatttctaggaataatcactatgaacatttgagtcttcccctttctttttttctctttttttgtattttttgttttttgtttttttttttttttactatatatgtatggagtgcaacacatctgtattttagttatcactttacattgattaagcatttgtacatgctattaagttcctctcatagctctaatttatatattaaaataatcattctcctaatgttatatagattatttccagattttaatagtataaataaaatccttgtagacacagttatttgtaaatgtttgatttttaatacctaatacgtattagacagatttctactgcgttgaaacttagggtgatcattttgaatggcagtttttacaactgaagattttccctcctgaaaactttattttaagcatcttggataaat

SEQ ID NO: 16665 - DNA, 1062 bp, Homo sapiens
ggtcataataagcacataaggagcacaactggctactttccctgaaaactgttacagtcaaaaagtaaattaatttagggaaaaaagactgaagatttcaaggtacggggtcctaaaagtaaagctactgctttgcaggttttgttaactgggcgcgggtgtgggggtgggagtaaagagtagggatgtaggcttacagacccaggttgtcaggagagcaatttgatgtggaaggcacaagtaagagaagatgtaaaccacgcaaacaaaaagtatttgaaagggaaataattcaattcagcaaatatttgagtgcatactctggaccgagattatagatagaatgaactataaaaagtccaaataaaccctccagagaatgctgagaccttggctttctgattctccacataagttaaataggccccacaggaggcccccactgcaacacgcagttggttcagtgctagattagtcatcgttagaagatggccagaattcagactgatctgaaaaaccaaagaactcaggttgcttcaaaaacccagagacagccaaagctcagaatcaactaaacatcccatgtcaactgaagaatgatggactgctttggtcatagtaagagggtcatgagaggggagggaggtgaagcccaacctcttgctagccaggggcctccctcctctgtagaaaacagagttaataaccactcgcctgagaggcctgtggtaggtcaaatgagatgccatctgtgcagcaatttagtgcacaggagatgttctgtaaacttcatctttcactgacactaatccagtaaacaggcatacctgacttgggataagcaacaagaaaaaaatgataatgggaagcaatgaggaaataaaatcctcacttcttacttgaacagcagaatccttaagaaatacagcccactcaactactagtttgaaagtttaaagtctctgtgatatcagttctttctctaggtgacttacataggatgaaaaaagtgttcccaactgtaaacatgggtttctgtatcaaacatgtggctgactctcc

SEQ ID NO: 16666 - DNA, 1031 bp, Homo sapiens
tgaaataacatgtccatgagttcctctttccagaggtaccaaccatcatgtgggatcctaagtatagtgttaagtagctctttgtcctccccttcactttgaggttgtctagttatatgatgttgaattccccagctctggtccctattacctctctggcagattaagcaaattgcttcaggctggattgcttaacacttagcagaattcatgctgcctttaatgagctaccagtttaaccttctggggctagagtgatttttagacatttttgttttgatgagttgatttttgtacttatagctataactgtggatcccttgccatcaaactatggtgcagcaaagcagctgatgaatttctctgtctctgatgttcatgtcaaacagttatttctctagcattcattgggggctcagtactgtgccaggtgctgtggcatgagcagtagtggtgtggagggtgctacaggagacatctgcaatgcagtagactagattaaaaacaagttggggagagaaggcaagcacaaaaataaaagaaaaatagaagatagtatttgacttactgctgatagtgtgggttagattatcagtgataatcctattaaaatcagcaagggtggagggcatgaacatgagcaaagacttgaggactggactgagcatggtgcatgcatgtgaggtatgcagggactggatggaaggtgtggtatggaagaaaagagtgctcagtaaggctttatagataatgagggaccctgaacactctttggaggcaccagaggggtagtgggggcatggtggatggcttctgagagctcaccaatgataaatggtatgtttaatagagtaccttatctgttggaatgtatattttcctcaccatcaccttttatttagaattagggatcgacacagtgatgaggatgtcctgagagatgtggtagctgaatgtgatagaaggttagtgctgaaaggctatcatgtaattcataacaggcaagaagaataggagcttactttattatt

SEQ ID NO: 16667 - DNA, 1029 bp, Homo sapiens
tttaaacaagtgaaagtcattttggacttctgacttccagaaatgatatatgataataaatttatgttgtcttaagccactgagtttgtgataattttttgtaacagcagtagaaaactaatagagtagtagtttgagaaaattagtgataaaggatacttgggaaggaaaggataaatgcagttaggtcagttagaaactctctgatcttgccatcatggagcctgagaactttagagttagtaaatactttagctaatatatgcttcaacctctcccttttagacatgaggaaacgaggtctgaagatgttgtgataagatggcacagctaattggtggtaaattgtgaattgaacctttgttttctggacttaagtcatagaaaccactgtaaaccttgttaagctttaaaaagtttcattctgttagggaagcacagctcagttctgagtaacatagttaatacactaagtgctttgtatatgtttgtgtttaattgacttgagcaggctctactgaagaatacttctttaaacttcaggattcaagtatgtccatcaacagtaatacttaatggggcaatatgttatctcctttttaaaaggagagtaacagtgtattggattctcagtgaactgagtcaagttgcagggatttatgctgttttggtgaggaaaagtagctgttttatgatggctcattgagcagggtggtgggggaagttctctgcacctggacaaagaaataagcaagagaacaaagactgtgaagattttcatttagatcatatttgggatctgccaggggtgagtatcatcattagaagggagaatattgctgctaaataaggaaaaacactgtacccggagaagaacttttatctgtcagttaagacaaataggctggactccaaataaatattttaatcagactttgaataaagatgtgtccagaatacgttgcaatagttaaaaatgtaaggaaggttccaaagtgtacaggtggcagtactgttggatgtttcaat

SEQ ID NO: 16668 - DNA, 1049 bp, Homo sapiens
gggaaagtgaacaactactcataccatctcttatatgcccaattcctctggaacagataaattatggagattcaataccaccttaactaaggtatcaaagttaatgggctctatctatcaccactcccacactctaagccctactggatctagcaacctagcaactagactccagaaacagtaaataaatcctccctcagactaacagctgaaaaggaaacaagagttttagacttctgatgaaggaggaggaaagggtctttggatgccccttatgtcaggccccaggcttagtctggaagagatctgtctaggccaggcctgaagctctgcaaggtacaaggaaataatagctgtcaagaattaggcgacgtggatgaatcccatacttgatatgccagagaaagtcacttcctctgtcctctcatcattttactacacccaagtgaatgtcccacactcagttctacatgtaggaatggactttatgggagaggtcaggactggtgacgaatttgatgagtcataggaatcattgtatgttaggagtggttgagcccagtcttccggaagagtgaggatattgaactacagagagagattgagggaagttgcctgcagtttcacagcaggttacgagaggtctgaacaggtagcagaatctgcaaataattagcttatctggtgtacaggaggcaggtccctaattggtttgaatttaatactcaaagtacatgcgcagagaagttatagtataagattcagaacaaatgggctaagtaagagaaaaaaatgtagcaattggaagatgaagaagagaggaatattcaaaaagatagcattgtgctcctttcttggtggagtgaacaggtgaggattatactgtctttatggattataggtacattggaaaatagtttacagttattatttgaaattcctctatagtgaaggaagtagtcaagataaaatgtgttttgtgacttttgatataggaaagtcagtaatagccatctcaataaagtatatgctcagctatttcatcttta

SEQ ID NO: 16669 - DNA, 1045 bp, Homo sapiens
cagtgattgttcatggcagggagagaggaatggaatattggcagatgtaattgggaagctttcagaaaaggtgggggctctaccagcctggatagataggctgtggagactgggaagagcagagtgagaggaggaagcacagtctttggagtaaggcatggaagagtgttatcagttgtggggagagactttgcttgaccagggtgggcagttcacattgaaggatacctggagatgagattatatatagctgctctgtttagtaatgtagtcattagccacatgtgactgtttaattaaagtgaaataaaattaaaaattcacttcatcaaatagtgctcagttgctacacatagctagtggctaccatactgattgcagatagaaaatatttccatcattgcagaaaattctgttggtcagcactgataaaggaagtatggggttttacacaggataacagtgtgaagagcaactggagatcttttgaccaggcaaatagtagcatgatgaaagtcatacccaaaataaagagtagaaggagagcagtgaggggctgtcaagtaggtaggcctatcacttcaccgttacagcacacagaatgagatctggggatgatgaagctgttccgcaggaagaacatatggattttgtctggtagaatgactgaaaacctcaaggagccacagaatggccactgagggttttagtgtgagggacagagggagaatggtgtagcatcaatgagcaaacagtttggaggaggagctgccttggaagcctgagggagaacagtcatgttttttacaacaatgtgtggtagtaaggattaaatgaagtgagatatatatatatatatatatatatatatcacattgagcgagatcatagataaaactttagatataggtggttttaaaaagagacgtacccccgttattttgacatagtgcatgtaaagttacattgtgtggcttcgtcttgcatcttctgcataaatacttgcgctgagagctctttcccttgttagcttaggtagcaacta

SEQ ID NO: 16670 - DNA, 1531 bp, Homo sapiens
taagtgctcaatctttatacttgtttcagcttaccagaatgggggcatggtttagatgataaatttgattttcccttaaatatgatgtttgataaagataggctgcgaagaggaaccttactaatgtaaacttgctatattgtttcctttcctagggtgattgtgttgttacagtgctgcttgctgaagaggacaaagctgaagatgatgtagtgttttacttggtatttttgggttccaccctccgtcactgtacaagtactcggaaggtcagttctgatacattggagaccattgctcctggtaagtatttgaatgggatccttactagcttttcctagttcttaaacccttttattcgatgtttatgagtatagagtgacaggaagagtgaagtgtagacagtataaaaaaatttattagtttataaagcagtttgaatatctggtcctgctggtattggaacagattgccagttttttattgctgtgccattttatgtatattactgttatgtcggccacctaccaaattctgtaaattataacttatttaagaactgggattatgacagttgaaagctgtatttatcctcctacttggcaaaaatgatgttgaaaattcaaggatttaaagattctagagagtctctaggtatattattgccaaatttttatggacagggaataaaagaaggtagtcagcatagataccgatttcttttctgaagagtattagatatccttccttgtaacccacagctccagtcatcttgtttcctgtgatgtatatcatatcagaaaggcttttctggaacttgaggtctgctctctagcaggtaccatccagtatcaccattgctgaacatttattatgtgttggtgatggggagaaacagcttcttaacctaggtataatcgatcagtccgtgactcagttctcattaggaaaggaattgaggtaatttttataaacataatacttcctataataggaacactttagggttaaagttcgagggctgtgtgtttatatacctgtgtgtgcatatatatctagaaagggcatataagtagatacaaggagactgcaagcagatataagggaaaaggcaaatacaaaaagcatggcctgtgtcctaactgtgatcctcagtcacaaatcccaacaaagtctgttctattggtggagagggatgtacctggaagcccttatgcctttactggtaaggtccttaaattaggatgggcagcaggcaattactttctcagagtcactgaacttgtatgacagcctggagctctaagtttgtaccagatccttgtacattgtcctcagcctccctttctgagctctagttcacatttcttcccttgactttgattctagtaccactttatatatgtctatgtaagtacccttgccctgcctacccaagccaagcagaatgggtattagactctgctcctttcctctaatttggtccgaatcctcagaaatcattcctgacccctttgctttggccctgtag

SEQ ID NO: 16671 - DNA, 1050 bp, Homo sapiens
agcctgaattgtttaaatgtttacagtgagcatgttatttttatgatacatagtaatttttgatgaaaacattctgaaggctgaaaagaatgtcctgtcttttgaaaataaatccatctttgtgctgattaacactggaggctaaccaaagcgttataataaaatattacatttaaaacacctatgaaagtggctagttcaagaatataatttgccttgaaacatagcttgagatggaagtatacttctagtaatgaaagatcttgccttagtaataaatgaaagtaaaatattccattattgtcccttcatagaaaacaaatacaaccctaaatgacattttaattaactagtgattttcctctaaagctgagatttgtttttttaagacctatgtaggattggcaaatagtgtacaaaatctggacatcctttgaagataattgttggggtgggatgggggcatagagtactgttttattgtgttcatttttattaatgaaactgtgaatttagaccaagcagtgatttcatagtggaagatggaacaggatgtttagtgggttttgtatactatttttgtaaaaggctttggtgcagaatctttcataaaatgaaatctattttcagcatgtctgttatttatttttagaattcacagcaagagttcttgtttgaagaactacaaacctttattgactccaaatttgactcagctctgttatattttccttttctttttcactgataagggagggtactttataaagtagatttgtcattaaaaaagaataatacatttacctgatcagaagttcttttgggtttaaagaaaaaaattgcagcccagattgcaacaaatggtctgagttataatatgttatgtctttctttttctttctctctttttttttgttttgttttgagacagagtctcactcttttgtccaggctgaagtgcagtggcacaatcacagatcattgcaggcttgacttcccaggctgaagttattcttatacctcagcctcccaagtagcactcaccatcgt

SEQ ID NO: 16672 - DNA, 1059 bp, Homo sapiens
gaagggaaaatattggattaacaattggacagtttctcaggtatctctttcatggctatttctgacattctgccttctcggttatacagtttgattttagttatacacagagctgacagtagctcacacatccatccattcacctgctaacaaactctgctaatgcagcagaaagagataagcatactgttgttgccaagcacaacccccgcgccccaacacacacccatcccgcgttgttctgtttctctccctgtcgttcgccctcatcccattctgcctgagtaaacagtcattttagcaattcgggacaaatttctgtgctgatacttactttggcacttcacagttttgggtaaggtagcattgcttcaccatggctctttgctgtgtgaatggtgtttacttttagtggtattgtgactccctttctgattcaagggttcaggtttctcatctttgcataggcctgaggaaggagatcaataagaaaggaaaaggactggttaaatggatagggctgtggatattctgttttacatagtgtaatctctcttctaaggcactgtaaatttaaggtttgaaggcataattcaatttggatctcagattacttgcatcatcatcatcattgaattgtgaaattttgacatttattgacatttattcatatctacctcaaaggactttcagaagtttacagattagcttaattttggataaatgggacaatgctatatattgattctgttgacgaaccacagcatttcttctttaaagcagttctcctgactgacatacgtatcactccatccatccatcgttcatcatccatccaccatcagtttatttggaaattaagtgaggctatatatggtgttttgggtgataataataaagaatttaggaggccccttctagattttatttatttatttagagacagggtctctgtctcccaggctagagtccagtggcatgatcttggctcatggcaacctctgcctcccaggttcaagtgattctcctgcctcagcctccctagtagctgggactaca

SEQ ID NO: 16673 - DNA, 1149 bp, Homo sapiens
gcgaaaattatgattagccattcttggacatataaggattctctaagacctatccctttagaaaacacttgaactttattttaaatcctaccagatagtaataactactcaggacattttttttacagtttcccttttttgtaacccatgattgttaactttcactttgttcagtgttagggaaggcagagcttttgttgacttgctgtttcactttagcttatatttagatcttacattatgaatatgaatgcatttgtgatctgaaaattcatcttaaatacattgtatttaagtttcactctaagtaaatgaaagaattcatgtagggagcataactcagtgattgacatatatgttatctcttatttccctttctttaattttctgtcttgcctgagaaatcttagccccagaagagtacccaaaacatgtaggcctacttttcctttagttggacaatcatctcctctgatttgaagaccccacccatggtcacctaactagttagtaatggagagaataggtaaagaccccagtttgcaggctcttggtgtcatgaatgctaggaagtgacaatatcagatgagcgtggcattgtagttatctaagaagaaaatattagagccagatgttattggatctggctgatctcttactcacacatctcaaagtagaaatcttgggacttggatcacccatgttgggggtatgagggagcttgagagtaagaggaggctccagctagtgactaggtgtgcaaacttggaagtcaaacctaggtttgcattttggctctgccatttgcaaactttccttgctaagccttgatttcttcatctcataaataaaggatattgctatttacttcctggatgataacccagcctttagtgtatgcaatatgaaaaattagggcttatttgtcatacagattctggttatttttgtggagcaaataaaggtgcataaatatttcttcttggagaaagatggtagtatagtatggtagaactgcttacggattaaaagcttaataaaaatctaagcttgcctacttagtagttagtgtgacttggaaaatgtcacctatccactgagtctcatgtttcccctctcttaatgataatacctgttctgcctacatca

SEQ ID NO: 16674 - DNA, 1038 bp, Homo sapiens
aggggacacatgtgaatgttgaacacagacccagcctgacaagctctaggtactcagtcatgatttactgtagtgggcactattggcccctctcaaagggtttgtgcctgtaagctctcaagtccttcttacaagacacttgcgcttgaaacctaggtgtagggttaggtggtggagtgactactcaagaatacatatttcacaatggaaccaagtgctattgagcaagatgttctgccaacatagtaattttgcccttttagattcctcttcaggtacttgacaagtgggtcctcagtagcccatctggtgcaaaacaagtttggagactttgcttttgcatagtaaagcaaaagatgaaacaaatgtacagacataccttaaaaataataaccagagaggcaggatttgggataacttgacatctggccaaattcccattcatcagtctgtccatccctttgtatctgacttcctttgtcattgtgtgatctaggtctttgtgtcttggtaaagataaggttgtagaactgagtggaaactagagaatgggggaggagactaacatttattgaatattgaatacctgctttgtattatgcacagtactaccttggtgctttacttgcgttttcatttaaaacccctcagcaaacctcggggaggctaaagcagcttgtccaaggccgtatagttagtcgctcttttcacaacctgtctttaggttgtatttggatttattcatagaattttgtgaggaggcatgtttggtagcattttcaggcttttaacctaattaatttatgatggttaataactctggttctcagtgcctttttttccccctaagttttcagctggacaactttaagcattttgacattttgtattttttaaaccatttaactagtaatctcaggattgcctatctggcaacatgctagaaaattgcaaaatgtactttctgaagataatattgtacttatagagcaatttattgtattcgttgctaggtattttgtgtaaattctcatatct

SEQ ID NO: 16675 - DNA, 1029 bp, Homo sapiens
tatttggagagctaggaaggacaattcattggaaatatttcaggtgcgtatgaatatgatatctcttttaaccaccattcagtttctgacttactgtttcctagtcagcctcaccccacaattgtaactatctcttaacctagtggggaaaccaagccccattttccttacagaattttggagggtaaattgtggtaggtgttgtaggggtagttgcttgacacttaccccacaagcaggcttcccttacttttttttcttttttttttaagtctaatactcagaagttgccttcttttttggttcattagaattataccagccctctagcataccacacagtcacaatatatcaatcgtttcgggtgtccagacagctaacattttgaattcacattcatttaatcctcatgacagatttagtattttcactttacagatgaggaaattgaagcgcagagaaatttaagtagtccaagatcacaaagatggtaaggtgagagtaaggaatcaaaccaactctgtctgactttccagcttatgctctaacaattaccttataaaactttttttgtttaaaagcacaaaatttagagcaaattactcatagacagtagttgcttcaaggatgtgccttctttttctttgcactctccttatgctaattattaaggcgagagtggcagttctatgttccctcccccccaaaaaaaggaaggaaaagaggaaaactaagtttcagtgctaaaatatcttgtggccctgggtatgcaggattgcatatctgaccataactagcctagcagcgagttccctacggatagctaaaatacatcattttgaggtggattagctaccccccaccccctacccctttctggcatttagcttctccagctccatttgagtagagttgtggttgggtttgtagaactcattaaggttggacactattatggtgatgtggttttgagaagatattgcaatagccctcagaaaaggaactagatgctgcagttccttgtcaga

SEQ ID NO: 16676 - DNA, 1010 bp, Homo sapiens
aatcgttttatatttattatgtactgtgatttgttcctgatatttcacatttgattcagggaaatcatttcaacaaattatagagcttcttttgttgtcgtttttgttaggtgtggttttttttgtgttttgttgtttgttttgagataaggtctcattctgttgcccaggttggagtgcagtggcccagtcatggctcactgtagcctcgacatcctacctcaacttccgcagtagctgagactacaggcacgcaccaccactaactaacgcacctggctaacttttgaaaattttgtgtagagatgaggtcttgtatgttgcccaggctgatctcaaactcctggactcaagtgatttgcctgcctcagcctcctaaaatgctggattacaggcatgagcccccatgcccacacgacagaacctctttagaacatgactgttaaagctgatatttggatacttttgattttaatagcaataacaacaataataaagactgggtgggactgaacttttaaaatactcttgctattgttcagttggttttcagctttgctcaggcctatatgaagtttacctttgggagaaaatgaaaccttgtccaatgggtctatagcttataccacatgccgtattcctatctatgctatgcctcttatctcttctgccagtagtttttctccccagaatctgtgcacattaaatttcatttttccagtagttcatttttagaatctttgcttcagtgatgaattgaaaagttaaaaaaaatctgatcgcttgtaagtaatttgagaagttctctgacccaccttacctgtttattgtgcagtgctattatgagggagagtaaatcaatgttatatgtttctgcaaaagcagcaaattacaggagaaacatgagaaaagtcacatctagtttgtccaaaagacattatctctttatgaggacctattttattaatgtaactgtttttaaataggattaatcaactttaattataact

SEQ ID NO: 16677 - DNA, 1002 bp, Homo sapiens
gtactttctctctggcaaacagtccaggcagtgaatcagtaaccaaggatgacgcactttcttttgtcccctcccagaaagaaaagggaacagcaactcctgaactacatacagctacagattatagagatggcccagatggaaattcgaatgagcctgatacgcggccactagaagacagggcagtaggcctgtccacatcctccactgctgcagagcttcagcacgggatggggaataccagtctcacaggacttggtggagagcatgagggtcccgcccctccagcaatcccagaagctctgaatatcaaggggaacactgactcttccctgcaaagtgtgggtaaggccactttggctttagattcagttttgactgaagaaggaaaacttctggtggtttcagaaagctctgcagctcaggaacaagataaggataaagcggtgacctgttcctctattaaggaaaatgctctctcttcaggaactttgcaggaagagcagagaacaccacctcctggacaagatactcaacaatttcatgaaaaatcaatctcagctgactgtgccaaggacaaagcacttcagctaagtaattcaccgggtgcatcctctgcctttcttaaggcagaaactgaacataacaaggaagtggccccacaagtctcactgctgactcaaggtggggctgcccagagcctggtgccaccaggagcaagtctggccacagagtcaaggcaggaagccttgggggcagagcacaacagctccgctctgttgccatgtctgttgccagatgggtctgatgggtccgatgctcttaactgcagtcagccttctcctctggatgttggagtgaagaacactcaatcccagggaaaaactagtgcctgtgaggtgagtggagatgtgacggtggatgttacaggggttaatgctctacaaggtatggctgagcccagaagagagaatatatcacacaacacccaagacatcctga

SEQ ID NO: 16678 - DNA, 1154 bp, Homo sapiens
tgtcacccaggctggagtacaatggcaggatcttggctcattgcaacctccacctcctgggttgaagcgattctcttgtctcagcctcccgagtagctgggattacagggactcgtcaccacgcccggctacttttttgtgtttttagtagagatggggttttgccatattggccaggctggtctcaaacttcttatttcaagtgatccacccgccttggcctcccaaagtgctggaagtacaggcgtgagcctgtgcacccagccagctattaacttttaaaacaaacttgttgagagaaacagtgccctatgctttagattccatggtggtcaaaaaaaaaaaattagaaagctgaaaatcaagttagtgaacttactcatgctgcccctttgaaagtccatgttccttgggctacacttgacattgcactgtttttactcttcagaggactaagtggtatgtttttttgaaatttcacggtaggtaaatggaacagactatcccagattgtttcaagagtatgaacagtgatgaacaaaccttgttgtattggagtactgtggtatgaaggtgctgactgttctaacccgcccttattacacataatattcatgactaatgcctgggtggctacttgtaaagcaggcattattcagacaaatgttgcttttacccctgtgagaagaaaagagaacacaccctgcatgggtacgtgtgtctttgtttccagaagccccttagaaagggaaggaaaaaactcacatccttgaattcaaatacctctgtttcttagtactccattttaatattgtagtgattagagtcattgaatccaggctggtacttggctctagaccctttgctttctgatgagggatatctctattctaatggtatcttgtctactataaagaagaaaacaaaacatgacttaaagaaaagaaaaggtctcctctctcagtccctttcctcttctccttttttctctagttttaagagttgagagagtgaatattcctctggttggtcagcatacctcaatttacagataaaagaatagacccttggagagtcacatgactagcttgaggccaaaggcagctggaagagtttgaggtttgatttctaatctgggacttacacaacagggc

SEQ ID NO: 16679 - DNA, 1075 bp, Homo sapiens
ctctttggtcttaagatctcttcacatttttaaaaattaagagccccaaagagcttttgtttatataggttatatctagaaatgtttactgtattagaagttaaaactgagaaatttaaaaaatgtttattaattcatttactacaataaactaatcattattaaaattatatttttataaagatattttttctacaaaaaattacttttctacaaaaaaatttagaggagtggtattgttttaatttctgacttaatataaaatatttggattcttacatctttcatgcattaagcctattgcaatatattgttttagttgaagtatataaagaaaattaagcaaatacaggtatatgcttagaaaagggagaactaccttaatagttttctcaaataattgtgatattctttgatactagatcagaattgacaaacagtaggttcttaaaagctactttcggtatgcaatctgaaatcgtatcattgaactttttgtactctgtctcactctgtcatccaggctggagtgcggtggcacaatctcggcccactgcaacctctaccacccaggttcaaggcattcttgtgcctcagcctcccaagtagctgagattacaggcgtgcgtcaccatgcccagctaatttttgtatttttaatagagatggggtttctccatgttggccaggctggtcttgaactcctgatctcaggtgatcctcccgcctcagcctcccagagtgctgtgattactgatgtgagccattgtgctgggtctggtctatctcatatatatatatttttttgaaacggagtcttgctctgtcacccaggctggagtgcagtggtgcagtcttggctcactgccacccccaccttctggattcaagtgattctcctcctgcctcagcctccccagtaactgggattacagatgtgcaccaccacacctggataatttttgtatttttagtagagacaggatttcaccatgttggccagcctggtcttgaactcctgacctagtgatccgcccgcctcagcttcccaaagtgctgggattacaggcgtgag

SEQ ID NO: 16680 - DNA, 1035 bp, Homo sapiens
aacagacccagtggaattgcagtgtatctcatgtgcctcactaagtactgcactgggagctctgccgcctcctgccagtgactctgcttcagccatgttttcatgcacagtgacttgtcacatttctcacacatggcagacatttataatgtctgatgtgtgttgagtgtctcaaaagaaaaagggacacaggaagaacttcagcaaggttgatatctagttagttgacagttttttgttaagtattgcttcagcgagctctacataaggggatacagtatttacttcatttattattttctctccttcagggcactgacaaccttaaataggtcactttaaaaaaaataactatttcctatttacataataaatacatttgaagatttaagttttgtaagttgaggttgaaaagctgatttaatcactgtggcaggagttgcagctaaaaattaggtgaagaataggaaggtcctcattgataacccattaaaatgagtatttaggactgaaccaagagaggtgattcatctttctgtctgtatagaatttggataattgactcagtaatgaaatggaaccaatcaaaagctgctgctgctgctgctttttttttttttttaagttggagcctcgctctgttgctcaggctggagtgcaatgctgcaatctcggctcattgcaacctctgcctcccgggttcaagcaattctcctgcctcagcctcccaagtagctaggattacaggcacctgccaccactcccagctaatttttgtatttttagtagagatgaggtttcaccatgttggtcaggctgttcttgaactcctgacctcaggtgatccacccacctcggcctcccaaaatgctgggattacaggcatgaactgctgcacccagccttcaaagcttctttaggttcatcagaatgagagttagatgcatagagccattagaattcagacccaggaaaaccctacttatatgaaagaaagattaggaagatttgggaagttcttcttaacaataaacc

SEQ ID NO: 16681 - DNA, 1030 bp, Homo sapiens
gaacggcacaagaggcgctacagcctctgtgacatctccaaggtggacaggactgtggacgtggtattgctgaaggtaaggggggctgcacctcatgcattctgaagctctgcaggctgttttagcgctttgaacccggtagccatgtccctggccctcctgtattgggagaaaggccgagaaatctgtgcacagtggaggatgaggggtgaatgtaagcctcttaaaggaatatctgaacaggaagcaataggtgcttggtaatcagcattggaccacttactgttgaaatgtaattttactttcattaaaatggattcttatgcttgggagaacctcatactgttgaaaatcacagagagagaaattcaccttccaagttgctctgtttgtccttctgtctctgtcacccctccgcccccagactccacccccatctgcctggtctctttctctgtcagtctctctgcctctgtcttttaagtatttctgtcttttgtctgagtcttttctgtttttctgctactgtctcgttcaattctttaggggaaggataggcaacatttatttcttttggaaggatttccaataaacctatctattaaggtggcagagctgaccttttggcttggtttgactgcttttcagaggtagcttctgactttgttgatagctgtatttgtttgtgttctccgcattagtgatgtttggtgtctaagcaggatgagggcggagactctgaatagctaattgctcacagaaggcatccttgaatctaaaattagtaagaactcctccagccggtaagatgagagtctgggaatgttggacagctcaaagagcactttttggaaatttagcaattttctggcaaaggcaggggaaattggaagtcaaccaagcatttcatagatgacagaaagaacctcagtaactgaacttgtgagggtgtatgtggaggtgagggtcattttaagcaaagtggaaatatattgccttggtcaaggaaatagtggacctattttattga

SEQ ID NO: 16682 - DNA, 1051 bp, Homo sapiens
gaatcaggagcatatcagtgcctctgtgaatgtaccctgtgtgccttcctttcatttttggccttccctgacttttttttttttgaactcattgtcttcccaaggtctttggaaagacttatttaatatgatgcaaacttaaggatttctatcattgtcactcatagtgacttgacaaaaaattctatgaagtaaaaactccacatttaggaccgggcgcaatggctcacgcctgtaatcccagtactttgggaggctgaggcgggctgatcatgaggtcaggagatcgagaccatcctggctaacacggtgaaaccccatctctactaaaaatagtggtggcgggcacctgtagtcccagctactcgggaggctgaggcaggagaatggcgtgaacccgggaggcggagcttgcagtgagccgagattgtgccactgcactccagcctgggcgacagagcgagactccatctcaaaaaaacaaaaaacaaaacaaaaaaaactccacatttagaagatctgcctttctctttacttaggaaaagagaaatcaatagttttatgttattttattttttttttaataatatcagaatttaggtaatttccactgcgactttcgaggttttaattgtaaggaattctgttccccgcaaggggaataccattctgaagatatgtgtcgctaaaaacatactgagataaacagattagatagtatctctaagttccagctttaaaatgggatcattgataatcattgaaactaggtcatggatatacagagatttgttaaacatttatatatgtttgaaaattttaacgtaaaaagttttttaaaaatggaagtgtctttgttaagaaatacttccttgcaacctcctaggtgcatgacagcttgtgcctggatgttaccatctctgcagactcagagttacttctggtcacttaattgaatggttttcttagctaaggagaattagaattttctatatttcgccgtcttattttcccagaaccatttacaaaattgctcatataaatggcctgt

SEQ ID NO: 16683 - DNA, 1086 bp, Homo sapiens
tcaacactgtgcctcaattctgtctgctcctcagtaagttccctcctaaaattgaacctagctgcatggaccagtccacagtcctgattgtcccgtgtgccaaaggctagaaaaaagttgtgatctctaccgttaaggaacttggatatgtggtcagtcataagattccttggtttgcaactcctattaacaagtaccctgtcattctgctacatatatgggtttcctttcaagcacccatttgttacaaaggagtttgtagattgaatgctattgtagatgaatagattccatataaaataattactgaataattgacaggctctttttaacatgaggtcactgaaaatccataattaaaacattaaaaatgggccaggcggtagctcacgcctgtaatccaagcactttgggaggctgaggtgggaggattgtgtgaagccaggagttcaaaatcagcctgggcaacatagcaagaccccatctctacaaaaaaatttgaaaaatagccaggcgtggtggcatgtgcctttagtcccagcttactctagaggctgaggcaggaagattgcgtgagctcaggagttcaaggctgcagtgagctatcatcacaccactcagagcaagactgtctccaaaacagacaagtgaacaagaaaacattagtgacggatctaaggaaacttagccaagttttgataacagaacctgggcgttgtggcatactctataaaaagccattcagcagccttcatctaccttttattctgcttcacttttatttaacttctgtagccctttaaaaaaaatcaatcttcttgtttttatttagtataacagaagagaactataatttcctgccacatagcccctccaagaaagattctgaatggaagagtggaacaaaagtcagtcgtacattcagctacatcaagaataaaatgtctagcagcaagaagagcaaagtgagtatcactgtgggcattgcttgtgatcacctcagtaggatcctgtcacagcctgcattcacaccaaaactggttaaatcatggggacataaatggaaataaattcaggattactctc

SEQ ID NO: 16684 - DNA, 1072 bp, Homo sapiens
cttgtattgccattgacttgtgtatatacattatttctaggttacaaatagttgaaatttgccctctttggctatattaagtctttgtctacattagactatcactcagaattaaacctgtaactggcatataataaatttatcagatagcagaaatattcagttaatgtaggagaatgcacaggcatcctaagcccatttttgctttcttgatatgtcttcctgttaaacatgatagaaattctcttttactggactccctggatgatgaagcacacatagctaggacaccacaagttattagactccttatgctatcagtgtcgtatgtgctagaaccgcctctggagagcaagatctgggttacctcttggagacttccattgcccaacgatgccagaggtacccgtggagaatcacttgtgtagggtttggtattgactggggaaaactgtaggaaaggtttgagggtctgagattctcagccacacttctgtgtagtaattagtttaatggatagggcggtagctttcaggatgtcaggtgtttggaagctccacagatttctgaatttgtgtatatttaaaactacataaaaacgtaccttcttaaaggtataattcccaaattttaacatcaacatatcagctttagctatcagcctacctattcatttgtatttttccttccatctctaattaattgaagattatactgtgattgcaaggcaagccattaaaaaaaaactgctaatattggttatttatctacatgaagaacgttaagatgttctctgtgtcatgtactcaaaattaaataaagaaattagaggttgtggtaggtaagtgaattgcgaatgtcatgcacctctgacctcacgtttttagttcatcacagctgcttcattgttctcattaactttgaaagtaaatattaaaattgcaactcaaaataaatctgtactgttttacatatctgaacacagtatattaatatttcatataagactttttagagtttttctagtattttggaaaaccagtgaaatagtggattggctactggttctgtg

SEQ ID NO: 16685 - DNA, 1090 bp, Homo sapiens
cacaaatattcttattcctgttgtactccactgaggcaacatagtggtgtagagtacagattgtgaattctaattgtatggattcaagtctgacaccactgcttaagagctgtgtaactggacattaccaaacctctctgtgcctcattttcttcctctgtaaaaggggacgataatagtatcatagggtggtagtcaggtttaaatcagatcatacctataaagtacttagcagtaaacattccttaagtgttagctttcactgctatgatcatcacaaataaggaaacagcaatattgagtcacttacttgggtagaatatggattggttacaaataaggaaagctgttattttcttcccccctatgctggcttttagatacaagttattatgagctctgcctaacatcattctgcttttccagccctttcactgattccttctacctgcttcatcttctactctgtgtctcccttttacattaatactacataattacttctgccttcattccatggttcttctcatcagaattgtcctctcttttttcttctgacccatccacatccttgcaattcttcaagaactagtgttttcttcctccatcagattttatccgctcagtgacctcccttcagaaacattcaggttatgctccaggccctttaactcttaagctcattctcttttctacccacttgctctttttctcttgggtgggggtgggggtgggggcagaggggtagggccacatcccataatccttgtgtactttctgcagctagaatctggtcaggttttagaatgtcgggtttctgctattttattgtgtcatcatcttgtaaatagaatttgaattggaaattaatgattatattaatgctcattgagtcaaagacatcctgaaatactgtgaagtcataactaccaccccagtcttatttccttcacctcttgacactcctggggatggacagataatgcaacctgtgaatgggacagcaagtccattaccagggaaaaatgttcccaagtgccagcgtgaccactttagcaaattagatctccagtttcctctttagtcatgt

SEQ ID NO: 16686 - DNA, 1065 bp, Homo sapiens
caatttttttcagaaatttagccaattttctcagaacaattaattgaatattctttccattaatttgaaatgctatttacatgctaaattgttatgagaagtttctggaatttctgttctgttgcgttgatatgtatgctgtttttattctagtcattttaagtaatggaagctttctattacattttaacttgtgctgatgttcctcctatacataggtcactgtggtcttcgtttgtttttcttggctgctggtgctcacttagtttctttggtgctttcaatttgaaaatatttcataaagatataagcatttagttgtatcttaaaggagccatcttatcaggtaaacattagtgtgatggattctgagattcataaagccctgaaacgaatgtttccattttgttcctttggcagcaggttgtccagagcgttgttcatctctacgagctcctcagcgctctgcaggtgcgtgccttcatcttccatccctgcgtttatttgtctagagaacagcagcttggggctgttgttgacttggatctttgaggtttgcaggatgtttaatggataaatggggccctcagtctagggaagactggctctcgtggtgagaaagttacagaatgcatcgaccttccaggactagaattagtgaagagctggtgtgccgtaggcatggcttgataaccatgctacaaatcacatagcatgctaacatgcatctgggagattacttcactttagaaagccttaagtatgattataagtttctatattccgtatctctgtggtatttgaatagagtggccttcctaatacagcttctgtttcggacttcccaggaacatcctcaaattctgctcacttcctttcttgaagatctaacctgtctcgttcctactttctcccacttccaacacacacacacacaacccacccacccacacagacacacacacacacaaccacccccccccccaccccaggtaataccactgactgcaaacagcatgcaaccagattgacaaaaacccgtgagttcctgcacctttgaggttc

SEQ ID NO: 16687 - DNA, 1057 bp, Homo sapiens
aggctgggacaggccacgtgcgatagtgcccagcacactgagagctccgtctgagaggcagcagcttggacggaagctgagatctctgccagccaggttgtccaacaatagctgtccctgattgagcactgactgtgccagcactgtgccaagcctccgctgatattatcaagtccagctgccagttataagaagctagtgagggtgggagaagcaggaacaaagtgggcagaggaagcagtaagaacgcaggctgaatgcaaacagcagaggccgaacttagggcagtttctgcacctctgaaagtctgttcctccctttcatcaggtctcccttgcctacagggtgggagggaggagttcaggagtctcctacgcatagatgatttacttcctatgtgactgtaaaggcctcttttctagacctccctgcttcctgcatcaaatccattctgtagccagggtaatctgaaaacacaaatctgacaaatggcttcaccaattaaactcttcaaggactctctaaacgcaaaagctcagaaggctgacaaggctcttcacgatctgctccccactgcctccctggccaccccaatgggggcacttagctttaagcaaggttttgtttgctggtccccaagcatgccaaactctgtcgtgcctccatgcgtctgtacctcactgcctctggctggaacacccttctcttcccattcctccacctctcccctgttgtcatcaggctaactcctctcatccttcagaattttcacctcaggtgatatctttgccagaagccttcctcaaccccccagtctaggtcagatacccaaggtctctgtgctcccccaaaccttgtgcaactgtcacctaatttcagtgaatccccccagcccatttacttgtctgtctctgaacctggtccataagctcagggagtccaaagaccacactgtattgatctttttagcctagtgcctagctcagggccagatactcaaaagaaactcaataaatgtttgtggaatgaatgaataaatacgaggtggcccctgcag

SEQ ID NO: 16688 - DNA, 1052 bp, Homo sapiens
taggaagtgggggccaggagagcagcgggcactccttcctgggcagggtggggcaggatgcagtgagccagccccagggccagaggagtaggggtcatctgttaccttgacaccctctgcacacagcatagccctctctctctccagggctgttggttctttcttctgactcctgtggttttgctaatggcactttacagactccatggagatgtcaggtggaccatcttctagggcccagcaggagtagggaatgtgccaacagactgcccaggttgccgtggccttccccaccccccagatctcctgagtcatcatgctgtgctaatgaaagggatcatatcatcctctctggggatggtgggtgggggtgtcaatatcctggagctcccttaccccaactcaatgacttgggggtaaagttctcttccttttgttgcctacctcttcctccactcatttgggttcagaataaacatgtcctgaagttaaagaggagttaagtcctaaaggaggcatttcttccccacctccctgacctggaactctggctacagccattgtaggaactccgtgcctggcctgtcagctccctgctaggctacagtggaatagcagagcccacaggcttctcgtggggagttggctccttaacatttcttggcaacagaaagccccaggcacagctcagggaggagggaaggcaggtaagctttggacgagaactggcatatttattttgacccaaatcagggatttccccagtccacccagtactgggctcttaagcaaaagtctgagaaacaagacagtggtttgaattctggggcctttgtgtaggattgtgcctgacctttatttatttattaacagcagggccactcgtctagggcagtggagtctgcgtgtctcctggggctggggcagggcattggcagttacgcagtggccctgaacctggtctggtgcccccgaacctggtctgatgccccctcagctctttgacaatcactgtggctgttgggttttctcctatttctaaaaatgttctc

SEQ ID NO: 16689 - DNA, 1032 bp, Homo sapiens
ggtttcacttgtcacccaagctggagtacagtggtacagtcttggctcactgcaacctcaacctcccaggctcaagtgatcctccagcctaagcctcccaagtataatagctgggactacaggtgcatgtcaccatacctggctgattttttacatttttagtagagacgaggtcttctatgttgcccaggctggtcttgaacccttgggctcatgggatctgcccaccttggcctcccaaagtgctgggattacaggcgtgagccaccgtgcccggccacactgtttcttatggttcaacctttagtatatacagttgacccttgaacaacatagggattgggtgttgactccccacacagtcaaaaatgtgcatgtaacttgattccccaaaaattcaactaatagcctacttttgattggaagccttactgataacaggtagccaaataacacatattttatatgtcatatgtattatatactgtattcttataatcaagtaagtgagagaaaaaatgataaggaagataaaatatatttactgtatttatcggtattgtaaggtttttactgtatttacatatgagatgaaacatctgtctgaaatggcagcaaccacagctgtggacttcaatctgtggtacatatcaagcaattcagctttttcttgtaatgtcacgacttgttttctgcttcttgggagcacttccagcatcagtagtggcacttcatatgggtcccatggtgggattcaaggtttacagtattgcactaagcatgatgaaaaataccacaaaaactgcaagaaatcactttttccatcttactgggataccagatgtcctggatatgaactgctgaagcggggatgggtagtgtcacacacgttttaagcagatacttgcagcgcttgagctcactacagtaacaacaggaagtggctacattaacagcacactgtgtactatagttaattttatgcagttacggtttcagactgcatcccgacattggtttacatttctcttg

SEQ ID NO: 16690 - DNA, 1044 bp, Homo sapiens
ttttttcaaattgttgaaaaatctctcccaaaatttccaatatatttattgaaaaaaaatctgcatgtaagtggacctgtgcagttcaagcccatgttgttcaagggccaaccacaatttaggaatacacatacacattttaggcgtacatgcccagcaggactggagatggctggactgggagagcgtgtcccttgtggggagaggggcctctcgccctccagtgtgagttgtctcagcctgaggccagtgctgtggatccagagagggccacagagtggccgacttgtacctgttatggtcattacaggtggtcagctgtagctggatgtgtgccttgaaaggctgacaagtttgccctgagtgactcacctactgtcacctgatccaacaagatttgtgggcgtagcctgccgatgggtgacgccagttaaaggtagagcgtcggcaccgggaaaccctggctggggtcgggcttctctctgggtactgggccaccggtgcctggcgtccaacatcagagcacacaatacacttgaaaaacagttcagctggacccaggcagggttctaggtgctggggccccagttttgaactaaacagatggcagggggaacagtaaatgaacaagtaaaatacagtttcagagggtgctaattcctatgggaaaaggccagagaaggggataggaagtaaacttttagtttttaaagacaaggtctccctatgctgtccaggctggagtgtattggcactgtcatagcctcaaactcctgggtgcaattgatcctcccagcttagtctctggagaagctagcactacaggtgtgattcaccacaatggattattttttaattttagagatgagatctccctgtgttgctcaggctggtctcgaattcctggcctcaagcaaatccgcctcagcctggagtaactgggattatagacactagccatcgccctggcaggaagtgcggttttaaatagagaggtcagggacagcttcatggaaagacgtcatggaatgggagcaatgtgac

SEQ ID NO: 16691 - DNA, 1034 bp, Homo sapiens
agagatcaataaatgtcccatcccccagccccaccccagttctttccaggaatttgagagactcctccccctgtgtttgaaagtggcaaagtctggcacacttgcctcatgacactgactcagggcaggtcctgtggccagcaggtcacacagccccgaggccagcctgccagtgcctttctccgactcctgggctccagcaggtgcccgactccttcccttttcagacctgcctcagtctgtggagccctggctgctaaagggccactcaagcctcaccagtctgggccctcaccttacaaatgggaaaactgaagcccagagagggtctttgacatccctgaggtcacacagcaagttccagcatctcttccttcccagaatctttgtcccaaagagtggtgtctctttgctaaatagatggttctgttctttcccttcttcctcttctttcctcggcttgtcctctccctcttattctatttgtctcgtggtgagtcacatagtgcctcatgtagacccccacttcccctctccagactctcaggctcgggaagtgatgggtttcctgggaatccacaccatgatgactcgtaccttctacgtctgtgcccagctgtggctgcctctgggatggtggatgagttccttcagggctttgtgtgaactgggcctgagccaagcccctagatggggaaaacaggccacattgttcaggagcacaaaggatgttagcaagaaaagacacatgacccatggccgcccacacacccacatctctccacgccccgtgccatttctgcccgccgctgcgtgctgggtggtttcctctgcacagagtttcccttgagctgctactctgaggtcgtgtgcctgttgtcatcttttaaagcctcagttttgtcgccatttcccaggtgacctctagcacactcaagtttgagaagcgctggtgtggttcaggagcagcgccccttcattctccagcacactctccccagtcctctaagtcgagcgtgagctctgtccagaga

SEQ ID NO: 16692 - DNA, 1028 bp, Homo sapiens
atctaaaaagatattttagcctgggtgcggtggctcacacctgtaatcccagtactttgagaggccgaggcaggcggatcacttgagaccaggagttcgagaccagcctggccaacatgatgaaaccccatatccactaaaaatacaaaatattagccgggcatggtggttcacactcagaatcccagctactcgggaagctgaagcaggagaatcacttgaacccgggaggcagaggttccggtgagccaagattgagctactgtactccagcctgggtgacagagcaagactgtgtctcaaaaaaaaaaaaaaaaaaaaaagatattttagcaccaaaaatgttggaagatcaatatctcagattaaagagcaccttctaaccaggacatatttagcttactaaaaaggttgagttaatggccattgaattatgctgtttgggagggcctaaagtcgaggattctactcaaggagaggttcctcttttgcagtttccttaaacaatgctcgttactctttttctgggaaatcaggccattgatttagtttagttaacctaactgcagcagcatttggcggggctttgcgcccagtttttcaggtggtacagactacacaatgttgatatgcaattgtagcaccttatagtgaggtgaacttatactggaaatcgttctttgaatcctgaagcctggatttgtcatgtttgaagtgccacgttttagttcttaaggactgaggagtgggagggggctgaggtgagaccccagcaacctgctggaattaagtaaggctcttcagtggtatttacacataagttctttggaagcatgtacttaaacttactaaatccatgatttggtatgcccggtaatggcccagatggcttctgagatacagcatgacctctcttccgtgtccccaccacactttttgctttcctcgtgtagcaccatcacattcattttgtgctatggatttcccaatccagggctgaggatgtgtccttgaggttccttgggttc

SEQ ID NO: 16693 - DNA, 1056 bp, Homo sapiens
gaaataggtgtgtctcccatggtgcccttcagcacggacatcttctgattctggtacccttgctttgttagcaaacatcagagtggtctttttaggggaaggaccctgggagagggtccctgactgcagggtaaagagactggttttcttgtgtgcttgtcttcttctaactattcccagcccccgtactcctggacaggctggcactgtctccctttggcttttttttttttaagtactttttaaagctatcatttacatacagtaaaatatacaaatcttaagtatatagctcaggggctttgtgtatgtattcagctgtgtaactaccagtcccttgggtgtttacaaaagtgtactatgacctccctgcctctgacctacccatctgtcataatactactcgagttggcttcctcaagcaggccagcagccgaggcatgaacctacctgtccagcctcattactcacagcattctctcattgcctgtgaagtacctgacctttgggctgttgtttccccactatcccagatcccctcttttttctcagcaccaaaatgcctcttatcctataagaaaacttaaatagcatcaattctgcttttaagagacagagtctcactctgttgcccaggctggagtgcagtagtgcaatcgtaactcaccgtaacctcaaactcctgagctcaagctatcctcctgcctgtctcccaagtagctgggactacaggtgggcaccacaacacccagctaatttttaaaattttttttatagagacagagccccattatgttgcccagtctggtctcaaactcctggccttaagccatccttccaccttggcctcccaaagcgctgggatttcaggtgggagcccctgtgccctgccttaaatagcatcagttctgagatactattctctaacttgccgccctactcctctttagccagaatgagcccttcttccatcttcctaccatgtttccccaacatataacttctgtgtccgtttaaaatgttccatcttgttttatgagaatttgtgtctctttt

SEQ ID NO: 16694 - DNA, 1004 bp, Homo sapiens
ggaattttcctgtgcagatcctgcaattcaggaatagagcatttagcaacaacagtgaaaatgtaatgtgtgacagctgtggagaagaatttgcctccagtgaggggaaaatgctgtgttcaaagtggatttctgatgagcctattaatgggtgtttgggaagctgaatatgttgctgccattttgagatgaaaggcccaaggtgtttgttcctgaagctaatgaggaagccctttcccagcctcagccttacctccccagtaggactggtgagatgtgcacacagggtctactccacatctggccctcctgaaaagaagggcttccagtgggggctgtgtcctagtggagaagggtgaagcccagtgggatgggctcacgaaggacctgctgttgacctgctggcttcaggtccaccaggctaggggtagataggccagaaaagaaaccagaggtgtctgtggtaggagcagcaagggccctggcttccaggcctgtggagcagggaggctctggcagttcaggatctggaaaagaactgacaaaatgttctcctaaactctggcccttgccggcttccttacctttcctgtgtgcacacacatgcatgcacatgcacatgtgcacacacaggaaggcctggaactcagtttgcagactcgtggagctgccacaaagcttcactcccagtgtttcccccaccactgatgcttgtcctcctgggtttattctcacccatgaaagtagggtaaaaatgtatccccaaatcaaacacctgtcacctttctagaagcacttccatcctctcttgctctcactgtcatcgctctcctggatctttggggagatattcagtatgattttgttaacattctggccttatcttagagataattaaatgtgaatattcaaattaattagcccccagatgtatcttctgcagaaaaaaactcctctaacaagaagtcagttacagttgtgagaaacatgcaaaacgaaagaaa

SEQ ID NO: 16695 - DNA, 1030 bp, Homo sapiens
gtaattatgtccatttatcatgtcacatttcttggatacatcaggatctctttctctacgctatagatgatatcaccatggtcatctgccctggaattgccaatcacagcgagaagcaatacatccgcactttcgttgactacgcccagaaaaatggctatcggtgcgccgtgctgaaccacctgggtgccctgcccaacattgaattgacctcgccacgcatgttcacctatggtaagcatggctaagtggagtcctccctttttctgcaagtgtgctactacttctgcttctgccttgttttttctttttttaagttttaaacctatgcccatctgcaagagatggtaggtcacacggttatatcaacagccaacttgtactgggcattgatgatgccatgcctcacaccagcctttgagatgggcactataaccaccctcacagaggcagaaactgaagcttacaggggaaagtcttgcccaaggtcccctagctagtaagagtcacagcagggctgggagccaggtagatcgggtagcagagctcatgaccttcaggactgtgctgttctgatgctcgttcctcaggactcttgtgactgacaggcaagggtgtgatgaggcatgtgaatgtcagtgggaagggagcctggcacagtagcaactcactggattttaggttcctggggaacaggaactagatctcgtctttcgacgaatgcttcttgatttgaattaaaattttgtgttagctgggccagttgtggtggctcatgcctgtaatcccttctctagtaattaatttttattgtctttttttttttttttttttttttgagacagagtcttgctctgtcacccaggctggagtgcagtggcacgatcctggctcactgcaggctccgcctcctgagttcactctgttttcctgcctcagcctcccaagtagctgggactacaggtgcccgccaccacgcctggctaatttttttgtatttttagtagagacagggtttcaccatgttagc

SEQ ID NO: 16696 - DNA, 1033 bp, Homo sapiens
aacatctgcgtgaacttggcctctccagcccttgcaggtggaaacagctgtgtcaaggctcaaggctcacgctgaggggacttggagggagggggcttctgcattaagctttcctggtgaagacccttgatcttgtccaaagccctgtgtctttgactggcttctcttcagagtccccgttgtcatcgtaagacccttgctgtttggagggtggtcttgtgactgtggcagctgctggccgctggaatgaggagcctatctccatcctccagtgtgactcaggcagagcattgagaattcccagggcagaaatccttcctgctcaggctttcattctaaaactacagtcttcattaaagctgaactttctgggtagctgagcttatatgcccggcatctgaatgagagctctctttgtaactgtgtgacttgagatctagtttgccagctcctgggaaacaatacatgtgttcttgtttgtgtttgctcagcaagcagatgtctgagatgtaagaagcttttcttttcctgtggcattgattctgacttagagctgaagtaaaagatcactgaaacatcacgtcaagttgaagtcactcataggtctttgtcctttaggcaggacaggagagtcattaagaagcatttcactgtagcattctatcacaatatcatctggaattgttttctttgcccagaaagccttaacttgcctctagagaatccctggtattacaacgatattgcggcattagaattccaactcttctgctgtggaagtttgaagcgaagctgcagcaaaaccagagaatttcctcaagtggcctgtaggctccttgttatcttatgcccccacccctccctcaacaatatgagtgatccagaactggcccaaacacctcagctctggtccctttttgcccttcttggccttactctgttgttcaaagccactttggattgcttggatgcttcgaacagccatgaaaagtagcctgcctgtggcatttagaggccaagcaattgacagaaa

SEQ ID NO: 16697 - DNA, 1932 bp, Homo sapiens
cacaactcccaaaagtccattaagacccctagccacagggggcttacatctgaggggttaccgtcccttggcacaaggtggagtatgaaatccgcctctgccttccaggcttttccagtgccaagacctgcggggccaccaattgtgagtcccctcccgcactgactactccctcaacaggacaggagggaagctgaacctgtcgggacaccgcgctgggcacgctcaggtcccaccgcgcgtgctcatcggcggtccctagcgcgagttcggacaggcagcgcccccctccgactgtgagctgggacgctcccgcacgcttcccggcaccccttcagtcttcatggtacaccccgcccgcaggtacccggacggcggaagtgagccgcgggggcggatcttgttgttacgggtaacggaagtgtggcggcgttgggttgagcgggctttttggaagtttgtggcggaggtgaggccgaggtgactgcagagcggctcgcgaggtgctcgggctgtgggactgggcccctgggagggagcggttctgtgggggaaaggaggctcctgtcctgacttggcgttctggtattttctctggcgtggaaagtaggcgcgctccgctgtctcccgccgcctgcctcagctttcgcggttccctcctaggggtgtgcctcagtcggagccccttctgttaaattcttcccccttggccgagggtgagctcttacttctgagaaatttcccttaaccttgctttgcatttgttgtccggtcgcggtctccatcaccagctgcttcgtgttatagtttttgtatttgcgctcacggcttgttaactgaagaacccggaagggaaggccgcggcgtttcccgccggcggggctctgccattctcggatcttggcttcagatctctgatgctccccagcgtctcttggcaaggaatctacttcgcgttcagggaattcacagccacccgcctctggtcttacctctggttttaggatgattttagcaaatgtgcctaggttgatttaaacgtatccccctccgaagccgcctgccccttctggctggacacctttttaggttggtgtgtcctgtttgcatccggtagttcaaagcatgggatcttggagtccggagctggacagactcgggtttcacttctctctctgccacttggtagccttctaatcttgggggaaattccctaatctctgaatcccaaaagttgttcatctaaaatggggctaatattacacctacctagtaggtggtgttgtgggagtcatgttaatgaatgtaaagtgctgggttcagtgttttccctattataggggttcaataatttgttcaacaaacatttgttacctagtttgagctaggtactgtgctaagtgctggagatacaatgataaacaaaaccagctacggcccgtgtccttaggggacttatagtctagtgggagataacatttgttaatctgataattacacatgtaatattaaaaattggtgacagtatgtaagagagtttactggtgccatgagaggatgtactaggggaacgtttaacaacctatactgagcttttcttttcttttcttttcttttttttttgagacagagtctccctctgttgccaggctggagtgcagtggcgcgatctcggctcactgcaacctccgcctcctgagttcaagtgattctcctgcctcagcctcacaagtagctgggactacaggtgcgtgccgtcacgcccagctattttttttttttttttttttttttttttttttttttgtatttttagtagagacggggtttcaccatcttggccaggaaggtctggatgtcttgacctagtgatccgcccgccttggcctcccaaagtgctgagattacaggcgtgagctactgcgcctggcc

SEQ ID NO: 16698 - DNA, 2331 bp, Homo sapiens
agatgcttccttaatcccaaattttcagcacgtaaacagatggtgccactatccaccagctagctgcttaagccagaaatttaggaatcctccttgatttctttcttttttgttgtttttttttgatatggagtctcgctctgtcacccaggctagagtgcaggggcgtgagctcggctcactgcaagctccgcttcccgggttcatgccattctcctgcctcagcctcccaagtagctgggactacaggtgcccgccaccacgcccggctaattttttgtatttttagtagagacggggtttcaccgtgttagccaggatggtcttgatctcctgaccttgtgatctgcccacctcggcctcccaaagtgctgggattacaggcatgagccaccacgcttggccagatttcttttccttcatcaccaccccctacttcccttccaaactaaggaatttctattcttagttctcaaatatttatcttagatctatctacttttcttcatcgcctgtattagtgtgctagggctgctgttacaatgtatcacaaattgggtagcttaaatagcagcaatgtaatgtttcacagttctggagactagaagtgcaagatcaagtgttgtcagggttggttccttttgagggctatgagaatttgttctgtgtctctcacctagcttctggtggtttgttggcaacctttagcattccttggcttgtatcacctgatatctgctttcatcttcacctgacattccccctgtttgtgtttctgtgtccagagttcccctttttataagggcattagtctttggattaggacccatcctaatgacctcaactaatctcacctacaagaagagcccaatttccaaataaggtcacattctgaaatactgggggttagagcttcaacatatgaaatttggggttgtggggaggacacaattcaattcataatgcctctattactttggtctaggccactgtcatctctctcttaaacatggtagcagtctactaacaggtatccccatttcactcttaaacccccataactcattctccacacaaggagcaaggatgatttttgaaaaatctatcatcccatttccttcttttctctttagtaacttccgttgcacttagagaaaagctaaacttcctaccatggcctgtaagattcttcataatctggtcctttcccgtttctcttcaaactcatcttctactactcttttctttattattctccagccatgttgatttttttttttttaagcaaggctttggcctcaaatatgccaagttctttgctgcttcttggacattgcacgtgatcatacttccatctggaatatccttctctaacgcctttgaataattagctccttcttgtccgccaggtctctacttaaatgtcacctacttctgagaagcttccccttactaccctagaggaaatttccttcctttcctcacttattgtctatctcagcctcttatttggttcttttacaatttttttctgccatcctttcccctcctgctctgttatgaactctgagtcaaattactatgtctgttttgttcatctttataacatgcctaaggaaaataacatgctcaaaaagtatttgttggatgaatgtatgttcccaacttagtgctaagttataaacataaatgtttatagaatgagtaagaatagattttagtcttgacaatccaggatcatattaagatataccctcctctgtctaaaaattatggtgtttgtaatacttggcgtctctgaatgatctgaacgtgacagaagagtactttttcatattgagtgtttaggtcattggggtaaaagactgttgccagagacttgtacctttttctttctttgcagttgactaatctccttcagaatcaagcagtgaaaggaaaagttgctggagcactcctgagagccatcttcaaaggtaataataattaatgtcacttctgtctgtctcctgcattcattggtagatttgtttagttttcgtacttttcttacggtttgaagccccactggaacattttccatgttttgaggattctacagaatcaactacagcagcagtttcctgtctagtggacttaagtaattttactgaagggagtttgaagtggctacctgagattgcgttgctgatttgggggcctataattacagaatgtgcttttcgtaaaatctgctttggtttacttgtgcttttaagattgtggagaagagaacagcaatgtttaatacataatccatgcttagcaaggggcaagtaacctctggggttt

SEQ ID NO: 16699 - DNA, 1966 bp, Homo sapiens
agtgaatggaaaatctttggagttactacctatcattctcactgccctggctacgaaaaaggaaaatctggcttatggaaaaggtaattttcttccgactttagtggctttttctctatgcacataatcaaattcattgctcagtatattttgcatttctaggtgtactgagtggggaagaatgtaagaaacagttgattaacaccctgtgttctggcaggtgagtcttgttaatatgtataactttcttaggaatacaagtggcggaaaaaaaaccactttatttcaggaatttatgtctggaggttttaagtccttcttttttgttgtttttaatataacactataaaactatttagtctgcaatgaattagtgagaaagaaatgatttactatattctgtcctctaagactgttcatatagttttatttgcttgactgtatcttcttacagcaatttagtgtgttaagatacacataattaaatgttaatttagtgtgtttaatgctccaatctaagcattattggagtctcaaggtcgtgaaggctgggaaagtcaccctgctgctgcatcttttctttttttcttttttcttttttttttgagggagtagaatatacaagtgatgtatcctttaaccagtaattgtatttctgggaatctacattaaagaatgactgcaacatacaagaaaatcctcacatatgaacatgttcaacacagaaatttgtgaccagtataagcatacagtaatagagacatgtaaactatgtaagttaaggtagagccactccatgacatttatacctattaaaagtgaaatgtatacatcaaagatgaaaaattctaaccatataattaacaaagagattactatgttatataatactgtgattgcgtgtaggtttgttaaaaagaacaagaagggaatacccaagattatctaaaccagagataattgcttttatggttccttacataagatcccttacataaatcattttaagcatgtatttgtcaattaatttgtttttaattacacaagagtttattcaatacatactgtaatataccttgcattttttatttaatacaactgtccatgtcagcatatacaactctacatcattctttttaatggtttgcagtaatctattatttggctaatctacaattgtcagattatttggttatttccagtttttgtgctattacaaagagtgttgcaatgaatgtcttttttaattttaaatagagatgggaatcttgctttattggccaggctggtctcttgaactcctggcctcaagggatcctcctcctttggcctcccaaagtgttgggataataagcatgagccactgcacctggcctgaacatctttatatatctagatgaccttttataagcatgtacatggcatatatttcaaatagtaaattgggtagatctgtgattatgtgcatttttaaagttgataactactgccagcttgtcatacattccctaaaacggtatgtgaatagagtttgttttccacaatctcaccaacattgggtatcatcagaattttgattttgcgagtcgggtaggttaacaactgctatttcattgttttaaatggtatttatttgatcttgtttctcggtattgcaaaatcaaacttgaattggccctgtttttttgtcctcattaattttacaaagttatatctaaataagttgtaaagaaataaactttgtcattttcttctaccaggtgggatcagcaatatgtaatccaactcacctccatgttcaagtaagcatcatcttttcccttttctttgtgtatcctgctttgtgaacttacttgctagaaattaaactatagcaaacgtaaacatcactctctcctgattgtaagaatattagtagttatgttttctgttacagattcacagattccctcctcactcctgcctc

SEQ ID NO: 16700 - DNA, 1469 bp, Homo sapiens
gagtttagcttgagttggtctacttgctcatcgtagcacctgtccttgtctctcactcaaaaaccatagctcataccttttttttgttgttgttgagacagggtctctctgttgcctaggctgaagtgcaatggcacaatcttggctcacggcaacgtccaccttccgggctgaagcaatcctcccacctcagcctcccaagtagctgggactataggaatgccaccacatcgggctgatttttttgtatttttagtagaggctggtcttgaactcctgggatcaagtgatgcgcccgccttggcctcccaaagtgctggcattacaggcatgagccactgcaccttatagctcataactttctgttgaatcttttaggctattggatgttgtcactgtgccatcaggtgaacttcgtcatgtggaaggcaccattattctacacattgtgtttgccatcaaattggactatgaactaggcagagaactcgtgaaacacttaaaggtagcatcaaacttgtaaggtgatctgggtctcttttgaatgaaagtgtttgaacttaagccactgttatgccagttaatgacaggaaataaatactgtaaaatgaccctgggtgtggaggatctctttttttttttttactttaaaagtggaaaatacatgatgttaccacactcccttttttttaatgtcctcactttagcagtataccacatccttaagcaagccagaaagttctatttaaaaaaaccctcaaaagttctaacgcaaaaaagtgggaaaaaaggtgagaactattcagcaggaaactcaaaatctaattctaagtagattatgtgtcactgtcttatgtgaccttcagctatggcctctgctttctcatttatgaactaggatgttgcatctagtagtatatcgtggagttgtgtgatgctaagtcattcatcatgaagtatttgtaaagcagtaaaataaaactcagaagtgttttaaactatattaaaagtagtgtacagatatatttgttcctccaactttttagtttgaaaattctaactcagaaaagttaaaacactacatagcgtgaagaacacctatgttcccttcacctagattgaccaattattagacactttgccacatttacctcactttttctctcatacatattctttttctgaacatttaaaagtaagatgcagaaacccaaaccctaacacttcaatgcctgaatatttcagcatgctaagaataaggacacattatcacaataccatcatcacatctaagaaaattaacaataattccataatattatttaatttatattccctattcacattttcacagttgtctctaaaatgtcttttgcagctgtgttttttttttcctctgctccaggctctcatcaggcttcatgcattgcatttggttgttctttctttctagttttagactgattttt

SEQ ID NO: 16701 - DNA, 1025 bp, Homo sapiens
tattgatgattcttggcctaaatcagtaattataccaggaattcaaattttatatcttattttttttttcttttttttgtcctcacaatctgttcccaaggaattctaattttaattagaaaattttaattgcatctttctttcggcattattagctggcattcttctgtaaaaagagcctctcctttccctattgttttgaatatcattatgcactcatgaacctttttaaattcaatgtacttattattcattactgtcattatttgttttgagcacaaaattacccaaatttagccagttggatccttcaagtcagcttatgtgttcttttgatgtgaccccatttagtctttgagcttgtggcatgatatgcccaaggctcaccatagtactttctttgccccatcctgatgctagccatgtctctaaaaagccctgggtcccttctgtaggaaaggatatttaaagaccataatctgagtaggctttaaaacttctttatcttctctgtatctgttcactctttttttaaatttaggttcgtagtaactatattgctggcctttttaccagctttatgtattttgatccagtctgttgttttctttttgttttccatttgattgctgttttattttacattttttttgttttactagtatcttttctaggccttgaaaatgtattctttaaactttttgaggcacaatttacatagcacaaaattattttattctaagcatgcaatccagtgattttttttcataaatttacctagttttgtaactgtcactataatccaattttagaacattttttatcaccctgtaagatcttttatgcccatttaatctgcattagcactcccagtcccaggtaaccactaatctactttctgtctctatagatttacctttcctagatattttgtataaatggaattatatgatatgtggtcttttgtgtatgtcttctttcattaagtgtaatgttttcaggattcacctgtgttgtagcgtatg

SEQ ID NO: 16702 - DNA, 1022 bp, Homo sapiens
gactgatcttgaactcctgacctcaagtgacccacctgcctcagtctcccaaagtgctggcattacaggcataagccaccacacccggccaagggacttactgttaaataggctgttatacttttaagatgtatgtaatgggaccaggtgtggtggttcacacctgtaatcccagcactttgagagaccaaggtgggaggatcacttgaggccaggagtttgagactctcctgggcaacatagtgagacttcatctctccaaaaaaattaaaaattaaaaattaaaaaattagccaggcatggtatagtcccagctacttgggaggctaagccaggaggatccgttgagcctgggaaatcaaggctgcagtgagctatgattgcatcactgcactctagcctgggcaacagagagacccaatctttttttttttaaaaaaaaaaaaaaaagaaaaaagaaaatgtaagtaaatgacttccttttggttgctctcttctaggtaggacagcaaggagattccaataataacttaagtcccttcagcattgctcttcttctgtctgtaacaagaatacaaagatttcaggaccaggtatttttttaaaatgccattttgtttctttctgtagttggtaaaaaaaaaaaaaaaaaaaaaaaatcacagtaatctgtttttgttgtatccgttcctaaacaattttatccccttcctgccagcagcaaagctgcaataagacatgtatgtcccctctgttctctggggattgatggaaaacttttacaggtttttggtttattcctccgtttcctgttgtgtggtaagctaggtagtgaggtgggaataagagtggaaggataccacacagccccagttggaggaagggacaatttagctggatattcaccagcagttttactatgttgtagctttccaagagtaggttagttgcaaggatgaaatttacaatttttttcttatatgtgttccaggttgtgggtaatatttatattgacttttagc

SEQ ID NO: 16703 - DNA, 1766 bp, Homo sapiens
gaaattctattccactttagtctgaaacataaaatttgcattaaaagggcaagagcattgagcaagactgttttccaggtttatttcctatccataacactattctctcaactcattttcaagttaatgaaataattaaaactctcttagaacattattgactacaatagatttacagaggcatttgcaaccagtttcattttagtgtttcagagtatactattgtccttgttaactgtaataaacattaaaacgtatataaaacagaagtaagcttccttatagaagccatatggtaacagtattgggtagaaatgacctaaggctaataagcaaacttgttctgtttttacccactgattctttttcagccccttctcaaagtcagcatgtcaatgagagactgcttgatacttgtccttcggaaagctatgtttgccaagtatgtagcatctttttctatcataggaagacgttgtcttctaatgttggagctaaagttatctctgccatctcctagtaccacctgttcacagtgatcatgagaattcctagccccgcagagcaatttcatcaaataaggcattttgctaagtgctttatgtgcttttttcatttagtcttcagagcaaccctatgaagtaagaattattgcaattcccattttacagataagaaaagttaggcttagagaagatgagtgactttccaaaagtaaaacagtagttggtggtggagcaaggattcaaagtcaggtctaacatcagagcttgtgatgtcaagtactttgctctactacattagaataatcttcagggtaatgttctagtgtcaaatactctgaaacctgagctggcagcagttccaaaggggaaagtaccttagtcaagaagattatacttaagaatctcattttagtgaacatctgaattatgatctagaggctagtagatcaaattaattgttgaggggaatgagttttatttgtagcttagccagtccctcctaacatctcttcctttatttcttagtatataagctagagatgatcttgccatctcctaaaaatataagacagtaatatgtgaaaagcatttggtactttgaggataagatgcccaattaatatcacattggccatattataatatattcatgggtgtccagaggaacaactaagccatatgctattatctttgttctagaattaaaagtttttgttactcctcacccaaaggcatagcgaatagactgagatattacgttgtaacatctttaacatgaattaatcattgcgcctcagtgagaagacaagtgtgacattttctggatggacagtttacatggcatcaaatattacattatcctatgatgaaagagagcatatgaagggaagcactccttcaaacatggcaaaatcagcaatttcttacatttgagtaaccagccaattttacagtctctcagcagtcttcttattcctcacatagacttgagagcaggatagaaggaagtagagtatcatgagttaagtattgaaaaaagtcagttgaatttctgtactataaattgctttgaacagctgataccttattttgagtacataaattcactttgttttgctctacgcttcattgtttatacatatgccttctctgtatgcaactagctggatttttctgacccagaagcatattcctgtgaaatagtactgtttgttaacttctctatttctgagctagccagcttgatgcccgaaaatctgc

SEQ ID NO: 16704 - DNA, 1031 bp, Homo sapiens
ttagaaaaggatgctgctgttcaattaattttcccagttttgttaatttagatggacttaatttgtaacgccaatgaatcattttctttagccttatagataagaattatttgctggttatgaacaactttataagttatccatcaacactcaagagtatttaatttacttattttctcctacaggattatctgctgtgttgtattcagcattgtttggcctggtataagaatacagtcatacccttacagcagggagaggaggaagaggaggaggaagaggcattctacgaagacctagatgatatattggagtccattactaatagaatgattaagagtgagctggaagactttgaactggtaattgctaagtcctcagctgtattgaatgatggagttctttagtagcttgttaatttttatcttgtgtcttttaggataaatcagcagatttttctcagagcaccagtattggcataaaaaataatatctgtgcttttcttgtgatgggagtttgtgaggttttaatagaatacaatttctccataagtagtttcaggtaaggttttgctataactccatttgtaatttgatgaattctccattttatttacatatttttactgtagcagtattctaggcagtaaacagaccacagacgatgacactgtctcttaaatgagcacctagtctaagactaaactgtgttctttccactagagagcgctgaagtatatgcttaccaggcctataaaatgaaagccttccagcagggtttcacttactcagaatttcccagaccctgaattcaagaactcctaattttaacatggaaattttgattggtggtagtattggactttaatactctgcagggactggtataaataagggaggggaggccaggtgcggtggctcacgcctgtaatcccagaactttgggaggccaagctgggtgtatcacttgaggtcaggagttcaagaccagcctggccaacatggtgaaaccccatctctactaataatgta

SEQ ID NO: 16705 - DNA, 1061 bp, Homo sapiens
ctgggggcatgggaaagaaaagagggcgctttagccctagaccactatggtagaagcagaggaagttcaggtgtaaggaccctaaaacttttggacctcagtaaggacatagacattgagaattaaattatatattattctcataattcttagaattttggacttatttttatgcccttcatcatatattaccacttgagatctaaggacatgttttggcagctgatttgcttagatatggaaaggtctagaactcttctgttctgacaacacctaggtctatctctggcatgtttctttaatatctgaatgatctctaatttagtttgtgcagatgttatcctggacatcaaagatttgcaaggaaaacagccggggtaagtttactgccatgttttcctaaaggctttatataaaatcactatcctccagtggcatttggaaaagaaaaggtattccccattcattacacattcaccagagtggccaaaatgaaacagacacctaataccaagtcgaattgttggcaagaatgtagagtagttggacctttcattcactgggggtggaggtagaaattggtataaccactatggaaaactgttcagcaatatctactaaaattaaacatatgcctatgactcaacaattcgaatcacaacagaaaaatgtggaagaattctcttagcagcactattttagtaggtaaaacaaacctaagtgttcatcagcagtagaaaggataaaagaattatgatatattcacacagtggaatcctatacagcaaataagcatgaacaaactacatgtacacacaacttggagaggatctcacaaatgtactgtaaaacaaaagaagccagacacaagaaagggtacttactgtagaattccgtttagatgaagttcaaaattagacaaaatttatctgtgatgttagaagtcaggatagcagtttccttggcggggcaagttaggagggagtccctagaatactcgtaatgtacttgatctggatgctagttacacagtaatcttaactaatgatgggaaatgtctg

SEQ ID NO: 16706 - DNA, 1300 bp, Homo sapiens
tcctctgggaatgtgagcagagtagcagcaagcacatgaagaagggttgtgatgagacggcagtgcagtgagggcactttcagggaagtggaaggacgtggctttgtaagtgtcatttggtcctaaataccatcagattcctgcagtacttgaatctcctttactgtttgcttaaaccagttttttaacctcaccactattgacatgttgcgctagataattctttgttgtgggacctgttctgtgcattttgggatgttgagtagcatccctggcctccacctaccagatgccagtagcagccccctagttttaacagccaaaaatgtctccagaaattgccagttgtccttaagggacagaatcacccctcgttggaaagaggaagaaacgagagatctactgtctcctaaggccacttagtcatgcagtaaatgtatcacagggctgttactgatctttgaggaatcaaagagaatgggtccactaagtgtcaatctcagccaagattctagaaccaattattaaagcaatggatcgtgaccactttggtagtgatgcttcacttgttttctgcctctgcatcacttacaggcacaatatcattctatcagtaacttgcctcattatgtgtattcagggtgcctcttcccctccctttaagaatcagcaatcagctgggcacagtggctcatgcctgtaattgcagcactttgggaggccgaggcgggtggatcacctgaggtcaggacttcaagaccagcctggccaacatggtgaaaccccatctctacaaaaaatacaaaaaattagctgagcatgctggcgggcacctgtaatcccagctacttgggaggctgaggcaggagaatcgcctgaacctggagggcggaggttgcagtgagcaaagatcgcactgttgtgctccagcctagcaacaagagcgaaactccgtctcaaaaaaaaaaaaaataaagaatcagccatcaagtgggctgtcatctgggtttagctgaaggagttcttagtaatgggctgatagttgagactctctgtcaccttgcctttgtatcagttttgtgatctgggtcaggaatgcatcatccattttctatatccagccatccagccagtagtcaactgtcataaagctattacttctggtcctctccttttatctcacccaaatgcttgcaggaatgctttctcaaacctcatgcttgtaaattttcatgtgggtgccattcgtcaaacaaatctgttgtctatatataggatatatatctgtccattcccatat

SEQ ID NO: 16707 - DNA, 1090 bp, Homo sapiens
gactagccgccgccctgctccgggcctcgctccctgactggagagggaggggccgcgccgtcgctcagcgacccggcctccccgccgccgaccccgccggaaacctcggtcctcacggtgcttcccggtctgctgctcccccgaccccaggcccacggcacggcgtcccccttcgcgcggcctacgcagcctcggggtagcgtgtggcctccacccggccggtccgcttcgctggcagccgcaacttcccgtctgcacccagctaggtcccgcggctacccgagaggcaagcgggagactcccagcgcgaccaataggagggccgccaatggagcggtccgcccgcggggggagaagggggacttctgggtgggctctccctgcggaacgcgcgaaccaaaggccaacctccccttctcaaggagcaggtggattggtcccgagctagctggtgggcggaggtgacgtttttataagttgctcaagagacggtaacaaccgacgggccgcgtggcctaatggataaggcgtctgacttcggatcagaagattgcaggttcgagtcctgccgcggtcgaagggaggttatgattaacttttagtttattcctccctcaggaacgaagtattgggacaatgtgaacgtagtcgccgccgattcccaccgcacttcaaagatgtgggaacgccaagatccgcggaagtaaccacgcccagcaagtccctgcgagattgcccgcctacgtgtctcagcggaggcacatttctaaaatgtaccaggtctctcgcaccccgacgcaggtggaggaaagtggagagggaggggcatcctgtacagaaatctcaatttatactcaattgatggttggcaagagttggggctcgcagccaaagcgaggctccctccctcgcccatccggtgctgcctcctcgtccagagcaattctgaggggtaaaaatgttgccttccgttgaacctgaatttgcccgcagatgctagcctccggcccacagcgcggctggagcttgtccccttccccagctgtttccagtctccgcatccgtcttgtgttgctccaggtgcttcaac

SEQ ID NO: 16708 - DNA, 1047 bp, Homo sapiens
ggtgatggagaagttgttgcccaagagagtccgggaagtcatggtcgcccgaaaaatcaccttctactgggtggataccaccgaatggtctaaggtaaggaaggttactgtcgtctcagatggcgtgcacggtgctttccttgctaaccagaacttggcagcgtccttagaacagccacagaccccgaatgagactaatatgactatgcgtcccttcggaaggaaacaaataaataggaacagttttcacaacaaaatgggtagttcctcactacctactgtttaagacccctcacaatttgggccctacctgccttcccagacttgattttcctacacactacatctactctagcatattgaagtccagtccagaaaatcaacaggtctggactgcttgttttgtgttatgtgtgttgttcaatctgcctggaatgccagttctcactcttccaggccagtcttaacttcacttaccctttaaggcttcttctcccagtgacaactgctcagtccagcgtctgaattgccatacacattttgtgtggcacttaaccatttctccatatgttttgattatgcacatctctcaccctccatctagtctaaaaatacctcagaggcaagcagcaggttttaacacaatacccaggggtgtgtgtgtatgtgtgtgtgtatatatatatatatatatatatatatatatatatatatacacacacacacatatatatacacatttatttatatacatatatatatttatttattattattttttgagacagtgtatgtcgcccaggctggaatgcagtggctcactgcaacctccacccctccgggttcaagcgattctcatgcctcagcctcccaagtagctgagactacaggcccacgccaccatgcctggctaatttttttgtattttcagtggagaccaggttccatgctgcccaggctggtctcaaactctggcctcaggcaatccgcctgccttggcctcccgaagtgccaggattataggtgtgagccaccacgcccagccac

SEQ ID NO: 16709 - DNA, 1879 bp, Homo sapiens
aaaatggttattctgtcttttagtacactacattcttctttaggcatattgacaataatattctcaactaattagggcttctcacgtaggttgctgatgtggaccctggtgaaggccggccccccatcactggagttatttccccactctctgccagtgctatgatcctcactgtgtgccgcaccaaggaggctgaatttcaacgacatgttctccaaacagctgtggctgacagcccccgggacacagcttcccttttctcagatgttgtggatagtatattgaatcagactcatgattcgcttgcagatactgcttctgctggtaagctcctaaactagtaactaacagagtctagggtggtttgcagtcttttcaagcatcgggactttttcactgtgcagttagtagaaccccaatatgttataacacagatgaaagaaagctataatacttcaggcagtttaaatcattattatttatagaattccttaagtacttctgaggaggctgcaggttccatgaaaccagtctgaaatcgaagtcatggtttttaatatatttaagaaatactgcatataaaactgtagtgattctgtctaccctgcattgcattgttactactagcattgcaactaaatgcattgttactactaaatctacctagcataaataaggtttgtatcatgttagtattacaaaccttatgtaagctaggtagatttaaatatacgtatacatatatatatatataaaatcaacttgatatttctttaattcattcattcattcaacagatttgagtacctgctgtatggcaggcactgtttgaagtactgggactatattagagaacaaaatggacaaagatgtcttcccatggagctgaccatctagtccagggagacaaaacaataagtcaggaaaattacggtttagtctaaagagacaaaaattgtagtagtaaagcagaaacaaaggaatggggtgtgttagggtagggagggttgcaattttaagtagggtggtcagggaaggccttgctgaaaaaatgatatttgagcaaaggcatgaaggaagtgatggcagggagttgctggtagaggcgacagcgagtgccaaggctcagaagggtgttagaggaatggcagggaagcctgtggctgcagtgaaaggagcaaggagagagtaggagggggtgaggtcagagagccagcagcagaccaaactgggcagggctttacaggcactgaaaagactttggcttttactgtgagtgagagaggaagcctttgggtgattttctgcagtgacaccatctgacttatgttttaacagcattactctggcttccatattgagatttgactatagaaaggcaaggatagaaccagtcagacatattacaataatccaggcaagagatggtgggaaatgtagggagttggaagtagttggagctcttggatatattttgaaggtaaagccaacaaaatttgctgttagattaaatgtgtagagtgagctgtagggaaattgaaagtgactccagagacttttgccctaagctactggtagaaagcagtttctttctgagatagggaaggctgtgggagaaccaggggctggggtggtgaggactggagggtttgttttgggcatggtaagtctgagttgttcattagacatccacacatggtattgagtaggcatcaactatgcatgtttgagtttgggagatttgtctggactagagatgatgggagtcatcagtgatgttttaaagccatgagatgggttaagatcaccatgggggtgggcgtagatgggaaagagaaggggactaaggactaacccctgcaccctaatgttaagcagt

SEQ ID NO: 16710 - DNA, 1037 bp, Homo sapiens
cgcatggtgtgtttaactgaggattcagcgtacctagcagagtttctggaggaaattttgagattgtaagtttgatggttactaacttaactttaaaattgttttgtcaaaacctatgtatggtgttgtctctgaattttggagttgtaaggactactttttaggctgggtgagggagggaatagagagggtaagatggtaactgttccgtattcgatcaatctgttccacaggtatattgactctatcccaaagacacttggaaatctttacaacagcctagggtttgtgattcctcagaagctggctggtgtccttcctacagattttttcagtgatgactccatgacacaagagaacaaatcaccacttctttctgtgccttttttgtcaagtgctcgtagatcagtgtcaggcagccctgaatctgatgaactgcaggaacttcgtaccagatcagccaagaagagaaggtaagaggtcaaagaatcaaaggaattatttgcactgttatagttctgataaaagatgtgtttaaactacagtccagtcatctttgtccatataatttgttgaactaatagctgcccttatgtctgaatcagagaagccaactattagagctcctaataggagcatctgacaatctttatattatctaggaaatatatagtcatgttttgcttaacaacagggatacatcctgagaaatgcattgttaggcaatttttgttgtactaacatcagagtgtgcctaccaaaacctagatagtatatattttttcatttatgtatattttttcatatggaaaagctaatgttccagcattgttactgaatagcagtcatttcccctacttgatctgtaatgccaatatcaagtgtcatttattaggtttctatataggctccattataacctatgggaccattgtcatatatgcagttcgtcattgaaggaaacattgcatgactgtatagtgtttatttcctatttcacaaagtcttctttactgtccacatgaggtctccagaaa

SEQ ID NO: 16711 - DNA, 1413 bp, Homo sapiens
tggcaagtaaaagttaggaatgaattaattcaaaatctttaatgtagataggaaaactcataaaacaataactaaaataagcaaagcagtcactggaagagaatatacaattgtaagtggactttggttgcataccagaaggtgcttttcaatatgttatattttactttaataacaaatttaggccaggcacagcggctcacacctataatcccagcactttgggagtcagaggagggaggatagtttgacaccaacagtctgagaccagcctggacaacatagcgagaccctgtctctacaaaaaataaaattaagaaaaaattagccaggcatggtggcacatgcctgtaggcccagctattcaggagtctaaggcagggagattgcttgagcccagtaggtcaaagctgcaatgagctatggtcgtgccactgcactccagcctgggtgacaaagcaagacttcatctcttaagtgaattaatgaatgaataaatgaatgaataacaagttttttgaaaaagatgatgaccatcatggagccaggaggtggagtagtcgccccttatctgcagaagatatgttccaagacccccagtggatgcctgaaaccacagatagtactgaaccctatatatagtactgttttttcctatgcatgcataagttcaatttgtaaattaggcacagtaagagattaacaacaatagtaaaatagaacaattatagcaatataatataataaaagttatgtgaatgtggtcttcctctcaaaatatcttattgtactatattcacccattttggggccatggttgactatgggaaactgaaaccatggaaagtgaaatcacagataatggggtactattgttgtttttttcatggcagttgatataaggacttgaggtttttattggttgaaaaaaaaataaacctagctggaatctgtttactaagtagaattaatgtctcgctgaggaaaaaagggagactaaaaacacaatgaaacttttcaactgcatgaactatctgagaagagttaaaattcaataagaactatctttagaagcattaattattataatagtggtttgttctgtttctagatatttgtagcagtcctttggaattggaggtgggatttcttttaaatggttaatggtgttcactttcttatactttgtgaataaaatgcatatcttatatatctcacaatcctgattgaagattggaaaatccgaaagtgaatggccaaaagttgccaggcctttattctcactagattttacaatgatttgcagatctttctagcacactttgaaactttggttttagattggacaagacagttttcttctctaagatcagaattaacgcctgggcgcagtggttcatgcctataatgcca

SEQ ID NO: 16712 - DNA, 1056 bp, Homo sapiens
actttgttcattttttttttaattattttttctttctgctcaggctggataatttcaattaccttatcttcacgttcactgattcttctgccagctcaaatctgtggttgacccttctagttagttttttcatttcagctccagaatttctactggattcttttttatcatttctattgctttattgatattctcattttgttcatatattattttcctgatttccattagtttcttatatatggtttaagtgagctcattgtgcatatttagagaagttgatttaacatctttgactagtaattccaatgtcttggcttccttagtgacggtttttgccaaatttctcttttctggtaaataggccatactttcttgtttctttgtatacttcgtagttttttgttgaggactagttattagggatattataatgtggtaactgcatggaggtcagatcctgtcacccctcagggattcctgttctttgcttattaaggatctcagctattcatttgtgccttttctgaactatttgtgtaaagtatgtataccttgttgtgtgtggtcactgaagtttctgtctattatctctgtggtcagccaatgacctaagaaggatttccttaaatgtctgattcaagaaacgaggagggggaaggtgtgtctgtcccttaaacttctgataattgggagaaacccactgtagcctaagagagctgaaaccaaggcagtgtctgcactgctcctacaggaatctgcctggttgaccaaagcatgcaacccccaatttttggaggacgaggtcttcactgtctgccctagcaccagccagctgctcctggaatgtgggctgctatcccaatagctacagcagggatgagaaaagggaaatggtagccagttcatgcacatcattcccttcctaaagatcatcagtctctcccatcatcaagcacttcctaggttattacaggtgttcaatcaagttgccaggttccaaaatagtgaattctgatctttttttctagtttactagttatttgggttgaggga

SEQ ID NO: 16713 - DNA, 1050 bp, Homo sapiens
ccaatttaactttgacagtttataaaaactttgctattgtatagttctactgactatcccttcttagttctatattgtcatgcaaattacatctatacattgtatgcccatcaacactgatttataatcattactttgtattttaaataacaggggggaacagttacaaataaaaaacacttttataatgtttttcttatatagttacctttaccaatgctgtttaactctttatgtggacttgagttaccctagtgccctttcctttcagcccacaggactccttttagtattatttatagtgtaggtctgctaatgacaaattctgttttattttgtttcattctgagaatgtgatgatttctcctcatttttgaagaatactttcattgggtatagaattcctggttggcagtcttttttctctcagcactttgaatatgtcatcacactgccttttgtcttttgtttctgacgagaaagcagctgctaatctcatcaaggatctgtacacgatgaatagctctctggcttctttcaagatcttctttttttcacttttgatagtttgattatgatttgtctggttttggatctctttcactttattctacttgtattgagtttcttagatgtgtagtgtctttcatcaaatatgggtcatttttagccaatatttattcaaatgttctttctgcctcttcctttctgtcctttccttctggacttccggtatgtgtgtgttgtgcttgatggtgtcacaagtatctgaagctctgttcatttttcttcattcttttgtctttatcttccttagactggatcatctcaattaaccttgtcttcaaatttgttgactctttctttgccacctcaaatttacttttcatttttgttatactttttaactctagaatttctattcgcttttttttttttttttttttttccgtctgttgatattctctgtttggcaagtcattggactcatattttagatctttaggtatgattttctttagttctttgaacatatttaaaacagctgat

SEQ ID NO: 16714 - DNA, 1068 bp, Homo sapiens
ttctcctgccacagcctcccaagtagctggggttataggcacccaccaccatacctggctaatttttgtatttttagtagagacagggtttcaccttgttggtcaggctggctacaccattcttaaggtggcagtaaataagacttctgaaggtaatagtctagtgggtcagtgtttttttaataccttgttgggaccatgtatcaaacccctcttagtttgttaagagacacttcagaagtctcttaaagctaatagcttgctgaatttccatcttatatgtggtactatgtaaattttgcccggttttggacaacatgagaaaatgtcaagcttgtagttgtctttggttacttactgtggttctgattttacagaaataagtctgagacgaagtcctcgaatcaagcagttgtcatttagcaggacacattctgcctccttctattctgtgtctcagccgaagtctcgaagtgtgcaaagagtccactctttccagcaagataagtcaggtaacatacgggcccctctgccttcacaagtccgtgctgacttggtgagaagtgtttttgggaaaagaagcaagaaatttgacattttctttcttgacattggagaagtagaataggtatgtctagttgaggttcagggtgatggctagatggacagtccatgactttgtaatcagtcatccctaggactcctacaactggtcatccatgctatcattataggtagctcattcattcaagaggaagctacccataatttcccataaggacagaacctacacatcattatcttaggtggaaggtgatatctgtgtttacgttcttcattcttctatccatggttagcttgctaatagatttgtgtttcttattttatctttttttgagacaaggtctcactctgtcacccaggctggagtgcagtggcacgaacacagctcactgtagcctcaacctcccaggctcaggtgatcctcccaccttagcctcccagggaggtgggactacaggcatgcaccaccacgcccagctgattttttgtttttagtaaagactg

SEQ ID NO: 16715 - DNA, 1131 bp, Homo sapiens
atgattattagacacgtgggaacttcaagcagcaggtttgactgaagccacggtgggggcggtggaggaggagatagagaggatctcatctgttctcttggctttgtctactgtttatattatatactgcacagatacctttctggagtgtgtgacactcatcttttccgtttgattgcccactccatccagtcaccaacattagaaacctgggagtcatccttttccctctccccaggcatagccaatcagtcgagtcctgcccattttatttacaaactgactctttttttttttttttttttttggagacagagtcttactattttgcacaggctggagtgcagtggcacgatctcagctcactgcaacctctgcctcccagttcaagcgattctcctgcctcagcctcctaagtagctaggattacaggcacccaccacaacgcccaactaatttttgtgcttttagtagagatggggtttcaccatgttggccaggctggtctcgaactcctgacctcaagtgatccacctgcctcagccttccaaagtgctgggattacaggcatgagccactgcgcccggcctacaaactgactcttgtacccaccccctcttctcccctactgcaattcctaccctagttcaggtctacctggaacacttcaacaggcttttccctctcaaagggaaatcctccacccagaggtcagagtgatctttctgaaacattcctctcagtttgcttaaaatgttcactttgcttaaagctctatagactccccgtccgctaaagcaaggctttaagttttcctaagtggaactcttgggttcaaaaataatcacctttgtttggaaactcagtaaattgcttggaggttgggaaagacatagagctctggagaagggtctgaaaaccatagatctacacaaccaagatcagtctcctcccccaggcaggcagggtcttccgtggtctgttccctctggcctcacccctccccgctccacctccccagcaacatcaggctgggtgccatcctgcacagccactgcttttcacttccaggcctttgctagtattgttttctatgcctacaggccgccaccaccccacccacttttcctg

SEQ ID NO: 16716 - DNA, 1036 bp, Homo sapiens
gcttgccgcaacatgctgctcatctgcagtctaagaatctgaacaggaaggcgttctgagcagcacgagtgataggcctgtttagagctagttccccacagcgggtttatccgcatgttctgtatattcggtgggacacagtactgactgtagttataatcagcctgcaggctctaggattccccttccccttccaaatcctattcccaaaagacaaggatttggcctgttaactgccctggttagcaatgttgccttctgctgctagaatcaaagggggagtgcaggaggagggggcctttggtggttcagttccctcaagaccatgatataaatcatgcaaaacagcataaccccagagatctgagacctagaaagaatacaggatattaacctgagggaattcaaaccacaggtactttgcattttcagagctgcttcttgctgccagcacggtgcatagctgttaagggcagggtccttctaaaaagtgtaggtaccatttctgtaggataagcgaacctccaagcagtgctgattttcttaaagtctgtttttgtgtgtaaccctctgcaatttaagccaatttttttcagttcggtcctctgtgactcctgcatgctaagcctttctaccttcttctagatgaggatgtggatgttcttccctccactgtagaagactctcctttcagtcgcgctttctccaggaggcgccccatcagcagaacttatacacggaagaagctcatgggaacctggctggaggacttatagccacaaacattactgagcccaaaagatcaaggagtcagccaggaccctgtggacataaagaagttggatgcctggtcccaagcctcttttgccatggtcagtgttcagattgccattagaatgccttagggttttctaattccccttatggatccaatccatctcctggccctgccccttgttggggaagttgcaggaggagaggtggatggcaatgtgattggtgctataactcaggcagcctgggagtcaggaaccca

SEQ ID NO: 16717 - DNA, 1075 bp, Homo sapiens
ccagtatgtattatctttattatatacatgtagtatatatatatgtatagtacatatgtgtatatatatgtatatgtgtatatatgtatatagtatacgtgtgtgtgtgtgtgtgtatatatatatatacatatatatatatgtatatatatatacatgaagtaaaagaactattagaagtgggttggaggccgggcacagtggctcatgcctgtaatcacaggactttgggaggcccaggcaggaggattgcttgagcccaggagtttgagaacagcctgggcaacatagtgagaccctgtctctacaaaaaagttttataaatcagtcggtggcacgtgtagctgtagtcccagctacttaagagactgaggtgggaggatcgcttgagcccaggaggttgaggctgcagtgagctatgatggcctcagtgtactccagcctgaaaaccctgtctcaaaaaaaaaaagaaaagaagtgggttggtctctttcgcaatcaccattgtaaaggattttctgatattaaatacatatgctctattgtgtgtttatttctgggagaactaagaaaactgttggaaatgtgaggatttttagtgtagtcggaagctgagaataagtgatcatattgcgacccaactattttccctttcttctttccctgcccccagcatgttatatatatggaatcgaaatgaagttagaatggtcactacagaaagcaggaatgtccaccctccgcatttaaatgggaaactataacttttgtgataactcttggttatgtgtgtttttgtcttctggatggtacctgaaatgccatcccggaccccatcccgttctcggtgggactgcaaggatatgggcttccagactgggaagactgtcctgcatgtgtttggtaaaagacaacggctaaaacctggggcacatcagaatgtcctcgcaaggaccaagtccaagctggccccttgagaagcatcaggtaccctttggaagctggtagtgctggtcagtttaatctcactctgtgatgtccgatcctcgggccctgggctcacaagccatcgctt

SEQ ID NO: 16718 - DNA, 1102 bp, Homo sapiens
atctcttgagccttccccacaccatatgttgcaaaattatctggtctttccacattcacagcgttcacaggccactgttgcattacctattagtctgtgagtgtacacgttcggaccccacactggattctgagctttttgaaagcccagagctgtatcatttatttctggagccccagttcctggctcactgttgtgcagagtagttgtttcatagatatttattgatcaaatagaatttatggcaaaaccagtacttctcttctttttgaatagtaataaaaaaaaaaaaaatcacaagcccaagcacccccggtcttggacaaagccagtttacctctttggatctcagtatccttagctgtaaaatgaaaggatgctctgaggtctctacttgttctaagacactgacatccgatgcagctgtgtggctgtcagtcacagtaccatggatcaactcttgactcacaaattgaatgaagggatgggagggctgtggtaagaaagagtgtaattctgaggtaactgggcatgagttggaagagaggaaggagaagggacttcaagatgggttaatataaaataaagatggcagaaccaggcatgatggtgtgttcctgtaatcccagctacactagaggctgaggtgggaggatcagttgtacccgggagtttgaatccagtctgggaaacatagtgagaccctatctcttaaaaaaaaaaaaaaaaaaagatggcatttaaaaaattatgacctggtttaactagatggccatctaaaaaacgaacacattaaaacaaaataaatttcagttgggttaaagatggtaaatatttttaaaaatgaacttggagaaagtactttctaagaatgacttaaaacccagaagtcataagagaaaaaattaatatatttgaccctatgcaagtaaagaatttcttcttggcagaatccatcataaaatcaaaggagtctcccagttctcaaaattgggaaagcatttttgcaacatatatcatggagctcatttccatttccttaatatctaaagagttcctacaagtcattaagaaaaagaccatcaactgaattttttttttt

SEQ ID NO: 16719 - DNA, 1091 bp, Homo sapiens
gtaaattccaggacatttaaatgtattattttctatttttaagagagaggagaggcagattggatgaacttggaaaattaaatggcccccaaaaagtaacaattaagaatgtgtgtttggggctgggcacggtggctcatgcctgcaatcacagcactttgggaggcctaggcaggaggatcacttgaggtcaggagttcgagaccagcctggccaacatggcaaaaccccatctccactaaaaatacaaaaattagctggacatggtggtgggcacctgtaatcccaggtacttgggaggctgaggcaggagaattgcttgaacccaggaggcagaggttgcagtgagctgagattgtgctactgcactccagcctgggcaagagtgagattccatctcaaaaaaaaaaaaaaaaaaagaatgtgtgtttggcctgtatagtcttagctactcaggaggctaaagcaagaggattccttgagtccaggagttcaaggccagcatggacaacatagcaagaacttgtttctaaaaaaagaaaaaaaaagtgtgtgtttgaaatttgaggctctgtggctagaattttcacttaagaggaaatatatatctgcatttaaaattctttaatttataaacattcttgtgtattcttaggccagtgccccacaaaagtatgggccatgcaccagtgctgttctgcacaatgttaaccaagcaagaggaggagctaaacatagaaaatgggattggtgtttagaaacttctgtagtttgacattggcaggatgacatccaaatgggcgattggtggcttcatctcgaacagcgtgtgggccagggtgagcactgttgaccccacgtggcaggactcaggactaaactgcttgttgatgttagatctgagagggattaaggattaagatgaatcaaactgacctttcaccacagagtttgagaagcactggggatgttaaaggtggggaaagtttgcagcgggaggtgtgctttttaagcttaggaagtggaaagcaggagaagagttggacaggcagaagtcttctcgctcccacttcaccctcgagatcccaaca

SEQ ID NO: 16720 - DNA, 1197 bp, Homo sapiens
gggggaggcccaggaccacctgtcggggagggggaccgcagtcatttctcattcctcagtgtccaccttgcgacggggatagccacgagtcagcagcttcccggaaagagcaacgtattttaaaaaggaaagtaaagcccacagagggaaatcaagggtttttttgagcaaagggggtcttctgaaggtaacttattatttttttctttccaactgtgtgtcacctatgaccttttctgatggagatgcattttctttttccaagcgtaagcttcctaatgtgctgtgcgtgcttcctacccacccaccccgagcagcctggccgggcaggactggggctccatggggactgtcaccctggccctggaggtgcagccgctggcagcagcctcagcaggctggggtgggaggcaggagaaggcagagctgggaagccctccacccctgcctggctcctgcagtcgctgacttgctctgtcccatgtcccatcctcggctgtcagggctgctgactctgctcagccaacagctagctccctcgctcgcctgctctcttcccctctgttcccacgccagctcctgcccctggaaccagagatgacaggcccagggcagtgaaatagcacattcaggaactctagggcacccggacccccccacccacttgcctcctgaggcctcagtggggaggggcaagcaggggtcttccccaaaggcacagatgaagccactagcttcagcctagaaacccggagaagggaacagcctgcggtgggaggaaccaatctgcagcgcagccacccccaaggctggatccttaagtgaaggaccaagccaggcctcagggtgactgtgatcaggactgaggggtggacaaggtggcccaagtatggcttccagaccccgaagccccacgacctcccaggtgcccgccatgatgaccctcaggtggcagtgaccccgtcactgtataagacattttctcctgctgagcagaaggcatcatcccctgcaactacctcttcccacgtctttctcccctggtaccaaaaagaaccctgtacctctcctcctcctcctccctcctgccagtgcagtggccttggtcttggaaactgaagggagaaggtctggcccccagggtggggctctcctttccctcccccagccccgccgtcagcactggccctctgtgag

SEQ ID NO: 16721 - DNA, 1094 bp, Homo sapiens
gtcagctgttatacttctatgtgttcagtgcttttgggaggggtcagagtggtagcagtgcttctcagacacacttttgtgagtgtgatgcttcaggacctccacgttgccccatttttatctggggcccctctctgggctggagcactctcactgggactgtgtcattcatttgtttagtcaacaaacatttatggaacaactgctgggagctcacctgaccagttgatacaaatatgaataagacatggtcttgatcttgaagatgctgtcagcttggtggaaaagaagagcacaaagaccgggcgcggtggctcacacctgtaatcccaacactttgggaggccgaggcaggcggatcagctgaggtcaggagttcaagaccagcctggccaacatggtgaaaccccatctctactaaaaaaatatatatatatatacaaaaattagccgggcatgatggcgggtgcctgtaattccggctactcaggaggctgaggctgaggcggaagaatcgcttgaacccaaggttcaaggttgcagtgagccaagatcatgccattgcactctagcctgggcgacagagcaagactgtcttaaaaaaaaaagagagaagagcgcagaaagaccctcctcatcatcatcaaacatcaaacattgccatcatccgacagtgtcaccagtgcactacaagacgtgtgaacaggaaatgatgggcatacggagaagggcccttgcccagccggggatccaggaaggcctcctggaggaggtggaactgagccaagtctcaaaggatgagtgtgagttagtcaaaaggaaagccttctgggtggaggggacttcctgaacagaccggagatgagagaattgggcccttgagttgcagttccatgtcacttggtcgaaccaagaggtgggtgggtggcaagcactagcaagttaggagcttggacgacggggtgctattgaagtttttaggcagaacagtgacggctcccagagagccctctggctgcagcatagcagctggcctggagatgggaggctggttgggaggctgctgtgatggtggcctaggtgagagaggatgg

SEQ ID NO: 16722 - DNA, 1052 bp, Homo sapiens
ttttttatagatggtgttattatatttttttgaggcagtatatgaggcagtatatgacagtggtttttaatttttatttaaacaattttttctcctatttatttatttgacagagatgggggtctcactatgatgaccaggctggtctcaaacttctggcctcaactgatcttcccatctcggcctcccaaagtgctgggattagaggcgtaagccaccatgcctggccagaatgcattatttaacctgtcttttattgtgggcatttagttgggttgtttccatttctgttgctcactaatagtgccccagtgaataactacgtatgtgtatcattctgcatacctgccaggaatatttgttatatacattcccagaagtaaggttgccaggtcaaaagacaaatgcatttgcaatttgataaatattgctaagtagccctacatagattatgtactatttttcatttccatcagaatgactctggaattgaaatttaaaataaaggggattctgtagagctgctcaagattttgtgagcctgtagcaccttctgagtcctcagtcaggtctagctcctctttttttcgtttgtttgtttgttttttgtttgaggcagtctcactctgtcgcccaggccagagtgcagtggcgaaatctcagctcactgcagcctctgcctccaggttcaagagattcttggacctcagcctcccaagtagctgggattacaggcgtgcaccaccacacctggctaatttttgtatttttagtagagacagagtttcaccatgttggccaggctggtctcaaacccctgacctcaggtgatccacccacctcggcctcccaaagtgctgggattacaggcatgagccaccatgccggcctctatctcctgtcttcaacaatagctttttcaaaccttccaccttcctacttatctccctttattgtggtcaataaatgtccttttaagaggaaaaaaaaaaaacagtccattaagtaaaaactttcagcttcctggtcttcctctttgcccactactctca

SEQ ID NO: 16723 - DNA, 1052 bp, Homo sapiens
tgagacggagtctcactctgtctcccaggctggagtgtgatggcgtgatctcggctcactgcaagctctgcctctcgggttcacgctatcctcccgcctcagcctcccgagtagctgggactacaggcgtccaccaccacgcccggctaattttttgtatttttagtagagacagggttttaccgtgttagccatgatggtctcgatctcctgacctcgtgatctgcccacctcagcctcccaaagtgccgggattacaggcgtgagccaccgcgcccagccctgaataattcattcttgctaagcttcatgttgactctatatatcatctaagaaagtattgttttgtggtccaaacctgttgccgtggttagtaaggctttcttaggtgtgaaatatttagatgaaattttctcttttaaagttctgtatagggttagggtgttggaaaatgctatattaataaatctgtagtgttttgtgtttataggttcagaaccagagtaactggattgaaagatggactgatagattagatatatcagtctaatttatcatgactgatagatctggttaagttgtgtactaaaggattaggagagcccttcctgtcacaaaagtgccactaaaacagcctaaggagaaaaatggcttgcttttctaaacttcagatgtatctgggctctaatcatatagacaggcttctgatagattgcaactgtaagtagaaacctacatatagttaaaatcctggtctttcttggtaaacagatttaaaatgtctgatgtaaaacatgccacaggagaattcagggatttgagtttccctgaatagcatatatatgatgcatcaaatgggttattactattttttaccatttccacttacataatgaaaaacaattcattttaaatatcacattattattttgtaagtcatggaaaagggcaattgaagttttcattatgaagttttcccaataaaccaggaattctaaacttgaaaaaaaaaaatagaattagccaggtatggttgcacaggcctgtaatcc

SEQ ID NO: 16724 - DNA, 1025 bp, Homo sapiens
ctagatctctatcttgatgtctgaaagcttcttgagagtgctttgtcaggtctatgtccatcacattctttggtggatgtggcctcacaaatctttcaactcagccctctaggtcctcatgtgcattagtggagaatagcgttcacatatgtgggctttgggtccaatgcagtttgaatactgagtatgtcactaactagttgtgtaatttttggaacattgttaacctttctgatttcagtttccttatccttaaattgaaaattctagtagttcctacctcataggattgttgtgaaggtcaaatgagatcaaatacttacaactggacctaaggggcactcattatgagttagctgttgttactagtaacccattgtcatccctgtagatgtttcaggggtttgccgtggggaaccctgccatgcaggcttgtctcaggttctgaccctgtgatggggtctggtgttccctgcctcgtttaccgctctttccccatactttggtctgactctccaatgagctcatgattcctatgagcgatttctgtctcttgatgaatctttagatttgtcctttgtcttaggccttgagactgcagtagaaccttgtggcctattctaaccccagcccggaaaccaatgccccaactccattctgggctgacttcctggcttcctcccacaacttccgggtctctgtttttatatattgttcctagactaggatatgggtgttcacaaatgtttgttgaaaggttttcagaggcaattaggcatatttaagaagtgaatgaacacctgctcattgatatgctgtccataaactaggacacggtgttgaatgatgatttgacagagattttagaatcagagagatggaagcttgatcctaactctgaatcttatggccttaagcaaaatatctaacctctttgtgcctgttttctcatttgtaaaatgaggataattatatttcctcatagggttattgtgaagattaaatgagacaatataaataaagca

SEQ ID NO: 16725 - DNA, 1054 bp, Homo sapiens
aataggagtgataatcacaggattgttgtggggtttcaatgagagaatgcgtgtaaaatgcttcgtacaattactgccacttatgtctcaataactgctggctttggtcattaataaaagagggaaacaatattatcagatctgtatttagaaggagttctggcagatagggacagatttgtgccaaaatctcaagacagtatttttcaagattacactgaaacttagtacatatttatattatcatacatttttaaaaaggtcaagatgattatagttgaaaccacatagttctttttttaagaaagtcattgtagtacacctggctggctacacactcattagttatcctgactttctaggtgagtggcaggaaattgattctgtggcaatcttttatcactcaggaaggctacagatcctggtgtttacattctttcttttatgttgtagctgtcctggataatgaaagacttactgcagaggagatggatgaaaggagacgtcagaacgtggcttatgagtacctttgtcatttggaagaagcgaagaggtaaagattggctggctggagagaagattaagagaagggaactgataatagtgtgaatacaaataaagattgctttgaggctgaacacagtggtccatgcctgtaatcccaacacgttgggaggccgaggtgggggggaatcacttgaacccagctgtttgagaccagattgggcaacatagtgacaccccatctctacaaaaaaattttaaaaattagccaggcatggtggtgcatgccagtagtcctagctactcgggagcctgaggagggaggatcacttgagtccgggaggtcgaggcagcagtgagccgtgctctcaccactgtgctctagcctgggtgacaaaactcctgtttttggtggggggaaaaaaaagaaaagatttatttgagtatgttatagatgtaactgggaagctggtggttgagggaataagtataggtagggtatttatttatggcaataagtagccttgatgagagtttatcatgaatcact

SEQ ID NO: 16726 - DNA, 1035 bp, Homo sapiens
gcttttctcctctttttttcagagaaagttctgaagttctcttccttgccactggtatgtttgagaattaggccccacaattgttaggaaatgcagtacgtcaagttcttacagctacgtggcctgtctgtgcacctgtaatttcctttccctgttttttaatatagtataaaatactgtgctatatagtgtaaaatattacactgtgcacctgtaacttcctgtttctgttttttatatagtatattgccagtgggcaatgacaataacctcatttgaatgttactaagagctttgttaatatttgcaattgctagtagtgttgttactacgagatgcttttttaatgatgtaattttgttaccttttttggtttactaacagtagtatattgtcctggactacaattgcaacaaacacagaatgtattaaaggctttcaggaacaacttgataatcatggctgtaagccttgaattgtccaccctacgtttaggcccagaagacttctgagtaataagaactaatgataacctaaaaatgtattgttgttcttaatataatgtataatacgtaattgacaatacgtatatggtgtttattgggatgtcttttctaatctctttatatggtacatgctggcctattatagaaaattcatgcagtcattttttggttcttatcctttttgactctttattataattggtactgttggctgccttttccctgagatatttcttagtttgatttttaaaattgtttttaatctgctcaactagtcctgttttctttaattattctaccttccatgtcctagtgatggacatactttaagatgcaatccttgttagatacattttcccattttcatggtttcatttattctcaagacttgctgacataagataaacacggtatcttcagttggctgctggacatttctccttggatagctttctgtcacctagaatttttcatatctaaaactaaatctaccttttccccaactgaacttcccttcctctataataaa

SEQ ID NO: 16727 - DNA, 1050 bp, Homo sapiens
tctaaatgtagcaggttgcacaaactaaagcacttagtaaatgttcattgttgagttgtttctccatctaggcatggtagatagtaactaggagcattgtagttctgaaagcctcatactcagatcagtccagtgatttaaactggactagaacttggtcttcatatgcctgtgtctgggtctgaaataagtaaatcaccttctcacacctaatgaaattcagtgggttgtccaaatagagattttccaagtagtactttttattctgtattatagcactttattccttgcaattcttatgatgaaatgtctgttcaccctaatgaagttatttgctgaatgccaccgatgttttctaagaatgccaccgatgttttctaactgtccatagtttgatttggattattgatgattggtgaatgtcagatgaacacagtgaatggatatcttactctgtttcttttatttctccctagattttttacccagaaactacagatatctatgatcgaaagaacatgccaagatgtatctactgtatccatgcactcaggtagtcaaattttcttggcaaaataaggaaattatgaataacatctgaattgagtgtgtagttttttatccttgaggtaagaatgaaaaagttttttgattagtttcaaaagttccaaataggataaaatactattatccgaacaaaatggtgagaaacagctgtgtttttctagggagtttggagaagggatttatttatttaatagcaggtaattttcttctaaaaacatggtatctttcataattgatctagtatttctgtgaactatgcattcacttggggtgcagtctcttgtttagttaggtaggtccttgccattgttaagccatttgttcattcattcaataatttttataagccggatgcggtggctcacgcctgtaatcccagcattttgggaggccaaggcgggtggatcacctgaggtcaggagttcaagaccagcctggccaacatagtgaaaccctgtctctactaaaaatacaaaaaattag

SEQ ID NO: 16728 - DNA, 1031 bp, Homo sapiens
tcattgagtttcttattgttttatggtgtttacttggtaattaaggcagatatctccagagcaagtgttccttgcaaggctctcttatgagtgtttctctgtgagattctaaattcaccatcccagacatggatcacagatggagctgtggctttgcatactgtaaggaagaggctaggctcatagcctggcccagggagccagtcttcgaaccccagttgttatttctctgtgaaaaggagcctctgtctctaatggggggtgcaatgttgctttctgttgtgatatacatcctgtaatctatataatctcagtgtttttgttggtttgtttttttgtttttttttttagtacatgctgctgttattgctattaatgaagctattgaccgtagaattccagccgacacatttgcagctttgaaaaatccgaatgccatgcttgtaaatcttgaagagcccttggcatccacttaccaggatatactttaccaggctaagcaggacaaaatgacaaatgctaaaaacagggtaaaaatgcaacatctattctttctaattaatttatattattccgtcatttgatatggctccagtttaaacatcagttttattgagatgcagtttacatacaacaaaattcaccggattttaaatgtacagtttgagttttgaaaagtatatgtgatcatttaaccatcactcccagaaagttccttagtgcacttttgcaattagtttccaccttacccacacccctgagcccaggcaactaccagtctattttctattgctgccattgacctttttaagaattttatacaaatggaatgatgcagtatctaatcttttggtgtgaggctccattttgacctctgcttcttgaattttatataaataaaattctagagcgtagccattaaaattaatagtgccctttggaaagattatctctaaatattaacatagtctttcctctttcccagattctctggggtaaaatgtttgtgtacagttgttatgggtatgtgg

SEQ ID NO: 16729 - DNA, 1099 bp, Homo sapiens
agtttttatggctgaataatattccattatgtgtatacactacctttttttttttttttttttttttttttttttttaccatttattcattgatggacgcttaggttgatttcatatcttggctattgtgaatacagctgcagtaaacatgggagtgctgatttcctttcttttggccatatacctagcaatgggattgctgaatcatatgtagttttattttaattttttgaggactctccatcctgttttccgtagcggctatagtaatttatattcccatcaacagtgtatgagccctttctctgcagccttcccagcatttgttattttttgtctttgataaaagccattttaattggggtgagaaagtatctcattgtggttttgatgtgtatttccctgatgattaatgatgttgagcattttttcatatacctgttggccatttgtgtgtcttcttttgataaaaatctattcagcttatttgcccatgtaaaaattggattatttgtggggtttttttttgtttttttttttttggctgttgtttgaatttcttatatattatggttattgttctcttctcagatggatcgtttgcaaatgttttctcctgttctatatgttgtctcttcactttgttgttggtttcctttgctgtgcagaagctttttagcttgacatagtcctgtttgtctatttttgctttcgttgcttatgcttttaaggtcttagctaaatggctttgcttagaccagtgtcctgaagcatttccccaatgttttcttccagtcgcttcatagtttcaggtcttagatttaagtctttaatctattttgatttatttttgtatattatgagagatagggatctagctttattcttctgcatatggttatccagttttctcaacaccatttattgaagagactgtctgtctcagcccattttacgtggctataaagggatacttgaagtggggtaatttattagctcacagctctgcaggctgtgcaagaagcaaggcaccagcatctgctcagcttctggtgagggcttttgtgctgcatcaaaatatgaaggagaagatcaaagg

SEQ ID NO: 16730 - DNA, 1042 bp, Homo sapiens
tgcagtactttctcaaaggggaagttacattgtcattgatggactgttgaggacttttaagttttaacttggtgctgcactcctgttacttaaaccagagttgtttaatgaatgttaaaggggaggaatatatactgggggaagatgctcagtaagctcctgtaggtcgttagacatattactaacagacattcaggattcctagagaaaaacgacagtaaaagattttcaaaaggtcatttacttccctttggcaatatttcccaaatcgtgtgtggaacaagtcaaaaatacacctgtggaaaaactgaaatagtccctttatttaggagttaacatcagatgggtgatttctaccttgtggttaaagttctctttatatggtgggttacagtctcttacccttccagtgtttcatcttcattgctaatgatttcacaggtgatgaaatttaaattcattgaactctgttctgggcattgagaagacagaaatatgtatcagagagtctctaccttccattgtttcacagtgttgtgaaaacagcagacacaaaaccgagtactgtaatgtaaggcagagagaagtggtgctctaatcacagcacaataagggaagtcttaagggaatttttcattttgtcctggagtaacatagcgtagataatattttagcagctgaggaaaaaaagaaaaggctgttctagacagaaagggaaagttaaggatgagcttgctgaaattataaaaaggaagtaggagagaaaatagaaaaggaaaaagcacagagtactgaaaggacatggaccactgaaggagaggcgaatggtgtattacctggcacgtggtaggagtggcaggacaagaggcccaggttgaagcttgagggcctaatgtgctgtgctaaggaattcagggtacaacttctagcagagtgatttttaactcttgttagttcagggacacctttgagaatcttattaacctccacagaaacactcatgtttgaatagtgttttgcatatatggacctaagaatttaa

SEQ ID NO: 16731 - DNA, 1030 bp, Homo sapiens
ggggttactctatgctgattgggtcatgttaaggaatttagctatgtttgttagctttttataaggaaagcccatctacatgaaagtacaaagtgcatgtgggtgacagcagccttatttgctaccatgatatgtgaacaaaagatgccctgaaatacttaataacagactttaagtgtgtcatttttaccttctgaatctgctctttcattaactactggcagtagttttcagttctgttctcattgttttcctgtattgaacaaagggatatttcatttagttccaggccatgagagagagtgtgtatatgtgcatgcatgcgtgtgtatatgtattttttatttattttttcctcataggactgcattttctgcttttctttgctagcaaagtcatttatagcttccttggtggtatgtcttttaatacccatctttctgtttcgtctgttccagattattggtaacttgctttattatcgatacatgaatccagccattgttgctcctgatgcctttgacatcattgacctgtcagcaggaggccagcttaccacagaccaacgccgaaatctgggctccattgcaaaaatgcttcagcatgctgcttccaataagatgtttctgggagataatgcccacttaagcatcattaatgaatatctttcccagtcctaccagaaattcaggtaaggggaaaggcacaagtgcttaagagagtctgtggatgtatttttattgttgaggggaaaaataagattaaaaaccacctctcactttccccggactgccatatgtagaagacgtgtttgatgtgcccaggattccagaagatgatccatttactttgaagagaattttcatatgaaatagatagtagttaacacttatgaaatagatagtagttaacataaaaataatgatgattatgcatttagtacatgttaccttgtaatcagagaagaattggagaatgcttttaatttttgtaaattaacatctagttttgaattcagtgcttcagagca

SEQ ID NO: 16732 - DNA, 1021 bp, Homo sapiens
ttaattttttccctacacagctgaggggcgtagagtaactccttcactcctgggattcagtaccattccctcagctggcatacgaagctctcctagttacttgttaggtacttaagttcccagaaggacatgggaggattaagacactgttaaattcatgggagtgttctcaaatataatttaaactaaaaatagaagcaatttagtaatatttcccctgttttgcagagatattgcttaggctaattctaacatttgtttgccattttagagttggtatgttacttatgcttatgtctggaagtttggtttctgacatgtttccttcagttaccaatgatgaagattcagagtagatggttacttatagaaagtgacatgatgtgatttttacagagtctccaaaaagcctagggaaatgaaaggaaagaaaagcaaaaagatttctctgaaatatacagcagcaagactacatgaaaaaggagttcttctggaaattgaggacctgcaagtgaatcagtgagtctttgctttttgttttataagttgatttttatttctacatttatcacatctttgcctttttgtcttcatttctcttttctggatggttacttttagtattttttatgtatttatatatttttatgtgtagaattaggcctcatactcagagttaatttgtcataaaagagtttttcttttccttgtttgtagaacatttgtctcaggtcatgttcacttatttgggtctgatcttaatttttcctcattaaagcaggaagccattccttggatttcttctgtttctgaaccaagaataaattaagagtaacaataagaggagtttgctttattccacttatagctaggaaccaggcacttatcttcatttgcttttctgggaagtatcagcttgctttgcacgtggttcatggacctgacatgtcatcctcccacaggtcctgggcccagcgtcattagcaagcatttattgagcatctgctcagtcagccctgtg

SEQ ID NO: 16733 - DNA, 1025 bp, Homo sapiens
aaactagtgacccataacatggatgaaatgggaaaatgtcattgtgacttctgaaataaaaagcttagatgtgtgtggcaattgaacatgtttctttttctttccatgtatgatgaattttgatatgaacaacatgacttcctaactccaaatcaaccagaagcctcccttggccaatgtgccctattgctccagctctcaggctggttgtgcagtgggtagttgcctagcgtggaacttttctttcgccccagttcacatctggcacacaaggcaggcctcagtccatctggatccctccctacattgtgtcctttttccttgttccacagacttgattaactgtcaaaatgttttgttttgttttgttttgttttgttaataggacctgctgcagctacagtatgaaggagttgcagtcatgaaattatttgatagagctaaagtaaatgtcaacctcctgatcttccttctcaacaaaaagttctacgggaagtaattgatcgtttgctgccagcccagaaggatgaaggaaagaagcacctcacagctcctttctaggtccttctttcctcattggaagcaaagacctagccaacaacagcacctcaatctgatacactcccgatgccacatttttaactcctctcgctctgatgggacatttgttacccttttttcatagtgaaattgtgtttcaggcttagtctgacctttctggtttcttcattttcttccattacttaggaaagagtggaaactccactaaaatttctctgtgttgttacagtcttagaggttgcagtactatattgtaagctttggtgtttgtttaattagcaatagggatggtaggattcaaatgtgtgtcatttagaagtggaagctattagcaccaatgacataaatacatacaagacacacaactaaaatgtcatgttattaacagttattaggttgtcatttaaaaataaagttcctttatatttctgtcccatcaggaaaactgaaggatatggggaatc

SEQ ID NO: 16734 - DNA, 1045 bp, Homo sapiens
caattcactccatccctatggcagaggaatgggttagccctaatgtagaatgtcattgtttttaaaactgttttatatcttaagagtgccttattaaagtatagatgtatgtcttaaaatgtgggtgataggaattttaaagatttatataatgcatcaaaagccttagaataagaaaagctttttttaaattgctttatctgtatatctgaactcttgaaacttatagctaaaacactaggatttatctgcagtgttcagggagataattctgcctttaattgtctaaaacaaaaacaaaaccagccaacctatgttacacgtgagattaaaaccaattttttccccattttttctccttttttctcttgctgcccacattgtgcctttattttatgagccccagttttctgggcttagtttaaaaaaaaaatcaagtctaaacattgcatttagaaagcttttgttcttggataaaaagtcatacactttaaaaaaaaaaaaaactttttccaggaaaatatattgaaatcatgctgctgagcctctattttctttctttgatgttttgattcagtattcttttatcataaatttttagcatttaaaaattcactgatgtacattaagccaataaactgctttaatgaataacaaactatgtagtgtgtccctattataaatgcattggagaagtatttttatgagactctttactcaggtgcatggttacagcccacagggaggcatggagtgccatggaaggattcgccactacccagaccttgttttttgttgtattttggaagacaggttttttaaagaaacattttcctcagattaaaagatgatgctattacaactagcattgcctcaaaaactgggaccaaccaaagtgtgtcaaccctgtttccttaaaagaggctatgaatcccaaaggccacatccaagacaggcaataatgagcagagtttacagctcctttaataaaatgtgtcagtaattttaaggtttatagttccctcaacacaattgctaatgcaga

SEQ ID NO: 16735 - DNA, 1025 bp, Homo sapiens
catttattaatgtattcatttgtcagtatttgagtgcctactttgttgttaatggggtgtgtgtttgtgagggagaagagtgaaaacatggggctgtcctttaaagatcttactgatttgttccacaaatttacttactgagtgagtccttagtgtgtgccaggggttaggatggacactgggtatatagtaatgagcaagcaaaacacagtgtcccagtggattttaggatttaatgaggaagacattcatttaataagtaaggacacattttggtgaatatcaccaaaacagaagtaggtggagctctggacctgtatggtagggaattctcacctcttccagtggcctaaaggctcagggggagtgggggaggcattcgagggtttgtgtgttgagggagggaatatgttgcaggtacagagaacagagattcagtaaaagaggatgaggaggggatgtgagatgaggctggaggcattcatagggatcaggttgtagagacaggatttggaacttgatcttaagggcaatgggaagtcactgaaggggttaaactatgtgagatttgcttttttaaaagattcctctagctccagcgtggtgggtagaagagaggaggaggaggattttagtaggagatgtgatagtggcatttactaagatggtggcagtcgggaggcagagcggtgagcagattgatacttaggaggtggaaagggccagattttgtgaatgggtgaggaaggtgagaaagagggagggctggaaccatttcagggtgttcttcattaagtggacactggcaggagcaggtttgtgcggaaatgctgagtttgaggtgcctgtgaggcacataagtagagatggtccagcaggcagctgtttagatggttttgcagctcgagaaggaaggctgagctactgagaaaaatgggggaatttttgttatgtagccacagaagtagatttggctgcctaggaagaattgatggaacagatattgtaaactggtggcttaagtt

SEQ ID NO: 16736 - DNA, 1036 bp, Homo sapiens
actgtttttgttttgttttgttttgtttttctttgcaacagtcacaaacttacacaatacttggaagtatagtccacttaatttttttttttttttgagaccgagtctcattctgtcgcctaggctggagtgcaatagcgcgatctcagcttactgcaacttccagctcctgagttcaagagattcttctgcctcagcctcccaagtagctgggatcataggcgtgcgtcaccacgcctggctaatttttgtatttttagtagagacagtgtctcaccatgttggccaggctggtctcgaactcctgacctcaggtgatccgcccatctcgtcctcccaaagtgctgggattacaggcatgaactactgtgccctgctgacataacttttttttcacttgggaataagttcctgacctgatgccccatcaccccctaatatttcactgtgtttttcctacaagcaaagacgttgttctatataaccaaaatacagccatcaagataagaaaattaacagtgatccattattacaatctgatcttcagactgcattcaccaaatgtccccctgctgtcctctgtagcaaaaggattcagttcagaatcacatgcagttattgcctgcagtctccttcagtctggaacagcttttcagccttttatttttgacattaattcaagtactcttaacgtttgtgatcctgtcacatttgaagattacaggccagtttttttgtagatataacccctcaattggggtctgcctaatgtatctttgtgatttgattcagactatgcatctttggcaggaataacgtagaagaagtgaggctgttatggtatcacattagggacatgattttgatgtgtcctgttaatgatgatgttctcttttatcaattaaggtggtgtccaccaggcatggtggctcacacctgtaatcccagcattttgggaggctgaggcaggcagatcgcttgagctcaggagtttgagccagcctgggcaacatggagagaccctgtctctactgaa

SEQ ID NO: 16737 - DNA, 1041 bp, Homo sapiens
aatatgtgctcattgtgtaaaatttggaaaatatgtaaacattaaaaaggaacagaaaaaatgagccatttttcatcaactagagattaccattttaatgttaagtttatttttcatgtatctttatacaggtgatatcagtcttcatatttatattatttttttctttttcaaccattatataataattatttccctatgtcattaaaatactttataagtataattttaatagctaaataatatttcatcatatatgacttataatttacaagcatttccccaacggacattttagttgattctgatttttttaatgaataatatggtaataaacacttttatgtatgagtcatccatatttctgatcatagatttccacaagtagaattctgaaaccaaagggtagaaatatcgccaccgttgttaatagatgtggtttcattactttttggcaatgatatttaccttagcaaaacttctgacactgatggatttggatatttattaccttaaggataggagatccttagctttttcagatctgacgttccaagtgtatgttgactgttcaagaatgactccaaagttcatgacataaagtagtttgcatatttactgaagcacaaaatttaatcacacgggcctagaggctggtgagtgaccaaggctgcctagcaaatgtttcattggggcttcatggatctctgtgtaatacgtcttatatattgacttaaaaacttaatttgtttgaaaatggacagcttttgtgaaaatcaaaagggccattaatttatggtatacaattatgcacagaaaatctacagccgtcagagaaatatgactcaagaaaatactgagagttgatatagatactttcatattaaaatagaaggtttacaacggtctactacttttcaatgactactttctaattgcttaatagtatgtattgacttgtcatttctagaaaataaatctaatttcatttttagtgccaaccattggaattattctctttataatcaccacatggctata

SEQ ID NO: 16738 - DNA, 1031 bp, Homo sapiens
tgataaaaacagtgatctttactttggcttacaaaaggctcgtgcttcagcagagtgcagcaaaatgttccctgaccaaaacgactgtgtctgaagggcacagcttgggggaatacagctatgaaaaaaactacacgaggaacaaaaacattggatgaaaatagtggttgtatttggaaggtagaattataatcctccccttttctacgttcctaaattgtccataatgtggttatatttttttaataataaaagtccaatttaacaaatatttattggacactgcgtgtcagacacaatgcttgatgctggagatacaatgacccagacaggcacagtcactgcttggcggaacttcagtccagtgggagaggcagatgattttacaagtcattgtgacaccatgtgacaaacccacaatagaggagttcagagagtggctggattgtgtccgagtggtgcctaacccaaacgggttgggaggaggtcccaggaaaggcttcctggaggaagaggtgactaagctgggacctgagggctatataactgaagattggagtgaggagtgttctaagcaaaagaagctgcatttggcaaagcttggaggaactgaaagtttggtgacactggagcatagattgagcatgagaagggagtggtgagagatgaggctggagcttgaagtaggaaccagatcacaaaggactttgctttcttattaaggaatttggattttgtcctaaggcggtgtaaagctattggaaggatattcatttgcttgcctgcttgctcacttatttattcttccaaatttgttgtagaaactcaaataatatggaagcatgaaacatgaaaagtaaaagtctccccttctctacttcacaccctccccccagttctaatccccatggtacctattgctaagtgtttcatctgcaccctttctgcagttttctgggaagtatatgcaagcgtgtgtgtgtatatacatattttctttctacacaaatggaatcatgctatactgaata

SEQ ID NO: 16739 - DNA, 1032 bp, Homo sapiens
tacctggaaatccacaactctgcttcttttggaagattcacacgtcctgtttcattacagaaagagttctgccgttagcattagccatgtcactcccctccccggtctatctagcactggatcccagacactgatgtggagaaccatttctgtatggaggcacagaagccttctcttcctcatttgatgtctaggtcccatgttctgaaacagtagagtgcttttcagatcctgagcctaaggccctccttaaaacacatagagtcctatttacaggttcgtttctttcttgcttgctttctgtatttatttactagagacaaggtctcccctctgtcacccagtctggagtgtagtggcaggatctcagttcactgcaacctctgcctcccaggctcaagtgatcctcctgcctcagcctcccaagtagctgggactacaagcgtgaaccaccacacctgacaaatttttgtattttttgtaaagatggggttttgccatattgccaaggctggtctcaaacttgtgagctcaaatgatccacccacatcagcctcccaaagtgctgggattacaggcctgagccactatgcctggctcccatttgcagattcttttgacttacacctcccttgttcttcaagaaaatggggccaggcacaatggctcatgcctgtgatcccagcactttgggaggccgaggggggtggatcacttgaggccaggagatcgagatcagcctgggcaacatggcaaaaccatctctactaaacataaaaataaaaaaattaaaaaattagccaggcatggtagcacatgcctgtaatcctagctactcaagaggctgaggcaggagaattgctcgaacttgggaggcagaggttacagtgagctgagatcacgccactgcactgcagcctgggtgacagagtgcgactctgtctcaaaaaaaaaaaaaagtaagaaaaatgggactctctatttcattcagtctctctctgtcatcactaccatattagccagctttgcttt

SEQ ID NO: 16740 - DNA, 1030 bp, Homo sapiens
agaaagggccagggcgggtcttgttttcagcttctgtggctcagtaaccccacccactggtaaactggccaactgatgtcctctcttatcagaagaagaagagctgctccccttcctttggtgaagagtaagaactgttccctctaacactccacaggttgagaggaacagcagtccctgtgttgatggattgaggcagtaactcgaggaggaagattttcctgcacagaactgcagaggcttggggagagagagaacacactgggatgactctgagatcctaacatgagtgtcttggtggacggtggcctcactaaatgagatggactataagaagaggaacagattaaggggacagtgattggttggatttttggtagaatttgagctgtcttgggtacttttggcagagaacttgagtaggcagttggaagtatgcacttggagttcacaaaagaactgttgggagctggaggtgtcgatttatgagttactggactgtgggtgacagtggggccgagggaaggatgcgattggccaaggcgagcatggaggacaggggctctctaccaggaagacgggcactggccctgaggctcttaggaagcgcctcctaaagctcctgtgcccggaggctcccgccaccccctccacctgctcacactctgcctggtgcccagggatcctgagagcatcctttgcctctcagagcaatgcaggcaggtgtggcctgaggctgcgaggccacaggaccccagggaacatcaggacggaaggcaaaggggcggaaaggagtgcacagagggataagaaaagatccatgtgagtgtggggatttttttttttaactttaatttttgtttccatccattgcagccacctcttctttgtttatctttttcatcatccctcctccctgccttccttttttaatgtggaaatcttccttgagccaaaggcttcactaagcttaactaaggaagcaatggaggaggcgctgatgtggttgttaaaagccctgtgacctgtg

SEQ ID NO: 16741 - DNA, 1725 bp, Homo sapiens
ttactatattttcatgttgttaatatcaggaaggttaaaatgctaacttacacctcaacattgaaatcaccagcgtttgatgattacgtgactattacaccactgcattctaatttgtattatcagtactatgagatcagagatactgagtttaaagatggcagtgtactgagaaaaatggtaaacttctacttcctgaaattaagcgtttctgaacagagattcatcaaatctgcagaaaagagaaaggcagataaccgtaggttctgaggctcggtgtttcctccctaatggctttgccaacagaaatactgacaggttttgtctgtcacgggccttactatttatcaccttttcctctcctacctcctactgtggtcttgcctcatctgtacttcatgtaccttaagcctaatagtgaatgttgaagaaatgtctctctttggaaattatctgttttattttattgatttaaggtcaaattaagaaataagataatgagacttgtcaaagaaaacgaatacatagaagatgaaacttgcaatcctaatgcctctcctggcaaagaagacatttcccaccaaatcactaagaactcatgagagcctccgttttcctaattccagattctgtatttatttgagctgcccagcccaggcctgcaggatagggccccactccatcaaggctcctgtttcctcctgagcccgagcagatggtaccttctcttatagcctccatccttcccagaacactccaggtactattttctattttctgggggcatttggcatagttcactgtttcctgagaggcagcatagcttagcggagagctctcaggctttggtgtcagtgatttgtgggtctgacccctgatccaccaggcgtgctatctgatcttggatttctcagctcttctagaactgagcctcagtttcttcagctataaaatggggaaaatatctgcctctcaggattgaggttaaataaagtgtgaactcagcacaggcctggcacacagtaggtgcttagatatctgttttcaaatttctgtcttaatgtgtagtttgtatcttctttattatttccaccttaagaaataaaagtttgggatgaaaagtattattggtaactgccgaatgtatatttaatccaatcagtgatccaggagacaaaaggaatgggcttggtttgggtgagtgataaggaggcaaccttccacataggaggtgagaaaggggaaatggccttagcaaaggcagaggggcaggaaaatacaggctgtgtttgtggaactcagaaagctggagggaagacaagagcagaagagaccattgtccccaaattgtggatcaccgcaattactaagccagtaagttttgattttgccttttaggctgaacaaaatcattgaagatttcttagcagaataatatgattaacagtgtcttcagaaggctattgtgtgggaacaattaactaaacgaatgaaaacagcgcccctctgctcggtgtgtagtgcagcatcccatttgtgtctccgtgcgtccagaatatgctccaaggcatggtagacccagtgaacaacacaagactgataagacagtgcccccaacaacactggaaagtttacctttcttcacacatctaatgcgcctcttttttggttataaataccaggaaccgccgggcgcagtggctcacacctctaatcccagcaatt

SEQ ID NO: 16742 - DNA, 1032 bp, Homo sapiens
tgaggtcaggagttcaagaccagcctggccaacgtggagaaaccctgtctctaattaaaaaaaatacaaaattagccgggtgtggtggcgcatgcctgtaatcccagctactcgggaggctgaggcaggagaattgcttgaacctgggaggtggaggttgcagtgagccgagattgcgccattgcactccagcctgggccaaaaaaaagagtgaaactccgtctcaaaaaataaataagtaccaggaacccaccttaacttaaaaaaagaaaatgtattggcatatgtcactggaagcccaagggctagatccaaggggtcatacaatgtcattgagacctacctctgtggtaccacttctgagatgacttcaggcataacagacaggctttctccaaggtgaagacccccaggttcagacagcccttgggcttaccagccctattggggcactccttttttttccactcaaaagcactctccttggttctgtttgcgtcgtgagccgatccctgagccaaacactgtttccagggggtgaggtacctagactagaatcctgggcctgggtccctcacatgtggcacagagggaatggcagtgttaccaggtttggagcaagagtggagacagttcctgaaaacaaaagttgccggacaggcaaaaaataataaacaccccacaaaaaatcatgcaaagaaaacaccggttagaagacagcagaatagacttgtcctcaaggagggagataagagaaagcatgaaggaagagctgtcaggtacagggataaggaaccaaaaactcagttgtttaactctctgtgagtccaccttgttaattctgcttcatctttccattaatttttatttttcctttattaaaaattctactttgatggtagtgcttttggagccaattattcctcacagcctctggatgagagttggccaaggtaagcaagacatactttaaaagatatgatgggcatgtgttatttttagataatttcactttatccactttgaatgttg

SEQ ID NO: 16743 - DNA, 1048 bp, Homo sapiens
ttgatgttggaattggatatgggtgcactgctcactgcttagaggagtggggtgtgtgggaagagggatgagtttagtttcaggataggtagagatgggaatatgtaaacaaagcctaaaaaaagcagaggctgtaatcagtgggggtgcctgtgagcacagcaggatcctaatctccatggaccgggagccagctagacagacagatttttaccctggagctcctgcatttctgcctctgccgatccttcatttacattaccctctgcaaagtttacacttctctagaaagggccaaaggcctagagaaacaaggcaatcacaggtaattcaagtgaggattttttgaggcttgcatgctaagaaaaagaaagtaactgaagaaagaaattacctgagctgaagtattcattcttagcgatgtagcctctgagagaagaggtgagaaatgtcagaaggggtaagtgaggatggaataagaaaagcaaaggaatgtaaacattggtccaggtagacagagcaatgagaaaaacaggaagaaagaaagaaatcctggatcagggttcctgcgttgacttgagaatcgtggtggtctctccttttcaaatcagcagttagaaattgttgggctacaatatctgacaaccatggagggtgggctggcctccaactcagatgtctgaactgtgtgcctgctcctgcagttgccttgcaagtatagcagaactcagaaacacatcctaatatggatgtgtttacatgggaaagccagtgtttaaaatattattcaagtctccaaggatggaaattatttctggagaattatatttgttggtgggagctattttaaatagtttcatgtattttcctcctgtgtttcattaaagtttttcattttctttccttttggattttaaaactatcaactggctttgcaaaaaggtatttcttataggaccaaccaaagaaagatttaaacagtgatgggaaaatataattgaagcccagaactgggttctatgttcgaagcaataataactcttctttc

SEQ ID NO: 16744 - DNA, 1020 bp, Homo sapiens
gtttcctggaacacagttgcagccttggtcatcgctgtcccatccctgtgggactgataaaattagtgtcctgtttccagagagccagtcacaactcattcctttttctttttaaccctttatttgtagtgctatcttgtgggtttttaatttagcagtaaaaatccaggcttggatattttgatgatatgttagcttggtgccagtatatcagtcattgccaccaccatccttctggtcaccgcagcccagaccctgagagttgcatctgattactcccattcccatgcccctacgcccattcagtagccgagtcctgttcattttatcccagcagtatgtctcaaatctgcctctggttttctgtcctcactgccagtatcctacttggttcctgtttgccttggactattgcattggttttctagtcggcctccctgccttaaggctttctcctttcaatccacctcctactctgctgcaagagcagtctctgaagcttaactctgatcatgtcacttctccaactgaaaccttccatcccctacatcctgccaaatgaccagcagcctgcttcggtccagcccatctcccagtcctcccaccatgtgctgcagccacactcttccatcttccttctccttcttatccttccccaaccaccccccactcctcctcctcctcctcctcctcctcctccgcctccacctcctcctcctcctccgcctcctcctccgcctctgcctcctcctcacactgggcatccccttcagcttcgcttccggttgtctaaatcttccaggtactacagcaaattggttagggacatgaacattctgaagacacacgggccagagttctagtcccagaacttactagcagtgtgatcttggggatgataatagcatctacgtcgcagagttgctgtggggatcccatgagatcacctgtgtaaagcgcctggcacatagtaagtgagcagtcaggttggctgttggttatcctcttcttcaccattat

SEQ ID NO: 16745 - DNA, 1354 bp, Homo sapiens
gataagtaagaatgggccaaggaccttctgcaatagagtctcctgagacgacaattaaaaatgtaggctgggcgtggtggctcacacctgtaatcccagcactttgggaggctgaggcagacagattacctgaggtcaggaggttaagaccagcctggccatcatggtgaaaccccgtctctaccaaaaaatagaaaaattagccgggcctggtggcacgcgcctgtaatcccaactactggggaggctgaggcccaggaggtggaggttgcagtgagccaaggtcacgccaccgcactccagcctgggcaacaaagtgagactctgtctcgggaaaaaaaaaaaaaaaaaaaaaaaatgtagattccttggccgactctcacaccttctgaatcaaaatctttgagggttgggcccaagaatctgcattttagcaggctcacccaagggctctttatgtgctgtaaaataaagctttcagtcacttacttagagtctggttctgtgggcctgaaagaaattctgtctttgtgtgtctgcttcatttatcgacctcttcgtattcctgggcactcttcctgttgcccctgggctctgttaaaatgttatatcttctacctgtgttatagaatgtgctaccgtgttaccctgatctgtcttctcacctacactgtatcacccggccccacctagcacttaatgcagaaacttattaaatatgggttgagtgaatggttattagacatttcattcaaattgtatagactaatcaggttaacctataggttaaccttagccaaaaactcatctaaaatgtaagtaagctatacttaaaggcttagaactttataataatgtatcctgattctgtactgaaaacttatttggtatatttgattgctcttaagggaatgctaagatattacattcttggcacggttctttagttttagcttagagcaataggaaatactatgctttgtcatctgcagtataatttatggattaaaaatacttcattcagccagaatttattccaagtcaaagttttaaaactttgtgaatagctatctcatgtaccctttaaattaacttagactccagataaatcttcttcttaaaataacttcactgcataagaaatatatataatatcctacagcatgaaacttcggatttgttcctgtagacacccatggtaagtatcaaacagtgatgtaggctttttgagttacctgctcttaaccccatgatgaagcatttggaagagaatttccatctatacttctttactttgtggtttgaatagagattctcaggctttgtaaaaattgttctcctctcaggacagtga

SEQ ID NO: 16746 - DNA, 1020 bp, Homo sapiens
agcaccttaaatgaaaatcagtgtatcaaaagtgccttagaattttcaaaattctatttcaaatcataaagagttactgattcataaattcatgaaaatgaaagtaccacataaaagtgttttctttttttctttttcctttcccgctaggtttctgtgatggtgagaataatggacatggggaaggtatgaactgattttacctacctatattggagtgggatgctgattagtggacataacctttcaatacctttactaataaatattcatgttttcaggactcccccaaatgctgacaactgctgattggcttacttttcagagagcctctagaaaattaaggctagccatgttcagggccaggagaaaggaaatatgtggttgcattacaaaggttcctttttatctaggtccccacagtcacaaggttgagcaaggaaccaaaaattgtaatcacatgaaaatatgaatgaattggcctggcacagtggctcatgcctgtaatcccagcactttgggaggctgaggtaggtggatcacttgaagtcaggagttcgagaccagcctgaccaacatggtgaaaccccgtctctactaaaaatacaaaaattagccgggcgtggtggcacgtgcctgtggtcccagatactcaggaggctgaggcaggagaatcgcttgaacacgggaggcggaggttacagtgagttgagattgtgccactgcactccagtctggcgaccgagcgagactccgtctaaaaataaataaataaataaataaataaattaattaattgatcacttaaacaattagttattccagtagtctacccatttagaacgtcttcgttgacagataacaatgccaggaaaatgcaaattggttatgaaatgaaaatgcaaaccttacataagatactgagtttcgtaaagccaattaaaacattgttggagatctatggaaatgacactcaaagccattgacaaatgagggtcagacacagttcatttatttact

SEQ ID NO: 16747 - DNA, 1032 bp, Homo sapiens
aaaatttatattcagtttttctacaaccaaaatgagccttcttcctcaccctccggttggacacctctcctgctgcctcatttctttccaaaactccacagttcgcccagtcctacttttaccaagaaaagtgaggcgaggctggcaggagtgagtgctcagctctcttctgccactgattcccccgtcaccacccttctctggtcctagggacaccgaggtccctcctagtcaggccggccactttaccactccctggccctcctcccgctggatttgtggaggcctttctctgctagttaactgtccctcatctccagaattctccgccatgctttctgaaagcatatttactctcaggtgttccttcctgcttacccatcatcagcccaccatgccctggctgccacctctgctgttcagtggaaccttgagaatgtcggttgcctcctgtacgtaactgagagagaaatatccctgctgcatgtcttcctagtgagcagaaactcaaagccaaaatagaattcgtgatctcatccatacccctgccctcattcccaatctgctcacatcttcagtgtcccctgtctcagtgaggggctccaccagtccccaggctaaaggccccagagttgttcttgagtcctacttccctgtctctagagtctagcctgcctctccctccctgcgctcgtggcctcctgctggagcgttcagcagagtcatagcggcctctccacctccaggcctgctccgtgcaccccaagaccccttccccaagtctgttagccacgctgtcctaagaaaagctgatacctctcccccaccacactgcccaccccgcgtccagccttccactggcgtcgtgtcagcctctcatcagtcccagcctcgggtgctctctacctgcttttccacttccatctcccaccactaaccagccctcctaaactcaacctcccgtggtctgaatcctcacagttctgagggcacaccatgtggtctcacacctccctgcttttgcgcatgctg

SEQ ID NO: 16748 - DNA, 1079 bp, Homo sapiens
gctgctatgacccacctgggtataagaagctcctctggtgagtatctcctgcttagcagtgacctggtggcttaatcataggtggtccccacccatgtggcctgttcagtgaatcattgaatgagaatgactgcatcccagttagagatgataatgtaccttcttgtatctcctgaccctgcggacatttttcttggatgtttctgtttctcctgggttgatgaatttggggcagctctgctgaacctcattccttatcatcctcactcgctgctctatccagggacttggggaataagatatgggagccaagaaataagcatccactccgtgttggctgaacagtattagtggctgtcatcaacatatgataatttataatttaggccatctctctggattcctttcattttccattagatttctaaaggcaatattctgcattttagaaaatttacagtggatatgatgaaaatatttatacttaatatctgtgtgtgaagtagaaatcccccacagttccagttaaagatgtagcattagctatataaagatgctacccataatgggacttgggtgttactctctgggtttgattgtccacagctcagaccccatattgaaattatgactacatttgtttgaagcctgacacttttttttttttttttttgagatggggtcttactctgtcacctaggctagagtgcagtggcacgatctcagctcgctgcaacctctgcttcccaggttcaagcaattcttctgcctcagcctccagggtagctgggattacaggcatgtgccacgatgccgagctaatcgtttttgtatttttagtagagacagggtttcaccatgttggccaggctggtctcgaactcctgacctcaagtgatccacccgccttggcctcccaaagtgctgggattacaggcgtgagccaccactgacatacccttgtcaatgtctagggcaggtgataatcctcttactcccagtggtgcagtacagcccctggccgtaacagtcctacccagaattgtgttgtggagcatttcatttggaagggatgctca

SEQ ID NO: 16749 - DNA, 1123 bp, Homo sapiens
taatagcagatttgctgtgttgattactctttaagcaaatgttgaacaatctgtagtcactaactcacaaacttggggttgagaggaacggtaggatatagagaatgccatccaggtaagtctaaggcaactgagggaaaccaggttaggatttcaaagttggcatggaaaatcagtcattgactctctaagtacattaagccataggggaaagccaaagaaaacatttaataccttcctgaagctttgataatgaattagacctcttccctaattgtctacagatttgagaaacaatacttttattgttcatgaaatgctaagtatgttgaggattatatctcttataaggatgaaaagaagtctgttgagaaagaggcacatttaaaagtcacccacccatacaaaaaatggaaaaattagctgggtgtggtggcacacgcctgtagtcccagctactccagagcggaggtgggaggctcacttgagcccaggaggtcgaggctgcagtgagccaagatagcctcactgcactgtagcctggcaacagagtgagaccctgtctcaaaagaaaagaaaagcccattatagaaacacaggggttgaaacatcctataaattctaaactcagaggtggttctccttataccataatcatcgaggaatgtgttttcaaccttttgtcacatcctctgtctattacagcatcattttttttttttttttttttttttttttttttgagacggagtctcgctctgtcgcccaggtcggactgcggactgcagtggcgcaatctcggctcactgcaagctccgcttcccgggttcacgccattctcctgcctcagcctcccgagtagctgggactacaggcgcccgccaccgtgcccggctaattttttgtatttttagtagagacggggtttcaccttgttagccaggatggtctcgatctcctgacctcatgatccacccgcctcggcctcccaaagtgctgggattacaggcgtgagccaccgcgcccggcctattacagcatcattaactactcaccacctcgccataaattaatgatttagaaggaagagttgacagaacacaacggagagttagaggatctt

SEQ ID NO: 16750 - DNA, 1046 bp, Homo sapiens
aaagtagagaacataatacaataagtcctcctatacccatcatttaccctcaacaattaattttttttttttgagacagggtcttgctctgttgcccaggctggagtgcagtggtgtgatctcggctcattgtaacctccgccatccaggttcaaaccattctcctggcctcagcctcccgaatagctgggactacaggtgcacaccaccacacctggctaatttttgtaatttttagtagagacgggatttcaccatgttggccaggctggtttcaaactcctgacctcaggtgatccacccacctcagcctcccaaagtctgagattacaggcgtgagccagcacgccagccttgttatcttgtttcatccataccctgcttttaaaaattgcagatattttaatatgtatctctaatagataaggattttcttagtagcctaaatattgtcatgctgattttggtttttcacaactacttcttcctgcacacatctttccaagattgtgtgtgtctgctctggcctctgactttcacggcagatggtttcctcagggcctggtgatcctcagtgctctgctcatgtttaagaacaggacactgaggggctgtctccttgcggctctacactagagcggagtatgagactgaggcgaagggagtcatggcaggacaagcgtgtagaaagttttttccactctctgactgagtattggttggaaggagcgctgctaaaactgtaaccaaaggaggcattttgcttccagaaaaatctcaaggaaaagtattgcaagcaacagtagtcactgttggatcgggttctaaaggtaaggctggagagattcaaccagttagcgtgaaagttggagataaagttcttctcccagaatatggaggcaccaaagtagttctagatgacaaggattatttcctatttagagatggtgacattcttggaaagtacatagactgaaataagtcactactgaaatggcatcagtgtgaagctgcccattccactgaagttctgaaatctttcatca

SEQ ID NO: 16751 - DNA, 1050 bp, Homo sapiens
gcaggtccaactgccccttacacaaactgtgaccagaatctcctggttttagcttcaccgcctgctccctgctgtccccagtcccagagccctgtggggactgagtgctgtcagtgagattgcctcctggtttttcctcactgccagcctagcatcgggttttctcagctctgctaagccagctgccaccgggccatctgctgctcattttccagcttttgttgccattttcttctctcccgttatctttgtcctcgtgttgtttgttatcatttagtgttctgtgctgttgtttagtgttttttattaatgcttattgcttgttaatgttgtagtgtcttgttttaacaggatttggggatgacagagctaagggcctttttcaattttccacttttaaccagaagacacggctataaaacaaaacaaaacatgattttcacggagaaaactgaaaggaaattggttaaattggctgttttcttgtttagttcttttaagacaatagaacttgtcattgaatggaacatgctttgtggggaagtaaaatttgagatatactttgaaggatgagaaacgggcttctcacagcattgcacagaacaccgcggtgaggaaaatctcaggcttcctctcactctgacatttcctaatcctaaaggacttaacgccagaaacgcagaagctcattagtggctttgtgtgtttgttttgcagatggtgtcctcagaccgaagccaactttcctttctgcccacagaagctcaagcccaggtgtcgccgccacccccttaccctgcaccccaggagctcacccagcccctcctgcagcagccccgcgcccctgaggcccctgcccagcagccccaggcagcctcctcactgccacagtcagactttcagcttctcccggcccaggtgagttctggcaggagcgttggtgcagagggaatgcttgttttgctctgagttccaagctaaatgatcatctccttattccctgaagggctcatctttgaccaacttcttcccagatgtgggttttgacca

SEQ ID NO: 16752 - DNA, 1023 bp, Homo sapiens
tgggcgcagtggctcatgccagtaatcccagcactttgggaggccgaagcaggcagatcacgaggtcaggagatcaagactatcctgtccaacacggtgaaaccccgtctctactaaatacaaaaacttagccaggcgtggtggcatgcacctgtaatcccagctactcgggatgctgaggcaggagaattgcttgaacctggaaggcagagtttgcagtgagccgagatcgtgccactgcactgcagcctgggtgacagagtgagactatgtctcaaaaaaattaaaaaaaaaagatgtgtatcttgaattgtttaatgaagcaaataaattagcctaatagaaattacaaatatacagaataagaaatggtaagtggtaagtaaccactgacacaggatagtttttataacaggattaatttatgtacctttacgtaaacaaatttgaaaactaaaatgaaatggataattatgtgtgaaaatctagtttaccaaaattgactcaagtagatgttggaagttaaatagctcaatttccattgaataagtttttaaagttatgaaataactgtctcactgaaaaataaaaaacatgaggtccaaatggtttaacaggaaaattctactacatttatggagtccaaataatcctaatgctaaataaattgttttagaacgtagaaaagaaggaaaacttccaaattctttattttccaaatggcttggtattgtaaatgctgatttagttgtctgtctccagttgttgaagggctgaagtgaaataaagtaaaacatcttaaaacactttttagttcttagaccctcttttttaaagtagctttattgatatagactgcacgtatttaaagtatacaatttgttcagttttgacatacacacatcatcaccataattcagttaatgaacatatccatcactctcaaaagtttcctcatcccccttaattctgccttcttgctctcttcttgccggtcaaccacttatctggtttctgtcactg

SEQ ID NO: 16753 - DNA, 1032 bp, Homo sapiens
aaacctagtgtacaattcactgcccttgatttgtgaaagatattttttctgggaaaagaattctgggttaatttctatcagcacatcgaagatatcattccactgtcttttgattttcatttttgctaaagagaaatcaattttttgtccatatggtacactgatatatttgggtgtggatttctttttatctctgcttggaattttttggctttctcaaatctgaaggttagtgtctttaattagtcctggaaaagtcccagctgttatcttttcaaatattaattcttccctattttctcttctttctggaactctggctagatttatgttagactttctactctgtcttccatgtctcctaacttctcatattttccatctgttttctctatctctctgtgtgtgcatctattaagtcaaaaactatgaagggtctgagattttaccctacatttatagctatatttatctttagccacttttctgaagttctaattatctattgttatgactgattttctttgggttgtattggtatattatcaagttgtctacatataatgataatctcatctcttctagtatttcctttttcgaatatttttgcattggcaagagcatccaatatgggagtgaaaatgagagaacaatattgtttttgctgttgtttttaatggattcacccctagtgtaaaatatatggtatttgttggttctagattttaaacacttgtaattttgtgttttaatgtgtttgttagacatggtttgagttttattaggtgccttttcaaaaatgcattgataatacatactgtgtgattctatatatatgaatcaagaagtttaagaaaccatgaacgaagagaacatatgacataaaattctgtcaaaaatctctctttgtctagaaattgtgtttgatgtttaattttatcagagaacagaaagttgcttgccccagtgccccagttaaggtaaagctgaggttcataaatacctcaacttaaaaaaatacaaaaagtagat

SEQ ID NO: 16754 - DNA, 1019 bp, Homo sapiens
tgctgggattacaggcgtgagccaccgcgcctggcccactttaaggtagtttctgttatccccatttaacagataatgaaactaaggtacaggagcgttaaatagttacacaccgtcatagaattagcctcagagctaggatctgaacacagcagtcttgaggcttttgagttttcattgataacaactgcattatactgtctctgtatcattaagtttcactaataaaatggttagctagaacaggggcaaggacagagttctacagcatgtcaatagaggcttccctcttggcttacaacagtccattcatcaccacttcttgttcagctagttacatatctgtcttcagaccatgtttctgttctttatccatggagacacaaaagacttgactatgtgactccaaaaagttagaggtgtgaggcagcaagaaggaatgggtgggacattgactctagagtcctacagacctgtaatagaaacctgtctcctcctactcttgactatgtgactatggcaaatagttaaacttctctggacttcagttttttcttctataaaatgaggagaatgatatctaccttgctgggtagttgtcaggattcaagataaagtgcctagtacactgcaggcctttcataaatgataactattgttatctgccagtctagtaatccttttaaaaaaggaaatacattaagacggatggtttgtttttatgaacttttgctaactctattattgtttcctcccccttagagctcacaaagcagctatttgataacaggctctagaattttgctttgaatttacatcaaatcaccagcctgtagtttttggcaatcactttcaaattttttgaaaattagaacaatgtttgtctgtcctcactttccatcagttctcttattcactagatgcctcacacacgtgtcagtgacaggggctctgagatcctgtttgcaggtttcctttgtactctgaggtataatctgtctagacaaggagtcttgggc

SEQ ID NO: 16755 - DNA, 1039 bp, Homo sapiens
gagtgtcttaaatcagtcaaactacttctttgggtctaagggctcactgcatgccatgtgctatgttgggcgccgatcatttaaagatgaataacaaatactaagtagttcctgccctcctggagctcacagcttagtgagagagaagttttgagaggaatgaaattagccactgaaggctccagagaaaagccaaaaataattttaaaaccttacatcaaccctataaagttatcaaaagtattttttagctgaaataagtttataaagtacagccctccctatttttgccattgatgacttaataccacggaggtttttcttacagttacgctgctgacctttaaaacaacgattaatggatttatttttgtatcatgttagaatgtgtcatacttgatgtttgcaattatcttgagacagttgagtgttggggttagcgtaactgccagagctccgtgagtacctcttgttctctgtgctgaaccagagttgcgacagccaggctgcagagcaggggcacgtgtgagagatgttatgaaagaagagcctgaggaagctcagatgactccaaggtttcagacactgatgactgggaaaactgtgacaccagtaacacaaacaggggagtcaggaggcggagtcagatttggagaaaagctgagaagggctagtttaagtctagaggttaaagtgctggtaagtcattcaggtaccaatgtcttgcagacaacgggagctgtgtgcaggactggaacttaggagggtgtcagttgggtcttaagagaggtgtaggcatttgctgcacacgggtcatgtttaagatcataggactaggaaagctccaaaaaagaatgtctacagagcccagtcccaaatatctgaaagactccctcccctatttatggggcagatggaggtagtagagccaggaaagggaatttaaaatgagtagaaaaccatgattgtcttggtggtcatggttggaggaagggagaagaggaaggaaagaataaaagtagtggtaggtgctgtagaa

SEQ ID NO: 16756 - DNA, 1063 bp, Homo sapiens
ggcggaggttgcagtgagccaagatcacgccactgtactccagcctgggcaacagagtaaggccctgtctcaaaaacaaaaaacaaaaaacaaaaaaaaagatgtcatattatactttagattctaataaataacctatttgcaagtaagtacttctgtaagtactacattgatctataatttttttttttttttttttttggagacaggtcttaccatgttgccatgttacccaagctggtctcgaactcctgggcttaaacagtcctcccatctcagccttcctaagtgctgagattcttctgtcctcttacgccggatgcaatctactgttcttttagatcagttacatcaatggcaaatgcctatagttaaatgataaaaaaaatttcttttccttttgaatgactttttgtaagtataggatttgtgatttatgtttgagtaaacagtgtacatatttatttatttatttagaggcaggcaccttgaatctgttttcttagtactgtggggaagagatctgcctgggaaagcaaggttgtggatttccagtctccagcacttggtacataattggcactcagtaataatcaataaatgaaaaatgtgaaggaatttgggtaaatgtaaaaatgtaggcatgtctgttgactccttaatgtgtttggcacttctctgcatttggaagtaggaaattttaaggaatactttctgggactctgtttcctgatcttttctgccagtaggccctggtttggattaaatttgctcaactgctgctatgtcgtggccctggcgaagtcaggtattcctaaggttgaagccacagcccctgtgctgctctcctcccgccagtctgtaataatattcttcctctttgggaaatataaggcacacaaaaaaggctttattccatttccttagggccttaaaatatgaactggaagagagcaaagagacaggcacatagagttaactataatagaacaataataatagctaacacttacatatccagcctactcagtgtgccaggcactgttgtcattttaagtgtatt

SEQ ID NO: 16757 - DNA, 1046 bp, Homo sapiens
catgcctgtaatcccagcactttgggtggccgaggcgggtggatcacctgaggtcaggagttggagaccagcctggccaacatggtgaaaccccatctctactaaaaatacaaaaattagccgggcgtggtggcatgcacctatagtcgcagctactcgggaggctgagacaggagaattgcttgaaaccagaaagtggaggttgcagtgagccgagatcatgccactacactccagccaaaaaaaaaaaaaaaaagtacaggtcaggcccaaggaatggtgaataatccattggataagtggagaaacatagagaagggatgaccctgacaaggtggcttgacgccagatcatggaggatcttgcatataacgatggtaaaatgtttggactttattcttttggcactttaacctgggaagtggcttgatctgaactgtgtggatgaatgataaccctggcaagagaatagaggagaggatgagtgagagaacagaaagttagaggtagagcagcccttcaggaacttattgcctattgcagtcattgaggagagatgatgctggtggaaacagcagaagtggaaggaagaaacagagtcaagagagagggcaggaatggtaactaaatggaatgagaagagtggatacggttgaagtttatactagttcctggggcaggtgcctagaaccattgaccataaatggaatggaggaaggaagatgagtaataaatttgattttagatgcatgatgcctgggatgtttaagggatgagtggatgaccacgatagccatcttcataccttctttggtcacatgtacctcctgaaaaaatcctggaaaactatgtacctcctgcatatatacatatatgttttaaatatatatataatatatatgtattttatatatatgtgtgtttttattttttatatatatatgtgtgtgtgtgtgtgtgtgtattttagaccaagtttcactcttgtcgcccaggctggagtgcaatgacacgatctctgcaatctccacctcccgagttcaagt

SEQ ID NO: 16758 - DNA, 1041 bp, Homo sapiens
gctgatagcggccatctcagccatagagggaggtgaagcctctgtgatctccacccccgcaccccctcaggacatggcccctaaaagcaccatcccatttagggtcacccattttcttcctaggagctgtggggctttgcgaataactccctatggctgaatctgctttgctgaactaggaaaccctagtgagttgtatagatgccattcatttaagaaccttgaaaagccaacatcttattcccatgtaaaacatacctaggtgatttggagaatacagtgacacaaagaagaaaataacaattacttgtaattctcaccatcttgagagaaccaccgttaacattttttagcgtgtgtatccttccagatttcgctttagtttgtataaatatacatgtataaatagtttttaaaaaataaaatgggattatgtgtacatactgctttataatgcatcttctttaccttgatcatggtgaacatttattcatttgttgtttctgattttgagtgactcagggcttgatagtcttcatcctgcttcttctgttacacttttttttttttttttttttttgagagggagtatcgttctgtcgcacagactgggaatgcagtggcgcgatcttggctcactgcaacctccacctcctgggctcaagcaattcttgtgcctcagcctcccaagtcgctggcactacaagcacccgccaccacacttggctcatgtttgtatttttagtagagacgaggttgcaccatgttggccaggctggcctcgaactcctgacctcaggtgatccacccgcctcagcctcccaaagtgctggatgacagaagtgagccaccatgcctggcccttctgttacatttcttatattcttgcatggagaaaggattgggggggattgtgagggcatccatctgtccatctatgtggctggccttgggggctagatttcttctggggaggactaatttttttacccttctcccccagatctcatttcaggccccaattgaaacttggggtgggca

SEQ ID NO: 16759 - DNA, 1071 bp, Homo sapiens
cctcctgctccacccacaccatctctccctcactcccccacaggtacagtggctggaacagcaggtggcaaagcgacggactaaacgggacgtgtaccaggagcccacagaccccaagtttcctcagcagtggtacctggtacgtggccttcttcgctgctgggacctcctccccagatgcaccatccacccactatgagctcttggatggaggaggctgtcttcgaggcctcctctgattcgtttcctttcctcctgctgggcagtctctccttggcccatcctaataagcaagcctgggggtggccctcccagagtcctctacattcccatggagtccagacagccagtggcggcctttcaggagcagggatggtacaggaggaggttttacgggggcaaagggattcttcaagatgctcctagcctcacaaaaccaatcatgtctcataagtgatggggtgggtgtctccacagtctggtgtcactcagcgggacctgaatgtgaaggcggcctgggcgcagggctacacagggcacggcattgtggtctccattctggacgatggcatcgagaagaaccacccggacttggcaggcaattatgtgaggaagtcggggagggaggccgtgatccctgctgaggtgtgtctagaggctgtcttgttctatcagtgaggtcagccttctcctgatggtggccaaatccttcttaggatcctggggccagttttgatgtcaatgaccaggaccctgacccccagcctcggtacacacagatgaatgacaacaggtaagaagtggcaggccccggtctctgcctcccttctcctttcttccactaaggaacagggctgagcctgggtgagatgtgccttgcctaaaaggctgaggcttttcccacagtcctggcccacctggggctctgagggagggctcggtcagagtggagatggccacaggcccagtggagtgtgggagatgggggctgggtactcaggggatgatgggtgtcggatgtgcggatccctcgtgctcctcaggccacatctgccgggccctgttcacccc

SEQ ID NO: 16760 - DNA, 1052 bp, Homo sapiens
ccactggccaccaggctggcgcagccaaggccgaagctctggctgaaccctgtgctggtgtcctgaccaccctcccctctcttgcacccgcctctcccgtcagggcccaagtccctgttttctgagcccgggctgcctgggctgttggcactcacagacctggagcccctgggtgggtggtggggaggggcgctggcccagccggcctctctggcctcccacccgatgctgctttcccctgtggggatctcaggggctgtttgaggatatattttcactttgtgattatttcactttagatgctgatgatttgtttttgtatttttaatgggggtagcagctggactacccacgttctcacacccaccgtccgccctgctcctccctggctgccctggccctgaggtgtgggggctgcagcatgttgctgaggagtgaggaatagttgagccccaagtcctgaagaggcgggccagccaggcgggctcaaggaaagggggtcccagtgggaggggcaggctgacatctgtgtttcaagtggggctcgccatgccgggggttcataggtcactggctctccaagtgccagaggtgggcaggtggtggcactgagcccccccaacactgtgccctggtggagaaagcactgacctgtcatgcccccctcaaacctcctcttctgacgtgccttttgcacccctcccattaggacaatcagtcccctcccatctgggagtccccttttcttttctaccctagccattcctggtacccagccatctgcccaggggtgccccctcctctcccatccccctgccctcgtggccagcccggctggttttgtaagatgctgggttggtgcacagtgatttttttcttgtaatttaaacaggcccagcattgctggttctatttaatggacatgagataatgttagaggttttaaagtgattaaacgtgcagactatgcaaaccaggcccagtctccagtgtggtaccgttgctcctgcatcgcagctgaggatagggggccagttaggcctacacagtgg

SEQ ID NO: 16761 - DNA, 1048 bp, Homo sapiens
gccggcggcccggggcccagcgggagcgcggcagcggcgcgcggagcagggggctacgggtgggcgggcgcccgccttcgcctgcgtcgctgcctgcacgcgggccgccgtccccgggcgtgtgagagccggcagctcggccgactgggcccggagcggcgcggaggccgggcgctgacggtaacgggccgggtgcgcgcgcgggagggctccggctgccccgacagaggccgggctcgggcggcgggagtgcgagcgccactgcggcgtcagaggggccaggaagggacaggaggctgcctgaggcccgtacctggcgcctgtctctgcggtccccggggccgacgaagtcggagcgggtggggagggagccgggcgggcggccagagacctggcggcaggtgcctgccctctgtgatccaactctctccccagctccacccacattggcctagacccagtctctaagggctgaaaatattgcccggaagctcccgagcagaatcagatcgcgctaagtagggcacaacgcagaggcgacaaagctcctcggccccagggcccgcggagcagactccggagcgcggtcccgcccacgctcggctccgcagttagcgtcctccttcctcctgagcaggcaagcggagcccgagggcggtggcggcggggggcacgggtcccctgaagttgcctcgcagctgagcactgggccccgtctctcccttcccagggggccttcggcgtcactgcaggcttcctaggggtcccctaagtgctctgcaaaccgcggctggaagtttcccactgcagtgaacagtagagaaacagggagaacacacagggcttgctttatgctagaaacacaagcatctttcttctttattagaaagaaactcattctgtgtttctgagaaaggatcgtgccaggcactgtttctggtgagtgccagtttgacccgaaagggcactgagaaaggctttcctatcagtctctttgggttctggctaaacttttaaatcaaacaaaatagagactagcttattcacc

SEQ ID NO: 16762 - DNA, 1219 bp, Homo sapiens
gggtcccagcacctggaaggccggggggccagcccctgaggtgtgttcagggcctctctggcttccatgccctgcccaggtgcaaccccccgctctggctgggcagtggacccctttggatacagctccaccatgccttacctgctgcgccgtgccaacctcaccagcatgctgattcagagagtgcactatgccatcaagaagcactttgctgccacccacagcctagagttcatgtggaggcagacatggggtaaggccgggtagggtagagggggttactgcagcatagtcttcactggggaacagcagggatatcagaactaagacccccactgttcttcagagcagacctgcaggcactggtgtggactgccagaaatggtcgcaccctctggttaggggagggccatattgacctctggcctctacagggcctgctgtcccaagggcttcagcgtgccctgtgtgcccgtcccctgagggagcccctcatgtctttctccctggcctacacactctctccagccctaggtccagttacagcctcgcggtctatcagggctgcctttagcctgaacagatccttgcccccctggcgtccagaggctgcctgctggtggtgaccacgtggtgtgtctcctgcagactcggactccagcacagacatcttctgtcacatgatgcccttctacagctatgacgtcccccatacctgtggcccagatcccaagatctgctgccaatttgatttcaaacgcctgcctggtgggcgcatcaactgcccttggaaggtgccaccccgggccatcacagaggccaacgtggcagagaggtatctgcttccagccctttcacttcacagaggaatcgggaggcctggctctggtctgggccgtgccacgtggagggtgggctcaggtggtgagttgaggctcctagcctctgcagcagcagctccttactaagtctcctgaaaaactggaatggctcttgcaaccacctttcacagaatgcttttaggttctcacatgagtacttcttgatgccctaacaaactgccagggccagctgacaacttagaggtgaaggattcccaggttagatgtatgttacaaacttcaggctcatgtgccttcacttagtgccagtgttctgacttggctttaagtcaaccacgagaatcctgttcagatccacattcagtcccacgagatag

SEQ ID NO: 16763 - DNA, 1034 bp, Homo sapiens
tcagacccgggtagctggtcacgctggcagctctgtgtggcccccatatcctcagggcaaaacgaacagtttgcacttggtggcatctgaggcccttgagatctgtctctgggaagagcccttgtgaagggctgagccgagagcacccagtcaaggctaggcgtggcccaatggctggcaagttcgggggcctgactccctgctgggaggagtgtgcctttctctgccaggagcagcccctggtccatctgtgtcatgactcctaactgcagcccaatatccctcactggatcttctcctctccccctctgggatatggtatttgaaaaaatgactgtcttctatacaagggatccgttttagggttttcagacatctttctgtggttgttctgggttaaaagactgagcaactacacaagtcagtaaggactggagaggtgaaagggagaataaggccatctgtcccggtggaatgtaggggcagctggtgtggtttccctcgagatcttgtacaagaacagctgcacccacctccaacacctgcacacactggggcctctgtccccaacacatcagccatgcaccgagcccctgctccaagcatactctagaaaacagagcaaaggtggtcacttgccatatcttttttccagggcaacccagatgacacttaatatgagcctctgcctgacttgccatctggctgtcctttccagagccctacttttaacacacagacagtcagagcttgagtctgacctgctggggctgtctggctgtccagtgtagaacaagggcaggagagcctgtgttttagtcacaacctgcccaacctgagcaaacctgccccagattacggaggtgtgcagcaacactaccgatggctgttgatctaagtttttcatttctggtttattttgttgtatgtaacccgtcctgattcggtttcctgcctgggcccctaggcccgttccctactcctgagtcccagagcgtggggggtaaactgccagggccagccttcccctttct

SEQ ID NO: 16764 - DNA, 1055 bp, Homo sapiens
gtaattccaatgagattgaaactttggaattgacagttctaaagtgcatttgggagagtgaatgtgtgagaacactaagaccactctgaacgatgataatgagttggggggtggactgctcgggggtgatcctgccagattcccagaggattctcacgccaccattacctcactcagtgtgacctggagggggtcagacagacgggagagtccagaaacagacccagggctacaggaatttagtatatggtaagagggatgttttaagtggggaaaaaggtggattatttaataaacagcacttttagacaactagctatcaaagctagatctcagctgggtgcgatggctcacgcctgtaatcccggcactttgggaggccaaggtgggtggatcacttgaggtcaggagttcgagaccagcctggccaagatggcgaaaccctgtgtctactaaaaatacaaaaactagccaggaatggtggcgcgcgcctgtaatcccagttacttaggaggctgaggcaggagaatcacatcaacctgggaggcggaggttgcagtgagcttagatcatgccaccatgccactgcactccagcctgggtgacacagccaaaaaaaaaaccactaagttagatctctacctcacagtgtccatacaaattagttccagagggaagatataccacaaaattactcaaaaatttttatacctctggtgtgggacggtcttttctaaactttaacatgagacttaaaagatataataagggaaaagataagcagatttcgcaaccaaaaaatatcgaaagtctctgtgtgatggaaaacatcaaggttaaaacacaaatgacagatatggaagaaaatatttgcagcacataaaaaaatcaacgagtacaattactttaggagaaaagcttgcttcagggtccttagagaaagtcactggggcctgccaagctgccacctaaagacaagagtgagagggctgagttcttccaggtcatcagagttgttgctgcccgtattaggccacacagtggaaccccattta

SEQ ID NO: 16765 - DNA, 1050 bp, Homo sapiens
agttagggatctctgtggctgcccttcaacaactggaagcttccttctgtttacctctcccaccccagacagtggcaaccctgagcatactgggaactcggcgagtagtctccatcctgggcgtggaaagccaggctgtgtccctggctgcctgccacctgctgcaggttatgtttgatgccctcaaggaaggtgtcaaaaaaggcttccgaggcaaagaaggtgccatcattgtgggtgagtggaagcaggtctggggtcttttggacgttactgtcatggaagggatggggctgagccagccaggccagttttttggggaccagacttgcagctgcaggttgtttggaatacggtttggtgacattattttactctagattctcagcaaccaaggtgcctcaggacaaagctggagctcagtctggagcctgggatgcggatccccccttccctgtgtctccctggtttgttggagaagttgaagggtcaaactgggctgggctgctgtggagcccactgatgtcttcttgttgttgccagatcctgcccgggagctgaaggtcctcatcagtaacctcttagatctgctgacagaggtgggggtctctggccaaggccgagacaatgccctgaccctcctgattaaagcggtgccccggaagtctctcaaggaccccaacaacagcctcaccctctgggtcatcgaccaaggtaggtgatatagttcacaaaaacttgcttcagcagctgaagtttgtttattcttaggagtaataagaaaagttgtgagtggggccaggcatggtggatgacacactttgagaggcagggggtcacttgaagccgggagtttgagatcagcctgggcaacatagcgagaccctgtctctatgaaaaattaaaaaaaattagctgggcatggtggtgtgcatcggcagtcctagctactccagaggctgaggtgggagaattacttaaccctgggaagtcaagtcttcagtgagctgtgattgtaccactgcactacagactgggcaacagagggag

SEQ ID NO: 16766 - DNA, 1029 bp, Homo sapiens
ggtgttctcctggggcgggggcaggtgagcggaggcgggggcaggtgagggctgctgattggagaagcaagcggagcgggaccccttaatgcgactgtagctgacgacggtctcccttgctcaggcatggacagctgggccatgggaccctggaggcagagctggagccacggctgttggaggcgttgcagggcctagtcatggctgaggtggccgcggggggctggcattctgtgtgtgtgagtggtgagtgacttagtgcttctccagacgagctcatgatcttgtgcaaaccttcctcctcgttttccagtttgggtgggggcctacccaggcctccttccaaattcatccatccatcgcccagtcagttatgactcctaaatgcctctcaccctcggcctcctctgcctgcaccatggcccactcacgcctggactctggcatttgttcctagcttctctgttactggtctcactgcccctcccctcctctccccacctgctcccagccaggactgtctcttaacagtgctgccgagggagtatggagtgtgagggggcagctgagccaaggaaaacgcagaaacgctgcagttgcctagggggccatgatgtgtggcacagggtggacactggggtgcccaccaggcaccaggatggtgatgagtgtgtccctgtggtggtgccacagctggccagagtgaggagtttcacttggtgatccaggtgtagctccttcctaggctgttagagcccatgcagagagggtgaggctgggaacagatgatctttgtctgtgtctggggctctcattctggctgctacgtagatcacctggaagcttaaaaaattaccaatgccagggggccgggcgtagtggctcatgcctgtaatcccagcactttgggaggccgaggtgagtggatcacgaggtcaggagttcgagatcagcctgaccaacatggtgaaaccccgtctctaaaaaaaaatacaaaaattagctgggtgcagtggtgtgcgcctgtag

SEQ ID NO: 16767 - DNA, 1031 bp, Homo sapiens
aagatcacaccactgcactccagtctgagtgacagagtgagactctgtctgtctaaaaaaaaaaaaaaaacaaaaaaaaaaaaccccaaccttgggctggagagaccagagggctggaaacagcccagtgggacgccctgcactcaaggtccagaaggagtttgaggccttaagtttagtgtagaggctgaagcacggacacatcccaccagacttcctagtttcagatcattgctcgggccctgggacctcgggcctggtacttaaccccctctgtgcctcagttgtgaataaaatagggatcctgcgtaaatggtgatattgtcataaaaccacctgtagggctattgtgagaattaagtgattatatttgaaaagcatgtgaaacatcagcatggattaagcacttcataaagcagctattgttagaaatttttagaattaggcagctgttccaaccaaaaagctccagtgttgtgggaggccaggaaggggagagctgcacgtggctttcatcaggaccggctgtgggtgcagttgaaaaaggggcacaggccggcccagtggttgttttatttacttatttagagacagggattttgccatattgctgaggctagtctcgaacttttgagctcaagtgatctacccatctcagcctcccaaagtgctgggttacaggcatgaaccaatgcacctggccctggcccagtggttttgaaagggagaccactgcggtacttctagggatacatttctgaaatgaggggctatttggcagcataagaatggaagtagaaggtccagtaagggacttaaagggtgatctgaaggcattgaggggatgtgaacctaagacaagcccctggggcccgaggggaagcgccttggcctggagtgctaccttgggcagggcaggctttagttgtccccaggagcggatgcgatggggaggagagtttggatggatgcaggggcttcacagtctgtttcatgtgtccccttgatctctttcagagactggggatatt

SEQ ID NO: 16768 - DNA, 1040 bp, Homo sapiens
tcccagcgcttcgcgtaccaggaaggggacggcgtcctgaaagggacatttgaaaaacggaggcaacgcgtctattaattaggtggcggcgcctggggtcgcagcactccagaggctgaggtgggagaatcgctcgagtcagggaggcggaggttgcagtgaactgcgatcgcgctactgcaccccagcctgggcaacaaagctagaccttgcctcaaaaaaaaaaaaaaaaaaaaaaaaaaagacataatgaatgcatcaggctagctaacaatacctcaactctgatcaatcataccatcatatcatttcctggtgagatgcataggaaatacagagcatcacctattgccaaaaattgaacctaatcaagcctcaagatctaactaccagtttataggctatatagagattagcaggaatatgttaagacaccaaaggtatgaaatcaaccatatccaaaatgtaggaaattatatgggacaaatgatctgtcgtcttcaaaaaaatggcaaagtgggaaatgtgggaggggaaaacacttcagaataaaagagatttaagagatgtatcaacaaaatgtttcaatgtgtggatcttttttggataataattcaaagataactgatttaaggaattactaaaacttttcgggtattgtatttcttttcttctcttttttttcctgacagagtctcgcccttttgcctagtggaggagctcggctcactgcaagctccgcgccacaacccccctgccgccccaggttcaagagattctcctgcctcagtctcccgagtagactgggattacaggcgagtgccaccatgcccggctaatttttgtatttttggtagagacggggtttcattatgttggccaggctgatctcgaactcctgacctcaagtgatccgcctgccttggcctcccaaagtgctgggattacaggcgtgagccacaacgttgggccaggtattgtatttctatgttattattattttttgtatttctatgtcatacaggcttgtatttctgtta

SEQ ID NO: 16769 - DNA, 1051 bp, Homo sapiens
ctgtattctcttagcagattggcctggatgaacaagggtagtattgcaaaaatgatgaggatacagctgcatttcatgcagaaagagtgaagaataaaactccctactagctgcatttctctggctttagttccaactcgcgcagatttcactacatgcatcatttaataagcatgtttctctaaagtggagtcaaagtacttctcttctgcatatgtactctattctgtacattgccgcatgcattgcatatttacatacgtgtttgtgtacagcgttgcatacaatgaatattgtatgccatactttttgaaggtgcgaagggacatttcaatggtaactttgactgtatggttgacacatggatttggaaccgttctcccctgaagaaaatctcggtattttcttgcctctcggaaatgcctttggtaatctgtaggccagaaagatagcatccttactctttcaattcatttttattttcggtttctatgtctgtatctggaaaacagatataaacaggaaaaacagtggaatcatggaccttggctcataggataaatgaattgatgtgattcaaagacacttgtattttatgtagcctaagtgtttatgtgttagcatgagacaaattattgcttaatggttaaaactccaagttaaatgattacagttccaaggtggagaaaggcaagtgtctgtggcagctgtcgcttattcgatgagtgttagaagactgggattcatgcctatgtcctccccttacctgctctgtgaccttgagctgtttacttaatctctgtgtacctcaatttttcattttataactggggttataatagtacctaccctctgttttgctgtgaggatgaactgagtcagtacatgtaaagcaccttgaacaatatctggcacatagtgagtgcccaggaaatattagctattactattaataataatatggttatgcatatttactgcaaacataataaccgtgtagccccaaccaatgagaaataaaattatttcaattaaactttagttttggttt

SEQ ID NO: 16770 - DNA, 1026 bp, Homo sapiens
cgctgtgccagccagtctcagatttggccaggtatgtattaagttagcaccagacatctgcattctaatctcatccatctctgtggtttttttggtgggggtaggagtgatatggttcccagaatttctctgcacaggctcctttttttaaaaaaaaaaaaaaaagaaaaaaaaaatgtcagcttgatctctgccaaactaattaacttcgacaacttccttaagtgctgcgagcaatatagagttgagtaaggcatgttcttggccctcatggagttgatttatcgtggggggggagatgacatgtttataattttttcattaatgactcattcattaggacgtttcaggtcctgggccaggtggcagccaagccctctggaagcctcatgtctggtctagttgtattacaatagaccagactaaaaatagaagcaaagcattgggccagggtgggagatgggcctgggtagactggtcggagatataaaataattttctcaaccttggttggggatagatccgagggtagcaagatgtcaagtggaaccgttggtgagaggctggctgcggagagtcattggaggcagcatgtgattggaaacctgggatggagaaggggagggctggaaacccagggccacagccgggctggggcatgtcagggctggcactgtggagtgccactccagttagcagcgcggaggctgtcggcatctctctcggccaagcttggatccctctgcccctgctcccctgctttgaagtggtgtggtgaaatgtggctggaagtcagtctgctagcctgtggagggaccttcatccagggcatgctcagactcagctagaagcaagcacagcttcctcgcatgctgaggccaaggggctgaaggatgcagaatgcttcttgtactggaatgctgtgctcaccagtatgggtgccacatgggaggggggcaaatatagggtcctgggcctgaggacaaaatgacacctctgtattaaacctctcttttgcatatgtac

SEQ ID NO: 16771 - DNA, 1031 bp, Homo sapiens
tgttaatttccagaaggtggacgttcgtctagtctatatcaaggtatgaattctggggaaagggaagaagaatttcttgttattattaggaatatatcattttagagttctttctattcttatacatggaaaaatgactggctgagtagatatacttataaaatgtatgttctaaaaatagcagtaagtttaatttcactgaaacttaacagaagacttcagtaaaactggaaagaagtaactatcttttgctactaaatgttgctgtagaagtgtccaaggccagccttatttttcctcccttagagataatttattattgcctataggttagatatatgaggaatcttttcttaatatttgacagataatttaattctgatgtatattactgctgtgtgatgtgtgtcatagtttttggaactggatgtgtattttcaatcaacagatgcaattctttattagttttgggagaatttctttgtattatctcttcaaacactgggttctatgcagtgaattctctgctgtaaggcaccaattgtctgtatgttacattgtctttgaactccatagttgtctgttttgcttcgattacttgaatcccttttttttatctgcattcaccatgtttatttttagctttcctctagtcagaaaattgattttaaaccatctttctttagtcctgtgtagattctgtttcatatctttattttctagggttggctttagttttcaacgtatttctttagatctacaatcttttttttttcccttttttagatgttgtctttgggttcttgatgtattgaactcatattcttattaagttctatggctcaaagatcttttggggggtatctttctctggctgagttacgttttcttttattttgagttctttgtctttgacacctactgttgctttcttgcctttccaggagtctgtgtttaaagataaccatgccttgtggtttttcattttattcttgctgaagtaaatcaggctatatctttctttgatttat

SEQ ID NO: 16772 - DNA, 1025 bp, Homo sapiens
gataatggggagcgcttaaggatccctatggctgatccctgtcttccgtttaaaattctgtttagtttgccagtcttttgcttgccccaaccagcactactggttgcagcctcagggtagctgagggggatttccttgtttatttgcaatcaatattgctttccctgccactgttctgccaacctacatgggagtaggagggagggcaagaaccagattcccactgatctatccagaagttttaaatgaattagtgctcctcagtttgttgtatgttttgtccagagtcttgaaatggttgtttttgacagttttatcattgtttttgagaggatttgccaggcttctcacactgccattctagccccactgcctttttccttctagagaggaaaactcatggggcagataaagtgtggactctggcaccggattgcctgggcttgaatcctgaccctgccatttgcaagctgcaagaccttcggcaaattactagaccttggacaaatgacttaacttttgtgcttctgtatcttcatctgcaaattcgaaataataatagtacttacgtaacaaggttgttgtaagaatgaaatggattcatctacatagtgatagcagcggtgcttgttactgcaaatgcaatatgttagctcttttacttggtgcagcaagggcagggactgtatcttacttggcactttaaaccttgccccaccatccttggtctggtggctcgcacgtagtcagctcattggattctcagatcatctttcttaagtgatgcttgacatacggaggaaatgaggacagctctcagagtaactgaagatgcgaggaggagggactgcaggggacctgaggaacagatggcctggtgcctcgttgaggccaaaggttggtcagtgtgttttccctcctagctctaggaactgcccaaattgcctggtgctgctcagaagccattgaatttgagatgaggtctgtacacttgcatttccaatccaagaagttaattagcacaa

SEQ ID NO: 16773 - DNA, 1024 bp, Homo sapiens
gagtttgagtaacatgactgaggacacagagctaaggaaataataacaggggttcaaaccaggttttcttccctccatgatctgtattgtgtctacctaattgctcgggattgtctaaattcacccctgtggcatttgtggctccttacaatttgtcctcaccccacctttccaactattttcttcctttttttttttttttttttggaagcaaggtctcgctctgttgcccaaactggagtgcagtggtgtgatctcagctcactgcaaccgccgcctccagggttcaagcaattctcctgcctcagccttccctgagtagctgggattataggtatgcaccaccacgcctcgctaaattgtgtatttttagtagagaaggggttttgccatgttggccaggctggtctcgaactcctggcctcaagtgacctgcccacctcggcctcccaaagtgttgggattacaggtgtgagccactgctcccggccccagctattttctcttccatgatgaaatcatgccacctatctttggctcatgctgttccttttgcctgaaatgttcttccctactcagcgaggacatcattcagctgtcagatctcccatgacaaggactcttgtcttgctcacagcaccctgcgtggaatttgcacacagcagcagagggtagccatctcattttcttaccactttaagaagccctgtaagaatgcatctcctcatggcccccttggtgtgaggtctgcatcacacatctcacctccagtccctttgtgttattcttaggtacatgtttaccttcttgctagatggcttcttcaggccagatgtcctctctccatcacttttctcttgtgtctagggcattgcctggcaagcagcagatgttcggtatatgtttaacaaacatagggcagacaagaatacaaaaaaacgggggaaatcataatattcagttggagggtacttggcagggtcatagtgcttagaacagtcaggggtgtatttacctgatggcc

SEQ ID NO: 16774 - DNA, 1052 bp, Homo sapiens
tgccccagccgtattagcaagagaccagggtgtgttgaccatggataaaaggtggcctggtggactttgattttgccagagtactggttctcagacttggctgcacacctagtgttcttgaaaaatactcatgcctgggggtgcaacctgggcattgagacgtttttaaaagttcccaggtgattcttgtgagcggccgaatttgagctccacggggctagaccactaacaccgcttcagtgggaaaacatgatcgggaggagttgtatgtttatctcttctttttgagtgcgtatgtggactttgggctttctgatattagccaccaaggtatacttggggtctacacattggaaactccagctttgaagaatcagaatgatgtcctggtcattgtcctgttgcagctcaaaaggagaggtgatggctttgccagcatttggcatcattcgaagttggtgacttccggtaattttttcaataatggaagtatgcatgggaattgggtatgtagagagaaataaggtatttgtgttttgaaaagttatttttcacggtcagagtttctgatgttttatactggaaggatggaaaccacttgtgcgtgggggttaagaatcatctgagtggcaagttgtttattacgtggcgggcagtgttttcagtggctgcggtgggctctgttggatggcagcgtgcaaggtgagggctggccagccccgcatctctatcccttgtttacaaagtataattctgtctcctgccagctgctggatttttctgacatccccagtcactgagtgctaagctttgaaaacattacctctacccagggaagctttatgcctcccaaaagcaatgtgccttgaggtagaaagttaattatattatggagttttaagtgaaaatagaatttgaactggatttgacataaaggttcctatctgccaggcttcaagcttgctgagataggatggtttggaagcaggacacaccgaaatgcagatttttctctgtgtctttctggcccagctttggagtagacgcgttta

SEQ ID NO: 16775 - DNA, 1031 bp, Homo sapiens
aaaatgggtgtggtaagatagacagaaatggataatgaattgctgagccaaaccacagaggcaaagatgcaggattgcatgctaaagcaccttgtatctggctatgatgttcaagatcaatgaaagactggagtgcagatcagggattgcacctgtgtttctgatgcagtaaatatacttttccgaaatcaatagggtgactctgcagagccctgtaaacatggtgtaattactgtgctgagaattacagttgtcacatatcgattctgtcttctcagcaggtattcgtacatttcctcctgcccctagtgccactctgccccatctccaaaatctaattcccattgaccgcatcacactgctgtgtccaggagggaagaggggatgtaatgtagtgaggggacttcagctgtaccttcaccttggttgaggaagaggcagctgagtgagtcacagatttagggacaaggtggcacaaagttgctctgaaaattagatcaaagaatcccaagaagtagataggcatcaacctcagtggaagctgcctcgggaaataacctgctcaaagaaggatttctcattcttcagagtagactaggagggaggcttccttaatcctggaaacaaggcccaggtcatccctgcagaggaaacatctatatataaagtggctaacgtaagataaactgtcatcttagaaagcatcattcactgactcgctcattcgctcactcgtttgttctaaccttcactgaatagacacttgtgttcttggtgtgttgcaggagggaactatgctatggctggggcgatgagtgaagtacagcctctgccctcgaggagcttgtgttctcccaggagacacaggcagtgaggctagagtgcagagatgaaccaccagaggtggtgaatgcggtggggggaggaatggtgtcaggcctcttggggaggcttaggagagttacccacaggaagggagagcctgccaggaggagtaggtgtttgtcaggcagaccgggtgtgccaggcag

SEQ ID NO: 16776 - DNA, 1050 bp, Homo sapiens
gtcagtctgccttccccaccttctttcctggtggcatcttcttgctttctcagctgcagccacactggctctgttgttcctcacatggatcaagctcagttcccacctcagggcctttacattttgctgttccctctacctggttcactttccccagatatcctcctggctctccttcatttggttcagggctttgctcagatactaccttatcagaaaggcccttcctattggccttatgtaaagttgtatccctgttgtcatgcctgtactctgtcccccatactcagctttatttttctccatagaacttagccccaccagatgtagtattaatacatgcttcattaattagatatatagtttctgtcccactacaccaaaatgtaagcatcataaagacgaggacttcattcagttcagtgctatattcccagtgcataaagcatggcctggcacataacaggtactcaccaggtctttgtcatataaatgaaagggaacgactgagtctccatatacatttgatccatgaacaacatgggtttgaactgcatggacccgcctctatgcagatttttttcaataaatatattggaaaaattgtttggagatttgcaacaatttgagaaaacttgcagatgaattatgtagcctaggaatattgaaaaaattaagaaatttaggtatgtcatgaatgcatagaatatatgttgatactagtctatgtattaattgactgtttatgttattggtgaggcttccaattatcactattagtagttaagtttttggggagtcaaaatttatagtcagtgttttactgtgtgtgttggggtggagggtgaccctgtcgcctgtgttattccaggatcaaccgtacttcattttgtattcatctaccatgtgtctggatcccacactcactcagcatttctgcatttgatgtcatggagcaaagatgggcactggatttgggcagccccgcgtttgaatgccgcctctcccatttcccagtcgggtaatgctgggcaagttaacttcctgtct

SEQ ID NO: 16777 - DNA, 1028 bp, Homo sapiens
cgtctggagttgttccttccgaggttcagatgtgtcaggagtttcttccttttggtgggttcgtggtctcgctgacttcaggagtcatgccacagaccttcgcagtgagtattacagatcataaaggtagtgcagaaccagactgagcagcagcaagatttattgtgaagagcgaaagaacaaagcttccacggcgtggaaggggacccaagcaggttgccgctgctatttcgggtggccagcttttattcccttatttggccccgcccacatcctgctgattggtccattttacagagtgctgattggtccattttacaaagtgctgattggtgtgttcaccatcttttaactagacccagagcactgattggtgcatttacagtcctttagctagacacaaaagttctccaagtccccacctgacccagaagctcagctggcttcacctctcagtatgggtggggaacctacttgttttcagtttatgaaagtaggttttcaggaaaagcaaacctgtggtagaaacttgttggaaatgtaatggaacctggaatgttccattaatcacaagacttctgtgtgattgctcagagctctaaaagtagatacaacggccttgtcatctgtaatttttttttgtttttggtcatttttaggtgaaatatttgatagtgctttatactttctaccctttttagggcatggtaaatgtatttgttcgactgacagctactgcaagaagcaaaccctcacatgcatcattgctttttttttttatgctcaggtgactccagaacaggttttactaatatgtgggcagctctgtgtagtagctcttgccatgttagtgttgctatatttagttcctcctattcaaggttgctatgcttgtcggcatcaagcaggaggagaaaagaccctggtggaaggggcatgggaagtcttgtggaccaggccggaagtggcacctcattggccacagctccgtcccatctctggtagagaaagagagttgagcagtgtgt

SEQ ID NO: 16778 - DNA, 1021 bp, Homo sapiens
aaatgcatctctttttcaattaaataaacttaattaaaacatcttttctagtagaacacaagggatacctatgctgataatattacatgcactgtgctgactcagtataggatcatttagattaccataccccagttctacttaatagctgtatgatgccgccaattagttcaacatcccaagcctcaattctcaaatctgaacagtagagatgaggttgattgcttatctcacggagtattataaaggtgaagtgaggcaaggatatcactcttccctgcattaaaattacattgcccgcctcccctgtgaaccctgtgtacctccatagcaggaaattcatcttatgtatctttacgtgcccaagtcccccagctctgctctgaaacattctgataggaagggccattctgtcatattatttattgctatatctctctagtgcctggaaccgtgctgagcatagtatacgtgctgtgtaaatgtttgtcgagtgcacttatgcgtggtaggaggtagttaattgatggttgaacactgacttgctgaaatgacttacacatgtcctgtctcacccctagtggttagtgctaacaaatgtctcggcttcagagaagatacactatggagtatacattccttttgcttattagtactttattagtttttcatcagctagcctgtcatgcattggcctcagcatctatcaacagatcttgtcattctgcctcccccttcccatcagaggatgtctcatcagtggacatcttgttagtgaatacctcgttattccttcatcagaccttctgtcattttctcagctgcgttgatgagaaatcccagacttcatgggaaaggtcaggagttggcaaatgagagctagacaagattcagtagtgacatgcagtggttgtcctgtgggatgaagggctttcgtgagtgatacagtaggtatacacaacagttagttccccatggaattcatggatacggggccaggattacatgcaccaccagccag

SEQ ID NO: 16779 - DNA, 1150 bp, Homo sapiens
ccctcaaatgcattagtcccgactgaaatctggtggtttgtgtaatgttaaaaacattcttttacttttcatcctggatgcatctatggcctgcatttgagctcctacctaaagtagttctgtctggcagagagcagaagaacactccaagtgtggtctatggctctaagctctgaaagcctcatcatttccttatggggataattaaaaactcttttaaagcctctgaaactctcttattgaaccctaataaatatcagtggctttatttgccacaacttactaaaaagcagagcagtggttaaatgaaaagatttatgatatttgcattgtttattttgaagcatctaattaaataattagttcagtcttctagctgtttttagaaacaagtctttagaaccctacagagagattttctgggcccaggaactcatttggggaagtgattggcctttgaacagtaagtagaaagtcatcaaggtagctctgcccacctggtgtttgcttatggaaaccatctgctggttaaagttcctggctcagaacagccctagccaggcagtcacagcctgcacagaggtgcagtgatggccatagtgtgccgaaggggctgatcgcttcaagagcgtctggaaagttgatggtctatctgtcactgcgatcttgacatcctgtgtggttcagtctggttgcagttggactcatgctgggtctggcgggtaggtgagaatctctaccttgctgttgctgtccaggtttcaaggcaagcgtgagagtagtcctacacagaggaaaacacacattaggctcaagcacctgcctgtgctttgctgctgcttgtttaaaggagtgcttggaaatgccagctgcccagcctctagagagctggggggatggacccctatcctgtgagaagttgagtttgaggatacacctgaccgctgagggatgcagagcacacctacgctagctcacttttacacaacccgatagatttcttgatgttatgcactggataattcccttgtggcccagtcaccttcccttttgtagggatggcctgtctatgtgatagaaagtactcaagccatggaatcaagtggatgtgaattccactgctgaacctgccacacactgactttgggac

SEQ ID NO: 16780 - DNA, 1032 bp, Homo sapiens
ggcatactacaatcatctagattcatttttacaggttttggggagtcaacattgacactgaaatcataaatcaggtttaaaattctgtgttcaacttggtagaacataagggttttatacacacatgcacagagataggtataagttgttttctcaatgatgtttttcagtgatattggcaaatgtgattattacgcctagaaaacaataactgggaccataatcgtttatatgatatatgtgaatgtaaaactgaaactaaaagcaaatcctttcaaaaagcaaatctgctttggatagcatcagtcatggtcaaaaaggcagatcaacgccctgtctaccaagaagagcaatatttcagctaggaaactctatttgaagagattttatggatttctgatgtgtaaaatgattttgtatcatattgtagatggagtcatttgtagagagaatgaaaaatatattacttctgacatgttctttttaattgaaatgacatttgtacactctgatatttctctgtgccaatgtgtttttcttctcactgaccgcagccatcatccaagtcaaggtcaagggctgcatgctgtcccaaatgttatgctctgccgagccgtcccctgagttacagttgggaagtctgcaaacctctgcctcactcaccatcagaatattttctggaggaacaactctaggattgaaataagcaagagccagttctgctggggtcatagtccagggcccacagctcaaccacgagagaacagatacaaagtgtcctgggctccttcacatctctgtcattctgtcactcaggagcctggttaggtgactcaggttctgagcagtaccctgggttaactcctgccagcccactcagtttctgagctgcaaaagccaactcgagaatgtctccagcacggcctgatgcttgttgtacagcctgtgcaataagtaaaccagggattcgtgtgtcaggaagacagcaggctttgacaccatggtgccatttggatttggctctaccactat

SEQ ID NO: 16781 - DNA, 1065 bp, Homo sapiens
tgctagaacaggtttctgcaaggacactgttacctgtctgtttccaagaagctgtcgggtgccctgtggctgggctggtttagctttctctctgccctcaggcagggggctgggttccataacttcccaaagccctttgcaaccggggcacacaccactttctctggcagcatgggtccatcctcaggagtgtcacattccccatgcttcttccgtcacccttgtccagcacttttccccagggcttcacaggacacatgcctggccctcagggaagcttgtcacttcactcattatcccgcctgtgagcagcggctggcagtgtgcccaccgtgagctctgtgcccccgaccagatggcacacgaggagcccagggctgctcattccacagtaagcctagtggctggcttccctggatttagatatcaaaattcacattggtggagagaagagggctgtatcgatgcaggggtctctacactgaggcctcctttagcacagaagaccctgtgacctcatcagaccagcattgctgcccagagccctaacacagcctgataagtgcatatcactgtagtcagtcatgcatggcttaatgatgaagacactttctgagaaatgcgtcgttaggcaattttgtcattgcggggacatcacagggtgtactcacacaaactcagatggtgtatcctaccgtacacctaggctatagggtgtagcctgttgttcctaggctacaaacctgtacagcatgtgactgtactgaatactgtaggcagttgcaacgcaacggtaagcatttgtgtatctaaacatagaaaaggcacagtaaaactacagcataaaagataaacagtggtacacctatagagggcacttaccatgaatggagcttgcaggactggaagttgctctgggtgagtcagtgagtgagtggtgagtgaatgtgaatgcctaggacagtattgtacactcctgtaccataggctacactacatttatttcaaaaaaattttcttcacaaataaattaaccttagccagctgggctcggtggttcatgcc

SEQ ID NO: 16782 - DNA, 1049 bp, Homo sapiens
ctgcaagagggcaggaggcctgggaccccaattgtgctatgatgtctggctagtcctcactttcaactgtactgtccccaagcatggggataacagcacagtctcgatgcaaccccttcagcttgttggttgtttctgtttttccaaggatgctgaaggcttggtcctttgacccattaagtattaataataattctcattattcagtctgtagggcatggatcagtgacgaatacattgcttgggggatttatttaagggaagaagggctatgattatgggtgatgggggaggtgccgggagtcacagcagatgagtcaagaagggtaggcacagcacccatggcaagagaattgtatccctgtgctctgtgtcccgttcttttgggaaggcctgagcagtgagtttgtttgctgagccgtctctagagtgccagtaactctgactgctggcttaccacagcctgcagcctggatgggaggatatgactggcttcaggactttgcaggaatctctctggtctagtgtgggtgccgcttctgactcggacaactgttctccatgccctctacttcctgctgctttctcagatcctcttcctgctgctctgctccctaaccacaaccccactaaatagagccccctaattctagcccattccgaaagatcttttccagtaacatcccctgcccccaactttgtgtgcttggttatcttaaagttatgacaaaccagagataatgtgctgatcatgtgaacgtcactcctctccaaagtgacacattttcattttctaaaatgcaccttattaacagaaataagattctacagtttctggttggccatggagtgactatttggaaacagtggaacttccagatttcttcgcatccaagtaggattttgctgagggtggactcagccctgtttctgtgatataaaacattttcttcattctttccttcatcagacatctcctataagccccgttcaaatgactgcttcagggttctgggttcccgtgtgtaaatgtgtgttagttcattctt

SEQ ID NO: 16783 - DNA, 1050 bp, Homo sapiens
aggcgtaagccactgtgctcagcttaatttcagcttttattttagatatggcaggtacatgtgcaggtttgttacatgggtatatcgtacccagggactgtacatagtacccaataggcagtttttcatactcctcccctttcccctctagtagtctacagtgtccattaatcctatgctatgttcatgtgtgctcagtgtttagctcccacttataagtgagaaaatgtggtatttggttttctattcatgcactgattcacttaggattatggcctccagctgcatccatgttgctgcaaaggacatagtctctttttttatggctgcatagtattccatggtatatatgtaccacattatctttacccaatccaccattgatggacacctagattgattccatggttttgttattgtgaatagcatggtgatgaatgtatgagtgcatgtatctttttggtataattatctattttccttgaggtatatacccaataatgggattcatgggttgaatagcagttctattttgagaaatctctgaactgctttattggtggctgaacaaatttacattctcaccaatagtgtaaaaggtcccttttctctgtagcctctccagcctctgttgtttattaatagcccttctgactgatatgagatggtatctcgctatgttgatttgcacttctctaatgattaatgatgagaagtttctcatacgttggccacttgtatatcttcccttaagacatatctgttcatatgatttgcccatttttagcgagattttttgttttttgcactttgattgaagttccttataaattttggatattaaacatttcgcggatgcatggcttgagaagattttcttcacaacacccattcaggaggttttccatttactctgttgatagtttcttttactgtgcagaagctctttaattaggtctcagttgacaattttaggttttgttgcaattgctttcggggacttagccaaaaattatttgccaaggccaatgtcgagaagcatatttccta

SEQ ID NO: 16784 - DNA, 1224 bp, Homo sapiens
cttgaaacctgggaggaagaggttgcagtgagccaagatcacgccattgcactccagcctgggcgacagagcgagactccatctcaaaaaaagaaaaaagaaaagaaaaagaaagaaagaaactcactgagccttgggacaagaagagagcatagggctctccctgtagaaacctttcctttttatcagctagggtgaatttgacactgagaaataacatcactaatctgagatcacagcctggctggttaagggcagagcaggcttgcacaggtctcctcttttgtaacccaatgtcctaatcctcatattagttcctctacccataaaggaattacagaaatcttgttaaagagaagttgagtgactagtaaagataacaatagcaattatgacaacggtgaagatgatgatcacggttagcatttactgagtgcttcctaagagctaagagctactccaagtgctttatagatgttaacacattccagcctcatggcaatccagtggtcacctgccagtggcactgtttgtagagctctgtgagccagatgctaggctaactgctttgaaacacatttgctggatcctcaccagaaccctctaaggtaggtaccatttctatccccatttattgatgaagaaaccgaggcctggagaggttgtataccctgctgataaacttgtgataaagcagctctgtggaaggccgaaacccatgcatgctcttgaccattgtgctagactgccctgtcctctgagttattttttttaccctgagctaataatgttaacgaatatatctgaagaccaactcatccccagtggttcttctaaaggcccagagttttcctgagagcctggtctggccttagtagtttctccatcagtcatttagaaagacagaaggtgaatgaggaggaccagaggaggactctgagcacatctccccaaaatgtccctctagtccagctaagttcagtgccatgctggaggacagaatggcattaaccccaacctgttacacaaggtcacctgccataggtatgagcattccagactctgaggtggagcctggggctaaagtgacaggaggaaggaaagctcctattccattgcaaacctgattctgatgtcaatcaaaagggcctgcctcgatactacgtgctgtatatttgggcatctaggtgtccggagcaggggagatagtaaagatatttaaca

SEQ ID NO: 16785 - DNA, 1031 bp, Homo sapiens
agatatttccaaggggaaatggggagggacaaaaataaatattaggcatcaaattaaaatgagaagacccaacgttactctttgtaattgagaactagatttgtagtgatgaaatctggaaccttaagggagaactaaagtgagacactgggtaggtcataataccctttctgttgtctaattatctgcctatgaaatgggtaaatatagcctgttgccaaataatgttgaaaagacaatttatctggaaaagacatgtacatataagcatgcacacacatgtgtgtgcacatacaatgtgatatatacaagtatgtgaatcctaaggaaatcagatacaaaatccagacttaaaaccagtgtgtggataggcaataactccccccgcagtgttctcatttaatgacaaggttcctttcaatacacagcttccccagtgattttcattatttatttggagtctgccaacaccttgactgaaaggctaaatggaactttaaaaactgagaaaagcacccagtacctccccacaccgcataccccatcattttttaattaataaaaataatgaatctcacatacaacttttctaaaacatgcagggcaaaaagtcgggggtactcgaggcacatgtatttatccatccaccaacctaacgtgtcagtgaagcgggatgaaaccgtgtggccagacagaatgggatttggcagaaccgaatagagtgtagggctggaaagggccttagagtgcttttacttcaaaagcctatcctacagaggaagaaacaagggatctcatgactcacatacacccttctcacttcccagtagagtgacaccacttaatactatttcttttgccaccaaagagcaaattatgatcacatttgaatggaggcactgttgagttaaccttgctgcctctgttgaatttctggtgtctcaaagttggagagaatgcaatggacaacagctcactacatgtgagtgaaagcaagagaagacagccagcaggtgctgagtcatgctaga

SEQ ID NO: 16786 - DNA, 1034 bp, Homo sapiens
gctccttttattgtcctttgtccttgggaggaaaagcaaaatgtccttgagcgcgcgagcaggagggggcggcgggccgggcctcgccgctcggctcttctcgcactgcccctccgtggtcgggggccggctctcgccggcgggatgcgcctcggtgccctgggcccgagtcgtagggtcctggggtagggggcacgcggggccccgctgcagagcccgcgggcggcaggtgggcggggggcagcctcgtcgccgggactggatccgccgggaaaggggcggcgggtgaatgccggcgagagcccgaaggggatcgggcgtggagagcccctttctgtcctggtgagttattttgatatttagggtaaaaaaatccctttcaggttctccaacggaggagctttttaacctctttccggtgaggtgggaactcatcttcatgatcgaatttaaaagaacaatggaaccctgactacgtttcaacaaaaataaaacttgtttttttccctcctattgggtgttggcttttaactctttcaaagccgattttgaaacggctgcagtgatacatgcgaaggtacttgctgcttattaaacctttatgacgttaaggttgtctttgaaaaatgcaagttggaggagtgcttctggtatttcagaattacgaagacaagtttactgtgtcgtcaaggctgtttaatggaaatagatttgataattacggtgctagctagctgatgacgtttggttaatgtagtttattttaccgagtaatgacgccaagatcatttgatctcctgatatttaaatatgattaaatacactgtttggtactttttaaaaaggtctcaaggagccgttatctgcaacttctcacacctgaatgttagaacgtacttgggtcaattcctagtctttaaaagttcataatttaattatttttaagaatttatattatcacaagccatgatcgaaaaactttcacaaaagaacattctgacaccaaatctcttcctgaagttactttctcgtaa

SEQ ID NO: 16787 - DNA, 1027 bp, Homo sapiens
agccatatttgttgcatttgttgcatgtataaaaatctagatatgcttaaaacggaacagtattttaaaagtacaggtttcataaaatttagtagagttctctgtatagtctctaatcttagaaaaatgttggaagggtaatttttaagtgtagtggtttgaagaacaaaccagaagcgcacaaacctttgtgtattttagaatatatttgtcttcattctgcggagctcttgtgttgtaaaggtgcagaactacgtaaaaatagtgttgggcagacttacatagtacatctgaaatcagatactggtttattcgaccatatttctaagggcatttttccagtaaaattgttttattttttgagtagccttcctatagtggtacatgttacatcagttgcgcatatcttgattttacagaatctgtcttaagtaccaattttggtttttcaaatcaatgtttctgaaatttttgaacactgaaagtggttttaaatgaatattctgaatctagttctttagaatcctctttgaattgtgaaatgcaaaataattgttagcagtttaacctgaaagatctttttacatgataaatgggggaggagaaagactgaaatgaaaatgttgaagaccctgatttgaaattgagtgtaaaggtctagatactgtaagttttagagtagctttagagacaaagctagtatcccacttggtgagatcaagtaacttgtggtttaaaatttaaagtaaccagtggccattttaacttcactaatttctcttggaggagctaatttttaattgctcatgattgtaaaacatacttccggatggtaagggagatgttaagatgatttgtcttgaagaatggtaaactttttctttgtttattgcctgtcataaaaagagggaaagtaaaaaaaaaaaggttcataatcttaaatcagtccaaaaatttgaattttctgtatttctgtttaattcaatgcgttaatctttagcattggtcaatacagccaaaagatgag

SEQ ID NO: 16788 - DNA, 1061 bp, Homo sapiens
ctttgtttaattttgggaacaagagaagactgattagattttgaggaaaaccatgaaccaaagatagctttttttttctgtttaactctgtatattgtgcaaacaattttaatcttttaagtatttaaagaaataagcttattggagaatttgaactagtttgctattcatactgatagattttagggaagaacatttaaaaaatcaggttttgagcatagattttagtttcttttttgtaattaaaaagtttaaaaacacttatttttacttgctattgtttgcttcataattaagtttagaatcttatttgttttcaccaaaaggtatgccattttgaagactgagacgttggagttttatcctagaggataaaggaaatctttgggaaagtcagtattttatatagcaagtaagtaaatgtttttacccaacatctgcaattgaatagttaccaacatttaagtagaaaaataccattaaagtttgttaatgaaacaaactgtagactacttatcactgaaaggatgagaaaaccatcaaatttctttgcctgacattgaaaacacttctattactatcaagacagtcgatgcatgtaatttatattggagcaggaagacatttagtacttcttaataaaatggtgctttaggattgtggttaaatctgcagtaaagtcatcaagattatgtttttacaaatctggtatatacagtcttaagcctttttttttttttttttttgattgtacaaatcacattttaggaatggtctggaattttgcatttgctgatcgtaggattcttaacaacatttcaaaaactaaatagacactttcatatcttaggcatttaatagatttaaaatactcattttaattgttttcatgagttttcaaacaggtccaaaaatgtgttgttttctaggaaatgagagttaatgcatctaaagagtcctctaatttaattgcttagtaattgcttttaaagcatgaaagatagagataattttcacgcgcagtaggtattgggcccccagcataccatgtatatcacact

SEQ ID NO: 16789 - DNA, 1045 bp, Homo sapiens
taaccttcacaatttaaattgaaggatattctgatccttaggttataaatatgtgacttgatggtttatgtaacattcaagtagcatgttttctataacaatatgataaaagttttgatacataccttgtatgttgcttgacagatctgttttagaaaacattcctctgccttttgaaatgaagccatgtatttgaaattatttcccaaacaattatatcttaagcgtgtgctacatagtaatcatagtcattttaatttagattataaagctatattttaactttgaggtttgtgaattttcttagacatattaatgactttatagttaatggtgctctcagattttatttttaagttaaaaatttgccaggcgcggtggctcacgcctgtaatcttagcactctgggaggccgaggcaggtggatcacgtgaggtcagcagtttgagaccagcccagccaacatagtgaaacccccatctctactaaaaattaaaaaaaaaaaaaaaaatttagctggatgtggtggcacgcgcctgtagtcacagctacttgggaggctgaggcaggagaatcgcttgaacctgggaggcagaggttgcagtgagctaagatccacaccactgcactccagcttgggcaacagagcgagacttcatctcaaaaaaaaaaaaaaaaaaagaaaaagtaaaaaatggttttaaaaaccaagttttctaagaaaagcataaatgactaatgataatatgacaattgactaaagctgtccttactgtttgaaagaacaacaaccaaaatatgtatattatacctgtaagttattaaatctgaaactatgatattatgaaatagggtaggtggaaatacgagcaaaatcattaactttcatagtctgcctaagctgaattttgctcccttctcctgtctttccaaggatggcaaagtgattttagactttgtcaattttggtggttagtaatttttgtgagtgatgcatggggaaggagatgctatggtagattacattagtgtctaattcttgtga

SEQ ID NO: 16790 - DNA, 2075 bp, Homo sapiens
gtcttcacaaaaccctctgttacttataaggtcagattaaatttggaagatcagaaatatgttgtgttccttttaaattgcttcatttgtcaatttcttgggaagataatttagcacctactcttagagcaattttgaagcagatctttgctatatttcttttttttttgtttgagacggagtctcgctctgtcgcccaggccggactgcggactgcagtggcgcaatctcggctcactgcaagctccgcttcccgggttcacgccattctcctgcctcagcctcccgagtagctgggactacaggcgcccgccaccgcgcccggctaattttttgtatttttagtagagacggggtttcaccttgttagccaggatggtctcgatctcctgacctcatgatccacccgcctcggcctcccaaagtgctgggattacaggcgtgagccaccgcgcccggcctgctatatttcttgattatgatctgtccgaatgactaaaggaatttagatttgggaagataaacagggacttgctctataatttgaaaattagtcctaaagaagcatttgggtagcatagttttaactaaaatcctaaacttcgttgccttctaaaaaccttaaattgctacattttgtttttgtttttgtttttggagattgagtcttgctctgttgcccaggctgctggagtgcagtggtgtgatctcaactcactgccacctccgcctcccgtttttaagtgattatcctgccttagcctcctgagtagctgggattacaggcgtgcaccaccacacttggctgagttttgtatttttagtagagctggggtttcaccatgttggtcaggtctcgaactcctgacttcaggtgacccacccagcttggactcccaaaagtattggaattacaggtgtgagccactgcgccctgcctattttcatattgaacttttaaataagttttctttgtggtggtgggatgattattgtaatcatacttgggaacagaagtgatgaaaaaggtatgttacttgagatatgggaaacgctattttccatgtttagttatggggtattcaagtctaactagtggaaagtatggatacattttatttattttttgagacggagtctcgctctgttgctcaggctagagtgcagcgatgcgatctcagctcactgcaacttctgcctcctgggttcaagcaatttctggctaatttttgtatttttagtagagacggggtttgaccatgttggccaggctggtctcaaacacctgacctcaagtgatctgcctgcctccacctccccaagtgctgggattataggtgtaagccaccgggcctggccggatacatttttattatcaagtatatattttaggaatgattagtgttggtttagttgaatagattggtacaattagtagtaatttgaaatgatgcctatggtttcctaacattttgtcttagtgttgattaaagacataataatgtgaaataatatggtaatactaaggaatgagaaagtggccttacaggtgggcaatgtaaactttcctgtagaaggattgaaagtaaatagatgtaagactagaaagtgaaacaattctgtactgtaagagcaatgttggctgtgttaaataactcgttcccaaacatcagatccacctggggagcccaaatatttacctacatttttggagttcttaggggctgaaacttacgcttgtgattttgtagtaacctattctagagaggagccaaatttgtgatactcaagagcttgtatgatttctgcttggactgtattgttaatacatacatacatcttttggtctattggcaaatgacccttgcaagatgttgacattttgggtataaatcatggtgcttaataatctgttttcattttttatgtataaaattaaattctttttgtcctctgcagaaatatgaacctcaaactgaatcctctaaaggccccatacaatgaagtagacattggtggaaacatttagtaagtattattcaatttacatgtttaatctgtttagaaattttaaa

SEQ ID NO: 16791 - DNA, 1031 bp, Homo sapiens
agagttgatgggaaggttgtataaatgaattttggtgaattctcaacatgatttatttatttttattttatttttcgagacagagttccactgtcacccatgctggagtgcagtgtcatgatcttgactcatcgcaacctccgcctctggggctcaagcgattctcctgcttcagcctccagtgtagctgggattacagtcacgcaccaccattcccagctaatttttgtatttttagtagagatggggtttccccatgttggccaggctggtctcgaactcctgacctcaggtgatccacacgcctcagcctcccaaagtgctaggattacaggtgtgagccaccgcacctggccaacatgatttattattgacaacctttttggtaattatatattagctacttcataaaaataatttttttgaatcatatttgggaatctagattttagatgataatttttgcctatggctactttagcttgcgttgtgtaaatggctgctagggcctgcgaaatagattttatttttggagggggatttgtttttcaatacaggatgatgaaagagatgaaaacttttctaatatagtacaataattggctgtggtcattttaaagggatcagttgcatagcatatagtagatgctcaataaatacttagtgtatcaatatggcttctgttaaacattgtttatcagctagtgttttggatttaatttaaaaacagtgacattgactattaaaacatgttttaatgaattaaatataaaattgtaggtatgcctgaaagccaaagttttgaccaagtaaaaattaaaagtgacaagatttcattttttctctgcaattctcaatctcttagtttgcatatatagtcaacttttaaaccattgaggacggtaccggaatatttgatttgattgtaaaccttaaataagatgactccttttcttagttgtcacaattgacattaattttatagttagtttttatgcccataagacccagacttgttaatatatattcta

SEQ ID NO: 16792 - DNA, 1005 bp, Homo sapiens
gaagaataaatagttcaggttaaattgttttgtgttaatcatactgtttgtgattcatgtcaaatactgcagcatacacatccatggttaatacacgagcaccatttgttattgactgatgtgaggtggttggtctttgttaaattcaaaaatggaattttggatattgttcttgctacgaaatttatctttgtgtgtagagtatggaattgaaacagtttggattatggattttacctagattggacattgttgattttgtttggtgtaaatctaaagtggatttcttcagtgagggagagacatggttctggcagattatgttgaataaggaaagttgattggatttttttgggtgtgtgaatatgcttgtctgaatggagtgcttggtaggatattgtttctggaattagtaatttgtttctgtggatctcatggttttgatatttaggagaatttgctttgtgacattactttgataatttgcaatcacgtatgtcctattgttaataacattgttgaaatgggtgtatacttacttgatttgaaatataagggaagtgttgggatatgtgttttctgttggatttggacgtggagtttcttgggttactgatttaaaggtgatcgtgtttggaccatactcttgaatttttgcctgaatcagtatgggaagtaaatatattgtgattatgagaagtttctttggggggaggagtgtaatattttcaaggttatataatgggttaaagaattttgtgaaagaacaaagaaaaatggatattcttgaataaaaattggttgcattaacttttgctccagtgcaacttgaacactagggaggcgctcttgagttgtaaaagttacccctttcttccagtggagatggaaaattcccccttaaattttgtctttagattatttttaggcatcataaagaaggaaaaacttgaatttatattatgaaattaaggttttacttttatttagcaatcatttcaccca

SEQ ID NO: 16793 - DNA, 1138 bp, Homo sapiens
aattttttctttgaagaatccaggatatctaaacttgtaactgagggccatagagaagccttgtagtagtaaattatagtaaatagacatatcagaaagttatatgaatgaaaaaatgtacatttaaaaacaaaatcacttaaaggaccctttgactgatgcctctcagtttatatttttatgtgactttatatttcttttgatacacttgacattttaggaaattttgatgtgatttatcaaaacctttacttgatggttagagttcctgcatttatgaaatcaaatctgtaataacagaaatcctggaatactcttaatatatacttctattttgtgtttgttactgtgattaatatttgcagttgtatattttacatttaaattattttaaggtttgcatttgtatgcttaagacattgatttcctgttggtagatgtattttatcctcacaatttagatgtagctgctttaaatttattgatgtatttcgacagagtcgtctggaatgctttatcttctgaagcttaaaaatgtactgtttgtgcaaatcatgatctgtttcacattccttggagtaccttgttagtgatgaagtaataaagcctctaagatgtttttgttgtatgacctctgtatattaatttttaaaagtacatatgaatgcattttttgatgtgttctttatgcattttcatattataaattttaaatcatgcagtttaacaaggatgtgattcattatgtggttttccttcccaatttttacttttctaatttttataaataatacacttttctattaggctagtgaatttgaaagttttgaacatgatgtgttactaatatgctgaattctatttattttatttgactgaaagcatattgagccttgctttagaaaataagttaccaaatttttttgcattgagttgtcacccagtttgtagtgctgtcttaattgaattgcccatgtaaattactagattaaattgaggacagaaaagttttttactcatcctaagctgtttttttctggaaagtaatgacaatttgaagaaatgagaacctccagatatatttggcaaattattaaagattcagcactaaaattgttgctcccttgagtgtatcatt

SEQ ID NO: 16794 - DNA, 1047 bp, Homo sapiens
cacctccctttttgtgtagagactgaattctaattagttgtgttaatagtatttgctgaatacctttcaattcctaaaactggggtcaaagtagtcaacattgcagttaattatttttgaagaggatatgaactattctgttatttaagatattttaacctaaataccattatgagttaaaatgcataccatgatataacaatttacctattaactgttgacaatcttgcagccaattaagttttttatagaaccagtgttcttaggtatgtttgttgagccttctactttttttccctttgatgtggggaatagcatcaagcagcaagaaaagagtgttgatcgatttctctctctttctctctctctctctgtatccttgccgtttaaaatatgcactttccaactagtatttggccgttagggagttagtatctttgtaaagattaagtcagcagaggaaggtgggcaaataatatttttgataaagacttttggttgtgacagttgtagcaagttattgcttgaggagtgaatctggaagtttatttgaattttaactaaaactcacagattttatcattagtttactctcccttacccccaaataaaacaactgacagttatgagagacctcctgagaccacctggtatttccaaactcctatcatttctcccataaaatttgatacactaagtttgtttctggtataaaaattgagtgactgctctgtgtcagccattaaattttttcttgctatgagccatcttttttttttttttttttttaagatcctttagtttttagctgcttcttggtaaccttagaactttgcttccttgaagaacttggctttcttgatatggtgtcacttgaacaaagaaacttaaaaaaaaattcctctaagagtattttgtgtacaggtgaaagtaactttgtggcttggttacactgggtgtgtcacagctgagtaactccctcctgcacttcagcttgactaagcgttgagttcacatgtatacctttgcaaagctgccattcacaac

SEQ ID NO: 16795 - DNA, 1031 bp, Homo sapiens
ttttaaaatagagtaagggtagtacttgtctcttagggaaggaagttcaaattaaataaaatgatacttctaggcagtggtctttaactagtggcaggtttgtccccttccattaccctggacatttttgcttgtcactctgggggtgggggtgttactggcctctagtgggtagaggccagagatgctccccaacatccaagagtgtgtatgagacagctccccacaataacaaattatccagcctcaggcatctataatgccaccactaggctgggcacggcggttcacgcctgtaatcccagcactttgggaggctgaggtgggatcccttgagctaggagttcgagaccagcttgggcaatttagggagatgccatttctacaaaaaatgtaaaaattagccgggtgtggcagtatgcacctatagtcccagctatttggaaggctgaggtgggaggattgcttgagtccaagagcttgcggctgcagtgagctgtgatcacattacgtgcactccatcctgggcaactgagcaagaccctatccaaaaaaaacaaaaaccctatgattgagaaaccgtgcttgccttggtaaatgttggttgttagtaataaagttgagtccctttgcggtttcttctctggcctgatccagggacccctcttactcccatgacgttatgggcatacgtttcacatttattattgggattggtaatcagatcttttaatctcctttgaactttgggagttgctgaaagcaccatatattttataaaagtctaaagtttataacctaaacaatagctaactaaagacaagactcacagggctgaaaggaactcttggtcaaattggtccatctgtccttagggctttaatgggtgtaaatacattgcccgaggtggttaagtattcttttgttaatgaattctggggagaactccccttgtaactgcttttcacagcttggttatttacaaagacttttgattttacctgaatagaaagcttcttttgtcttttgtg

SEQ ID NO: 16796 - DNA, 1045 bp, Homo sapiens
tgcaatggcacgattgcggctcactgcaacctctgcctcctgggttcaagtgattcttctgcctcagcctcccgagtagctgggactacaggcacactaccatgcccagctaattttttgtatttgtagtagagatggggtttcaccgtgttagccaggatggtctcccatctcctgacctcatgatcttcccatctcagcctcccaaagtgttgggattacaggcgtgagccaccgcgcctggcctaaaaacactttttaaaaacactcattcaaatctttgctggttttgtgtagggtgggatgtacttgccgcccttggtttggatttggctctcatgattagacttactttagacaattaactagtttagacattaaaaatacttaaggtatataatgaagtgctgtgaattcactattaagcttcactactaagtttcagtcataaaatgtcactagtatcattccctgagagcatctgcctccctcaacccctaaaggcaaatatagttgtgaacttggtgttaatcttttcttgggtttgattttcattgttgttatttttgaaattacacaagtaatccatggaactcacaagtatacttcaaataacccatccctaacagagtaaaccagtgttagcaatgtggtgattaaaatgcatttatacacatagatatatgctgacagaaaaacggcttttttttttccccagaaggtattgttgtgtgcattgttacatttctaggaatcactctcctacacaaactcaaaaacacatagctgcacaagaagatacgtagaaagaaagatatttatggttacagtcaacagtttccaaatacaaatactctactcagaaatatggaaagtgtatcagagatatttgcaacttattgattaagtgaaaaatctgaaaataacctaaatgtaccgttaataggggaatgttatataaaatgtagtgaatttatagtataaaccagttcaaagggaatgagatgggcatccatatagacatatcctgatgcgggcattggca

SEQ ID NO: 16797 - DNA, 1033 bp, Homo sapiens
tggtcttatattactaaaattactatctgcaaatgttttaccatgagaatttttttttaagcagattcatgtgtcagttcttaaatatttttaaatctctctctctctcaaaataagtcactcagcctctgaagaagcttcgggttcagactcaggcagtcagtcggaaagtgagcagggaagtgatccaggaagtggacatggcagcgagtcgaacagcagctctgaatcttctgagagtcagtcggaatctgagagcgaatcagcaggttccaaatcccagccagtcctcccagaagccaaagagaagccagcctctaagaaggaacggatagctgatgtgaagaaggtatctactttgccctgcagtacaaatgtgctgctagcctaggacaagctagcagacctttgttgttcatgaaaactcattagtatatcttgatgatgaaacctacagccattttttctagtaatatacagtagtatatctgaggatacaaatgaagacttctttctgctctattaaggaaaataaatgacctgaaccatccaattatagggaggaaagacaaatttttatacgcttggtttttaactttatttatttatttttgcaacagagtcttgctctgttgcccagcctggagtgcgcagtggcacgatcttggctcactgcaatctccgcctcccaggttcaagtgattctcctgcctcagtcacccaagtagttgagattacaggtgtctgccaccacgcccagctaatttttgtatttttagcggagactgggtttcatcatgttggccattctggtcttgaacttctgacctcaggtgatccacctgcctcggcctcccaaagtgctgggattatagacctgagccaccatgcccagcctaaaatatatttttaaggttaaagtgagcagttccggaaagttaataatatgtagttataggttggatggacctacaagccagtcagaatgattgcactgtgcctttgataatcattatcctaaaatgagaacttc

SEQ ID NO: 16798 - DNA, 1032 bp, Homo sapiens
tcctttgatagacattttttgctcacgatctcatatcttaaactattctttattgtagactgacttacaatgtatggcttagtggtggagtcttgataagatttgcattttataagaggccagtaatgtaggagaggacagcagtttcacatgtgggagagccttatacatctgtagggttgggaagtaatttctttgtaacagctcagtcacttttttcacttcacccattcttcacagtgacttagtattgctggtccttactatcttttttctcgttcttgaaaatgaaaagaaaacgtgaaagaatccaaccaatttcaaatatacatacacacacacttaggccttttaaaccttgagtttttcaaatactcccaggacgtgtaagcctggctttaatgtttcctgattctttggtcctcagtgagttatgattgaaagtagcagggctgagggttggtgatatggccaagcaactcatttcctcactgcacttcagtttccttctctgggaggagaactttggactagttgatttgctaagttttttttttctttctttctttcttttttttttttttgagaacagagtctcgctttgtcacctaggctggagtgcagtggcccgatctcggcccactgtaagctccacctcccgggttcacgccattctcctgcctcagcctccagagtagctgggactacgggcgcccgccaccacgcctggctaattgttttgtatttttagtagatacggggtttcaccacgttagccaggatggtctcaatctactgacctcgtgatccgcccgcctcggcctcccaaagtgctgggattacaggcgtgagccaccgcgcccgaccttttttgcattcttatattgggagattctaagtcctcctggttgttcataagtctgtaaatctgtaatctaactggaaaactctagcctcaacacatccattctctgtgtttgctgtctgctatacttatagaagtggacctcattggtggccctggtttaggtt

SEQ ID NO: 16799 - DNA, 1032 bp, Homo sapiens
cagctgagtacagtggcattatgaaatagttttatttagaaagcttcatgtaatagcagtatataggagactctggagtaagtaattattaaagccagaaggtccagccagtaagatgtcattgaagtccacgaatgaagaagtagtgtgaggacaagggaagtaacagtggcgtggaaggagtggatgggagaacagttatggggtaggtttggtaggagtggatggatggctgggttttggagttgagagtaagcagtcggattccattcactgccagccgccctcatagagaactgaacacatcaataaccttatcaaatattcttattagaatgatacttctcataatgtgtgctatagagcactaatcttcagagaaaagtcccctgaaaaaagactttttggccatgtaactttgagatacatccctgaatgaatttctcctgtaaattcacgctatggacacacatttcagactttgaaaagtcatgagtaaagaaattgtataactttttgatcggttgtttcctaaactgatttggccacagaatccacattttatgcaaaccatagagactgacctcactagaatgctatcctttaagcttctgggggtgaaaacaaccttcccttcagaagcttgtttctgaagggaaaaccaaattcacgcaattaaagggtttaaggtagatgggcggcatttctgaatttacaaatcctgttatggtgaagatcaactgtatttagcatatgacagctggaggcaatgttttgtactctttagaatcagataacagaaagatagttgtttctgaaaaataggagactctgactgccatataatagacaagacctaaagtgctatttaatgatgttcatagatttatttcaggaaaggggcaagttaactaaaaatattttatttgaggatgaactaactctggcttatggaatattaaccatgaagaaaggggtgatggagtgaggtggtgattcacacacatgaaatttaagtttttggccaggcgc

SEQ ID NO: 16800 - DNA, 1032 bp, Homo sapiens
tatgaatgtactcatctttgtgttcttttacattgacgttattatacgtattgcattatattttcatcttacaagcctccctttttgttgggggacatatctctttggtctatggttgatgaagttccaaaggttggaatttgttttacttgttaatatatgtattttcctattcaaaaagtaaataaattgcatttttaaaagaaatttctaaggatctgggagatcccttgttgagttccaatcaccagggttcagtagctgatgaagtgcattttcttcagtagatgtatttctgggggccagtttcttctgattctggcaataaagcttttgctgttcggtggtcagtgttttaattctaactcttactgctttatagtttggttgcttaggtcattttagaatgtgagatattcattgaattctaatcagatttattttttatttggcatgtttctattacatcaatcacaaaacttatgtgatatagaaaggtagaagtagaaattatgtcttaattatgtttttttcttatagatacgggaatatgaatggattcattcccaaaccaaaagattgaagttcaacgcacttataacaacatatgagatcctcttgaaagataaggtgtgtaattaatatctaaaaggctaaatcttttccagtgcgacttgtccagatggtagggtctgttactgttctgtggagcatgttagaaataaatacttgaaagttaaaaataaaaaacaaatggtagggtctgtacctcctacttgccatgttacttttcttctcttatttcaaaaagcaagcaaatgaacaaccagaaaaattacttttcaaaggatattaacgttataaatagaaaacagaaccctatagatgaggggaccttaggtcaccaagtccagttgaattaaacagaatgaaagggtattgaataggtcagtaacttacctgagattattgtcagtcattggatgccatctcaggtatttcccttgaatgtcatcttaggcatttcctatt

SEQ ID NO: 16801 - DNA, 1023 bp, Homo sapiens
ttccaaatctggaaatcagaactgtaaaatgctctaatgagaatttcctttgagcgtcatactggcactcagaaagttttgagtgccattttggaacattttagattttcacatttaggattctcagcctttgtgtacacacacacacttaaatatgtataaagtacatgtgtgtaaatatgtaaaatgtatgtatgtatgtgtgtgtgtgtatatatgtaaagcatatgtgtgtgttgtgtatatgtagagagagttgttttcttctagtattcctgtgttcagtgaggttgaaatatccagcagaatctttaacattcctaattctgactggagatgtgaaagatgtatgattagatggcaggagatacaaaagaaaatattctttgcttcttaaacttttttaggcctctttttttctccacaatactactactatctcttatactcttctggtacctacaactttctgtttttttgtatctagtagtatcattatcattttaatttgcaggtggattctgaccaggaattacaaggctcttgccaaaggaacaagaggcagcacatctggttttcttaatattgtgatggaactgaaaaaatgttgcaaccactgctatctgattaaaccccctgaagaaaatgaaagggaaaatggacaggagattcttctggtaggtagttcctcataattactttctcaaaaaaaacgcttagtttctctaggtgcttttcatcagaatgctctatttccttgttggtgacctatcaaggatcatcaaaggaagctttaaaaatgggagagaaaaggtaactaagaatgatttggaaagtaaagtatagtatcaacagatactgggaaaaagaacatttcgggaattgctggtcaagcaggttgctaagggcttcagaaagctttaagatgatttttaaaatatggatttgtagagattagggaagattaaaatttgtgtttcaacataattattggaatgtcttttaaatcttcagtccctcata

SEQ ID NO: 16802 - DNA, 2190 bp, Homo sapiens
ttttaatttttgaagtttcaccttgtcatttgtataaattatagtttgagacattagatgtaaaagatgtagagttgaaactgaaagtaaatgaaatatcagaaaggagaattggtttatttgcaccaaacatttttagtaaatacgaataatttctgggcaactaggcaactcatctgttgccattttattctattcgtgttggcttttgttcttttaggaaatggatatagatgaaattttgcggttggctgaaacgagagagaatgaagtgtcaacaagtgcaacagatgaacttctatcacagtttaaggtatgaagatctttgtgggagagagttctcagcattgattcattaatgatgactaatgtttatgaacgctttctttgtgctaggcgctctgcttttctctttacctgaattgagtcatatcctcaatattgttctctgaattgtgagtatgttgtgaatgtaggttctacagtccgcacgaaggtaatcactgaagtgggctatcctatgtagagtcagtgtgtggcggaaaagaaatcactgaagagagggctaggtagagagccaggacagagtgtagaaccaggacgtgtggagcactgtgggacacgtcaatagatcagatgccaaagagaggtcaaagataggaaaagagtagatgacaattagaaggttctgatgacttggtgagattttagtttgttttttgtttggtaagtgagagaaagaggtgtcagtggtgtctcatataacagaaaattacatgaaatgaggactaaacacaaaagttgggcaccagacgaataggaggtggcagcacagagtatcaatgttattaaaaagcttagtgaaagagtacagggatgctaaattatatggctagaaggttgaagcaagacaaggtttttgaaagatgttaccatgtttctagtttgaggaaagaacttgagtatagggagatattgaaggttctcaggaaggaaatgatttgatggcacattgccccagaggagactggaagggatacagtcaaaagcacagatggaagacttggccttggaaagaaaaaggacaagtacactttagggaagaggaggaaagagatgctgtgggagtttaatttatgctcttaatgactagtaaagtaagtgaggtgtttgcttgagaagtggaaaagatttgggacagccatggatgaggcagaaagttgttgggaggaacctgatagggagtcagctgaattgagatgatacagctttgccgtggagccagtcagcagggtcatatgactttctccagcaatacttttgaggtcagagaaattggatcagttggctatcccaaggtgggagattggcttgggaggcacaggaaagtcaaaatagcaaaggttttcaagattcatgtgacagcttggaaggaaggattgaccatgggttgattccatggaggtagagaagcaagagagacctgatgattacaatgatggctaagtgtagtatgcccattaggattgaattgaattaggggaaattgtgtgaagtgtttggaaggaagcaatattgtgtgattagctccaaagctggccactggtagaagttgtttcaatggaagaacaaggatggaattgagtgggccagagagccctagattaatgggttaggatgcagaggatggggtagagaagggggaaggtgatttattagtgttcgtcatagtcggtttgggctcctgcagtaaaataccgtagactgggtggtttataaacaatagaaatgtatttctcacagttctgaagatttgaagtttgagatcagggtgccaacatggtcaggttctggtggaggctctcaggttgcagactgctgacttttcttatcttcccatggtagagagagagaagctagagagctctctgggggtcccttttataagggcagtaatcctattatgagggctctaccctcatgacctcctaacaccttacattgggagttaggatttcatcctatgacttttgggaagaacataaacattcagtccattgcactgtttcagctcagttccacctctgtgactgctgctcctttcttcagcaataaaaacctgcacttgtgtaactcttactgtgtttcaagcactatcttaagttaagggccagagtctggcctttaacc

SEQ ID NO: 16803 - DNA, 1029 bp, Homo sapiens
tagtagagatgggatttcaccatgttggccaggctggtcttgaacttctgacctcaggtgatcggtgtgcctcggcctcccaaagggctgggattagaagcgtgagccacccacacccagcctagttagttgtcttttaaaatcagatagaaggaaaagagttacaaaaatgcatgtatactgtttttatatttacttactctattattccatgggtgctcttatttcttcatgtgatttgagttactattttatgtcctttcatgtctgcccaaaggactctcttttagcattttattttgaggcaggtctgctaacaatggattctctattttggcttagctcgcactgttaatttcatcttcatttttgaaggaaagtcttaatttctttttttctgtttctcacgtgggataatctcaattggcctatcttcagatttggcagttctctcttcttcaggctaatatctgctgctgagcctcaccagtgattttttttttcatttccgttattgtagttttcaactctagaatttctatttcactctttaaaaaatgtccgtttttaaacagcatttctgtttctattgatatcattttcgacctttctttttaattctctaggcagactttttttaactcttgtaaatatttataatagctgattagcatccttgtcttataagcctacatgctagacttccttagggatggtttctattacctgctttttttcctatgtatacttcatacttcatactttttttttttttttttttttttgagatggagttttgctcctatcacccaggctggagtgcaatggcgcgattttggctcactgcaacctccgcctcctgggttcaagtgattctcctgcctcagcctcccgagtagctgggattacaggtgcccaccacaatgcccagctaatttttatatttttagtagagacagggtttcaccatgttggccaggctggtctcgaacgcctgacctcaggtgatccacccgcctcggcctccca

SEQ ID NO: 16804 - DNA, 1021 bp, Homo sapiens
accaactaaattctcagtgaactcagctgagctttatctccttttgtttccccaatttataatttcagttcaggcccagaaagatggaatcccagctaagaaatacaagttacaccctgtactagcagcccatgtgtgcatgttctttaagtgctcttgcagctatgtcatttatattgatttccctgtattattataagcaaagcaaatttgaggaaaaaaacccataataccacacctcatttttttcaagtaatagggtcataagtctcattcttcatataatatgttgagtatgcaatatattatgtgttaggctctggaaaggcagaggttagatcatgttacagatcatatctgattaggcagataaacagtattttaaccttttccttattatatgtaacttgctttcaggttttttaatgttactattatgtctttaatatattatctttatttgtacttttgtatacagagtgattttccttttttaaaaaaaattgtgtctttaggatggattccaaagatgtggaatcagtaggtttaaggaatatggatattttggctggcaaggtggctcacacctgtaatcccagcactttgggaggctgaggtgggtggatcacctgaagtcaggagttcgagaccagcctgaccaacatggcgaaaccctgtttctactaaagacacacaaaaaattagccagtggtggtggcatgtgcttgtagtcccacttagctactcgagaggctgaggcaggagaatcgcttgaacccgggaggcagaggttgcagtgaggcaagatggcacctctacactccagcctgggtgacagtgcaagactccatctcggaaaaaaaaacgaaaaaggaatatggacattttaatgtggtataggccatgtataaggcctataggtttttatttgttttggtttggtcttgtgaggtaaaatgagttgcactcttttgatttctttggaattttcttgtttgaattatatggctgctactgcttt

SEQ ID NO: 16805 - DNA, 1063 bp, Homo sapiens
ggaagagggtgatggagcaggaggctgggcacagaaggctgtcccacgggggtaagacactggctaaaatgtccacgtagaaaacactagatcttgatcgtccacaagaacagagggattggctgattggctgatactgccagtatcatgagaaacaaataaaggcccctagtgatgcccgggtgtttgggggcagcttcatgcacacacagcttgcacacggagcttctgcacaggaaggcaaatctcatagctgcaaggtcagggtcaggccaggcaggggctggacacactctgggaagcctgaggagaggccctcaagggcaggtgtgcagggacagatggagtctctggctgcctgagaggggaaaggggagtgggttccagtgggtggtagagtctggcaggcccagagggctctgttggtggtagtcgaggtggtcacagaaacccagaggcctcatcatcttggagatgaaagtcccttgcctttccctgctccctgcagacaccaggctgctctcccactccgcctgctttggatgtcgactcctctgttcctccatccggaaacttgcgctgtgcttcaggggcgagcttggtggatgggctccccagttctctggacagagccaaggctcccaatggccttcaacatcctgctgccccagcctccatcgccagctcccctttgctggtctttgctcttcactagcctgggagcttctgggagggagggcaacaactagctcagaggctggcacagatgcaacgtctgttaagtgtttgctccatcaatgagtgaacaaacacacctgagtaacggaggcctgacagacaggcgggggcaggccaaaggtgcctgaagccagccaccgacgttctcaccgggggaccacaataccccagtctggcccgagttctgagactgacttggccacagacactgacgctgtcactgtctggcctccagcagagcctggttgacagggctgagctctcagcctgctgagatcaaaggtggccttcggttgcagcagaaatgggctgggttggtgaagct

SEQ ID NO: 16806 - DNA, 1053 bp, Homo sapiens
tgtaatagaagtaagaaatacatgttttgttgtcatagccattgattttacggagtcaacagttactgtaccttaccatagcctatactgaccaataaactgaaaatttcctgtgttagtccatttgagctattataaaggaatacctgaggctgggtaatttataaaggaaagaggtaattggctcatcgttctgcaggctgtacaagcatggtgctggcatctgctcagcttctgtagaggcctcagggagcttttactcatgacggaggctaagtgggagcagacagtcagtcacatggcaagaaaagtagtgagagagagagaggggaggtgccacaaacttttaaacaacgagatctatcacttcttggccttttagctaagatcaagtgtagtatctgtttttatcagtttaatatatgatacatcttctatccaaggacaatatattaaatggatttttggagcagagagatggaatagaagcttgctccatccactccatgcatcgacctggtattgcagtacctccaggaacagtgcaccccctcgaggtattaaaaaaataaaataaaataaacaaccagatctcaggtgaactcagagcgagaactcactcatcaccaaggggatgacgcaaagccattcataagggatccatcccaatgacctaaacacctcccaccatgtcctgtcggtaacactgggaattccatttcaacatgaggtttggaagggacaaacatccaaaccatgctacctctctactcaaacataaaacatcatatttagaaaagtcattattgttgtggcataactatattctacattgatttgaaaaggcccctaattatagccagcaatcatatgatgagattaaattgaattgatgaacagattacataacaaaggggacaaaacatgttttgtgaaaacacactttcaatattgaacctaggccgggtgtggtggctcacgtctgtaatcccagcactttgggaagctgaggcaggcgaatcacttgaggtcaggagttcaaaaccagcctgg

SEQ ID NO: 16807 - DNA, 1062 bp, Homo sapiens
tgtgtgtgaggcggcggcggcagcagcagcagcagcggctccggcggcggcagcagcggcagcagcgacttcagcggcggcggcggcgctagacgcagcggctccgggcccgacccggcggcttcggcggcggctccggcggcagcggcggcccgggcggcccgcagggaacggcgagcggcctccacccagcgactgcgggcggcggcggccggagagagcgaggcgcgcgccggacgcccggggcaggcggcggcggcggcggcccagcgccaggacgacgccgcgcagcgcccgacgcggaccactttcatgctgattcccccggacccgggcagcgctccggccactccgcgggccgccggcctccgccccggcctgcctggctccctgggcgcgcccgcacccggcgcctccgatctcctagtcctcctgatttcgatggctttcctgaatggctgactgtgggctgccctggacttggcccccggacagtcgcctctcctcctcctctacctcctccttcaccaccacctcctcttcctcctcctcctcctcctcctcctccgccaactcctcggctgcacaccagctctaagagcgagagtgaacgagagagggagggagagagtgagagcgagcgagatctttggagagatttttttttttgcctcctacttctgtcttgaagccagacaatcgacttcagctctccctcccctccctctttctccacgttctgctcccactcgctctcctgtccccttcccctcccctcccggcggaaagccccccgaaaccaacaaagctgagccgagagaaacaaacaaaacaaacacaccgggccagacaagccatcgacaaaactttgcaaaagcaaaaacaaaaaaggaaaaactaaccaacctcaaccaaccagcccccgagccacccggggcgccctcccgcgccctcttgcaccctcgcacacacaaaaggcggcgcgccggagcccgagacccggggagccgccgccgccccgccgccgcccgcagccaggggagcaggaagtccggacgcagc

SEQ ID NO: 16808 - DNA, 1033 bp, Homo sapiens
cattttgggccacacctgagctttttggctgcctccaggctgagttcagcatagcccaggtggatggaaatcaccaaccccctttcacattcttgtactaagttgtcagctgatccttttgtcatggctgagaggggaaaggggttcccgattaagaataacaaacatctggacgttagcagggcttggaacctagtcacccactacaattttttaagcttgttaacaggaaacgaggagagatgtgtagtttatgtggcaaacataaaggaggtccacaatctcttccttattgttcgaaagaagtctggggaactaagtcattagctgaacagcttgcagcttcttagtcctcaaactgctgtcttgtacattgctgctttccacataaaacctcccagcacagccaccccaaattctgcctttggaagtccttaggtaatcaattaaaggccagtgtctgggcagggaagctgtttgcagaggtttggatagggattatttttctcgagtgcccctcatacctagaacgtttgcctgctgcagatatacagacaagatatctccctacctcatagccaccttcacccctgtcccacaacccaacacccagcccaccttcttggacgatggaggtagtcgttaatttcttggtatcattgctagctcttagccttacccttggtctttcaaggaaaaaaaaatgcctgatactgtcgttaacagtttaatttatgactatttgcaaaatgtggaggcctgtgtggagaatgcaaatcgcctcacaaagagataaaggttcctgttatctgattcagagggagacacacagttccgaggatgccgagggaaggagtcctgtgcaaacagatcttttagttcctgtccacagacacctctacattctgtagacatgcagagtcctagatatacatatgaggaggttgcatgtgtgttctggttcttggggtggaggtggtggtggagattttcgaatatctgttttaatgactcacaatatgcatatgttaac

SEQ ID NO: 16809 - DNA, 1026 bp, Homo sapiens
agttttgatataatcttggcttcttaaaaactgtgtatcattaaaatatatgttctgcaagaattaaaactgagtccatgaaaataccataggaagacataaaactttaaaaggcaactcaaagatgatggaaacgcacttacaagtggtgaccaaaatttttaggtgaagtcgagcactctaattagagaactggaggaaccacatataacacttaacttcccctaccctgcccctccccaaaagaaaccatgacaaacctagcttttaaaaaatattttaagaaagagaatgaactgtggaatttattggcagccaaggaatgtgtccaagacacatgctgaggttttgaataaaaagtgaacttttgtaatttgaattgggtcccgcttagttcttgaattgttatgaaaatcctatatctgtttgtatatttgcaaaccctttgtattataattgttgatattttccctttttaaaaaataccattgaaatcagcatgacaaaaataacactgttggcacttataggtaacgtgattgattcagtatcttagagtttacagtttgtgttttaaaaaaactgaaggttttttttttaagtgcaacatttctgtatactgtaaaagttataataactgaactgtttggtcgagtctttgtgtgttatattccaaggaaaattgaaagtattcagaaattaaaatattatttgatatctgaaacctggctgtccccactcactgtctttacatctagaagagcccctgtgagctctcgcttagctggccgggcggggggtggtgggggggggcatttgtttactcccctcagtcagtttgttcaaaggtggactactgtatttgcctgtttaatttgggtgtgtgtgtgttggggggggagctgaagttaatggtttatctatggtttaggaagtgccatactgatatagtaaaccacccccattcacctaatcctccttttaattaaaaatggattttccaggaaaaaaaaaaaggcccttata

SEQ ID NO: 16810 - DNA, 1046 bp, Homo sapiens
tcatacagagacacaaagggcttggtatctgtcctggaggcctctgtaaatgcccccaaacccgggaagggattctcatctcctctaatagagaacagatttcctcctcttaacatccattgtcattaaggcgcaaagctgactcttggagttgtaaatcttatcgtccttctgataacacacttgtaataagttagcgtcctattcaaagtgaattgtaaaactgcctcatttaatatggcatctgtgtcattaaaacttttatttttctccccctcgtgtcttgcaggtttggccttggggctagcgctgaagtctctgcctatggggcctctggggtagggctgaggggaagaaaggtgtgaaagacgggctgcctggattcagcctctggatcttagaccggggtgagagacccgaggcagaatgggcctggggggtggtgtccctctatcccatctcccccggagcggccccctcgaaatgacgttccttgaaagaaacatgcttgtgattagctaagcaaacacatctgctttcggagttgggccttcgttaattagctgaacaaagggccgttttgctttttaccttttgctggggagagtgtgttatttcaggagtgttgcgggccctcctcttttcaattgcagccacgacgttaattttattgggattactgatgggaaatgaggtggcgcaggcttccgagaggaaaagcttgatcattaccccctttggaactatatttttccacccaacctcctgcttgagaggagggggtggggggcgaactgcgctgcaagttcggagcaattggaatcaggctcgcggtgcgctgatctcgggtgacagagcgtgtgttgaagctgaactctataatttgcgcttctgttcctttattaggcctggacaacgaactaatgagctttggcccagtacaatgtcacttgtatttattttcttatggcaactttgagatagcggaagtgttctttaccaagagccagggagggcccggagtcctgccggctgctgtcccggcc

SEQ ID NO: 16811 - DNA, 1073 bp, Homo sapiens
aagggccaaggaactcagcaatcaattagtttagatcttttcatacttgttgctaaaatcaaagtataaaactacaaccctggctatacctaagaatagcttcttttcctattttttttcaagtcatgtagctaacacgtaggaaatggcagctgccttattttcccaagtttcttttttctgattcttctgcctagattagcctttaaataatcaaacgattttctccccccgcccctttctctcattgcagtttctcatctgcctttatctgcctggtttagtttttaaaaatacacttatttgtaatatgtattattttttaaataaatgttccttaatcctctctctttcttcccccttcccttgcctggcagtgagaagggaaacgatgttgtttaataatcacaataatacagtgctttctagacaaaggcaaaattaaattttttataaccacaacaagaagggaatcaacctctctttctctctctctcatctctgtctctttaaataagcagctgaggaaataatctcccgcactgaacagaaactgcttcctccttgaaaatgccaccgttcccacctccctggccctctctgggccaatcccttgggctgtcggctgtctgcctgtccaagaccctggttgggggtgggggtgcgcctatggagatccaggggcgtagtgagaaggcagtggggtctcgctcgcctacgtgcggctgccgaggcggggctgacagcaagttctaaagaggggcagctaatttattaagtaattcttacttcgcttcagcatcctctgcctacagctcccgaggctccggcgaggagggggaggggtctggggctgtgcgtctccccctccgcatttccttctccgccttccaggctccgccagcccctccaccagcctcatcactaattaaaacgccctgtggctttgggactgagtaggccggtcgttgaactgtcatctccgccaggatgggaaatctagaacatcccctcttctgcaaaaaaggttccgaacccagtgaagtgattgggcggagtgtcattaatctctc

SEQ ID NO: 16812 - DNA, 1047 bp, Homo sapiens
cccggtagactgtggggtttttctgtcgcactgggcagcagttctgggtgtctggaatgggggagctgttaagtgtggggctccggccccactttccaccaatgcttcctcaatgagctaaaacccaaattcggcttcattatgtaccaccgaatgtaatttatagctaggcggtctgtcggcggcgatttaaatcatttggtgataaggatcacacttattagatttcttcaaagccgatgggggttttctatctttttttttttttttttttttggagggcatttgtgctaaattgcccagtgctggtgtgataactgtcaaaagtttgacatcaaaggagctaatattattcagttaccagagaagctgtctgtctaaataagaatatcttaattactgcatcacaaaggtagaaaaggggtcggatctgaaaaggggagaggcattcagccgctgcttttgatgcgctatctatattagaccgatgcgccgttcttaatcaggcctagtccgatttcctttcctctctcggtcggtcctctgaactttataactatatgtaaacacgttgtcagtggggacataatcttctcaggttcttattagaagaaatttccatcctctcccgttctagattaggcgcagtggagtccgctccatcaatgaagggactaaggtttcgtggacaataatgtggcaattgttgatggtttgtgacccataaaatgtggaggtgactgttctggctttggtatgtaattatgcaaaacactttccataaagacttgccattcgatctaatggcagtccctgcggtctatttcaaaaagggagggtctatgtacagagagagaaaagtaacatttgttttaacacaggttttataggggggatggataaatacaaacacatcacaacgccgcccaaagtattttttcgagtcaaattaaaataattatcagggggtttaataagttaatcatagcaacacggcccatccaaacacacagggaggggggttcaggcttcagccgaccacctctc

SEQ ID NO: 16813 - DNA, 1036 bp, Homo sapiens
tagcatgaaatgctcgtgctataacacaagtggcgaggtatcgccaatgaactaggagtggaaacacatcaggagcagacttgacctttccttggatgcctgcagaccacgccaagtgggatttagtgggcaccactccccataggaggcttcatggtctaagcccagatctaagcctgaatgaccacacccccaggagtctttgccacagaggactgaagctgagttccttgaaggcaaggactttagccacggaagggaacgcgaggaacttcgggcaatctttttgacgccacgttccattttttaggatctcttgccaatttctcagtgtgtttctgtccagatagactaagctctttggagttaattaacctgtggtagagccacaattaatacggagagaagacggaaaggagaaaattcagaaggaagggggaaaataacagtagtgtttgtctagccggattcttttacaccgctcggtcacagttagttaccgactttccagctgcgaggacgatgcgcgccatttactgtaattgaattgctgtaataacaccttgcaaggggacagcaatgcgtttcaaaaaaaagttgcgttcctggccagcagttgcctaagctcctcctggagtcactggttgcctgctagatagagctgccccaaggggatggggacacagggctggttgggtcctcgggtggggctcgaggaacctgctttcaggtgaattcgttccgggcgttcggtgtccctgggcttgcctaggggtactggggacccttagtgggccagaacccgaagctgaacgtgaataagggacagggtaggacctgaaattgcagagacatagaaaatcaatacgtggtcgggagtcaactgcgcgcgaccaagggctctgccctccctctctccgttgatttggacgctgggaagctgcccgccgtccttccccaccccctttgcccagccttggcaagacctctccggaaacatactcgcgttaaggaactgggaaagcttcctggcccg

SEQ ID NO: 16814 - DNA, 1023 bp, Homo sapiens
ttataaataaaatatatgtatttggcacacaattctgatggttcagatttcaagattgggcatctgtatttggtgagggcctcttgctgcttcagcttatagcagaaagtggaaagggagtgggcacgtgcaaagagatcacatggcagatgagagaggaagccaaactcacttttataacgatgcactttctagtaacttattcagtcctatgagaatgacaactcactcctagaaaagggcactaatctatgtataaggaatctgcctctatgatccaaacatctaccactgggccccatctcccaacgtaccacactggggatcaaattccaacatatgtttttggtagggtcaaactatacccaaacctttagcaacatataattgaacattattgtataagttcagagtgtataacatgacatttttggatgtgtatacacagaaaatgattatcaaaatcaagctaattgatatatccatcaccttaaatagctatctttttcgtatttgtgagtctggtgagaatacctaagatctaccctcttagtaagatataagtatacaatatattattattaactattgtcaccatgacagatacttggtctcttttattcaacttatattaataaccaaagtttgtcctcttcgaccaacatctacccattttccaacccccaacctctggtaaccacccttctgctctctgtttctatgaatttaatttttatagaaagttttaaaaaatattttaatatcccttaagatttcttcattgacccatgtggtatttagaagtgggttgtttactctcaaaatatttgaggattttctagctgtctttctattactgatttctagcttaatttcattgtggtctgaaataagacaatgtgtgatttttattcttttaaaattgttaaggtgtgttttattgcccagaatgtggcctgtgttgatgaatgctcggtgcaagcttgagaagtacatgtgatctgctgctattggatatagcag

SEQ ID NO: 16815 - DNA, 1078 bp, Homo sapiens
taccatgtaatgccaaaccattggtctggtattacagtcattgatccagatggctgaatttgccatatggtttcttactacttacaacattcctggaaaggtggctatttcatccaaatgagccttcaactactgcagtgtccaagtttcatgcaaggggcctgctaccattacctgatagctcttggaagcaatgctcaaatcaacagatcttttgtagttctctttaatggagcctggatgatgaatttacatctatctatcagaaacattgtcttctgccctacattactaatgacagaaaattgtctctatataattcatcaaagtatgtctatagactcactcctttattatcttttctcttgcaaactgtataattcccccttcattccacgtcaggggagacctttaatcttgcttgggtgcattctgtagggctttctacattaaagagactgaacaggtgccactggaggcaacaagaatgggagcaaaccacgatgaggacggtcctagggtagtgacttagtaaatggctagacagaaaacattttctaagagatcacagcctcaggaaaaggagttttaaatgtttatttgacaaaaaataacttattcatatttacatatctctttacttttcctgcagaatggtcaccctataatattgatttacccttgaagaacatttgcaatttgatgtatccctgacacacatactttaattctttgtcctctttaataacagagactaaaatgagtgaaattctgataacctaatcatggtatttctatttcagtgtcataatgggatccttcaaaatgactgacaatattatatgattcacaaacctaagcctttgatgtctcaatgctttttctattcctgtcttagattttgctccagtgatgtatggtggggaggtaggactgaagtgaactcttttcccaagggcagatgttccattggaaaatgtgttagaaataatgacttaatatagagaaatacagtgaaaggacaaaatcaaaaacttttaggtaaaataaaagcacagagattttaaatatggattta

SEQ ID NO: 16816 - DNA, 1014 bp, Homo sapiens
actcttaattaaattgtttgattccctctatcatgatgatgtttgaaatgcttttgcagtaactttcatgttctttcaacccaggagtaaataaggagaatctgaaggtcaaggaggaacattctctttattttaactctttgcatgtctcattttatctcttctcccacctgccaaccaagagtggcctcacaggttagtggggcagtggagctattcatgtcatgtagaatggttcaaattcaacagaggtccagagaacagtttttgatacttgaaaccctgtctttacttaaaatttattgcatatgcattagtaccattctcttaaaaaaaaaaaaaaaaaaaagagaaacacatatgttcatgttcagataaaaactaaatcactgttatctatcctatgggattctgtctcctgagccacaaatctgaaagctgacaaaggtttctataccactgttgagtgtaaaaggatgtctgtgaaatagaggttatgtaatgaaatgccagaatttcagaatagtccaacgactaacagagctagaatcagaatcagaactgcctagaaacatccaaagcacgagaccctcgcagatgattcattttaatacagaagtgatggtctctatctagtgcactctcaggatttggaatttcttgatagcaagtttgtatcttattttggatctatcattgcacattgtgcaaccttgaaagcatatggaaagggctgacattcaactccaatatggccaaaacaatggtgtagctactatctgttctgattgccagtgtctataccatagcaattgctaaatatttttataacatattctctctctcttttttttttttaacggagtctcgcacacaaaggagatgagtgttttatattttagtgtgctgattgattttgacagattttcctttgaggaaataaaaactttacagaaatgagataagattatatattttagcacaccaaatgaatgtttcttctagattttatag

SEQ ID NO: 16817 - DNA, 1011 bp, Homo sapiens
aggtgattggatcatgggggccgtttcccccatgccgttcttgtgatagtgagcaaattctcacgagagctgatggttttaaagtgtggcacttctcactgtctcatgcctgctgtcatgtaagatgtgctttgcttccccttcgccttccgctatgattgtaagtttcctgaggcctccctggtcatgcggaactgtatgtcaattaaacctctttttctttacaaattacccagtctcaagtagtatctttatagcagtgtgaaaatggactaatacacaagattaactagttttctctgaataccattctcaaaatctggagagagctcatccagctgcttcagttaggttgacactagtggaagccctgaaactagtcagctttgccagaggcatggagggcaggatagtatcatgtaaatatgtctattcatctgcttacagatatatggaaggcagagaagatgtttgaggcggctagacatctgaatagtaccttgcaaagtattaactaaaagtatattttaaaattatttgcttatttgcttattaggaggtgtgatactaaaagtacattttatcttttgcagaatcctcacggtgtttctaagtcgatttattgtgaattgttgctggtgacctcaggttttggtggcggacaaacctgaatgccattctggctctgttattgtgggctgtgtatttttgaccaaagtctttaatccattatagtctcagtttcctcatctgtaaaatgataaaaactgcatccaccatatagggttctaacatgaataaaatgagaaaatgcaaataatccaccaaactaaaatactcgacacgtacgtggcaaaatgtaagcacacaataaacagtaattattaaaaatattatttattttacatacattttatgattgcaataaattattgcacccaagagtactagcattggcgttgtacatcatgatcaccttatgggggttgcttatgctagtaggatctgatt

SEQ ID NO: 16818 - DNA, 1114 bp, Homo sapiens
aaagtctcccattattattgtgtgggagtctaagtctctttgtaggtcactcaggacttgctttatgaatctgggtgctgctgtattgggtgcatatatatttaggatagttagctcttcttgttgaattgatccctttaccattatgtaatggccttctttgtctcttttgatctttgttggtttaaagtctgttttatcagagactaggattgcaacccctgcctttttttgttttccatttgcttggtagatcttcctccatccttttattttgagcctatgtgtgtctctgcatgtgagatgggtttcctgaatacagcacactgatgtgtcctgactctttatccaatttgccagtctgtgtcttttaattggaacatttagtccatttacatttaaagttaatattgttatgtgtgaaattgatcctgtcattatgatgttagctgattattttgctcgttagttgatgcagtttattcctagcctcgatggtttttacaatttggcatgatttttcagtggctggtaccggttgttcctttccatgtttagtgcttccttcaggagctcttttatggcaggcctggtggtgacaaaatctctcagcatttgcttgtctgtaaagtattttatttctccttcacttatgaagcttagtttggctggatatgaaattctgggttgaaaattcttttctttaagaatgttgaatattggcctccactctcttctggcttgtagagtttctgccaagggatccgctgttagtctgatgggcttccctttgtgggtaacctgacctttctctctggctgcctttaacattttttcctttatttcaactttggtgaatctgacaattatgtgtcttggagttgctcttctcgaggagtatctttgtggcgttctctgtatttcctgaatctgaatgttggcctgccttgctagattggggaagttctcctggataatatcctgcagagtgttttccaacttggttccattctccccgtcactttcaggtacaccaatcagacgtagatttggtcttttcacatagtcccatatttcttggaagctttgttcgtttctttttattcttttttct

SEQ ID NO: 16819 - DNA, 1051 bp, Homo sapiens
gaccctcaaagaaatgatgtctttaccttattggaaaaggtaacttagaatagatccccttcataaaataacctggaaacaattgatgctggatattcatatcatcatcaaccaacagacagtcagaatgcaatggctgcaagcatgcatatgcaatgctttcaaagcctttgttttactagagggggagaaaagctggaaaaagtatgcatttgtgtcctcaaagtctgtgtcctggatcttaacaaaaatcgctgtttctttaaacaggcaatgtgggcttgggttgtacccgacagagagcagaggccctgtctaatttagaggagtgcaggcgtccttgtcaaagccaggagaagctccaatcggattctcagtcggagcctgaccccatcaatcagagtagcttgtggttacaattttctgggaaatgtggaaaatcatcatctacagtaaatctgctgcctgaaatgcctcgtgtcatctatattttatttaaaattttggtgtagatcttctattgtttttgtgtatccaaactttggtagaacaatatctcactaaagactagccaacatgactacagctgaaaatgcctgcaaaaatcccataactttctttaagttttaatttttatttattttaaggaaaaatgcttctggtaaatcaatatcttttaacatcgaaaagacctcacattgacaagacattgttgagacaatggcaaacatggaggtatggtcctggcctcggggctgtcttggtattgttaaagaaacagtcatgatcctaaaaccgcagctagggtttgacaagaagagaaattgttaggaccaagggaggagaggaggttttctaggtatatggcgtgcgtggacagaggcatggaggctagagaagtcatggcttccatttgcatgaataagcagcctgggtgtggttacagctaggaatgccagttagcagaaagcagcctgtgagactgggaacatatattaggaccagatggcagagggcctagattgacttggtggcagaggagagggtttaa

SEQ ID NO: 16820 - DNA, 1065 bp, Homo sapiens
gtaccctgcaaagtgtttcccagtcattgctattactttttgaaactaatctgaaatagagttatcatcatctattagaaatgagacaaataactttcaaggagaatgagtaactagcctaatatcatatggttagtgagctgcaacttaaatctggatctatggtaccccattatcactcttctcagaccccataaccccttcttcatagggagatgaggatgacataaatttgtttatctgaagagattctgctagggaaaagcaagaaatgtgactattaagctctttgttcttgccatctaaactcttctcagggccctgtagaaagttaatggctattccatgggaaaccaagaatatatttgtggcaggcaatttgttgcctatttagtagctacttcttatcttctatgagaacttaaaatcctgttggtctaagcatggtaaccccatttctctttactgtgattgatttaaggacgggcatgtgacagagttctggccaacaggatttcaggaacagagaagttgctttggggaaggattctgcttcctaataaacgaaggtgctggcaaagatattgacatctagcttccttgaacgtgggagaatgtgacgtttggagctgcatcaatcatcttgtgaccttaaagagacaagcctgaggataagaagacatggaggagggcagagcgaaggccaggaggaagcctggatcctgaccatacggctgagctacagatcagtttctaaggccagacttctggctatgttagggattgattgagttatcacccaaaccaggatccttttcagaatggaagtgggtactatcagaaatagcacaaatacaaacatggcacagtgggacatgtggtcagccctatgtgaggtctcggagtgttattattgctgtcacaaatattctactacttgcaacccaaatcagtcctagcttatatatatataatatataaattatatattttaattatctatttatagcatacatatggctaaaatatgtataataaatatgcaataaaatgtatataataaca

SEQ ID NO: 16821 - DNA, 1050 bp, Homo sapiens
tgtggaagcaggtcactcaggacacagaaaactaggagagagccaggtttgcttgacaggtgagtggggtaagtatataaactttaagaaataaacataattttaaaatatattcattagaaagttattgagtatctcaaatatgccaggcacttttgtaggaatggtggtacagcaatgaataaagacagggagagagagagggaaacagagcccctattctctatattgtagtggggcagtaaatataactaaatcacatggtctgaaaaaagtgaaaagtgctacagagaacagcaggataggggagatgaggagagcttttaggtagggacatagcatgacattttaagtaggacagaaagcaacattggagcacagatttgaaaaggtggaggacagagtcacatatagagtacattaggctgaggaaataatagaatgtgcaaaggccctgaggcaggagcacagctgccacatttccattataacaagaaggtcagagcagttcagtggatggatgtagagagaatggtaggagatgaaggcagaaaagtaatgagaggaagactgaggctttgtgggccattttaaggactaaaactttcatcttgaaatcatgttaataagggacaataagaaaaagaaaggaaaattagcactgagtacctgctatgtgtctaagctctactagggtctttaagtcacaaagatgttagaatacagaaactgtacaaaagaaccacacaatggagttgaaaagataagtatcctcatgtaaggaaattggaactacagattttctacttatatgttaccagcaaacctctcatctttttattcaagtggcatttatgcatgactttcaaatatagtattaatataagaggagacgtcctgatgaatgtgatgacctgagacccaggtatgaccaaagtgcctatttacctcttcagtgaaagaggaacattatctataaagtgaataataataaacattgacttacagaatgacagtagataatgaagtgccaattatgtgctatgatca

SEQ ID NO: 16822 - DNA, 1023 bp, Homo sapiens
gggataaaaaattcccatttcactactgatttctttaaatttttttttttagtgaatggataaagtagaaatcttcattttagtgtcagatgaccaggcaaatctcagagttctgtctctgtgttccgatttcttcatcttatttatcctatccacaataagggaattcaatattaaatctgagcatgaaatgaaaggacagtgtataagtctctcaagagagcctcctgaccaaccgtgaaagccatgaagtctactttggatctgaattaaacagattgtcttggtgccttcatcagaggtttcagtggtgcctctggccttacaaagtccctccacaccctgcattttggccttctcacaatctagtgataagcttctgcctgaaataaaatggagctggtaacccaaagctgagaaaagggccctggccatgcttggtaaagccctttctgtattccaagttagccaccaagaaactctgtgttagtcaggagagctcaaggatacatacatgacttgcttaatagcttgtcttgtgggtttggctgttttgtgttatacccagtattaatgatattcataaagttttcactcccttttccatttctgctcaaagaatactcagtgtgatgtttctggtatacccaaaataaatctgtcttttgctaaattagtttttggtccaatttaatattggtatttcccgttagtataatagaatgggggtaagcagttgtgatttttacatacacacacacacacacacacatatacatatccatatacacatatatatgtatgttggagttctgaaccttagcactttagtaattggtctatttgagaatggaatatatgtgtgtatgtatgtgtgagtgttatggtacttggtaaaaactggccaagtgcagtagctcacccctataagcttagtgctttgggagtccaaggtgggagaatcgtttgaggccaggagttcgagaccagcttgggcaatatagcaagaccctcgtctctgga

SEQ ID NO: 16823 - DNA, 1042 bp, Homo sapiens
taccatattcaggcctaaagacattgaaaaagcatcttttcttgagatcatggtcatatgaggtcctaatgaagtactacagttttcattctttcaagggtagactaaaatatagtttataaatcggcagtacggtattatgaaaccaagaaagggtttcttgaaaagcttgtcggttcaaagaggaaagatgaatttcaatgtgaaaacacgttttgttgagggctgtactttttaccccctttaagtgctttaacaggatatacgtttgattttcctcatatcttatttacctaggagcatgtaagagaaagaagggagagaaaaggttgcatctgcaggatgccttgataactacacagtcccaaataaaaggcctttttctaacctacctctaatggggttatcagatatgtttttaaatctctcgccctgagtactcttcttgggagttgctgctgtttacagccacagtctcatctatcactaaatatgaaactgggccaaggggaaaattcagtaagttagcgttaaatggaagtaaatatatgtatacctaagagaatgtcaaaataaacaccaaaccaaaagaaggtaggagtgccatttttagaaaagacacaactttaattcctgtcaagagacctaggtctactgatggcagtcactgcattgtacattattccagttcttcagtaattctgtttaaactgtgattttctttattgtgttggtgcaatattttattatcatttaacctcaggatattcagaccaacaggattgtgttgctgctgaaagtctgagcagtgttttaccgtccccagcccccctcccacatggtcacatgttcacttgcttttccttccatctgttggttttgtgagctgagagcatctctggacacatggaagggagccagggattcctgtgatacagattttgaaccagcagagtactttggttttcttcatgtcctaagggtttgatccagaaaccctggtgcttcccctgcagaatactgtacttcatttaacagaatg

SEQ ID NO: 16824 - DNA, 1063 bp, Homo sapiens
acatatcgtatgatccggtttatgtgaaatgtctagaataaacaaatccatagaggcagaaggtagatgagtggttgccaggggctgggggcggatggaatggggagtgactgctggtgggcacagggtttctttttggggtgatgaaaattgttctaaaattagtttgtggcgatggctgcatagctctaaatatacttaaaaccattggattatgtactttaaatcggggactttaatggtatgtgaattatatctcaataaacccttttttttttttttaaagaaatgtgatcaggttgaaaataacttgttatgctaccttaaattacgttaaaattattacatacatttgacaggctgatgtctctctctcttttcatttatgagtttttcagatccgtgagttgcagcaatacaacaaactgataattgaagcttagcaacagggattcaatcccgcagtagaaatgggcaagcaggagaaaaagaatcttggttctatgtagcttcagttagggattgaggagctggatttaaaaaacacaaatgctggtggagggcagatttttgacaatagaaacctcagctgaatctgaaatgatggtttttttcaggatagagtttaggagctgagtctgaagggctgtttgtatttccagttttattatgttttccaacaaagaaagacattgctgttttaagatgttttaaacactcattttttgatatgccacattgaccacaagtggtagtaaggactgaggatgaacagaacagttcattttaatgcagtattgttgtttcttttctttgcagttttattttatttcttacatagttccagggtctgagcaggagaaagaatctttaggatgcagtagttttaggatacactgtttcaagtatacagtgatttttataaaattaaaattccttacagaacgaaaggttttaaaatgtggcaaaggcatttttgttttgaaactgtgtgcatttatccagatttaccctggcctttcaataggaaaagacctagagaataattgttgtttacatttgc

SEQ ID NO: 16825 - DNA, 1046 bp, Homo sapiens
caagatttaccttccattgctctatttaaacaggtagtaacactttcattctcttctctctcccctttggctattctatgtggttaagatgctcgccagccagaaatactcacagagaataagaataaatacatccagtgttgtgttaggtcccacaccgtctatatttcgctagctaattttatgtattttgtttcatgttttattgatattttcagaatctttcttgctgagattacacaaaatatatagctggttattcagttttacgtgtcaaaagccttaaacctgtttccccatgattgccttttattatttttaattcggaaatctttgtttggctgtctgagagagaacttcagcctcccttcctcccagacattttgaacagttcaggctgtactcattcgtgtctctttgtcttggcaggtggaagcccctctgcttggaatagcaaacaatactaccagcttgccctctggcaagctcctttaagagttagctgtaatttcaccctctctctggccttgattctgcatgcagaatgattgcactgacttgagctcctgtggtctcttgctatacctcctatttgggcatctcccccatattgctttcccccaccattggggaggggaatggtaccttggttatctttgaattcccaggaggtggcccagtgcctggtgcataggaggagctgaagaaacggaagacttcttaaagggatactcgccattcactttgaagcacttctttgtacaacaaatttattttcatctgatcattgcacctctgctagccaaaacattttatcacaccagttactgctgcatggaacttgaaagcaataaaattatctttaaaatcattgtttgattaggctttttgcacattgaggtgaataaaaaaaattagaactcctggaagggtaatttgtgagtctggccttgtgtcaagatcacctcatccctgtggatggagactttgttccataagttccctatagataagatgtaatgaataattcattggcaccgatttat

SEQ ID NO: 16826 - DNA, 1074 bp, Homo sapiens
aggattttcaggctggccatttcaggatcagccatttcccacttcctgattcatagcttccaggatttgtaatgcctgtagacttttttctcttttgcttaaaagtggccattgaaagaaaaaataaatagcaaaatccccatcccagaagttctacttcctgttgttgtactattgagctctgaaaaacagctttgtaagtttaggctcttgtttggactatttcagtggaattcttgagatctttttgtttggacaggcaagtatgaaggcgataagtcgaaagaactacagcttactcagcacagaaatgcagaggctcaaatttaagttcttccttagctttatggtgtgtatattaatataatccaagcaatagtgagttgcttagccagggtgcacagacattttccacaatgccagttgtttccctcataatgtttaatgtttatttttaaaggacatatttgggcacacgtttcatttttgcctgtaaaagaattgggaatatttatgattcttgcaacaaaggagaaggatccaaagtaaccaagaaaatgatggactggcagccttcacattttcccacaactcttttcatgaaataaaatgtagataaggctgggtgccatggctcacgcctgtaatcccagcactttgggaggccgaggcgggcggatcacctgtggtcgggagtttgagaccagcctggcgagcacggcgaaaccccgtctctacgaaaaatacaatacaaaaattagccgcgtgtggtggtgtgcgcctgtagtcccagctactcgggaggctgaggtgggagaatcacttgaacctgggaggcagaggttgcagcgagacaagatggcgccattgcactccagcctgagtgacagagcaagactccatctcaaaaaaaaaaaaaaaaaaaaagtgtaggttagcaaaagtgcctacagttcaaatgcttccatgctaaacgttgtatttcttccggtctcatttgtgatgagagtcataagattttgagaaatacaaaaacctttccagctttataggatgataatggcttggccactc

SEQ ID NO: 16827 - DNA, 1029 bp, Homo sapiens
tcatgcatattgattccttgtttatctttttcttttaattctttaatacttctagaatgtatttgtagttaagtgaagtaagatacctcctcctgttgacgatttagtttccccacattgtgctgttttttttcttcactggattatgtaacaatatcttttcttttttttctttctttctttctttttttttttttttttttgagagagtctcgctctgttgctcaggctggagtgcagaggtgtgatctctgttcaaagcagcctccccctccccagtccaagtgattctactgcctcagcctcttaagtagctgggattacaggcgtgcgccaccacgcctggctatttttttattgtatttttagtagagatggggtttccacatgttggcctggctggtgttgaactcccggcctcaggtgatccgcccacctcaccttcccaaagtgttgggattacagacgtgagccactgcgcccagcctagagactctattttattagtgttttttgtagacaaagtctcactctgttgcccaagctggagtgcagtggcgccatctcggctccctgcaacctccacctcccgggttcaagcaattctgcctcaacctctcgagtagctgggactacaggcatgtgccaccatgcccggctaatttttgtatttttagtagaaatggggtttcactatgttggccaggctggtcttgaaatcctgaccttgcgatccgcctgcctcgacctcccaaagtgctaggattacaggcgtgagccaccgctcctggccgagactctattttaaagctgtcttctcccactgatttgccttttgtttgtggtaaaatcattttgtcttaaacactgtagcttcattatacatgttaacatctgctaggaagaatctccactcaggttaaaaaaaaaaaaatttgaagcaccattatttcaggtgaactttgtgtgtgtgtatgttgttttgtttttgcaattcttctccgctactcttccaaaaaagaaaacaca

SEQ ID NO: 16828 - DNA, 1049 bp, Homo sapiens
tggtgaagcagtttgtgtgcaggttccctgggacctggcttagcccacctcatttcttggggcgtgtgccttgtgcctcaaagactttgcttttggctaattgtcattagtgatggtgtcaccatcctgggcctccttcagaagtttttaatagggatctcgtctaagagaccaaaaagctttcagaaccactgacttgtggtgatttttgcatgccaagtatttggaaaatatctggagccccttcagctctcaccagttaaacctatttgtacaattgttctggtttcttcctgtgcttgaaaagcctctttctttgttgcgttaatacctctgtcttgctttcctcatgtgtatgccagtgtgacattctcggcagagtggggatgacgtggagcgtgtgggcccgtggttaatcttgtcctgaattgccttgctcaacttgcgtgtatagggtggttcaaaagttaagtttggctggtggtgaagttggaagcatcacttagaaacacgcctcctttgggcatatggtgtgaatcagggactctggctataaaaggtggggtctctgagcaccatcctggttggaatgttcccctgacttggaggtagcgagagacagccaaggtgtttgttccagggaggctggtgggtgggagatgggatttttctgtctgtggcacaggcagtattaagtagagcaggctgtttaaatcacattttaagtaaaaaccaaagtgcacagatgatctgcagaacttctgggggataagaagctgctttcctcgaagaagttcatctccaaaccagcgcccatggctcagcagccagcatggcagccccaggggtacatgggacttgggcatgtgaggctggtgagggacagggacagctgggtccagcagtgcctttcctagggacggttgccacgtcacctgtctgccctgtacttccatttcctttctttgaactcggggggcttgcatcggactacctgtgccgtttcctcaaactctaaaattgagtaagttactgagggtttccgtggt

SEQ ID NO: 16829 - DNA, 1026 bp, Homo sapiens
agtccgtgggggcagaagctaccatcctgtgcctgccctcactctcagtgtgactggtcttcaggatgtttaggtggctccacatgcggatgtacagctttcccctgcttgttttccccatggcatattaacagcgagatctgcaagaatacatcattttgtacagaacaggatgtatttcttttaaactacgttcctgtgtggacaagtggtatcatatgcaaaggtttaaggaccgttgatgccttgagatagtgccatctgtttgcctcaggtatgtggtgctaggacaaagctgccagacctcaccttccttcagtgagacaggaataggacagtatttgaaaagcatctaacatgtttccaagcacataggtttttggtaaatggtggcagctgctgctattttttttttaaattaaactatctaagagttgcattctaagaccatctaaaattctgagtcttaagctgtgttgactatatatgttcactaccataactaaatggtccttctgtattgcttttctaaattgtagaatttcaattattgtaaatagcgggccatactgtaggtgtggttcttgctaatttgattcgtactgttcaaattcttgtgtctgtccagataaactgtatctttacagaacattcagcgaggtacatatgtctatatcggggtgccagtggagtcaccctagtcatatgtaaactctatttatttggttccgaaactgaatttattttgtttgcaagtttggtatttgggagcatttaagaaatatccatagattcttgtatgatactgacattaaatcattaaataccatattttttaaatgcctctgtctgtttgcatggataacattaaagtggttagagtgggcacagttattggtaaagattacaaagatgtgcatttttatgacaactttaggtctcacataggtagccaaccatctgctccaggatgaagcatgtgcctgtttatcctcttctttggtaacgctaggtatatgtgtgcac

SEQ ID NO: 16830 - DNA, 1074 bp, Homo sapiens
cctcatccagaatctgagcagcccgatagccaagcaggagtttccttgtgccatggccagtgattgatgtcttcttctatgatgctgctgaaatgctggggactctgaagcgcagctggagtgatcaaagcaaaattaaaatactttctcagtggtttgggagttgggtgcgttctgctgtattttttggttttcggcatctgggtttggtgtgcatgcatggtgagctctagctggagcagacgttacctactgaggctacgctcttcgtggtttctccttaaccatcacccacttgatcttccatgaagccccccaaatcttccttactgaggactcttgcttccaggttgcttttgtgctcatccattgctgggttatttggtcagtgatgatggtttctctgtactttttatcagtaggttcagaggaccttgtttactcctcattcatctctctccccaaacagttgagaaaccacttgtgggttaggactcatgctttgtttataatgtttgattctccaacctcacagctaatgggaagcccgtggaggagatactctgtaaaaatccatctcccatgtgggcttgaccccacttagtgtctgagtggtttggtcctcatagttctcttgggggaggaggaagggaaggaggaggaggtggcgatggcagtggcagcagtggtggcatcttggaccagagtgagaaatcttggaccagagacaaaagaggtcttctctcagggtagtgcaccatgagagggagcacctgtttacattttgtatcctggacaccaatcttgccttgctctggtgctggccctgagaggtgcaggaattttataaagagatttacaaaacatttttggatgaccaaattggtccctggttctagctggaatgaataaacaaactaaataacagtagagtgtgagagtaagtgtgtgtgctagagaatgtgtgcacatgtatggcctaggtgagttcttcactttgctgacttgtgaattatttggggtcctatggtcctccccatcattcttattcatgtcagtccaccatcattaagg

SEQ ID NO: 16831 - DNA, 1111 bp, Homo sapiens
ggtttccttgctagttccttggccagagtttccatcgtgtccctcagctgcacaattaaggtgcccccgttttgtgcaagtctcatgctaggcagtatgagatgacacaaactaggattctgttgtgagataagataaaaacacttgacatttaaaagagagagacaacttatgcggtgtgacgagacactctacgacttttgccagaagagaaatagaggcaacaagtgctaggagctcagaggagggtaagttccacatttggaactttggattaaaagaatatttgggtctggttgaaatcgaggcctttcatgagaaatgtccacacttgctcagtactgtttgccgaacactgtatacaaggccctcgactcgtgaatgagttgtaatgcaaaactttgccaggcatttggaatgtggagtatactattttgtaaagatgaggtctgaatggtggtttaggtcccaggccagtgtccctctgccccccacctccatatgtgccctcaagccggtttggcttagacattatttatctctgactactgtgtacagcttagttccatggggaggaaaaggcttgatgaaccctaccctggaaggctggtggctctgttttctgatggatgaggtaggagtggtggaaagctggtagtttctactttgtgcctgtttaaaaagccccctctgaggccttagcacttaacagatgttcaggattgggggaataaaggagctgcctttgcagaggtctgtgggcatgcagtgggtgagagagcaggcactgagtgccccgagtttcctgcctgtgtgggcaggaggattctcagtggaatcaggagcatctccgcctggtgctggaggaggtgtggagttgaaggtgggattcttcctcttgaaggacttgaatgagtttctgtgtggctgaacagaaactggttcaacacccatgtcatgatttttgtgaagcgaggacttggggtcccaagtctaggttttaggttccctgctgtaacccgtggccaccgagagagagttttatgataaaatgtcagcaaagtacctgacaacgtctcacgctagaatgagtttcgtacatgtttagttc

SEQ ID NO: 16832 - DNA, 1044 bp, Homo sapiens
ctctgtactaagggaggagaagctaacatccccgggcctggaagatactggatactagctcattaaactcttgtgagaagccttcattagcattatgggaagacttgctgtatctatattatgaaggcatttagatttttttttaaatgcatgttcttaacattttttgtttattaagtggggcagtagattaggactgaatggatttgattctctcatcctacatagtgtgcccagaagccagaaggtttcccagaatttgtattatggcagcgagggcaaatttaattagcagataggaaaagctttggagcagtttaggccaatccatttaattgtatcagcaattaatattttgagaaaatggaaataattaaatttacatttcttctaggactttattttgttatcctttaaggttattgtaaatgaggagacttttgaactcacagactaaagcaaactacaccagataatcattaactttttctattgtgtgccacccttcccaaccagattgttccatagtatcacttatgaaccaagaacctgtgagcttgcaaaacgcatttttaaggagtctcaacttttctgatttgtgttaaagtttaggtgtgggtcccagaaatgagtttcatggaggggagaggttgtctctctgggtgggtaatacaggggccactgggggctcactgtggctttctggcacagacatttatgaagcaggggtgactaaagtgggagagagcagccagttctccagcagccccagtgagagctctcatggatctgcctattgcactggggtaggagccatcaccgtcagcttttctctggcccacagtgccattttctgattaagctgagacctctgtaatagacacgttgtcattttttcttgtgtctaaaagtttgcttgactgcagtgggtctccagctcagagcaggtctggctagagaaaacaggaggtgatgactggagcactttgcccttatggaacgtgctctgatgtagaaagcaagaggattttccttgcagtcact

SEQ ID NO: 16833 - DNA, 2003 bp, Homo sapiens
cctctgtactccatgggcattttctaggaaataatttcacctgccctgtgtaattctctggaagaatcacagtgagttggaaggaaacttaagacttggaaaaggattgagaggttagcccagaccacaccagggctctgaaggcccagctggggttagaacctgggacaccctccagcccactgtctcctgttccctggccatttactgccccactcccctttctactctcaggggccctggatctaatgaggggattcgtgcagtttgctgcactaatacattgcaagtggtgccaacctaaaggtattctgatggtggaatcagagcagtagcatcttattaggtcagaatctgtatctcctcttccaagatttttacatgatttagtgttttctgaattggaaaaaaacaaaaacaaaaacacacaaaaaaaccatgtctaaatcctagcatttcatcccatgttgatgaaagggcatcttttttttcccctaatctgtggttagaactctcagaaacttttagaagatccctcctatgttttggaggtttgcagatttgaaccccagttcctcccacagtgcttctccaactcctggaatgaggtaaacctccaggcagcctgttgacccaacccatgcatgccggtctttgggactcctagatgtggaccctggagtgaatagggatcaggtgggaaatgagttcctttgatcaagatccttgtaccagtgaactgaccccactccccgtctggattcctgtggtgattaccctctgtattagtctgttttcatgctgctgataaagacgtacccaagactgtgaagaaaaagaggttttaattggacttacaattccacatggctggggaggcctcagaatcatggcaggaggcaaaaggtacttcttacatggtggcagcaagagaaaatgtggaagaagcaaaagtggaaaccctgataaacccatcagatctcgtcagacttattcactatcatgagaatagcacgggaaagaccagccctcatgattcaattacctcacctgggtccttcccataacacatgaaaattctgggagacacaattcaagttgagatttgggcggggacacagccaaatcatatcaccctcttagcaaggactgtgttcgtgatcatgactggcattcactgaacaatgactaggtgccaggcacctcgccagtattctttaatctttgcacagtctgtagggtggatatggatattactgttccattttttgtggaagaggaaatggaggcaagagacctgattataacttgtgcaaggtgccatgcagctaagcagccagcccaaatccagacctgctttcctatgattttcctgcccattactctcccatcgtagctcacctaatacttcctagtgggctgctgctgaacacacacccagggatgacttagtggcttgtcttgctctgaagaaggctaggcaccatgttggatgagttcttgaagatgtcttgctctagtcaagaaacttttaaatctttggagtttttgtccacatctgcctagttcttagtaaacatgatgtgggttctattagcatggcgccctccctcccttcctaccacctttatatgagcggagaacatctatgactcttatgagaaaggaaagatgaaaatcagagtgacatagtatagttaaattgcagatgcttaattataaaacagcttgtttctgaattttaattccttgcttttctctgactttttaaattcccctccttaggcagaattcatttttacattgatgattttttttttttttttttttttttgagatagagtcttgctcttgtcaccccggctggagtgcaatggtgtgatcttggctcactgcaacttccgcctcccgggttcaggcaattctcctgcctcagcctcctgagtagctgggattacaggcatctgtcaccatgcccggctaattttttgtatttttagtag

SEQ ID NO: 16834 - DNA, 1032 bp, Homo sapiens
tttttttttttttttttttaagcgagcagcagcaagatttattgtgaagagtgaaagaacaaagcttccacagcatggaaagggacccaagcgggttgccctgaagatgcattttttaacttgctttttaactaagtatttttgctctgagctttcctggatctgtaaacacacccccagctattcaagatgggcttcttggtgaaaagtgatgtgtcctaggagaaatcacgcctgttgttgccgctggccatcacagatcccggtgcctgtctgtgaaaggctggccgggctgggtggggatgagaatggtcgggttgtctagactcagcctggactgtctttgactggaggggcctgagctcctcctccactgctcaagaccccggttaaggggacagcagagcagggatgagaagtggccctcttcacatcacctcccagcaagagggcctgacttagtgctcccaccattgccagccccagtttcagggtcccactcagttgtatttgaataggtctcatgacatgtgctttgcttgaagagcggctattagcagcagacgttcaagaggctgagctcaagcaggtgagcatgttctgagccattgtgaacccagtgaggtgcctatgctgatgcccagggccgcctgggcggggtcaggcccccatcgcttcttcatcctagctctgggagtgcattctgcactctcccgaggccagctggtggcctttggtgatcaccctctctgtaagtttttaagtggcttcctttcctctggtggagaagccagcacctttatcctatgacaagaaagctctttgtagtaggtggtagtagaatcagacagatctggcttaaaatcttggctgtgctacctcttggctctgcacattggtgaagagaatttaccttcctaaggcctctcagctacacgactgtggacactcagcttccttctaaggtcgttgtgagaggtaaagaaaaggggttagtccagggccagacatggcacaatgcctcaatgaaat

SEQ ID NO: 16835 - DNA, 1050 bp, Homo sapiens
ctggctggggtctggcatagaatgcccttggcacgatgtgtgtgagtgtgtctttccttagtaaatggccttgaaaatgccatgtgcttctggcaggcctggataaggtttgccctgcataacccttggaaagcacagttctcacttgtaacaccctgtctgcaggtccatgatattgtaattaaaaagttatgggatcacaagggcctatttaaagggcatctggtctaaaggcacagttaaaagcagaatttgtgtcagtggctcccttaatttctcaaatatggttctgtttctaaattcatcccactggatgtctgtgttgagttttctgttgatgaaagaatgtttaaaaatgaggcagatccaaattctaatgtctgagtgtaccactgcttaattactttgggcaggtcacctcacctctcttggaaagaaaggtgatatactacatctgtgattttcaatttttttttttttaactagacccacagtaaaacatagatatacaccatgatcccaggacagaataagtatataactaaaataagtgttttgaaatcacttcttgtctgacacagcactcacgctttctattcatgtagtaccacgatactttcttctattctaatgctggtaagagatgccttaaactgattttgagaactaccaatgggtagcagctagcggcttaaaaaggatgttattaaggtccttttcaccctgattttgactctgttggctctcagctgagtgccccatacttagtgcacatagagttggcctctgaggtcagcctcctgttttcctgtgaaaatgaggatggaagagagtcacttgtttccctccttcatggctaccccctgaggactgggaagaatttaagaatttgagtatatgttcccaatagcatgatgtgtttcattgttcatctgtaagcatttttaaatattcgagatctgtatcttgggtaatttttatcaactttttatttgtaaaataatttcaagtcagttattaaagtaacaaaaataatggcaaacttgatac

SEQ ID NO: 16836 - DNA, 1030 bp, Homo sapiens
tgttaccgtagtgataattcttctggaatctcaagtcattaaaagtgatatggctaactctgggccctgtgctataaaaatagatgtcatgggatgtgtgaatcctttcttcagtgttatagttaatagcaactgaaggaacgttttggtcaaatcccgaatacttattaggggctcactgcttggctgcatttttctcctctgcgtaaatcatctatccatgtaattattaacccctaagaatgaatagcatttttaaaagggttccattttcccctcatatgactttggttcattctcctccttgtttctgtctctcagtgaactttccaaaagatgggttatgatgaaaggtgaatcgtcgttgataactgctcttacttatctgtgtatcgaaactgcaggtagtgctcttcagctctgtggctggatttagtgcctcttctagggaggggtgggtgttggcacaaagcgtatcccatttccctgaatgtcgtgtggacacgtgagaggacagtgcaccctttgggcttggtgctgcccccttcacgctactgaaccccagggtcataattaaaagctgtgttagctcttctctggttagaggcatacaggttggaggcttgtacatagccgtgagccggttggtctaggccaggaagcaaaccattggaaaatgtggttagcagtgacagttgacagcatgtttgcctgcagtagtggtggttggtgctgcgtgttgactggagttgcttgcattgggagagcctgacttggccaagtgtgtagcttgagaccagttggattcctctcagagagacagtcttcacccccaagctctgggtgttgggcgtgcagcattcgtattcagcaaacatttgctgatttccgcctctgcaactactgagctcagctttggggatctgaagatgaatagacacagccacacttctggggaaatctccctgtggggaggctgacatggaaaccaaccaaatgggagtgtggtgcatatcttattagagctttg

SEQ ID NO: 16837 - DNA, 1024 bp, Homo sapiens
gggcaggggaagacttgcctaggagcagggcctcgcaggatgcagaggagtttgccaagtaccagagattgtggggtaggtgaataaaggctgagtataaggataagtcaattcaggcagatgtcctctaagaatgaaggtgagaatgctggcggaaaccagttgtggccctgtctgccttccctaggagactggacctgactttacaggcagtgacggtgaagcagggcagtgccacgagcagatctgtgtttcctgaagggtctctggcagctgtctggggaaggagggaagctggcagagccgtgggtggaggcagatgccattgctatggagtgagcatggggaagggggtcggaggccttttggagatagatacagcaagacttggtgaaggatgaagttggggcaggtagaggaaaagcaatgagcttacggatgactggagactgactggagaagatgaccacccttgccattaactaggataggaaacaacaaagggtaggagtttgacaggggagaatgtttgtgctgttgagttgttgagtttaggtgcttgtggcacgagcaaggggagtgagctggtctaggaggtttttggaaacactgacctggctgcagagagggagatcctgggacacctgttttgggagttatcccagtggggaaggatcactgggaagggggccacccctttgggaggggtcagtgggacgactcccaagggaagaggttggttatagggagttaaaagaaaggagcacccctcacgcgagcccatttttcaaggatacatgtttgtcttttagattctataaggagtagctgctacacagaaagatgtctacgtgtgggtgaacacctggcgtatcccatgcagggaggcttcagcagaccttggtggcgatggaaccaccacagtgatccgaggattgggtctgaaggctcctccgagtctccaataaaaggggttgttttgaagggctcaggttcttcctgggcttttttgggacagtcttgc

SEQ ID NO: 16838 - DNA, 1449 bp, Homo sapiens
taggtggaacatgggactgtttgcaagctacttctgtttctgaaatcacatgcttgggatcccaaataatctactgaaagctgtcttcgggaggcaaagcccagggatttgttttgtttgcccctaatcatctcttccatcccctttctcaaaagtcttatatctagataatttagtacatttgatctactaacagccagggccataacaggagctgatattacataccccggaagtcctttgcaaacacactgtagtggcgattgattagtgttccgagccataggtaacattagcctgcctcgtaggaccctcagatgctgaccgtatctgctgcaattcttagatgtaaaagagcgcgcatcgtataaatcaaaactagatgattattttcatttgaaattgttgttgcactgtaatttctcagggttttgtattttccaacagtggtgtcacttaatgggaagatcgctcaggctttgtaactgggcataataccaggtattctcgtttaggcattctgctcagtagtattaacctgaagccataggacatgccaatgtttttttccgtgttttttaaaaaaattaaaatggttggctacaaatgcatccttttttacttcagagtaagtcggccttggttaagtcttaatatttctcatgcctatttttttttcttcaaatgaaaacatacggagagaaaatagcatgtttatgccttttggttgtacccagcactgcccagaatggcttacagagtttatacccatggaggtttcgtaaaggtgacattaacttcgcagtaaagtcactgaccccgaacctgtgtcacttcaggcttagccaaatgctaacagagcagctcaaagcttaagcagaggtatgtgcttgctaagtaagtgtgtgttttggactaattggtgactaccattctgaacattaactgccctttgtgttttaatgttgccaggaggccgattgtgtaacctttggaggcttccctgagtttggagaactgaattcatgtggtgacttcctatttataatgtctttgggggagctatgaaataacttttcttctaagtgtgatttttgcttttttaaaagtttttatgttgttgtcaattgggtatttcccttctatgccaagacgaattgtaggttcaggtttctatgcagcctgtatgtaaacactggccctaaagaaggactctatcactctactttcagtttcttgcattaaaacaagtatgggtagcggtatccttcttatttctgcttcctggtcctgtgtgagaccctgaaaggtcctaatggcagtgctgattagattgtggccagggttcacccacaagttccgaagctggggaaggtggaagtgctgttaactgacttgtcccatgtctggggttttgcagcctggggagaggtgaccacccctcgtttc

SEQ ID NO: 16839 - DNA, 1017 bp, Homo sapiens
cctctttctctgcatgctctgttgacggtctagtcttgagagagaacctgctgctgtcccgtctgtcatagccttcctagcaactcttaggcctgcgtgctgtgttttcatgatctcccccaaagcggcactttgatgttttttcagagtcaaagtatcactgtggatatttatcccaaacaaaattgcaaactgatcaaatgttatgtcttttgataccaaatcaaaaacgattcttggtggctgatcaggttgtctcctaaaaatttgccttttgaacctatactgcctttatgagatgattatgaaagtagaaaatagcctgtgaaaaatggtacctttgctaaaaagaaaaaaaaatttttttgaaactaagagtctctgttgtccaggctggagtgcagtggcactatcttggctcactgcaacctctgcctcccaggttcaagtctcccgagtagctggaactgcaggtgcacgccaccacatgtggctaattttcatatttttagtagagatggggtttcaccatgttgcccaggctgttctcgaattcctgagctcaagcagtctgcccaccttggcttccgaaggggctgggattacaggcctgagccaccgcgcctggcctgctgtaagaaaatattaaacttaggatgggaaatgtgatctgaacaggattcctgtgaaggtacccagtgtaggtcttagtctcctctccagtgtacatttatggaggggcaagatttcaccattctgtgaagaactctgcgtgttgacgactgctcacgcctagggaataaatttcagagcatgcgtagatagtgccattttctacttaaaatactataatccattatttacttcggaaaataaaagcattaaggctgaaagttttgggttagtaatcttgatgttttaaaatgccttagcattccttcatttgttttgcttgccacgtggttttgctctgatttacacacctctgtgcatggctaatccactgtgccactcttg

SEQ ID NO: 16840 - DNA, 1007 bp, Homo sapiens
acagatcagttcatggataaatgatgaatttaataaaatttgaaaataaaccccacataactagtgctgctattgatcattcatatagccagcaggagtggtgagaggcttggtctgcctgaggtgtggagatgcttgtggtggggggcaaggtggacgagggctggggctgctcctggagcatctttacgcgggtggaggagctctgacacagtggcagtgtttgtaacactttccaaagggattaaaataattctgtagagttaaccctaggctagtgtggcttgatctgaaacagtcccagccagaaggtaagaactcctgtgttatgttgttagcatacaatttgctgaagttcacattttaaattttatatttaaaaaccaaaaagtagtactgatcattttggactgtttcaaagtgatattgtttttacttgttacaaacattggcttgcctgcatctaattgcactcacaatgggccggatgtggtggcttacacctgtaatcctagcactttgggaggctgaggcgggtggatcacctgaggtcagaagtttgacaccaacatggtgaaaccccgtctctactaaaaatacaagaattagccaggcttggtggtgggtgcctgtaatcccagcttctcgggaggctgagacaggagaatcacttgaacctgggaggaggaggttgcagtgagccaagattgtgtcattgcactccagcgagtgcagtgtaaatcccttaaggaaacagtgtgttgtggtaatcatgatatcatagtaaataggttttgttcgttatttttttcttttacttccttttctaccagtgactagtcctaatgtgttctaacttttgaaaataaagtacaaattagatggatttaaacatacgggaagtaagacggaaattcattacttttaaaaaacaatttgttgtggataagatttagaaatggaaacacaataaactgtgtttccatgacacaggtatactaccaagt

SEQ ID NO: 16841 - DNA, 1608 bp, Homo sapiens
tgctatctcctcaggtgcagggttctctggaactctgtctaggttggtctcttggatggcattcttgcagacttgccggaaaaccaaacaaaaggtgtgagtgcatgcctcctggatagatgtctttttagtgtaacttagcacaccttgtacactgtcagggcgcctctcagatgagtcatcccggcagcccctgctccatgagtgtcttccccacagtcctgagtgcttctaaaatcatctacaccagtggaggcaaaactagatattttcttagtttgcagaaaggaatatttccagacaacatgaacttgttctcctttggtctccttttccttgtcattgttcaagtcacaaggtctgctgattaaatttccccttgggtttcaaaagaacttgcttgtttggttgttgtgttttgccttttaatttgagagttgaggcccccaggtgcatgtggtaaagaattcaaagggctaaatgggtgtgtgttgttcgttatttctttgaacctcttggcacttgaatggtgtcagtaatttcactaattatggttggcaaagaaactctgacacatggctttggagctgtgttgttcttacatcatatctcttgagttgaacctatgctctcttgatggatgaactcgtaattcaccaggtgcgtggatcgctgtgattaattgtttcaagctatcagttatttaactctctagtgccaaatgttcaggagaaaatgtaagtgcagtgtaatgtaaaatcaagccggcaactccagcaatttgctcttcaaactatagctctatcagttcccattcatttatacacttacactattcaatttgtcgttgttgttgttgttgttgtgtttttgagacagagtttcactcttgtcacccaggctggagtgcaatggcatggtctcggctcactgcaacctccacctcccgggttcaagtgattctcctgcctcagcctcctgagtacctggaattacaggcacccaccgccacacccagctaattttctgtatttttagtagagacagggtttcactatgttggcctggctggtctcgaactcctgacctggtgatccgcccgcctcggcctcccaaagtgctgggattacagccactgtgccctggcactactcaatttgtaataaatcagggtaagttatttttggtgccaagtcgattaattgaatataggttattttgcatcttagattccctctgacgactaaatcttataagcagaggtatgtgagcatgagaactgtgtcgggtggtcctgaagagattagtggattagaaggagatttggagatttttaaaaaagcctctggacagtgagttaaatggtgggttgacactctgtggtcgggactttttggagagtctataaagttctgctgtatttctcaagagctagagagagatgatactatgaccaaatttggtttgaatgtattataatgtactgagtatcactaatttgttgggaaatgactgttaaaaatacttactgacgcttaaaaatatcacctatagcattagtataagtagccaactgatttacatatatttcatgtgtgtgttgggaga

SEQ ID NO: 16842 - DNA, 1007 bp, Homo sapiens
gcttgtctcgaactcctggcctcaagcgatccacctgccttggcttctcaaagtgctaggattacagatgtgagccactatgcctggccaataattatataaattttgatataaattcctgctcttcaaggagatgtgggttttttttcctcctgagagtatatttataaagttaattggattttatacaaaagaagcttttgactcatttcatttagcttttaatgttatcatctgggaggagatggtgaagaattctgttagccaaaccatggcgaattaatgtttcttacagatggttttattactttttatgatattatttggatcatgaaacaagtatcttggaaaatgtgagatacaaagatgtgagttgggaggtctctcttgtatgtgagttccttctataacagagaaaggatactttcagtttaagctgagatgctttttccttttcactcttgaaaagtctttgttgcaggaattttctgtgccctccctcctctgggacagatctgcttcttgatactgcagggctccagccttccttccagccagctcatttctcagggaagccttgttttcctttttcagaaaatttaaatgtatatttaacgcacaatttaactccctttcctgttgataatttttttcttcttcatattttgttattaataatagcttacagaatgggatcagtatcaggatcgggaggtaaccaggtctccaagttttccctttcgtttttcttttctgcttttaatgagccttaattaatccagggagctaggctgcagtatctgtggctctccctgatgttttctttctgcctttctgtcttggaggggaacctgaggatttggaagtagagggctctactagtgcttcctttttgtccttttctcattgtccaaaagagtcttaagcgatctccaggaaatcccctgctcctgccaggaatctgcctgtgagtatttgagtgagttgctgctttttaagtaccagtt

SEQ ID NO: 16843 - DNA, 1516 bp, Homo sapiens
gcaggtgtttctgtctgatgttcacagtctgtttatccagagtgccccagaaaggacagtagtgttaggttaaacctgtgtatgtctgttcttggttttaataacagtcctgtctttggaattatttagtgtgttctctcatttctcaggaagtcaggatgttagtgccgaagcacttctctgacttggtccgacattgaagtaccttcccctgcattacagaagaacggccccccagggggtctgtttgatgaacacatgtattattgcagtgagatactctagaaatagcttcatgtccttgcaaaattgccagcacaagtaaggacctggaaattgttgctatgcatgtatgtcagaagatttcttaaccaattctgtactgaataaaataaaatttattttcaagttttgtagggacctggggcaatatgtcagatagagttgaatattttcaaggcatttttagttcatggggcacatagttggcttaagatatctatgtgtatcaggactgaaaggtaaagtgcccgaacctgctaatgaaagaggtgtctgtgtggccatctgaggttcagccacaatgtgtcttgcagaattattttattttgctagtttttaatttctcaaacagttcagctgcctgtcccgtggtaccgtgagacttctaattcaagatgaccagtatttgcagacagagccactgcctttgctgccacattttgcttggttattgtgtgagaacaccatttttctctttttaaatgaattgtgtttctctttttaaattgagcatctgactgggcgcggtggctcacgcctgtaatcccagcactttgggaggccacggtgagtggatcacctgaggtcaggaatttgagaccatcctggccaacatggtgaaactcctgtctctacttaaaaaaaaaaaaaatgcaaaaactagctgggcatggtggtgcacatctgtaatcccagccacttgggaggctgagggcaggagaatggcttgaacctgggatgcggaggtcatagtgagccaagactgtgtcattgcactccagcctgagcaacagagagagactgcctcaaaaaaaaaaaaatccgtttacatagtgataaataaagtaattactatagtggtggcattctgcctaagtcatcttgaaaactgaatgcaaaatctttttaatagctccataatggtctcttgaagtgttacagatttttataacgatagctgtaatacaagtgcctttatttactgtgagacttgaacattttgaccatttacatgggtacttgtgtgtctccagctgagctgagtgcatgtcgctgcggcattgcaggcgtgtgtgcatgttggctcttgcaacggggcgtctgccaggggttgtctcgggcaggagaaggaggccagactggcaccacttgtagtgattggaatgtgtctagtccagctcttcagttccatgtaggaggttttaggatggagattgtgttttgggaactccaa

SEQ ID NO: 16844 - DNA, 1085 bp, Homo sapiens
tcacctgaggtcaggagtttcagaccagcctggccaacatggtgaaaccccgtctctactgaaaatacaaaagttagctgggcgtggtggcacgtgcctgtaatcccagttactcgggaggctgaggcaggagaattgcttgaacccgggaggtggaggttgcagtgaaccgagattgcatcattatgctccagcctgggcagtgagtgaaactctgtctccaaacaaaacaaaactaaaacaaaaacaaaaacaaaacaggctgggcacggtggctcatgtctgtaatcccagcactttaggaggccgaggcgggccgatcacaaggtcaagagatcaagaccatcctggccaacatggtgaaaccccatctctactaaaaatacaaaaattagctgggtgtggtggcaggtgcctgtagtcccagctactcaggaggctgacgcaggagaattgcttgaacctgggaggcggaagttgcagtgagctgaggtcgcaccactgcactccagcctggcgacagagctaggttccatctcaaaaaaaaaaaaaaaaaaattcctccacaacatatattccaatgtttagtttttctgttacagagatcacatgtactctaacttgtcaactaaatttaaaaggaaaagacaactttgagagaaaattaaaaccaatgcagtgtgtgtaaatgccattttgataagctcttatttcatgttgacatattctatggtgctcgtcttacataacctagttagggaaatgttttgttccagtctggctttgtttttcttcatgtgtttaggtccttccactttccttttgttaatttttggtgttgtacttcaggaaatgaattgagggttgcaaatgacctggagggccttagtttgtttgcttgtttgattttagcaacagtcaccgtggtacacctgacgtggctgggactcctgattttttttttttttctttttgagaacaaagaatgtgtccttgtcttggcatggactgggtagccttgttcacctccccacccatctctccttattggtgaggcattgtaaaccgtgttaacaggtagcatc

SEQ ID NO: 16845 - DNA, 1047 bp, Homo sapiens
tgttatataatccagcacaagtgactgtgtagcagcaacctcatgtttcatgatgactttaaaatgcaattgattctaaaatttagcttttaaaaatttcgacttcagattttctctgaaggtttaaggtaggcttctcctttattaattttttcaagaaatatttaagaacactgctctgtgctatgtaccattctaagcactttacagatactaattcatttaatcctcagcctggttaggtaagtactgctattcccaccgtacagatgaggaaacagcctcagaggagttaaaacaagttgctcaggttacaccgtcagcggtttggactacttcagtttcagataatcactgtgaaattttactgttttgagctacacgtttcaaaatcttttctgatgcggaactatcattaaatcatataatccgcttctctggagtcagaggttgacaacacattagcacttgactcgagcctctccctggaggaggacattccgtctgcggggagccgagtccgaggctggagcaactctggaaccacagccctccagtagagggcacacgagagcaggctatctgtggagatagcctgttggcacaggggtgaagatgacagaggcgaacccaagcaaagagagttaattagcagagtttgccctccaggctcggagggcaagtcagcctggggacctggagttagttcccttttcagctgtgaccattgaagacattcatcaagttctctggctccgggatgtcagctgtggtagtgacttgcatgggaggttatccgacatacctcacacactttaactccacctcttcagagtttgtggccaagaatggagccaggtggctattttttttttttaaatttatgtaataacaaacattcgcatttattgaaaacttaaagtataataaaaaaataaataaaataaaaaaagaaaaaagaaaacttattcctgtgtcaggcacttttctaagtgctttgcagtgtattgtctcatttaatagttgtttaaattaacagagtaggcc

SEQ ID NO: 16846 - DNA, 1067 bp, Homo sapiens
tgttcctggtgtcagggttatagaagtggacaaaatgaggcctctgcctctgtggagcttttattaaagtagggaaggggatgggagggctgggtcacatgttaggtgtggggtacagggtacgtggtgccaggcaggtatccgggtacctttttacgtagggtattcagagaaggtctctagagaggtgacatttggacgaagacctaaaggaaagggaagggaaaggcgaggagcttggagagcttggtgcatcttggtgggggatggggtaaactgagtcagttatgtagggccctggaggccacggtgaggacttcggctttgactctgaaaggagatggcagagtttggagctggtgtgtacgttaacaggaccatgctggcagctgcgttaagagagactgtaagggcaaggacagaagtagagagaccagtaggagtaggctgttgccccagtgtagggcagagaagatgaaccttagaccaggatggtggagatggtcagtggagagaagtagtcagagtctggaagcaccagcaagactgtctggtgcacacaggatgcacgtgggatgtccagtgaggaggatgagatgaggttgggtggctggagcctggtgagtgacaggcagagagggctattagatcacatgggccctggagccatggtgaagaatttggattttgttctctgtgttggaaagttagcagagagcttatatggggggtgagatggcatagggacaatgttaataacagcaacgaatatttattgagcacttactgtgtaccagctgttgcaacagcctctcaagggttcgttctgctattagagccatgttataaatgaagaaactgaggcacagagaggttagctaacttgtccaagatcacacagttagggacaaacttgacagaattatgtgtgtcctggtatgtatttcagttttctttagggaaggtaccacaactttgggtaactatgcccctaccccaggatttaagatgttttgatggttgaagggcgatgtttaagagtgggaccagagaatattgaggtatta

SEQ ID NO: 16847 - DNA, 1574 bp, Homo sapiens
ttgctctcagcttgctatcttgatatgtttgcctttgaggaggttagagttattgtgatttaatcacagaccatgtatttcgcaagattcatttggtatctccagcttgttttcttgtttcctcggctgtcagtccacaggcagaggtgggaggcggccggcatgggggaccgagtgtggtagaaaggagtgtttacttagcggaggggagtgctgagggctgctgttaccttcccagaatggctgatccccagcagtgatgagcaggctgggatcgtggtgttaaatttggtattttctagaaatatatagcaggctttcccctccacctgccccccttcaaggtttcgaagccttgtgttttgcaagagttgagaggggaacagttaatagcttggattatcttgtctctggagagaatttatgtatcaattcaccggaagactgctctggtattagggcaacaagaatggttttatttctcccttcctttcctgcactctgttcttatgtaattcttgtattaaaaccattcctggtaaattagaacatgctcttgtatttgggccctgctttgaagaaggctgctgagtctaaaaagtttggtagcctctcgtttctcatggtgatttctgagatttctagggacttggtgttttacagagcttgttgagttgcacaaaccagcctccttggcccttctaggtgataaaagatgctgggctgggagggcagctgtggaaaagggtgtgggcgagggagacagtgcttcatcctgcctggatgaagcatgttggttgttggtttattcataaattagaaaaatatattaagaattgaagttgttccttatctcataagatttctagcaggctgcataaagtctgtagatggtaatatccatttaaaagtggacaatgaaaaaattacctctttgggagttgtgttgctatctctaccccaatttggcaatctttaattaacttggcaacccccgttttaccaacaaagaacaacctttgattaaaaaaaaataaaatgtcagggagtgaaagatacggagtgtgactcagcagatgggaattcctttaataacacgctgggtgttagcgttagaaccgccactgaacagctctgcaggatgccctcccagccctccctccacctatttggattagaccaggagactgcagcaaacttctcaaggggaggcgaacttggtgttggtatctgagcgattgtctgtttcaattgtttccctctgtcttggaaaacaccggcacaaaacacaaatccagtcccagttcctgcagctgctggggcgaagcaggctttttatgaatgaggcccagaagggggaggagagggcttgtgttacagcagcagttgggtaatacatttcattcacttgcagccatctagcccaggcttcattttaaaggatattgttcatttttggcaattcagattagactttttttcttccttgtgcaactgttggtaagttagaacacgaagcatgtgtgtgcattctttttgcttgcttttttgagtgtttgctcctttagttggga

SEQ ID NO: 16848 - DNA, 1021 bp, Homo sapiens
tggtgtccaagctgacttgggagggacaagtttggggccagccccccagcctcccttgtcatgtcccacctctgctggcatctgtgggcttaaagtgccttcactcccatccttttcaactatttcttgattaaaaaaaaaaaacaaaaaactgttgaatagtaggagactctctctctcattggtatttgtgggaataaatattaaataaacactttctaataggtgttaccaggacgcctaaggaaattatctcacagagttttcaacactgtgaaaagagaagctgactgccagggagagatccctttttcctagtccttgtgaacatgtgctggacagccaggagtggcactgtggcaagaaacacccgttctctggcattagtaagagggatatagccaagggtatctgtataccagtgttaggcccatacatccataaaacattgatgtgagagctttagggcacagctgaccctaagcctaacgtgatcattaatgtcatgaaaattggagaattggtcaggcgcggtggctcacacctgtaatcccagcacgttgggaggccgaggtggatagatcacttgaggtcaggagttcaagaccaacctgggcaacatggtgaaaccccgtctcaaaagaaaaaaaagaaaagaaaattggagaatttataacgtctgatgtgacctgttctttaggtgttgaaattagaacggcctcactcacctgggacattcttcagctcacgccctgtacctggcttacagttgctcagtgaaatgctttcttgattgtagcatggtgggatttttataaatccaaatgacttagaggtaggtgtcacatttttagcagctaaaatcatactaatcgtaaagctcagattcctgtaagtagggcgctgagcacaggctgcatcctggatatatgaatagatgaaccagatcgtgtacatgtgggacacgttctttgtcctttgggactttcttttgcttggatgttggtagtaaccatgtaag

SEQ ID NO: 16849 - DNA, 1039 bp, Homo sapiens
ctctttgtaccatacttaacaggcaagtaactctcttgtaaaatcagattctaaatgattttcttttcttttcttttttttttttttttgagacggagtctctgtagcccaggctggagtgcggtggcgcgatctctgctcactgcaggctccgcctcccggcttcacgccattcttctgcctcaacctcccaagtagctgggactacaggcgcccgccaccacgcccggcttatttttcgtatttttagtagagacggggtttcaccgtgttagccaggatggtcttgatctcctgacctcgtgatccgcccgcctcggcctcccaaagggctgggattacaggcgtgagccaccacgcccagcctctaaatgattttcttaagtgtaattcaggagttggcaaactacagcccatgctgccacatctggcctgccacacctgttgttgcacataaagtttcattgagtcacagtcatactcatttgctttcatattgtctgtagacaacctagaatgttagaaaattctttctctggctggacgcggtggctcacgcctgtaatcccagcactttgagaggctgaggcggccggatcacctgaggtcaggagttcgaaaccagcctgaccaacatggagaaaccccatctctactaaaaatacaaaaattaaccagatgtggtggcacatgcctataataccagctactcgagaggctgaggcaggagaatcacttgaacccaggagttggaggttgcggtgagccatggctcatgcatgtaatccttgcactttgggaggctgagacgggcagatcacaaggtcaggagatcgagaccatcctggctaacacggtgaaaccccgtctccactaaaaatacaaaaaaaaaaaaaaaattagccaggcgtggttgcgggcgcctgtagtcccagctgctcgggaggctgaggcaggagaatggcttgaacccaggaggcagagcttgcagtgagccgagatcacgccactgcactccagcctgggtgacagagcgaaa

SEQ ID NO: 16850 - DNA, 1035 bp, Homo sapiens
cggctcacataattaggcagaactcaggaactttcctccctatctctttcactcttctgaaatgccctttatgttttcctctgctctttcagtcccagtgccttttctctggtgcagcctcatggttcggtctcaccttcagcttttccttccctccaatacatcctgtaaattattgtcagacttcttcttatctaaataactcgtttaggtaaggtactcatatgttcaaaataccatggtggctccctgttctctgtgatgtgaagtcctaaccattagactcagctttcccccaggacaccttggcttatcttcttgctgctttccagaggcatgggccattaggctggttttctgaaggttctgccaaaaggctgggcccttgtctcccaccccactgctgttactcatgtgttctcccacttgctcggcattctttcccatgctttttccttgatcatcacttactagctaacatctattttttcctaaacactctgttgcagttgtagtctgcagtcactctcctaagacttgatcatctattacgctgtttcgttctttattttttaacttttcttcttcttttttttttttgaaacggattctcgctctgtcacccatgctggagtgtactggcacaatctcggctcactgcaacctctgccttccgggttcaagcgattctcctgcctcagcctccctagtagctgggattacaggcacgcgccatcacacctggctaatttttgtatttttagtagaatcggagtttcaccatgttggccaggaggtcaggtcgaactcctgacctcaagtgatccacctgccttgacctcccaaagtgctgggattacaggcatgagccaccatgcccggttgttttgttctttaattttacaaacttggcatagcttagaagaccatatacagtggcaccatatacagtggcaccatattagtggcaccatatacagttttccctgagaaaactggtacctcccaacagataccaaaatctgggaccacccc

SEQ ID NO: 16851 - DNA, 1064 bp, Homo sapiens
ccatgttgcaacttaaatatttttggaatgcaatgtaaaagtgatttactgtcctataattgttttcctgaaagcaaaatgatatttaagtgaactgcaatgaaaaatgcaacgactgtaatttatcgttgaagggcattttcaaagtgtatagaatgactaaagcttaagtgtattaaatattctagaggaagacatatttaggctataaatctagacttcctttggaatttgtttcctttttctcagccaggtgtatgaagattttaagttcttaggcctcagtgggaagaagatttaaggttccaagagtacatttgtatctcttttaaattttctattgtttatcagtgacatatgtaaatgttttagggagctgtttactgtaacattacctactttagctctgtgcagttgtctggcaaccaatgtgataaagacagagggaagtgctgtattttgttgctgacaagtatatcttaaaagtgcaggtgcacctgaataggcaataaagtattaagagctgctcctggagcagtttgctctctgtgacgtgtgaaaagtctacggggtttataattggtctggccatacggctgcctaggattagactcttttcatatcccactaaacactctccttagaagcaagcacaaggagatagtttattttaaaatgtaattgctatgttactaagatttgaatttgagtaccgagaataaaccatatttctgtttagaggctggttggcttaaaattgtgtctaatccttcccctgccccccaactccgaatcagagaatgaataacaaataaacatgacaatgaagtctcatgctgttgttttcatatttgtatttaggagtttcagagcaaatgacttggaaaacaggcaaatccactgacataggcatttttagccaccttggaatccgaggagggattctgcactatgccctgtaacctcgttcacatgccgtttgaatgtataccatgaagaccccttagctcagggagctttgctctatttaagtaatgtttatattcttaatgaaccaaagagga

SEQ ID NO: 16852 - DNA, 1038 bp, Homo sapiens
cacacacacacccctacacccacacacacccacccctacacccacacacacccacccctacacccacacaccttcccacacaaacctacacccacacaccttcccacacagacctacacccacacaccaggatttgaaggctctgctaagaggctacaacaactgtagcatacaactagcacacttgttgctattatgtgtaggggactagatggaaagagtgcagataggactacctaccattcacccctaccagcgaagtggaagcactcatcttctttcccttcttaccctttcaaagcaagttgttgagggatgaagaggagagtgactttaatcgtggctttaagtagagattttctttaggagtaattgtttctctcgacagagtggataggcttccatagttgtcttaataccttttgtccaccccaaggattgacccaggcaaggaggatgaaccctcctcaatttgggaaagttaaattttaggcacagcaggtcaaagagtagggaagagctgcagttgttggaaccaagtgacattgatttagtctggaaaggagtcacagaggaatcaaaagccagaccctcctggcagctttagatgtggttggggtctgggaataatgctggtcccaaaatcacctctggaactaactcctgtaaaatgaagcctctgcatccttcagtaacttacttaaaattttgttagggctgcattttcttcaaagccaagttctgaataagaagtatttgttttgggctctagccagattactgaagtattgttgagggagatttgctgtggaaggtgttgggggtacagggattgtgaagataatgtaaaatatttaacattttaaaaattttcagtaagttctctttccccaatgtcagcatgacttcttcattcatgttcttccatcactctccattcagttagaatctcaattgtgtaatatcagtggtagcgacaattatgaaattcgtccagtgaggaaaatccgcagagctagagcccaaaccagcaacttt

SEQ ID NO: 16853 - DNA, 2447 bp, Homo sapiens
gattacaggcaggcaccaccacacccagctaatttttgtatttttagtagagacggggtttcacatgttggccaggttggtcttgatctcctgaccgcccacctcggcctcccagagtgctgggattacaggcatgagctaccatgcctggccttcaccaatttttaaattttttgtagaaactcactatgttgcccagtctggtctcgaactcctggcctcccacctcagcctcccaaccacaactggccaaggtcctgtttctcatcacattgtcactcactgatcttgtcatgctttggtggagcttatctacaataattattactgccatgctttaatggcaattttctatcttattgtcatttattcattggaatttttacataggaaagacctgctccttctcaaactctaaacagtttcattcaccatacttttctccaggtaactttctgggtggctgaaagtgactttcaaagaatggagatatcttttcaatgttgagagagtggcagtctgctggttcccaagatgccttcttcacctagcattgagactctgcagaatgccttgaccacagttgtgatttggatctgttggcttgcaaagcccatttgagaatttacaaaatcattttcacggcctgagagtcttttaggtactgatttttttcatcccttctttactaacagactttatttagtagagtattattggacaggtttggggttcacctttatgagaaaaaacttagattttctaatttcagcttttttattttcttccatcagtgggacaaagttgacatcattgcctaaaagtaatttctgtgattatctgtgtatttcagttaaccatgttctttggactcactgtggtcttcagcagggatggtggccaaactatgtttagaaagataaaaattaaaatgacatctgcatccttcatgtaaacccataaaaaatagcacgtgaccctgaagatcctctgcctctcattccaggcattacaattgaaaatgctatctgggatgttaaaaactaaaactattctaggacttagtggaatattgatagttagggaatgctgtttgctttcttgaattttgaacctgttattgagaaggtagatgcgcctgtttaccccaggaaggctcctctttgaagacagtgcccctggagcacatgaccttttcatgcccttgcctgtcaagacttttccagtactctaaggtcaaagggcgttgggccaggctgatctaatcagggtattaaccttgccccactcatcttgatttattcctagatcccagttcccagagcatccctttagagcctcagaaatggaacacaagacagctgaaataagcccgtggccaaaaggcactctgagcatgagggaagtaagcaggcttccctgtcactgctgaggctctgtcatccagccccagctgtcctcttgtgatcactcagcagacccgggaaaaattcaagaatttgttttttagtgtcagtgggagacgtggggatcctgcttttgctgggagagcttcagttgtctgagtccccactcaaccccaggctcctgccaaggccaccaagggcaggagcactggaaggctgactatggagtgaagaggccactgggtttcacaaacagcactgtcagccaaagctgtagcttgttagccatccaaaagaatcttgcacctgctgccagtgagcttacacctagatgacagctggagctgacactcattcagcccttactctatgccaggtactattctaaacacttgccatatactcagttgtcccacagatacaactatttatccccactttagagacaaaaaattgaggcacagaaaggttaagtaatttggccaaggaagtgcagctagtaaatggcagacctggggtttgaaccgaaatcagtgtgactctagagtacctactcttagaccctactctctactgcctctcattagaagtctcccccacctccctaccaccaccatcaccacccaccctcccagccacatatatgctcacactgggtggttcagatggctagaagtggcagctcaaccttgtgtgcctcggacacgaaaatattaggttcagacaccactcagacttcacattttcattagttttgggtagaggaatgagaataaatattcagcgagacagccttttctaactgcaagattgcattcctcttctttctagatgcagtggcaagaacagtaccctggatggtggagctggtagtggtagatgagatagagcagtcccttgattctgctttgtccccattaatgacagatctgagggcatccagaaggaatctccacaagcccagcctccacagtggctgcttcctctacatggtagagtggtgctcacctccactcctccatagatgccaagtcatctgtg

SEQ ID NO: 16854 - DNA, 1070 bp, Homo sapiens
gcttttcttccttggaacatggagcaccactctcccctgtgctgatacacttacaaagaagttcacctactccttggaaagttctggaaaaggggcttctacactgttggcctctcgaggagaacggtttttgtttctgtcttcctggaaaagaggtgactgctggcatcatctttctagataaactccttgctatgatgccattagaagcagtgttcttttgtgttttgcttttgtttttccctgtagacaggaataacattttgactagaaacttccctgatgtaataacgaagatggcctccttagaaagttccagaacagaccccttcacctctgtccccagaagcagaagtaggtgatgcactttcttggcaagccacataactaccatttctctacaatcgaagctcaaaaatctgtgcttgtatacgttcattttttgtttttacttctttacttcctttgataagacagaaacttctgtattaaaactgatttaactctgaggggctaagtgaacaacaatctgttgtcctatagaggtcaaggcagtgctcacaacaggatcattgtgctgctgtagttcagtttaggggacggggaatgtttataaaaacaaagttttgaaatgaggacagggaaaggctttgtttacctggggctctagacttaaggtactcattttgcctgcagaataatgaaatgcagagttgtaattagaaaaggttgatgtaattgatgtgttaacaatttttgaggtttttctctttccactttaggacagtcatgcaattatttttctgaaccaaaatcagaaccatcagtcgaaggctaaaacaggcctggggaaacactgtcttttggcaaagaaagacaaagatccttgttctctaggccagtgtgcatatgtgtgtaatgctttaaagaacaattttgacaagaactcttaggatgcaacttgtagagtgatttttaaggagatgcagtaggatttgtgcaagtattctgctatgagcctaagattttcaacatggaaatctagccatgcagtgactcgttcactttgg

SEQ ID NO: 16855 - DNA, 1079 bp, Homo sapiens
ctttttcagtgatggggcacttggggagaagtgcggggagtggaggaggaggggaaggtgcattgcaaatagaaatgtaaggcgtggcctgggtggccaggatgtgccagagcagcctccagacctacttaaatcccaggaaaagtcctgcctcaagttaggcacaacatctgacttggatttctctctgtttttttctcttccagttgtctgtctgtgcgccctctcccacaaggaatagttttccacactgatggaattaatgcatatcgtggtattattggtggaatatgtttaacctttgtttcgtgatttgagaggaatggttcttgtgtatcgtgtggtgacagcaggttaaggagagtgtcagagctggtgcagagttttgccccggggccatgaggttctgggcatcatgactctcttatgaagttacaaaactgggcaagtgattgaaggcagaaagacactgtaataaagtgtgctccagtgatgtgtgctccggcttctctcccttactcatctgggccaggtgctttcgccacagtgagcctgggtgtcccctgcctgagatgagcacagtgatgtctatgcgaggttgtaggactcagtgaagtgccttagggattttgcctggcactctcctgggctcatgaggtgcctagggctgagacttccccttctctgtctggtaaatcatctctcccattctttcttctgcggcccttcatatgagctttgtaatttactcagggtggcagggtgaattcatcttttgctgggtttctgcatcacctgctcctttctggccaggtcagcctgttcattttttccatgccaacagcctctaagtgccagtaagtcacgtctgaacaaccaaagcatgtttccctgcgggagaatgccagggcaggcgggtctgggagccaagaggatttctcctgttcagataagtcgggggaatagaagagccctgtgacttgagacaagctttgagtgacacccagtgaatctcccatcactactttaatccctgccccagtgttctggttccccctttcctgcatgaggcagtacga

SEQ ID NO: 16856 - DNA, 1032 bp, Homo sapiens
aatgtgtgaaagtgaaagttttaaaagtcatactaaatgtgtgatcctttttagaattcactgggtacgggtacgtggaggaagtgtttttgtttttgtgaatttgtttaaacaaatgactgaggctttgttttccactctgtctggccaagcaccattgctacacttttttaaattcatgacatcctgagcagtgaagctgttcttcagcccgcctctccatttgtgactggaagacaaggaggcagacaccaatggcgcctctcacaatggaggtttatttttttttaatctaacggagggattgtagatggtgtaaaacttccttgtgccaggagagaaagggggagagagagagagagagagagagagagagaaataacccattctaaacaactttaggaatagatgatccgtaggcatcaactttgcgcagcaacaaaagccactttctgaacctcgttctgtgaagttttaaaacaaattgggtttgtttaattaaaatatttcttaaaggcaaaaagcactgagctaatttttaagaattttaagttatatattaatatgagtagtgatttataattttctgttgaaatacataaattcgagaagccccacccctaccacttgccagtcttgagtccccacggctcctttgcctaggtctaaagtcactgcttgcacactcctgccttgcatatgccttgccatcgtgtgggcctcttggctggaagtgttcttgtcctcccgttaggtatcttttatgacgtgaatccttacctctaattattatctgtgtgtacatctcatcacctgcatctgactgtgtgccttgtgtatgtctcttagccctcacaattgcctgacatgccttacaaacgggtagaccaagtgttaaatgaacaaatatttaataagaacttaaaagctttttgactttatatatttttaaagccattgtgattaaacactatgtttgatgtggtgctaattctgtgctttatcaactgtgtgaattgtagtatttttaaa

SEQ ID NO: 16857 - DNA, 1107 bp, Homo sapiens
tgacaaaattttatcagaaacattgcatactcttctctaaatagtagtttccctacaagtggctgtcttcagtttagtcgtttaagttatgttgacataaatgattatgtgtgtggcaggggcttttgcgtaggttgttgaaacattgcaccttttggactaacagtttttaccaaaataggcagaagtgacatttgcagccacagctgtgtggcattgagcgtctaaggtatgtgtaataggcagtgtatcggtagcattgataccttggtcaacaccagtaagccatgtaattgcccagaagtgggctctaacactagttttaggagatgcagccaaaacgacaaagctggaggcctctccctctgagcttggcctccacttggtcaaaacagtccccagtttgtccctacgggacacaggcctgccttgttaggaaatcagcaacatttaggagcccacaatacctcacataactctgtgtacagtaacagagaatggaaatagggctgtaagcatgaacaaccagtcaagttacaaatatagaatactctctcaattccactttagttagtcatggagggacagtgtgagttttataaacttataaggaatatacaaacagttccaaatttaaaataacttgaagtaacttttaagtgtgtgaaaagaatatttttttccaccctgtccatttaagcatctgtgacaggcagtattaagtgatgggtgtctttacgtacacatgcctgttgctcacagtactggggaagagttgcaaaatagtcacccattctgcagtgatttctctcttcttatttgtgaaagactcaaaaaaaaaaaaaaaaaaaaaaaaaaaaaaaacaacaacaaaaaaaaggccaggcacggtggctcagacctataatcccagcaccttgggaggccaagtcaggtggatcacaaggtcaggagagcgagaccatcctggctaacacggtgaaaccaaccccgtctctactaaaaatacaaaaaattagctgggcgtggtggtgggcgcctataatcccagctactcgggaagctgaggcaggagaattgcttgaacccgggaggtggaggttgcag

SEQ ID NO: 16858 - DNA, 1033 bp, Homo sapiens
gtgctgggattacaggcgtgagccactgtgcctggccggcccttccttttagacaatagaaacatgctgcaaccacataccaccataaacacggtgggggaagaggctgcaatcaacagtcaggaggatctgggttccaagcccaggtttgcagtgtaacagctgtgtgctcttggtgtgaacatttggtcatgtacaaatgaggataatgatactgcccccttgtgatcattagggggattaaattaaatgcagaaatatatgtgagatgcttaatgtgttgtaaggcgcatggaatatatttagtgaatattaactgtatattaatacaaagtcctgtattcagaatctccagtataaattacatttatatagtagagatatgaatagtttttgtgaacaagaagacctggaacttcaggtgactagaagctcagagtgagccagctatgtttgatgatagttattcttaagatcacacagagaaacggcaagcaagctgctttgggcaaaaaagagcatttctacactgttcagactgcctctgtactgttagaataggtctagggcgtgttgcgtgagtggtgactgagtaagatgttcagagggaagccgtgaccgtcatcttggaatattgtttgaaagtctgacctgtacaaagcagcactcacttcccctgcgtgtcagacacctgcatgagggctggggagggtccagtacaggaaagcgcatttttaatatgtgtatggaggaagttcgtcaagatgggtgccatctggcagtggagtagcacttcctggaaagtaatgagctcccttggactttgtttgaagagtcacccaggtttttgtaaagaagtgtttcagatcagtatgcaatggatgactgtaaatttctcttcagatctaagaatctgtgattggatgaaagggagaaaggactgcataagtgcttgttgcttgtaaactgggccaggtggatgtcatggccctaggagcttcttgcctgcctttgcatgccataaagcagtcct

SEQ ID NO: 16859 - DNA, 1026 bp, Homo sapiens
ccattcttgatgtttcgccttgtggtccaaggttggtacttgagctccaagcattactactgcattccagccagcaaggaggaggatggccatgccctctttgttctcaggagtcttccaggaagttccagtcacaacgtttgtttatatctcactggccagaacttaagtcatatggccacctctagctacaaggaaggctgggagatgtagtctgtaactggatggccatattatcaactaaaaattactgaaaatgacaagaagaataaataatggaaggcaacctgttgtttctgtcaaaggatgacttcaaaagagaaagttgcaaaagtatttcaagcttgacagtatcatgacagttttcttcagaggtgacgctattcatttgcatgtccaagttctgatatctgttttcaagttcacctatttgcagcgaaataggaactcttggaggcaactagtgggtgtgtaaaccggtacaaactttctagaggacagtttaacccaacaagatgaattctggaaattgatcctaatgaaatgttaagggtgctcatgaagattgctttgccgattgcaataataaaaagtaaagaaaatatcttataattggggacaggtgtaacttatgatacattccacaatggagtgtaatactgctgttaaatgtttgtggaattcacaatcttttatgccaaaagaaagctttcagaatggcttgtcttttttgtagatacttgtatttatatgtccatgcacatacataagaaaggaccagggaaggtctgcttgaagatattaataaaggggtcacttgtgggtaggtggacttacttgttctctatattctctttacttgtttgtgatctctggtttttttaatcatgtatttttattacaagaaaaaacaaattctagaatctccactcaatattgcatgtcagagtcaaaaagatacacatttaaataattttgtattgttttccaatttgaggataaagtaggaaatgtataatgcaaacc

SEQ ID NO: 16860 - DNA, 1022 bp, Homo sapiens
ccttaaaacatcaactgcacgcaacctctcatctttccaacttgaacttccctttaatttttcttggaaagctattaaattaaattagatgtagggctttatcctttagtacccttattattttatttgtatcaactcaaagcaaaatagagcattttattaaatatgtcttcataaattacgcacagtaaaatcccattaattggaccacacccagttcattatagtgtttattataattttagcattagttgaactgaaaattggtttttgtttactatgagaaaaaggtagactaaacaagatgaaacctgttgtttgcatattatgtttgtacatctttattagcaactatttttccaactattttcaactatttttccaactattttctagttataaaagcaatacataaatactatagaaaatttagcaatgcagaaatgaatttttaaaaatccctcatagatagccattgttaacattttggtgtattttcttcaagtcttagtaaaatggaacctttaaatatagatccctgtatcttaggaattagaaaggcagcaaaggcagttcctaatgagatggagaaaatgttgatttagtcatgcccttgtactgtgggggccatactgtctgttgacagagcatattaaaagacgttccctacattcgtcagccttagctaattggcagtctggtatttatgattttatattttgttaatcagcttgggagctgcagtaccccccagcctcctagaaacttggcttcccctgcctgggaggcctcgttccaggagtcgttgttgagagtcaagccagggaagtgtgtttttgtcagggagcagccagtcctgtgctgggagcatctcagggggcacctgccgttgaattgttctcacttgtgtttgtaagaatccaagtatgtcacccttacaccaagtgagcacacagtgacacaatcccctttcaatgtagataacattgcttcagagctggagaacttcatggggctcatcg

SEQ ID NO: 16861 - DNA, 1044 bp, Homo sapiens
ctctgtaggctggagacctcgggttcagctccatttatcagggcacaggaccttcctgttctgagactttgttccaggggactttcacacttcagagaatagcacatgtcatcctgcacttttgtggggtgattaaaagctcacggtatccttttatgtttagcccatccaattcttccaactggcctcagccagaaaagcagggaaggcacccccagtttgcagctgagagactccagcctgggagagctgaataaatcttttgcccagaggggttcctcagtaaatgctggagatgaggctcagacctgacctttggattcccagatggagtgctctgaaccgtgtacctggggctgtcttcaccactcaaatatcgatagagataacatagagatgtcctcaggaagataaccaactgttcccatcctgtgtggtctacagattgggagatagggcctacccaagtgtagaaataaacattttttacaacatagagaaggctgagaaccaggataccaatatcaataaaatctggatatcatagagcacatggaagctaaagaaaaataagtaactggtcaggtgtggtggctcacacctgtaatcccagcactttggaagaccatggcaaggcattgcttgagcccaggagtttgagaccagccagggcaacatagtgagataccagctgttaaaaaaaaaaaagaaaagaaaaattaaccaagcatggtggggcatacctatggtcccagctacttgggaggctgaggtaggagggtagcttgagcctgggaagttgaggctgcagtgctctgtcattgcaccactgcaccccaacctggattacagagtgagaccctgtctcaaggggaaaaaaaaaaaaaaacctaatttttaaaagcattctttgaatgtaaaggcagtaagctaagaaacaattaggaaatcacatttactgaataatttacttaagtaatctttttcttcaggaaacaatgataactttagcgtatgcatattttaaagatgtgcagacaggtc

SEQ ID NO: 16862 - DNA, 1116 bp, Homo sapiens
caccgttatactatgtagggttttactatggtttctttaataatttctaattcagtttatagtaaagtcaatcaaaagcagcctcctctgaatgggaatcaggtgcagaataatgactttatttctatctacataaaggtctcacaaagttggttttttaatagtaatatatatatacatacttctgtagtgtgtgtatataaggcagagagaacattctggacggatgcacaccacacttacaagagttgttacttgtggagaggatctttccctttaaaaaaaaaaaaaaaaaaaaagccagatgtggtcgaaggcacctgtagtcccagctactcgggagactgaggtgaaaggattacctgagcccaagagctgcagtgagctagaatcccaccactgcactacagcctatagagcgagactggctcttaaaatccagcaagaagatagatatgcattgtttgtatgaataatagcttctaaaaagaaaatcagtaaggaagggagtcatcccagatgatggaattgatagaacaaggcaagaccactttctccctctgtgagggtggactgtgactctacgagagaagctattctgctttgaaatgcggcactagaggttggtgtgtgtagcttttgactgtgaagtgtccaggaagagaaagcatcaatacaacaaattcagattctcagggctctcatggtgacttgaattcacattttgtgtccttctagaatgctttcatgatacgtcttggtacttcattacaacaaaaacaaacttattgccacccaggtcgacaggtgggaacagtgtcaccttatttgaacttaatttattcggcctttgagaagcacttatagccagtttcctcgaggggcaacaaaatgacattgcagttcaaaagtgctttaaaaacttctttttcccaaagctataatctgcatgtcaccattctccagagtacattgaaaatcccctacaggaaagtgctgataacattgtgcacagaaaccgctcctggctggtggcactggggacgcctgcttaaagtcggagccgttgggttgaatcgagagaaaaggattgagcgtattgacttcagggacctc

SEQ ID NO: 16863 - DNA, 1062 bp, Homo sapiens
aactgttggatgcctttttataaatacatcccccatccctgctcccacctgcccctttagttgttttctaacccgtaggctctctgggcacgaggcagaaagcaggccgggcacccatcctgagagggccgcgctcctctccccagcctgccctcacagcattggagcctgttacagtgcaagacatgatacaaactcaggtcagaaaaacaaaggttaaatatttcacacgtctttgttcagtgtttccactcaccgtggttgagaagcctcaccctctctttcccttgcctttgcttaggttgtgacacacatatatatatatttttttaattcttgggtacaacagcagtgttaaccgcagacactaggcatttggattactatttttcttaatggctatttaatccttccatcccacgaaaaacagctgctgagtccaagggagcagcagagcgtggtccggcagggcctgttgtggccctcgccacccccctcaccggaccgactgacctgtctttggaaccagaacatcccaagggaactccttcgcactggcgttgagtgggaccccgggatccaggctggcccagggcggcaccctcagggctgtgcccgctggagtgctaggtggaggcagcacagacgccacggtggcccaagagcccctttgcttcttgctgggggaccagggctgtggtgctggcccactttccctcggccaggaatccaggtccttggggcccaggggtcttgtcttgtttcatttttagcacttctcaccagagagatgacagcacaagagttgcttctgggatagaaatgtttaggagtaagaacaaagctgggatacggtgattgctagttgtgactgaagattcaacacagaaaagaaagtttatacggcttttttgctggtcagcagtttgtcccactgctttctctagtctctatcccatagcgtgttccctttaaaaaaaaaaaaaaggtattatatgtaggagttttcttttaatttattttgtgataaattaccagtttcaatcactgtagaaaagcccc

SEQ ID NO: 16864 - DNA, 1046 bp, Homo sapiens
aaaatagaagagcagtcactgtggaactaccaaatggcgagatgctcggtgcacattggggtgctttgggataaaagatttatgagccaactattctctggcaccagattctaggccagtttgttccactgaagcttttcccacagcagtccacctctgcaggctggcagccgaatggcttgccagtggctctgtggcaagatcacactgagatcgatgggtgagaaggctaggatgcttgtctagtgttcttagctgtcacgttggctccttccagggtggccagacggtgttggccactcccttctaaaacacaggcgccctcctggtgacagtgacccgccgtggtatgccttggcccattccagcagtcccagttatgcatttcaagtttggggtttgttcttttcgttaatgttcctctgtgttgtcagctgtcttcatttcctgggctaagcagcattgggagatgtggaccagagatccactccttaagaaccagtggcgaaagacactttctttcttcactctgaagtagctggtggtacaaatgagaacttcaagagaggatgttatttagactgaacctctgttgccagagatgctgaagatacagaccttggacaggtcagagggtttcatttttggccttcatcttagatgactggttgcgtcatttggagaagtgagtgctccttgatggtggaatgaccgggtggtgggtacagaaccattgtcacagggatcctggcacagagaagagttacgagcagcagggtgcagggcttggaaggaatgtgggcaaggttttgaacttgattgttcttgaagctatcagaccacatcgaggctcagcagtcatccgtgggcatttggtttcaacaaagaaacctaacatcctactctggaaactgatctcggagttaaggcgaattgttcaagaacacaaactacatcgcactcgtcagttgtcagttctggggcatgactttagcgttttgtttctgcgagaacataacgatcactcatttttatgtcccacgtgt

SEQ ID NO: 16865 - DNA, 1130 bp, Homo sapiens
ctcagttcttcatggttgcagattcagcagtgaaaaatgccacgtaaaacaaagaaagtcccttgacctgagaggccttcaggtggaaacagcgtgtggtttttcggggatgcctcagccaggctgccggtgtggctagggcacagtgaacagggggtagagtggccactgcaggacttgggcatttactttgagtgccatgggaagccactggaggttctgagccgaggagagttggggcctggctgtggcttagtggaatcactgttgctgctgttttaaaaatagactgagtggactcagggatgccttcagagattgttgcagtaacccaggcaggaagtgctcgaggcttggaccaggggtctcagaggggcccctgcgttcaagttgaagccaacggcatttgctgccagattgaatgtgatgggagagggagaaatcacagtggacttcaggcgttgtggcctgagcaactggaagaagggactttccttgttttacgtggcatttttcactgctgaatccgcagccatgaagaactgcgcttggcacactaaatgctcaacggctggtagttgaacgaatgaaccaattgtatacaccctgggagctacttccggtacctcttatacgctttactgcggggcattggttaggaggacgggcctgggtgggagattcaagttccatgtacgtgtgttcagtttgagatgcttcttacacacccacctggaattgtaaaatataacttgagttcagggtgctgtctgggctaagctataaatacttcgtcggcatccagttcgtgcttattgttatgaatacatttaatttttgtgtgtagctgaagttatcacagtatttaaatcccctggagctctacctttcaaggttgcaaatgacagtgatatttgtgaactgtcccacaggcttgctcagtgagcggtagctcaagtttggctaagagaaaattaattcttttgatactgacagcagcatgcctttcctggtgtggagcaagatttcatcatcggttgtgatgctgcccaaaagttctctaaatagcaaaaaggtgacctctctcccaagcttttgcagcattaggtgaaactgcctctgctcgggtg

SEQ ID NO: 16866 - DNA, 1174 bp, Homo sapiens
aaggtgacctgaattgctttgatgtctattaaaagggtatctggctgatacgttgcttgtagtttacattgcagcctgggccggcctcactgtctttattttctggaagacttacatcagccagggttcatctgagccctcactcccatcagtgaagagggagcagctctatcaggcagcccctggcctgggccccaggaggctgctaaggggtgaggccttcccagggacatggagtccatggaggagccacggcttcaccaagggatgaattgaggggtggtcctggggctaaggccatgagggcctttctggatcccccatttgagagccttgctgccactgaggggctggtggccggggctcagagaaaggggaaaagatgttgccagactggacttcccaaagcccattgttggcattctccttggaaatcttgtggggtgaacagttgcacaattaaattggtagggcattgaaacacacgttgagttagatgatctaaactttaatatggaaaacttgaaaacactcgggctttatttgggggaagaaagcattaatcaggaatttttcatttgtgagtgacagaaactctcctcagactgccccaagtcagaaaaagaatttattactcatatacctgaaagtcttgtgctggtctactctgtgttatgaaggaataactgagactggataatttgcaaagaaaagaggtttattttggcccacagttgtgcaggctgtaccggaatcgtggtgctggcatctgctcctggtgaagcctcaggaagcatacagtcatggtggaaggtgaaagggcagcaggcatgtcacatggcaagagagcgagcaagagagtggggaggtgtcaggttctttttttttctttttgacatggagtctcactctgtcacccaggctggagtgtggtggtgcgatcttggctcactgcaacctctacctcacgggttcaagcaattctcctgattctcctgcctcagcctcccgagtagctgggactacaggcacctgccaccatgcctggctaattcttgtatttttagtaaagacggggtttcaccatattggccaggctggtattgaactcctgaccttgtgatccacccgcctcagcctctcaaagtgctgggattacaggcatgagcccctg

SEQ ID NO: 16867 - DNA, 1087 bp, Homo sapiens
gaagggactgtggctctttaatgcttaaagcacgttttgctgggatttgtccattgtcccaaggactctcaaatgtactgaacacctcccaacccagatctttggcccttctaggtgactgtcacagggaaggagcaacattaaagtaatcataaaataatataattgtatacttgtaatttccagagagacttgcaatttataaataaatatataatttaataaaataaacataagataataaaattaaaacaaagcaaacctccaagagtctaagactggggttttgcctttggccagtgcatggccagggaagctgctggcagctcgcctggcaggtgaagatgagatcgagacctctgagcatcctaagacgtgcagcaccatccctccctttcctcctgcattgcgggtggcagtgagcgggagctgtggggctgggcgtggggccatggatactgagaagagaggagacacaccctgcctgcagctggcaccaggctgtactggctcttgtctcctgtcaagagtagcggcagttgtgtggggctcgaggtactgatccatttgctgtatgatcacagggtcttgcctggagtgtgcgttttattgcactagcagcagaatggtaagggaaacatgctcggggacagggagggactgcacctgcgaatctcccggccctcaagattctgatgaggttagtgacaggtggaaccggcacagtggtttcaaacctccctggatgattgtcaggtaccaccagggtggagaatccccggtccagggcctcacagctcacagggcggcagcatgcgcattgtgaggcattgcaagtttgttgggaatgcagaatcttgggcccacccagacatactggaccgaagttggcctcgtaacaaaatcccaggtgattcgtgcgcacactgctgttggcagagtggcccaggcgcaggtaagtgctaggtcttctcacagcagcctggaagacaagatgaaggatgggttgatggaggagaggggaagcagtcacagtgggaggcggggcttgcaccaggacccacgcgccagtctgggctgcttgcag

SEQ ID NO: 16868 - DNA, 1037 bp, Homo sapiens
tcgtcaacgtggagatcgtggaggagcccgtgagttatgtcagcggggagaagccggaggagttttccgtcccattcaaagtggaggaggtcgaagatgtgtcgccaggcccctgggggttggttaaggaggaggaaggttatggagaaagcgatgtcacattctcagttaatcagcatcgaaggaccaagcagcctcaggagaacacgactcacgtggaagaagtgacagaggcaggtgattcagagggcgagcagagttattttgtgtccactccagatgaacaccccggggggcacgacagagatgacggctcggtgtacgggcagatccacatcgaggaggaatccaccatcaggtactcttggcaggatgaaatcgtgcaggggactcgaaggaggacacagaaggacggtgcagtgggcgagaaggttgtgaagcccttggatgtcccagcgccctctctggagggggacctgggttccactcactggaaagaacaagctagaagcggtgaatttcatgccgaacccacagtcattgaaaaagaaattaaaataccccacgaattccacacctccatgaagggcatctcctccaaggagccccggcagcagctggtggaggtcatcgggcagctggaggaaacccttcccgagcgcatgagggaggagctgtccgccctcaccagagaggggcagggtgggccggggagcgtttccgtggatgtcaagaaggtccagggtgctggtggcagttccgtgaccctggttgctgaagtcaacgtctcacaaactgtggatgccgatcggttagacctggaggagctgagcaaagatgaggccagtgagatggagaaggctgtggagtcggtggttcgggagagcctgagcaggcaacgcagcccagcgcctggcagcccagatgaggaaggtggagcggaggccccggctgctggcattcgctttaggcgttgggccacccgggagctgtacatcccttcaggcgagagcgaggttgctggtggggcctctcac

SEQ ID NO: 16869 - DNA, 1018 bp, Homo sapiens
agggaacattcctaaattcattgcttcctggggtggggtggggtgggggcgctaaattttaaaaatgtgttttagtttttgtgattccaagctacgcttcaagaagtacagaaaggaagaagtaacatcagaattcacatttatttcaaaaactcggcatggactctcagttcaggctgctgtaacagaaagccgtagcctgaaaggcttaaacaacaaacatttatttcttacagttctggaagctgggaagtctcaaggtgccaacagtttcatttcctggtgagggctctcttccgggcctgcagacggctgtcttctcactgtgtcctcacatggtggagagagagatcatctctctggtgtctctccttataaagcactaatcccattcatcagggctccaccctcataacctaatcacctctccaagaccccacccccaataccatccctttggggattagggcttcaacgtgaattgggagcatatgaacattcaccccttagctgactccacccatgtcaactagataggacacacggtgagtagtgacatcttacacgtttttagcacactgctgatgtccgacaggcctgggtctgggaccagtgtgtaccagcaagcatggtctgtggggtcagctgtcacgctcctgaggaagacaatggtccctgcttctctccaccctgtcgtggctctactgagtttattttccccatcaatactggaggtggtgccctgcacaaatggccccagggtggttttgatgtcccactgggggctggaggggagggccctgtgctgcaatctgctgtcatagcaccagcctgcagcctcatggccacagtctgtgggaccaggggagggaggggaagggacatcactgcccacacctgcacccctacccctgggtgttccatccacctcgatctggcactggatctcctcgttgacatcgtggaggaaggcactcaaagcttcctgttcgactttgccatcctcacacgactatgg

SEQ ID NO: 16870 - DNA, 1962 bp, Homo sapiens
taaatagatacgtatgtcttgttcttttgtgattggcatattggcatatatgttgaatgcctacttatatttctgaaattagatttttcagttttccaacttggaaaatctatttgcagttataggaatccttttttgcaaagtcatcatcccgtgctatgaaaccatattagtactttttaaccctttaacgagaagtggtataagaaatattttgacaaggattatagcctagattttcccatgtttgttctttatgtataaagaaaaatttgtgattggattacttattaactatctgccatagcccaatggggtagactttgttcagagaattgacctttgcttataaaagttaaatttgtgggcggaccacgcggctggaggtgtgaggatccaacccgggggtgagagggtggaggtggctcttgcgatcgaaagggacttgagactcaccagccacaagctgtgaaggccctgtgggtgctggggcctctgctgcgtcctgctgaccttcgggtcggtcagagctgttgatgaagttgatgtggaaggtacagtagaagaggatctgggtaaaagtagacaaggctcaaggatggatgatgaagtagtacagagagaggaagaagctattcagttggataaattaaatgcatcacaaataagagaacttagagagaagttggaaaagtttgccttccaagctgaagttaacagaatgatgaaacttatcatcaattcattgtatgaaaataaagagattttccttagagaactgattctgacgctttagttaagataaggctgatatcactgactaatgaaaatgctctttctggaaatgaggaactaacagtcaaaattaagtgtgataaggtgaagaacctactgcatgtcacagacactggtgtaggaatgaccagagaagagttggttaaaaaccttggtaccatagccaaatcttgaacaaacgagtttttaaacaaaatgactgaagcacaggaagatggccagtcaacttctgaattgattggccagtttggtgtcagtttctattccatcttccttgtagcagataaggttattgtcacttcaaaacacaacaacgatacccagtacatctgggagtctgaatccaatgaatattctgtaattgctgacccaagaggaaacactctaggacggggaacgaccattacccttgtcttaaaagaaaaagcatttgattaccttgcattggatacaattaaaaatctcatcaaaaatattcacagttcataaactttcctatttatgtatggagcagcaagactgaaactgttaaggagccatgaaggaagaagcagcagcaaaagaagagaaagaagaatcttatgatgaagctgcagtagaggaagaagaagaaaaacagaaaccaaagactaaaaaagttgaaaaaactgtctgtgaatgggaacttatgaatgatatcaaaccaatatggcagagaccatccaagaagtagaagatgaatacaaagctttctgcaaatcattttcaaaggaaagtgatgaccctgtggcttgtattcactttactgctgaaggagaagttaccttcaaatcaattttatttgtacccacatttgttccacgtggcctatttgatgaatatggatctaaaaagagcgattacattaagctctatgtgcgctgtgtattcatcacagatgacttccgtgatacgatgcctaagaacctgaattttgtcaagggtgtggtggactcaggtggtctgtctttgaatgtttcctgtgagactcttcagcaacataaactgcttaaggtgattaggaagaaacttgttcataaaactctggacatgatcaagaagattgctgatgagaaatacaatgatactttttggaaagaatttggtaccaacattaagcttggtgtaattgaagaccactcgaatcga

SEQ ID NO: 16871 - DNA, 1054 bp, Homo sapiens
ggaggtggaggttgcagtgagatgagatctcgctattgcactccagcctgggggacaagagtaaaactccattgcaaaaaaaaaaagaatataaatgaatattcaaatggaggcaaagctagttttctcaacaaagacagagcattgtcccccccactggatgtaatttatgtatgtgtttataaacaagaattgtttacattgttatcagttatctgtagtttacagaattgtaaaattgctgtcagagactcagtatcagataacctgtacggatatactagggaccgaggttagaaaactctgacctgtgggccaagtctagcacttcatctgatttagtaaataaagtttttttggaatacagccatgtccattcgtttacatattgtctctggctgcttttatgctgcagtggcagagttgagtagttgtgacaatgaccatatggtttgcaaaaacgatttacataaatagccctttacagcaaggttgtcaacttttgtcaacccctgtgattatctggatacaagtcatttatcagatatatgatttgcaaatattttttctcagtctgcggtttgtgtatttttttaattggggtgtcttttgaagagcaaaacttatttttcctttttccggcactccattcatttatatatattccttttcttttttctttttttttcaagacagggtcttactctgtcacccaggctggggtgcagtgatgtgatctccgctcactgcaacctctgcctcctgggttaaagtgattcttgtgcctcagtctcctgagtagctgggattacaggtgtgcaccaacacgcccggctcatttatttatttatttatttttgtatttttagtagagacggggtttcaccgtgttggccaggctggtcttgaactcctgacctcaagtgacccacctgcctgtgcctctcaaagtgctgggattacaggcatgagccaccgtgcccagccttatatatatttctttatgtgtgtataggtagcaatgttaacaagaatgagggtctgaaagactatt

SEQ ID NO: 16872 - DNA, 1050 bp, Homo sapiens
aagagtcttgctctgtcgcctaggctggagtgcagtggcacgatctcggctcatggcaacctccaccccccgggttgaagcaattctcctgccttagcctcctgagtagctgggattacaggtgtgcaccaccacacccagctagtttttgtatttttagtagagatgagatttcaccatgttggccaggctggtctcaatcacctgacctcaagtgatccacccacctcccaaaatgctgggattataggtgtgagccactgtgccaggctactaattcagttttttaacttgtgatacatctatttagatttttattgacttcttgaatttggtaatttgtatctttttagaaatatgtttatttaaattgctaattggttgaaataaatttgttcatattatagtatgtccttttaatcgttttaatttctgtaaagttaatagtgatatttcatcttttgttcctagttttcctaattcaagtcagttttccttttctgtgtatgtatttatttgctttggttagtctagctaaaggtttgtcaattttgttgtctttttaaagaactaacttttgttttcattgacttttttttctgttgcttttctaatttctatttcattgatatctactctaatttttattattttctgcttatttttattttagtttttactttttcttttttctaaaggtggaagcttaggaaatggatttcagaactttcttttctaatataggcattcgaagctttaaatctcccactaatcatttccttggctacattctatgcattttgatatcttgtgttggttgtttctatttggcaaaaatattttcaaagtttccttctgatttattttattattatgggttatttagaagtgtgttgtttaatttccaaatacggggatttcctagatttctttctgttgttgatttctaatttagttaccttttggtcagagaacatactttgtatgatttaaattcttttaaatgtgagacttaatagtctagcatgtggtctgtcctggagaatatac

SEQ ID NO: 16873 - DNA, 1112 bp, Homo sapiens
acctaatagcatttttaaattatcaactcattttttcctataaaattaacatagggaaagaagactaaactatgtaagaagtagcaagtgtcagctcttatttaactgtattgtatgatctttgcatgtcacctcatttaatttgcataagctctttttgcagtatagagaaaagaggtgcttcctctgtcatgtcccattttgtgcccttggtttgaggggatgaatcattgtctctagaggccgctgcctccaactcttctctgtgcaattaaagtatagaaaagtgttactaccatttgctgcatgccaaagagaattctctcttaactggccttcttctactgtaggccgtacttccaaatatgtcacttactaataatgagaacagtaactgccatatattggagaaggttatgtgccaagaatgctatttgataatttgtaaaccttgttagcaattctcactaaacctgaggacagctttattttccccattatacagatgaggaaactaagccgcacatttagtaaatagaacaaggattcaaaccccagttgtcggactccaagactgtgctcctgctctcttaactagtatgccacaccccttaccattgcatatacccaggtaaagagtattttctgctttctgtgagccccctaggggctctgaaagacaaatctgagaccagagatcatttgcattttatcaacgcagttttattttgaaaaaatattccaaagtgttctatgtacctttgaagtcttctatttgtggctataggacttgttgagcaccttttcatctacctgttggcctttcatatatgttctttggaaaaatgtctgtttagatgctttgcccatatttcaatcgattgtttttcttctattgagttgtaagagttctttatgtataccagagaagtagtgaagaaatttaaaataggaaatcttagtgccttgttgaggccttttttatgcaagtggattctggtatttatagttttcccatctatattttataaatgtattgccttttataccaatagatatgtccatgcatgtttacttaagttaacagtatgcaatattttggtaattctcta

SEQ ID NO: 16874 - DNA, 1030 bp, Homo sapiens
gtaaaaaattaacttgatggacttcatggcagaatggttggaacagaggaaatgtcactgaactggagatagatcagtagaaatgatccaatctgaaggacacatagaaaagacattgaaaacaaaaatgaacacagcatcagggacctgctagccaatataaaagaatcttatgcatgtataattggcatccttgaaggaaaatagggagagaatgggtaacgtcagtaacaaacatgtttgaagaaataatgtttaaaaatttcccaaatttgatgagaaacaaatttacattttcaagaagcatagcaaatcctaagcagtataaattcaaagaaaaccatgcgtaggcaaagctgatgggtacaaaagataaaaagaaaattttgaaagcaaccagagaaataacattacatacaaaggagtaattcaaaaagattgttaatttctcatcagaaactttgaagtccagaaaacaatgcaactacattttataagtgctaaagaaaaaagtcaactcagaattatataaatacattctcagaacaaaacttagccttaagtagctctgccaagatgacagactctttgtccaagccaaggtttattctttctaggtgacatagtttctttccatctccatatccacttcttccctttccttttacttttaagctgaagaaaaacttttttgctaaaaaggagaaggataaatctgtagtagctcccacaaaaatgcacatgtagatgacacagcatactttctgaaggagaaaagatcattatttgggtactatcaaaattcatacagctctcactcccctctcagtctattatatattaatgtctgtctctcctcactataataggcccagctctgatcttaagtatgttcctcacaaatgtatatgctcatatgtaccaaatacacaatttttatggaggcacaatttgtagtagctccacactacaaacagcccaaatgtccatcattactgcacagcaatgaaaattaataaactacagtaca

SEQ ID NO: 16875 - DNA, 1077 bp, Homo sapiens
aaatcctatcatgaggattccacctcatgacctcatttaaaccaattatctcccaaagacctcctctccaaatgccctcacactgggggtttgggcttcaacatatgaatttaggaaggaaacagtccagtccataatagtcacattatgaggtactagaggttaggactaaagcacaggaattttgggggctatacaattcaacccataacagtctgcgttctggccccactgagataaaaaaaaatgttttctcctgctcttacatagtcactcaatactgaatataacactgaatgtttcacttcttgtcaccaaaatttgtgggaagttctccccaccagcaaccagtcagtcagttctccagtagacactagctgggtgtcctgtaaggccatcagtttctagacactatcttactggagatagcattagatcccacaggttaagggctcagtcccacaagactgcctccacttaagatgctagttgcaagttgtagattgtcacctgtacttctgaccaaccagctataaaatcagggttcccaatacctccttctcatgttcagttaatttgttagagtggctcacagagctcatggaaacacgtaactgttttatctgttttattctgctatgacagagtaattgagattgggtaatttataaagaaaagaggtttatttggctcatgcttttggagcctgggaagtccaagatcgagtggccacgtctggtgagggccatcttgctgcatcataacatgtcagaagggcagcaggcacaagagacaaagaaaatcagaccaaacttgtccttttcatcaggaaccccctcccacgataactaacccactcctgtgataatggcactcatgagggcagagctctcatgacctaatcacctcttaaaggccttaccttctaatattgtcatattggcaattaaatgtcaacataaactttggaggggacattcaaaccatagcacttgagttcactggtttattataaaagatacaggtgaacagccagatagaagagacgtataaagcaaggcttgtgggaataaatat

SEQ ID NO: 16876 - DNA, 1032 bp, Homo sapiens
ttctttcaggaattcttggtcttctgggccggagtgattctatgagagtgccacatgtctgagtgattgttgtgccttgaggtaaagacctgtttgttagagggcctgcaaaactgacttggtcttacagtttccttttgtctttcaaaacaactaatactcccttctcccactcactagtagtttatttttaaaataagctcttttatataattcttatctggtttcctcacttatgaaatgtttcatatttccttacccttgctttttgtggctattgcttctttgaagccaagtaatatcagtcacaccaacattatttgcatactcattttggggattttgtttttccttttggcagaagcctattcgttggcaccctcttaaggtgacttatgaaatttcccacaagtgaaatagtcttcaaaaatttaagtaaattgttcttagctgtttcttcctccttacaacattcaaaaattatttgttgaccatctgtcatgggctgtgctctgcagtaggtactgaaaattctgctttgaccccaccacctaattcttttctcatacatatctcattcctaatgtctagggcaatgacacaatcaagaaagaagtctgcttgacatttctgtttctgtttctgcacacagaatcttcccatgagagacagtcactactaacataaatgcaacaagcagatacaatatgttattagatgattcttgagtaagttaatatgtacacaagctcaggattttaactttgtcttataaatactattttttcttttggcttgacttcctgtacgagtcaaatatatgctttgtgtttttaatcaggaaacatatttgcagaaaaaatcgcacatttcttatgatttttgtgggctccaatatgtgccaacagcattgtgattcgttcttttaaggaatagtggtatttctgtattttaaaaccaagctgaaatgctctttcttctgccttgcctgtaaatatgctcaaagattctaaagcaacaaatgtcatgtct

SEQ ID NO: 16877 - DNA, 1031 bp, Homo sapiens
cgcctggccataaactttagtttttaacttaaaaattttaaaagcctaattcctgaaattaaagtatataattaatgaacatcaaaatgcctaatgttggcgttgctgttatactgtttcgttcattagcaagtaaaataacctttctgggcatcactttaattatacaatgatatgatagctagatcctttttaactctgtgttacacactgtatatgtaattaatgttaaattgtttatgaaagtgaaattaagtgctataaagcatagtggaaggaatattatgcttctgatccaggagttattgagttcaaattctttgtaactattgtgttactttggcttatatattttgtttttaataactattattctagaagaaacataaagatttatttcacagtttgaaataactggtaacaactggtaacttcattactttattcagtccactgggctaggtgctgcaaggcttggctttcacggtcaggggggagtatggacatagacgatttgtgcttgattttgatgtgtaatagatgtgtacgatgcagagtacacatctgcaagggtaattaacctagtttcaggaatgccaggaaaataagctttaatgttggacagctatataaccataatgtaaatgccaaaaccaggaaagtaatactggtatgatactgtttaccttttcactatgaaaaccttcttttgaatttaatcagtttttcttctaatggtgtttatctgttctaagttctaagtttcaatccataatcccacattgcatttatttgttgtgtttctttagtctcctgaaatctgtgatattaactcattttttttgttgtctttatgatcttgatgcttttttgaagagtactggtcgttactttgtagaatgtctttcaatttgggtttctctgatgctttcttatgattaatgtgggattatacatttttggcaatataccgaagtaatggtatcatatcaggaggtatgtttatatcaggggctacaggatgtcactgt

SEQ ID NO: 16878 - DNA, 1044 bp, Homo sapiens
tgagattatgctaatttctgttttttcttccaactttcatccattcacttcagcattcattgctggaacttatctgtgatacctactactgtagtattaacctcatggtgattttgtgatttccttgttcctttctcatttattaaaattcttcagtgaagaagtgtcccttctccctcgtttatttattcattcatttatatcagtatggacttagaggtttttattttctaggttgcaatctgatgctgttgcttatgttactgctcagatcgttctgctttggcattgagagctctgtccggttggttccttgtcctttttacattctcccttcagcttgaaagctcttcttcactttctggtactgaaaagtttctgagaaacttcaggctcatcttgcattttaccagctccaaccctgtaatcatcttctttcccacaaagccctggctccttgttttgggggatagcatttagaaaccgagatctgggtactaggactgccgctcattgctactggggagtctttttccttctcagcagacagagctaagaaatacgtgtgtatacgaacccacacatttactcacatccacagtcaattctgctataacgcagcatatttattccccaaaatcactatgtatgcataatcatgcaatgaaagccacagggttcgtgtgatcaatgaagttagagaaatagcattcaaaaactttatcactgacacagtaaaagaaaggattggaacttaaacctgattaaaacagtggcatggttttagacatgttaaatcattaaggaatatataagtacatgataaatgtgttactttaccatgaaaaaggcatgaagtttgcttatgtgagtgtcctaaggtgtgtggcttttgagttactgtgaaatggtggaaggagagttgtcagatgaaacctaacaccagatgtggatagatggggctcataacacatgacctgtggtagctcattttcatttgaatcacttctttcttgggtgccttgcaatttagtcttcatttct

SEQ ID NO: 16879 - DNA, 1046 bp, Homo sapiens
tacaaatgctcatagcagcattagtcataataggtaaaaagttgaaatcacccaaatgaccatcagttgatgaaagaatacataataggttgtatttccacacaagggaatattattcagcaataaaaaggaatgaagtgtagatatgtgctgcaacagggatgaatcttgaaaacatgttaagtgaaagaagccagccacaaaagaccacatattgtgtaattccatttgtatgaaatttctggaataggcaaatgtatagagacagaaagtaggtgtcccactgcctgagactgagccatagggggctggggtaggcatagggaatggggagtgagtcctaattagtactggggttcttttaaagggtgatgaaaatgttatggaattagatagtggtgagggttgcacatacctgagggtatcaaaacattcaagtgtatgctttaaatgggtgaattgtatgtaaattatatctcaataaagctactttcttttttattttttcagaaaagaacggaagctgtttgaacagatgttttgggcctttgggtagttgagtggatgtagatggaggtggaagggcatgggggggataatgggtatttcttggcattactgtgttatcacattgtcacacaaatgctaccttctccatccactagctaagaatgtaataagttgtgttttagtggagattgtataaaaacctatctttttaacctacctagcacttgggctggaattgtgctttattctagttgacaggattaatcttaccattctcttatctgtattttttaatattaaattcagatgctttcctattttcagggttaaggttatacaaaattgtgttctgcccatctgtctatcctacaccctcctttgctgtttgttcatccctattcaagtttgtgtcatttttcttttttacctcctgtaattggaacaatctcgtttcgtgagtgtgtataatcactttcttccttaaatgcttgcttgtgtgaaattttactgacttaaagatattgtttcctgtgaat

SEQ ID NO: 16880 - DNA, 1049 bp, Homo sapiens
ctactgattgcccaggtttctctgggtggaacttgaacattctgcagtcttatgtaatctttgggaactttttttttattatactgcttcctgatcattgttctttgcctggccttgtgaatttcactttattcatgcacacattcaatgaaaaactatagagctgtgttgttacatgtggtatccattagccatatgtggctcttgagtgtttgaattatggttattctgaatttaaatgtgctgtatgtgcaaaacacactgtgttagtctgtttgcattgctgtaagggaataacttagactggataatttataaagaaaagaggcttattttgactcatagttctgcagacgtacaagaagcatactgctggcatctgcttccagatgagtgtgtcaggaatgttacagtcatggtgaaagggaaaaggggagcaagcttgtcacatggtaagaggagaagcaggagagagtgggtggggggaggtactacactcttgaacaaccagatcttgcgtgaactcagagtgagaactcactaccaagaggagggcaccaagtcgttcatgagacatctgctcccatgacccaaacacctctcaccaagtcccacctccaacattaggggttacatttcaacatgagatatgggtggggacagatatccaaatcatatcacacacactgaatgttagggatgtaggttggaaaaacatatatgaaaatctcactttttaaatatcagttacatcctgaagtgataatattatgagtgtattgggtggtatacaatattgtattaaaattaatttcaccttctttttcctttacagtgtagttactagaaaattaaaacttacattttaggttcataatatgtttcttttgggcagtgctgctctagaatccctctgcagatttcaggagcactttctctcctgagtaccatcctttttgctaatctgtcgcacaaattcccattacctcagacttcctgaatttttatctgtctcttgtactccgtgagtctccgtattcttcttggct

SEQ ID NO: 16881 - DNA, 1033 bp, Homo sapiens
tttttgcctcattttaaaaatgaagaaactgtggctgagcaagtaagtgacttggtcaagatcactaatagctatttagtggaacttggattcaaaatggactcttctgtgttatactacttaaaaataaaaactgtgttgacttaaaaataagaaaatttcgctggggaacacaattagatttagtggttcccatatatcaagccacagtcagactagttcttaaaaaaaaattagatctcaatgtttaaaattatagattgaatttagagaacaaacagctgagaaaattgagatacttaaaaataaataataggtattttacgtgtatacaaagtaaagactttattaaaattattttagaaaagataaaatgagaaaatattttctaggaaatgtgtatccattttataatatctgcgaataggttagacaaaattacaatattgatgactgggttttttttgtcaatagttaattgttagcatttgtataggactgcatcttgatcttgctgtaatcactctgtcctttaaaatttcttctgtttcttccttagttttgagaagacaaatggaaattaagtcaatgaggtaacatattataatgcatcttaaatattggcttcttttagcatcagagttaagactcatcttaccagtactttctactgcctactaaaaattaataagaggcaattaagcatagtattaacagtgtagctcctttgggatctggtttttggaatactctgttttcagtaagccctttgcagagagatttagtcttaggtatatactaaaataaatatatatatatatacacccatcatgtgccttccacttttttactgacagttgatgatgagggacatcttttgggtaccggatatctgtaaagtaatgttatatttggttttctttcggtcgatgggtacaccattgagagctgtggccatggggcttgttattacagtaagaaaaagcctatctcctgaggctagcagaacctgtctgaaacagataattggatt

SEQ ID NO: 16882 - DNA, 1039 bp, Homo sapiens
tgaatatgtaactggataaggaagatagtaaggaacacgaagtgggttagggccagtgaaaaagtgggagtttgagatcagcctggccaacatggtgaaccccgcctctactaaaaatacaaaaattagctgaacatgatgatggatgcctatagtcccaggtactcgggaggctgaggcaggagaatcacttgaacccaggaggtagaggtttcagtgagccgagatcacgccactgcactccagcctgggcgacagagtgagactttatctcaaaaaaaaaaaaaaaaaaaaaaaaaaaaaaagacttgctataattgtagacttgacttagtttttttggtgttggctttatatataggcataccctgtttcttagctgaagtttatttaggaaaagtgtatttttacatcacaaaactcagtagtctaacaaactggtatatgtgaaaagtcacaaattatattccaagtatagtttgtagaatattagaattacatttaggcattttgaagcatgtaaagggaatgtgcatctctgatgttgctggcaataagctagacattacaatattagaagcctttgagccattgtcttccatgtgtgtttgtgctaaacatttttctaattgcctttcatatttagcccttatttttgcttagatttgtagaatgcacaaaaaagttgaggaagtgttaaattgtggagaaggaaaaaaagccagtgagaaagtaactgcatatgaagtcatgtagtaagcattttacatcccttagccatggtaatttactataaaaggggatttttttgtgtgctgaattttaaaagagaaatgattggggattatggttgatgtgtaacgtattataatttttccctacttgaaataatgggaaataaatttctggttatggtttttgcacagaatatctgattttcaggagcagattcctaactgtaagtgttgttaggtacactcagatttagaactgatatgtcttcctggtgaattgaacttttattgttttgaagtatcct

SEQ ID NO: 16883 - DNA, 1038 bp, Homo sapiens
agaagtgctggaaccagattccctgagtttataaccccaagctctgccccttactacgtgaccttgggcgtattgcttaatttttctgtgtctcagtgtctctatttataaaatggaggtaataattatagattgctattaggattgaatgagttaagacatgtccatgcttaggaaaatgtctagtacatagaagaatctcagtaaggcttggctcttgttgctattattgtatacattgagaaaacctcaaacattattgttgcattagtttaaccagaactagagacacaaagagattcaagaggtattttaggggtaaagttaacaagacttcaacttatttactaattttgtataaccagaaatttcaactaataatgctgtgtgcagtgtaaaagcaaatttgaaatttgtataacacttacatgatttgtaaacttacagattttaaatcttctaatttgtgttttcttttagatcttgtagaaaatttcagctgtagcccttggactagaagctgaaataacagaagctgtgtacgatgcattagggtattgaagaaaattaacttttgaattaaatatttggaatataaggaaataaggaaagttgactgaaaatggggcggaagaaaatacaaatcacacgcataatggatgaaaggaaccgacaggtaaatgaaaattttaatttatttaattgatatgaatattcttttaaaaaaagaacataggacagaatggttgggtttttcttaaacttaattttaagtctaaatatttttagttacagactaaatgaaaaattctaacaatcataaaattgtatcttttcatcatctgctttaaagagacttccttattatagatatatgtcaccaaaaatatagatactcaaaagtaaaatcaccacaatccccaccattaccaatccattgtatagatttctcataagatatttagtcttctatgtatttgattatatatttgactgttagtcttttttatattgattatttttaagttatcacatctg

SEQ ID NO: 16884 - DNA, 1039 bp, Homo sapiens
agacttaaagagctgcttcactttacttccacttagaagcctctggtgaaaccttatgtttgttcttccttatctagaacacttttaaaaaagtaaaccgtattaaagtataagattaagaaaaattcagaaatcctaagagtgtggttcagtgaatttttgcacaaagaagaagaccgtgtagccagcatatcccagagcaccacccgagaggcactctatcctgtctcccagttgtttccccctgccccaaggaaggtcattatcctgacttctaacactatagattaattacacctgttgttgagtttatatgaacagtgtgtcttctttcgcacaatattacatttgtgaaatttatcagtggtattgttgcatgtagatatatgtaagtatatcttgtacattttcattgatgtataatctattgtgtcagtagaatacaatttatgtatttacttttttctattgtaaatggacatttggattgttttctactttggtactattatgaagactgtaattttgaatattctcgatagtatacgtgaacacttgggtaaataggagtgcggttgctgagtcataagggtatgcatttggttagtagttgacggaagttttctaaagtagttctactggtttacactctgctggcagagtgtaagagttctagctgctccggtcttgagcaatactgggtactgtccttttcattttagtcattctggtaggtgaacaatagtaatttaatgttaagtttccatgatgtctaatgaaggtgctcactttttcatatttttattggccatttagatatatatcttctgtgactagtctgttcacttcattttgttttcttctaatgggctgcctgcttttttcttattaatatgcattctatataatcaggtgagtgttttgtccatgatatgcattataaatattagctctaaaactatggcttgccttttcactttcttttttaaaaattttattttagagacagggtcttgctgtgatgcccaggctggagtgc

SEQ ID NO: 16885 - DNA, 1176 bp, Homo sapiens
tttgctgatcccagactgtgaatttcagtgggtacaatagagaagggcttgagagggaggagaaatacttcagattagtggatgtatttagttgtttagggatcaaagtctggctgatgctacattacctggctgggatttggggtttctgatggtaacaattttaactgaatgataagggaacactgatcaactgttccttctgtggtgcttcaccctctgtagtggagtggcagccaaggataaggaaatacttccccaggagacagctctgtcggagaacttggcatatacaaaacaaatgtaggactgtagcacaacaggagagggaaggctcatatggaggacaaagctgggaaccttttccatctttgaaatctggctcagtattaagaagaagattcatcttcagatagcccatattcaagtactactaatgcttttaataaaaatataccttttttattgtttaggtcacttttacaaagagaaagtttggattaatgaagaaagcctatgaacttagtgtgctctgtgactgtgaaatagcactcatcattttcaacagctctaacaaactgtttcaatatgctagcactgatatggacaaagttcttctcaagtatacagaatataatgaacctcatgaaagcagaaccaactcggatattgttgaggtaacacatatctagtaatacgtgaattgcaagtaatactgaaatattttgtttaatagcattaactgtcagaatgacttgtacatctaaaacataaattaggtgtatatgtatcttttctctaaatcatttcttagaagagtgattgctgtatggcgactcacttgtgttataaacatactctattcattcagacaaagtaaactatgttgttttaccatgtataccagcataatcttaacatttcatctatgattacttattttgtatgagttttaaaattaatattgtaagagactatcatttttggacagtatgaagttacagttttggtatgtcttaatcatttcattatgtcattgacagctcacaactttaaacacttaagaaaacaatgacaattatgtaaataatatttgctttgttaatagtgttttagttgggcaacaggagaaagtcctcattttctttgtttatctgctgcctatttgatagctct

SEQ ID NO: 16886 - DNA, 1043 bp, Homo sapiens
catttagggcagaagatactaggtgcttcccgtgtttctcaatgttctgtgtcagcctgtaaggtgagatgtatatagtctaaatgatctttcagttctcttatatatagatgggtaatgcggacatgcagttttgtgaaacctggcacttcaaacacacaatttaaaattaaagagacagctgtatagttttcatatttattttgaagttatttttgtggctctgttctcagagagagactagggatctagattctacagaaagacaccttcttgcatagattagtcataactcaactttttaatttacaattatgcaatcagtgctgtactggtaaaagaaattccaaatgatagtatgaattatattttagaaaatgagacataccttataattttctaggtttttgtttagttggttgattttcaaatttctaacgtgtttcactgattgtgtatgctaagggtattttataaagaaaatttgatatgggattatggttttttcctcaaataatgtttcttgtagttctcattttaattcattagcagtaaaacatgagaaggtaaaccttccatattgtttttaaaatgttagtgatttttaagacttggtaaataggcactacatgcttaagccttctagaataacccaaagctttattatgcacgttggactttatctcctgtaactcagtggagaatatttttctgtcatgctttgtttttatataaattttcttttcaaatatctggtttattttgtggtaatttctgggcttaagtgttatttccagaatgtatctcgaaaactttaaaaatgtttatgctctgaaaaaagaacgtagaagtagcaactagtatttgtagaggaattcaagacattagcttgctttttttgcgccacccacgttcatataggattatcccataatattatataattaaaatatttttattgtggttttccacatttatgtagttgaattaagtttttaaaaatggtttcgttactttggtctcttataaacctatcagttttg

SEQ ID NO: 16887 - DNA, 1684 bp, Homo sapiens
aattttagacaagcttattttccatggaagtttttatgtatataaaactttttatattttatgtataaaagttttatatttaactattttttatatatgtataacatttccatggaaaatgtggctaaaattttaaatatagaatttcttgctgagtatttaacatgaaagagcataagctaaaagaaacgcattttaaatgagttgccctgcctaattagtaattcattttgaaataaatttttgtaagtttattatgtaaaagaaaacctcaacatacttaaaaaaaagtttatacagtattgtttttgtcctctcaagtatcttttttctttcttttttcacctcttcccttaatcctttccatctctagtttcaccaagaggtttagtatataaaccagaaaatgagaggcagatgtacagggtcagccaagtggtaacatatacccagaattctgtaaatgtttccttgaatttgaaaggtaaggttgtcagtactctataagtagaatgataggacgtatgactttaaagatttttgttggggtagataccattgtttcaatcagttatctttgaccaacaacagtaattaatcatcacttctaggtttgagactctttctggattctatgttgtagaggtactagccagacttattttgagaaatatgtgacttgggtaaagagactaataatgtgttacctaaaggatcactaacagttttcttcctcatgcttctttgattataagggatagaaacccatttaaagtagctccaactaaagaaagaatttgttgaaagaatgcagacagatagcactcaaaggcaagaggcaggagtagctggcttcctgaaggccggacaccaggaacttcatattaagggctccatggtctctcatctctgccaccaaggctggtttgcaaaataactctccttgcaagcacaactgataatcttcatgtagaaatgaattgatttaaaacaggtgagaaattcaaaatgatattgaggggaactgaattggtaacaatttatggaacagatagaatggagagagagaaaagtggaaaaaagatataagagtctagacataagatagtgcaggcttgagtgagtatggggacagtagaaatggaaataatatataaaatttggtattccatgtgaatgtagagagagaacaaagggaataaggtcgactaggttggtaagtcccaaggagagaccggtttaataaaagataatgaattctatggcagttaagttgaaatagaaatgttagtaaaatatccaaatgaaagtgtgcagcaggcagttgggattataaatcttccaagttgcagattagatttggatgaaggcataaacattactatcataaaattataaaatgaacatattagagattttatttgagtcattaatgaatgagggaacagtaagatcataaacagaggagaactcaaaaatataacacatttatagttaaagaatgcagaagtaaatttataaatagaaacaaaagtggccagtatccacagggtgacaatcaatggtattccacaggaaacaatttctggaaacaagaattatttgcagctactacaagttttctataagttaactaatgtccatctctgcagtgttgtaaaatagcctcatcaaagaaacggaa

SEQ ID NO: 16888 - DNA, 1057 bp, Homo sapiens
ggtttttatttatttatttatttatttgagacagagtcttgctctgtcgcccaggctggagtgcagtggcacgatctcgctcactgcaagctccgcctcccgggtttacgccattctcctgcctcagcctcccgagtagctgggactacaggtgcccgccaccacgcccagctaactttgtttttgtatttttagtagagacggggtttcaccgtgttagcaggatggtctcaatctcctgacctcgtgatccgcccgcctcggcctcccaaagtgctgggattacaggcgtcagccaccgcgcccggccgtaacatagttttttataaaggtgattatatcaagtgaacatgagtcaaaaattttaagtaattaattagtgagggagcctgaaaaaaatgttgcctttgtaaattcaaagatcagacaaatgtataagcccaccaagaaggccaaatgaatttgcttcataaatacaaaaactggctcttccacagttgagagaggaagtcagttgaacttccaccaggcgggatttgtttgcacatctacaaacacaaattatttgcattactctcacttttctacacattatcttctgtttacagagttggaaaatagctcagaaaccaaggtacaaaccccctagaatcagataacttggcatgtgctctaaacaatacagagttttaagagatatttagttttttgggtttcatttaaaaatatttcagtatccttacataactagcgttgaaaggtaaatattagctaagtttattacttaaatcctgcgttttgtaccataaatgacaatgtgcagaaagtacctgaattggcccaagtcaaaaaaaaaactgttaaaataataatggaatttaactttgttgtgacataaatagaaaaatgattgtttctaacaagtgcttaactgaccctccaaaaataaaattactgtcttctatagacgtgtactgatgaaaaatataggtgtgttaattttaggattttatttaagtaatattgccaattgggacctttaaattagtttggaaca

SEQ ID NO: 16889 - DNA, 1534 bp, Homo sapiens
ataataccagtggcacaggagaaacttctactgttgtgctatttggtaatgtgaagacagaaaaagtctttttatggtagttgggtcctcaaaacaactcttcatggtttagtgataaggagacacaagttgcctatcaaacagaggtacattagcttattatctacaaagctgatagagcctcttaaattctctcatggtgacagaaaccccatctgaagtgaaggcttgcagagctggagataccagagcactttccttcctcataaatacaagtagagttaaccctactcttgtagaataaaaattgcatgtaattgttgaacaaaagctgccttcttttttctctggcaattaaaatgtggtcaaagagatatatacttggtgattgccatttgtgaaaatttcagtgataagcattacagcttactaagaagagcaagactaattaactagtcttaaaatagatgaaaattgaggggaaatatcagagatttaggactagaataagtcaacaactttatgataagatctgtgtgtaggcacctactatatttgttctgtttctagtgctgtgtaggttttaagagttcaatgtgttccagtgttctgagtgtctacattttcactcctcatagctacttggaaagatttggcaagtaaacttgctaccatggttgggggaggataaatgcctttatcctttagtgctcccaacaacaggaccttttatggccaagcacacataaaagtccatgtgattacttaggctcatagagcctagtgccatggagaaaatgttggagaaatagatgttgtgtttgctatatgcacatgccaagtaatttaataagctaacgtatctgtactaatgattgtttatgattcttcatgaaaaatttttaaaaatcacattgaataaagtgaattttaaaaataatttgactttggagaatcaaaaaaattcttgaatcttaatgtactgtgcttatgttctacttcattcaagaaaaaaggagtaaaataaacatccataattattgctaatcatattttaaaggatactaagatctgctatgaaataatcaaaaatatctttagatctaatttaatcgtttattgatgaacttctctgggactagttcagtgatcaagctttgtttcctaactaagctctgttagttaggcttacttagaaattttaacttcctaatccttctctgcagttggtcagaaaatcaagaagtctcagccatttcagtgttgaaccctgtaactctactttaaaatacgacccactaggattttttaaaaaagaagaaagaaagaaataagacattctgaaagtaaaggaatattccatatatcttcaagctcttggtttttaatttatccttttaagtactggacaagttatttcatgatgaatttaagttaaaaataaaaatcagaaaaccaactgttttttgcattatactaagaaaaaaaaagtcagtataatccaggagatattttaatggcactcaagaatatt

SEQ ID NO: 16890 - DNA, 1060 bp, Homo sapiens
tttttaccaatattgtcattttcaaatacgtaatttgtttataggcgagtcttccatttgccttgttcgtattttaatttttgttgcatcttctgcctgcttccctaaaattggaatacttcaggcccatgtactgctaaaagaagaggcatccttgagacttttaaagcactgaacgaactcaggaaaggcaaagacttcttaaataagaaaccaaagaaagtctaatggaaagactgattgatttgcttgtgtgaaaattggaaactttgtgaatcaaaagcactgtaaagagagtaaaaaggcaagacagaatgggagaatatatatagtatgtatacaatcaatagagaggtttttttttaagaatacctacaaatcagtaagaaaaagaaaactcgacttttgaaaatgtgcatgagaacacatcacttcacaaaagaaatgtctgataaatgtgaagaaatgctcagtctcagtagtcatggaaatgcaaaattaaaccacaaagagagaacactgcacacccaccagaattgctaagatgaaatagatggtataccaaatattgacaaagctatgaaaaagcacaaactcatacactggtaatgggagtacaagttgttgcaaccatttggcattatctgcctaagctgcagatacgtgtattgtgtgacccagcattttcactcatccttatgtactgtagagaaatgcatttgtgcatcacgagtaccaagagatatgtaaaagaatgtgtacaacattatgttaaagtcattgtctagaaatagtacagatctctgtcaacagtagaatggataaatataagagtacattcatatgaaagaatattatactgcagtgaaaatgaaatcacagcagttctcaacatggatgaatgtcaccaaacattatgaattaaagaagatagatacatactcaagattctaactatataaagtttgaaaagcaggccaaaaaaactatagtgtttgggatgcttgtgtagatagatggcagagccataaagaaaaaccaagaaattactgtaaaattc

SEQ ID NO: 16891 - DNA, 1045 bp, Homo sapiens
ttcaaaaaagaaacctaactagtattttaaaaactgaaaaggttgttcatcattggtagtattcatgaaattcaaattaaaatgacaaaaaaaaatactactcttacttactaattcccaactattagcactttttattgtgatattcagtgctaatgaaggcatggtgaaactgatgatctcatgcatgcttttgtggcattgtaaattagtaacaatctttctggaaaggttttggcaagaggttttagttgtcataaaaatgtttatacctccaagcccactaatcccatttttgggaatctctcctgaagaggtaagttagaataagcaaagcttcattgcaactttatttgtagtaatgaataataggaagaaatcaacatattcaacaatatgaaaatgaagtaaatgaaatttcaactgaatttctttttagttgtgatttaaaacgagcaaaaaatatgagcatggaaaacaaaaagggaaaaatccaaagagattataatacttaagatggtgggactgtgtttttcactctttttctagtttcagtgatgctgtattaatacagttacctctacagtcataacatctttattgtagtaaattagaatatttctttatttattacttataacttgttttccattgtcatctgtgcaaataaaacttggcagctttgtacatattgtaatttgtatagatctttcatagaggtaatttgcttatttgtttatgatttactaggtatatttctctatggggagtttaatactgggtttatactatagttcaaatgactttggggactttttactttgggcacactttaaaatatcaagcataaaataaagtcagatatccaacaacttcactttttaaaaacacgttgagaaagagaaaaaacatatatggtactagacatagaaaggctcaagatgctcttggaattatttggggttaaatgaaggtaaaataagggtttgcattgtagcaggcacattggcagttaaaaagaagagatggaagaggtgaaagatat

SEQ ID NO: 16892 - DNA, 1053 bp, Homo sapiens
ctcatgcctgtaatcccagcactttgggaggctgagacaggcagatcacctgaggtcgagagttcgagaccagcctgaccaacatggagaaaccctgtctctactaaaaatacagaattagctgggcatggtagcacacgtctgtaatcccagctacttggtaggctgaggcaggagaatcacttgaacccgggaggcggaggttgcagtgagccaagatcatgctattgcgctccagcctgggcaacaagagtgaaactccgtctcaaaaaaaaaaaaaagaaaaatgctgcttacaagaaatccactttaaatataaagacatagataaaagaagggagaaaatttaccattgcaaacaccaaaaagaaagctaaagcagacctattaatttcagacaatataagcttcacaacaaggaagagtatcagcgataaggagggacgtgacatagtccactttccaagaaataactgtctttaatgtgtatgcacctaacagcaaccttcaaaatacataaagtgaagactgatagaactaaaaggtgagtagaaaaatccacaattgtagttggagacttctatatccctctcagtaactgatagaacaagtaggcagaaaaatcagtaaggatctagatgatttgagcaacactcgaccaacatgacctaagagacatttatagaacacatcactcgacaacagcagaacacacacttttcacaagtgcacatggaacattcaccaagatcacatcctgtgccaggaaacaaactggcaaatttcagtgaattgaaatcaggcatattatattctctggccataaggaaatcaaactagaaatcagtaacagaaaggtagtaggaaaatggccatatatttagacattaaacaacatattttaacccaaggaccagagaagaaatctcaaaggaaatttaaaaatacatatagccaaatgaaaatggaaatacagcatcaaaattttgaggcccaactagagtagtgatgaggtgagatttatagcaacaaatgcctatatttgaaaagagg

SEQ ID NO: 16893 - DNA, 1066 bp, Homo sapiens
tattttggtgtgtaccttgtgtttggagatatgtaaagatatctataacaaaacagttgaatagcatcttgcccacattggagatagcagttgtagatcaagtgattgtttttcagagtaagtaatcggtcccacctactttacacacaccatttacagagaaaccttcttccagattagggcttcatgtatcagtggcacttacaatgacacttttcacagactgacagagaagcttaacttactcaagtaaaacaagtaaaaactgattagactgtttctagcatgttaatattttctaaatgttatggagaaaaggagcaaaaatgtttctttttttttttttttttggacggagtctcactctgtcacccaggctggagtgcagtggcgtgatctcagctcactgtaacctctgccgcccgggttcaagcaattctcctgcctcagtctcctgagtagctgggattataggcacctgccaccgcacctggctaatttttgtagttttagtagagacaaggtttcaccatcttggccaggctggtcttgaactcctgacgtgagccaccgtgcccagccttatttcttttctttacatgacttatgaattcatttctccttcagtctcattttcttcaaatatgtggtttttctccattgaagtcattttattcacatgaaaatatatttgcaaatgataaacatatataaaactggtatttaaaactcatgtatttattaacaaatgtttgtgttcctgttgttttataactgctagctcctgcgggaaataaaacatacagcagtttctttctgccaagaagcagaattcagtaggagatagataacatgtatcaccaggtggggtaatagtagggtgattaagatacagagttacaagtacagagttgatattctcacagttccaaatacagatcgatagcatgatgaggaaccccttttaaatactgttgcagtagcatgactatgtataagaggccagcatgagagcagaccaagttggggtaggagggtgtctttgaatactggccctagagaattt

SEQ ID NO: 16894 - DNA, 1083 bp, Homo sapiens
catgggtgtctgttgcaaaggggtgcatgggaaagggctgttgatattaaaaacaaacaaaacaaaaaagccccacacataactgttttgcacgtgcaaaaatgtattgggtcaagaagtgatctttagctaataaagaaagagaatagaaaacacgcatgagatattcagaaaatactagcctagaaatatagagcattaacaaagtaaaattaatatattaagttataattggaatatgtcagaagtttctttttacattcatatcttaaaaattaaagaaactgattttagctcatgtatattttatatgaaagaaaacacccttatgaattgatgactatatataaaattatattcactacttttgaacacattctgctatgaattatttatataagccaaagctatatgttgtaacttttttttagagaatagctttatcttggtttaactctttagttttattttaagaggggaaaacaaaaatatcttgcaagcagaaccttggaaaaaaaaagccatgaacacttattctaaatgtaaattaaaagttgagccaaactctttgtgtatatagcatcttaaatatattatcacctttgatgtaagtacctatgtattgtatggtcaccagattaaaaagtatatttttgtggattgccgccaatctggggggaaaaggcgaggtcctttattaagtattcactgtttaatatttactattttgttaaatatactgtactttggattttaattattagcccagttttttcagaggattgtataaaggggtttctcccctcactggtggtgaatgtgtgatgttacattgtaatctttgtgctgtatgggttgagcatcattatatattttgtatgtgtacataaatagcaaagtggcaaaaaaaattggtgttaagttcatcctgcataagtataaaatgtgttgtaacagattttgtaaggcattatttaaaacttgccttttgtgaggaaaaaatgtagtagaaaaagctgacctaatttaattaatattagagaaaatggcaaaatagtagatgagcacaaaggttttataagt

SEQ ID NO: 16895 - DNA, 1093 bp, Homo sapiens
taaactgtatttccacttaaagtaagattataataacatatgctccaccacatatagatgttcacaaaacataagcaagtatgaatattttttcataaccacttatgaagaaatagcagggctcctattacatgtactgtaacgaatgataaagtcataaacacatactatgcaaagtagcaataggcaaatcagagagagagagagaaagagagcacaatgttgcttccagaagacactgaatttattgctaccactgaagaaatttttggaaaggatgaagctttttgctaacgtatacgataacaacagcaaaaggaataggacctggaatcttcagttgaatcagtctatttataatctcgtgtaagaggtagagagaaaacataggtcattgctttctcatcattcattaattcactcactcattcaaaacacaaatagatgcatgctctgctagacactgtagatacaaatggttacaacaatctctcaagtttctcaaagccagtgggggaaataggcatataaacaacaaatatcatgcactgtcatattggacacttgaagactgcctattggactgtgggactacaatataagatactgtcaatttgtcctaagaaggtcactcacgggggagtgaaaactgaattccgccacaaaggaatagtcaaattttccaggccagtagggaaaatgctattccagatggcaggaacattgtgagcaaagttaaggatcaaggaaaaaatataagtatgaagagatgaaagtagaggcacgttgttcagtacaagggtggagtatttggtggagagaaatgagaattagggagagacagacagggtcagataaaaaatggtcatggtccacataaaactaaagagtttagaatttatcatgagacaaataggtgtcattcaaagatattataaggtacaacatgatgagatttgcacttcagaaccgcagccctgatagtggtttagaggctggattacaggtggggatggaggagctgtggtggaggccagggtaggagagaaaggagtgtgaggagtggtggggtgagtggggtggggatggattt

SEQ ID NO: 16896 - DNA, 1089 bp, Homo sapiens
agaataataacaattttaataagctaaaaggtttttgcacttctgttactttaaatttttgttctactttaaacaaataaaaatttggaattctaattgacttgttatgataataatttatacaaagaagacaatgtatagaaactccagttaataaagtgataatcaaagggtcctgggcttatatcaaaatattggccaattaatttacatttgtggtttttttttaaccctgtgatcctcctccttaactcattttttagattaactatcaaaaaactggtctcaattatatttgaatagaaggtttctactgtattgttctctaacttgaccatgttcggtacccttaattaaaatatataattctttagtagttttcatagatgttttctttctaactggttatatgaaagctacccaaataatgggcaggttgaatagtcgtggggtaggctcaatgttgatctgtggaatgctaccataggtatccacaaacctaagacacaaaaacgcacccttagaattattatctgcttatcagtagaactgtgactgaacctgaggcttgcccgactccgtacttcttggtgttattcacagcaccacagcctaatcttgcttgtttctttatttgaagaaatcttgaaaaagaattgcattctttgatttttctagttaattaaaaatttcacctgaatcagcaatatcttactgtgatggcaattgcatcttctaaaaaagcacagtggagatatatttggaataaatatatccagatatttaagtagtacattctcaaatatcggagtagtatattctacgaattatgtctgcaggcttagaaataaccttcatataatgttaataaaaaccaaactaagtagctattcaaagtatactcacggcattggacatttgggggtaattttcaccaaccaacaatgtctgtattagtatctttatatgatggtattgttatttctatagtcttggtcaacaaaatttactcatgtttgatataatttccacatacccatagcatgtctttggaagtaatgcagtgcttgaaatttaaggaaaaaatat

SEQ ID NO: 16897 - DNA, 1034 bp, Homo sapiens
actcagatgttatatcgtcaataacaatttcctggtggtcctctgcaacatttttttaaatgaccaaaatagtcatatgtcccaacggaggtacaatttacagcattgtgcgttctatttctggacatataactatataatctgagttatgaaaatcaaagaaactaatttaatatgtgaatttctatcactgaacattttaaatacttgtattcaagataatatcacagattatatatgcaaattaatgtaaattcgcagtggacaatattatattgtcaaaatcacactgacacagactctcagaagtagaagcttcctatcagaaggttaatattttctggatataacacagcaataataaaaagcaagctctggattagatagaaatccagggatttagatcctggggattgtgaatctaaatttatgttaaatgtaagtacatgctattgtgagacagttattcatgtgttccttgcaattctgcacatcttacaagtagggacactgactgccctttgaactacctcatcatggatatgtgcacagtaagccctggaaagcggagtgtatttctccagaacaaagaccaagttggcttggagccttagagattgtgatagtgtctccctgccgagaagaagcaggtgtgcctcctgttataaaagctgtgggttccctaaactcagggtttctttcctgtaatcaaactcattgtgtcagcatgtgccatctgaccatcttcatactgacttgtgtaaagtgggcttggagaaccaatgcaaaacgtgctggtattctggctactgttattgttgtgagagaactgtatcatcttctgccatcattcctaaatctgtggttggataacttgcaagaaaggtaaaaaaatctcagaatattcacattttatatgtgcatcatactgaaaaatgtgtgaatggacatggcagaaataaacatttggaaaagtttccattaaagggtttgcctagattcaaggacctttttcactagatttaaatttgaac

SEQ ID NO: 16898 - DNA, 1077 bp, Homo sapiens
cactctattttttgcttacacattgaatagtaaatgaaggttaaagttttaaatagtgaagcaagatatctggccatttccagtgttttctttttacttttcttttgaatcttagaacaaacctgccagataggtattacttttcctccaaaaaactgaaaagaagggaggtaataacttatctaaggtaataagtcagcacctatgtattccccaaccaaccccctctcacttactctctcttccttttttcctttattccctcttcctgattcacttgttaaatacctactgtatgctgagcatttttattgttcctagggtttcaaagatttggcacgttccttcgtacacaagttgctggaagataccaatattcaaatacaaaccataagctagaatgtagtatgataacacagattcatgcacagaatcctctgcaaagaggagtaaataagtagcattttgagggttgtggtggaagaattggggaaaactgcgtataggagactttgacgtataagtaaaataataacagattttcaagacaggaaaaaaagacaaggcgagaaaggatattcatgacaaagagaattcagaagcaaattcacagaggcataaattaggttatatatttagaatagcacaattgccccctatacattatggtcggagcacagaaaagaatggaaaaaaaaatagtctaggcagagtgcacagagctaagtcacgaagatcatgacgattgtgtataacaaacaaatgagtgattggataactctatacaacatcttcacaaatggagtcacggggaggaactaagctcagattcagcacatgcaaacacgtacatgcacagggataggtgagtgcttttctactttaatatgaatttgaatattaattggagcattctttcttgatattggacagttcttcctattatatctgttccaaaataatccatttatattacaagttttccccttgtatgcatttaagtttaaaaattctctatagacaaagggagacaatttaagatttcaaacgaatatggctagaactatgtcttagaat

SEQ ID NO: 16899 - DNA, 1118 bp, Homo sapiens
tgcattcttttcattttgtcagagcatataacatttacatattatttttcattcctgtatctaactttgtgttagtcttagctccacaattaaacatcctaagatgctcaccatcagcccttttaccgctgaccctagtcatctcttggttagatgaagggcatcctatgatagtagtgggattgacaaactatggcctgagggccaaatcctccctgatacttgtcttggtgaatacagttttattagaatacagccctgtctatttgtctatacattgtttgtagctgcttttgtgctacaatagaattgagtagttaagacagagactatacagcttgtaaagcctaaaatatttaatatctgtctttcactggaaaagtttgctgattcctgctccggtaaattcctcaagaagggctcatggatacagcgtcctcagctcttgtctacttaaaattgtttttctaaagctttgatactcgaaggatagtttagctagttataaaatcttggtctgatctgtgaggacatcatgcagaccctgagaactgggagtctgagtctcatgagtcagaaggagtgggctggggagtagaatgagtgccccgttctgagacgagtcctaccacttgatagccacacatttctgtggagtctcctgaccccatggcagtccccactggggagccctacccagagaagtcacatgacaggaggctgctgacaagctgtacaggcagagccacagacagaccctctaggaactgtagtgcctgggtgatgagccatcagctgccatctgtgtccctgcttcatccataataatatcatgggaagcttactaagtgctctgctgacctgacccaccaccccaataacactgtcagacaggcgcagaatgttctcattaaaccctcgcacatttggggcactcatgcagccttcttttcaaaaatgcatgcaaaccatctgcctaaatcatccctcatcctctagttgtgccaggggttgacagcactctgaaacggcattcttcggacccggccatttatctgtttgggaaattgagacccagccctcagaccactggctctgctcttgtctgctgtgatttc

SEQ ID NO: 16900 - DNA, 1077 bp, Homo sapiens
cagttgtcctttggtatgtacaggggattggttccagagctaccccctcagtataacaaaaccacagatactcaagtccgtggtagaaaatggcatagtatttgcatataacctacgcatatcttcctgtgtactttaaaatcatttttcaattacttataatacctaacacactgtgaatgctgggtaagtagttgtaatactgtattgttttttaaaaatgtattgttgtattatttctaattttttaatcaagttatttttcatctgtggtttgttgacactgtgctagggaacacgtggatatgaagggctgacagtggaacactggcctgtgcatacaagtggtactttgctgctttaccttcaagcatcctgcgtcaaaatgatgaaaacttagggttttactgtggtccgaaaatacttgaggttttaagcacaaatgggatgcatataatagcacatctgtacaaaccctggtagtctttatgggatgcatataatagcacgtctgtacaaaccctggtagtctttatgggatgcatataatagcacgtctgtacaaaccctggtagcctctcagaccaggttagtgtactgttagaatcgtgatggaagagtctctattataagggtggaaattgtaacaaactcattattatcttcattttccaattttgagtcttctaaaaactccaagaccatgctggacatttcaagaaaataacgttggaagagacaatgtcttagtgcatttattcatcttcagattcagtgtttatgcaaattggcccacgggcagttggctaaagctccagaagttaagtctataaagcaaatccccagaggaacctgagaaaacctctcgataaagtaggtaaaatccttttggtgaaacacatgaaaaaaagtaggagataggggggtaatcaaagaaatgcacagaagaacggtgaaaaatatttttagcatttcaaaaatgaaagattttgcaaatgataattccaaatgtgacactggcacactgatgggaatttatgagagtacatttggaaagcagtttagcagtatgtattg

SEQ ID NO: 16901 - DNA, 1048 bp, Homo sapiens
cactttgggaggctgaggtgggtggatcacctgaggccaggagttcaagaccagcttggccaacatggtaaaaccccatctctactaaaaatacaaaaattagctgggcccacgtggtggtggatgcctgtaatcccagctacttgggaggctgaggcaggagaatcgcttgaacctgggaggcagaggttgcaggtagccgagatcatgccactgcactgcagcctgggcaacaagagcgaaattacatctcaaaaaaacaaaagtgagcaaaggacacaaatagacatttctcgaaagaagacatgcagatgtccagcaggcatgtgaaaaattgctcaacatcattaatcatcagggaaatgcaaatcaaaaccacaatgagatatcttatcccagttgtaatggctactgttaaaaagacaaaaaataacagatgccagcaaagaggcagagaaaagaaaactcttaatacggtgttggtgggactgtcaattagtataaccactgtggaaaactggacatttctcaaataaactaaaaatagaaatactatgtaatccagcagtcaaagaaaactcttaatacggcatcggtgggactgtaaattagtacaacctctgtggaaaactggacatttctcaaataaactaaaaatagaaatactatataatccagcagtcccactactgagtatccaaaagaaaagaaatcagtatatcaaaggaatacctgcacttgtgtgtttattacagcactattcacaatagcaaagatttggaatcaacctaagtgtccattgtggtatatatacacacaatagaatacaatttggccataaaaaatgagatcatttgcagccacatagatgacgaggtcatcatgtgaggtgaaataagtcaagcacagaaagacaaatatcatgttctcactcatgtggaagctaaaaaaagttggcctctcgatagtagagaatagaagatagaaaacagaggctgggaagggtatgttggtggtaggaggagataaagagaggttggttaatggg

SEQ ID NO: 16902 - DNA, 1064 bp, Homo sapiens
agcgagacaggaggccagaggggactggactcaggaatgggctttcctcgtggctctgagacaaggttctgagaaagtctttccccccggggctcgggcctttgtcatggagaaggttctgggtgcatttcacaagggttactctcacctcctcatgctggagccatgagagtgtctttactggctctttaccttgaggacttggtggggttcctgggagtaaaactcacagctgagtggggggcttcttaatactggctgccactctcagaccagtcaattcacagtcaaatttaccatttcagtgttcgtcaaaattaccatttcagttttcctaccagtttatggcttcagtgactacggctccaggtacacagatctcagccatggctctgaatttgtttcctctccaaattgtgtggtggaggtttgccccacatcttcagttttctgatggatccatgaaaagtcattgactttgagtttgttcaggttttttgtcttgtaagaatgggagtgatgatttccaagctctttacatgttggaactaaaactggaagtctatttagtttatcatttttacttaaaataggaaaaacatatctgtccgttgtcctttgagctgattaatgttttgcccactgggatcaggtgtctcctgtacatcatcccaaagatcccccaactgtgcctgtgtcagaggcgctgttgaatcagtagaatgggatgatagctagcagctaatgggcttctgatctagtgtctgacttgccttataaactttgacaagatgtttaacactccccacaccccgctgggatcagcttccttctctgaaaaacaggggaattggaacatagtccccaagtccctccgttttaaaaattcttgccactaaccactcttaaaggctatgattttctgcttcttgtgatttaaaacaaaacaaaaattgttttttatttatttatttatgttagaatgacgtttttcagtgtggactttagccggggcttctcaagattgttttaggtgcctatgaaatcaaaacgaatttcctaac

SEQ ID NO: 16903 - DNA, 1032 bp, Homo sapiens
ggctgggtccagcctgccctgctccaaagcctggccagttttgtagcccctcttaatgagaacacagcctgtcaagatgtaagggagagggggttcaggaatctttcatcaggcaaatgtgcttaacaaaatatttaggatctttgaatcctcacagagatttcaatggtcatattttccaacctctatatctattaacttgcctaacaatatttttctagggggaaatgctgctagatccctggcctactggttcaggaccccagacaagtcctggcttgccatgatattgattttatttgactgttttgggttgggagggagaaagtgagtttgatgaaatgtacatgttttggaagtaagtacatgactgtgttatttttctctgagccttcattttaatttttttttcaaaaatgaaaaaggaaaattgtcttcttacccactcaattgttttttgtgggctgagtctattttttcctcagtttttgagtttcagcacagaggttggtgcattgcaagtgttgaccccttacttagaagttttattctgttttggtggaaaaaacagactcctaaagttcatcagttaggttggttattgacatggagagattcctttctttctttctttcaactgttatgtccaatgcttcctatatctgatgcacggtagtccgtcctggaggaggaatgggatcaggaacccaccttccaaatgtttagacccctggagaataaagaagataaacaaaaattattaatgcagtaacacgaaagcgaggctgccgaagaattcgagatgaacagcttctgcagtgcgctcatgagaccaggctccattttcttcctgattagcttgctaaatagacagaagagcctaacctggcctcacgcaggctgacactgaaggctggctgtgctggtaactggtggtatgactctggctgcgtcatttgcccagggttagaggcatgagccgagggctccttcagctgccacccactgtgatcctcacatcacagagaagcc

SEQ ID NO: 16904 - DNA, 1031 bp, Homo sapiens
ctgaatttcaagtgttcactcaaggaacatgtcacagctggaatttttattgacattttccaccacggacgtcttgaaaatgagggaaattaaggagactcccccactcccataagagtgtaaatctttctctttcaactccactgttacactagacgggaactggttcccacacagcatttgtaagaggagagctggatcccaggaggttagaccctggaggtggtattttggggcacataaaaggatgagtccctgccaagggctttctggggcaggtatttcagaggcgtcttccttgagattgttatgtgccgtgatggcatgaagctcagctccttaaacatccctgtgacgagaggtcctggggaacccggaaggtattttggcaggccaggcaccatcctgccggcttataattatgtctaatattgaatcaattacaagctcccttcaaaatcacctttaaatgttcaagccttagttcttccatttccttttctttgctgtgtcacaaactgtggtgaatattgtgtcattccttcccctggtagttattatggaaacgttctagggtgtcttccttggtagaaaacacagctccaagaggtaggagcacagtcttacaaagtgcctgcagatatccttcaggacaactccgaaaaaagttacctaaaggttttgtgttctgtgcatctatgggttactccaaggctctctggctgggtttctcggaaaccctgatgacaacaagacatcttaaacacaacatatattttttgttattattttttatttttgtttcatgttaatccttcccttcagtctccaatggcaatgcagctgaagcaatgtttggacgttctttcttctctaatcatcgtttttcaggcatgtgtgtgctctgggcatatgaaaaacatgtaaagagaaggaaatgcttgttcacagcatgcatttccattcagtcatgcctctcattgccattcttgcaattaatcatagattttcgggccagtgcaaccaatact

SEQ ID NO: 16905 - DNA, 1088 bp, Homo sapiens
agcccataggtttcctctgcctttggagcgaacccagtcccttagcggggagcgggcggagtgtgagcgcgcgggtgagcccgtgccggggtgtcggcaagagaccgcccgggagcctctcgctggtccggggcttcctggggttgcggggcggcccagcgaggcttcaccctcctcgatgtctgggtcacgcttcttgcccaggtggtctctggctggcgcagatacaactgctctgtctaccatggtctctgcaagctacaggggaccttcctggcaggcagggacgcgggaaggaagcctaggaaggccggggtcagcgaggagacgctggtggagaatctgagaacccccgtggccatctcaacctaccccttcacagtatgaggccgcgaagtttttctcccacgaacacttcccctgcaacaggtagagaaacgggggcatatagctttcagcaaacctctcaccgtgtacactaatgatagagtttgccagccactcacagggtatcaaaatgcccagacattaaagggatagctagaacatgcacaattttggaaaatgttaacattaaacgccttttatgatttgattctcttcatctttgcctatgtcctgaaagagaaaataatataacaaactaacctcacacctaatttgttcctaaaggaggttttgcggtcagccaaacctttccctctcccaaaagtcgatgtctctggcagtgacctcgcagtcaactcggatcctcagataaaaaacattcagtctgttgaatctatgtctaaaatgtgtcctgatctgtcccctttttcttatgcccccaccccccaccctgccccttgtccagggtaccagcatctctttactgtaggatttcagttcccccttcctccattctctatatagcagcgtgcgtctgtgtgtgtctgtgtgtttaaatgggtaaatcagaccatatcagtcctctttatggagtccttcagtagcttctccttgcaactggcacgcaatccaggagacctccttctcctcacacccccagctgatccagcctctgctgtctcggaccaccaggccattgc

SEQ ID NO: 16906 - DNA, 1049 bp, Homo sapiens
cccccaccccagcttccaggcaaaaatggctccagtgggccgtcactccagtctctgtgcaaccttcaccagcacccacgggttcaaaaataagaagcaagcgaagaaccgctgcctgacagtgcactatgagcattctcctggtgcctgactcctccctgaaggttaagaaaaaagttatttatatggaattccacaattcacacagtggattgacatgataagagaaagccacagttattcttggccccctttccatcatgcccatgggtaatcactgttagctgagtgtgttttctttttgtttgtttgtttgttttgagacggagtttcattcttgtcattcaggctggagtgcaatggcgcaacctcggctcactgcaacctccacctccagggttcaagcgattctcctgcctcagcctcctgagtagctgggattacaggcactcgccaccacgcccagcaaatttttgtatttttagtagagatggtgtttcaccatgttggccgggctggtctggaactcctgacctcaagtgatccactcgtctcggcctcccaaagtgctgagattacaggcgtgagccacagcacctggcctgagtgtgttttcttcctaacctcttccaaagcacatgtatggttatctttgtatatatttctggttttacatgcatattcagttgtacatactattgtacaacttttttcccttgaggatgtctcagagttccctctatatgcaccacatctggtgtgaatccaaccatctttcatcaatgtcttattaaagggtctttagattctttctaccttttgcttctaagagttgaatattactgcatatgccccagcagaatggcgggatcacagaacaagcacattaaaaattatcaaaggaaggcatacccctggttaatgaaggctgtcagacagaagggactataatataggaaaagcaacaaggccctgccccagtgtcaacttcccaaaagagttgttatttcctgtttctggttttagttcttcaggtaattatcatttct

SEQ ID NO: 16907 - DNA, 1960 bp, Homo sapiens
gctgtgttgtgaatcaggaaagcccaaagctgtcttatctcagtgactgtgtgatttgtgtaggtttgccccgaacagtaatgtgaggatgcagcaagatgtgcaggccctctgacctggctagaccctgccttgcagagacattgtcactgtcagctgctcacttcctcctggggactctgaggcccaagggggacagtggtgaaatatgacacagcttctcccctaggtgatcagactgcttccaatgagcctgtgcccttggctacataaagaggaaacataaatattttctgtgtgtgtgtgtctgtgtgtgtctctttgtatgtgtgtctgtgtgtctgcatatctatgtgtgtgtctgtgtgtctttgtgcatgtgtgtttctgtgtgtgtctgtatgtgtctgtgtgtgtgtctgtgtgtgtctgtctgtgtgtgtgtctgtgtctctgtgtgtgtccgtgtgtgtgtctgtgtgtgtctatgtgtgtgtgtctgtgtgtgtgtgtctgtgtctctgtgtgtgtctttgtgtgtgtgtgtgtgtgcctgtatgtgtgtgtctgtgtctctgtgtgtgtctgtgtgtgtctctgtgtgtgtgtgtgtctgtgtgtgtgtgtgtgtctgtgtgtgtctatgtctctgtgtgtgtgtgtgtgtgtgtgtgtgtgtgtgtgtgtgtaaggtgggatgtctcttcctgctgatcggtggcctgcctgtgtgctggcttggttagaggagtttcgtgcttctctttatggcgctgctcttcctcagatgcttgcgggtgcctgggtggatgctgactgttctgctcgggattccccgtagctgtctgtgaacacagcatttgtcacaatagcctgcgaagaggagggccaggggactgtagcaggctgccttggggacatccagagcatggcttccgggtggtgggctccgtgtgcctcctgggagttgcccagcacactttctctttagcccacatcgagtgtagacccatcagtcccaggctgcctggcacaagctggagaggggccagatccacaggagtctgcccactatggctccccactcctcccagtcgccctgctggtgacctggggaccctcttgcttcccatgtcccccagcagcctcggagctctcccaagccttctccacctcacgcacagtggattccggtcttctcaggtcacttcttttcccatgctaataaggcttgttgatatttgtaataatttctaaggatttggagcaggaggtggtggctgcagccgggctcagcctactgtcttgatctcatcttccagcgtctcctgggcatctccaaggtgtgcacttgcaggaaatactgagtgagaatgtcaagaaccggctctacagtcggaaggaaccgggttcaaatcctgatgcttccacagctagtcctatctgtgacaggggcagggttagaatctgtttgcggaatggttagcaccatactaagtgcacatgctaggcagaccctcaaaaaaaatggcctgttctttttctctttctctgttgggcaaattatgtagcctcaactggactctatttctattagggaaaatgataataatattacaatgattaaaaagtagggtccttacaaaatggtgagtccgattttatttggctctaagctagagaaggcatggctcacagttatggaagacatggatttaaaatgtggccagtcttcatttccaaatgtgtgtacacgaaagtgtgatgaccctcaaatctaatcatcaaaattaaagctgtttaattaacattttaaattaaaatgtttcaattaaagtccaaatctttccttgccttatcttcagaatgctttttcttttcttttttttccaaattacaaaacctgtatgtctcactgaagaaaactggtacagtgtgaagttcgacaattcacggagta

SEQ ID NO: 16908 - DNA, 1074 bp, Homo sapiens
cccagtggctgacaagtatttattaccaaatgtttgctttttcctaatgtgatatgtgaaaaatggtacctcagcctagttagaatatgcacttctcttacgatgagtgtgaccaagcatgttttagcatgcgtaagaagtagctatatttacttttttaaaaactatctctgcagagcctctttttttttttttttttttttttttttttttgacagagtcttgctctgtcactcaggctggagtgcaatggcacaacctcggctcactgcaacctccgcctcctgggttcaaatgattatcctgcctcagcctcccgagtagctgggatcacaggcgcccaccaacacactggctaatttttgtatttttagaaaagaaggggtttcaccatgttggccaggctggtctcaaactcctaatctcaggtgatccacctgcctcggcttcccaaagtgctgggattacaggcatgagccacagtgcccagccttcatattctttattaatcaatttttgaggaactctgattttccttatcaatttctaggcgctgttagtgtcggcacggtatctattcgttgttaacctataattagatgctctatcaagatctatctaagaacacagaaaactgaaatgaaaactttgaatattcaaagaggctatagaggaaatacgctgcttttttctcttaattattaaatgaatatgttaaatataaaatacttaggggaaatagcggtaaatatatcaggcctacctaagaacaccttaaactcttgacataaaggatatttgagtaagaaaaataacatatcatcttcttgtgtaggaggacttaatattgtaaatatatcaattctccacaaattgatcctatcatttaatgcattctcaattagaatacaaacaggatttctttttggaacatggaaaaagtataataaattttacctagagaaataaacctatgagaatacaggaaagttcaggtggggaggggatggggtgagaggaggggaggagattagttgcagcgtatgctaaaatttattccaatgccaccataat

SEQ ID NO: 16909 - DNA, 1071 bp, Homo sapiens
aatagaaaaaaatagaaacaattgataaacatagaaaatacactgtgcccattcctatggaaagaaatgcaaatgaaaaccaattatgagatatcttattctgttttacagattggaaaaatcagaaagtttggtattatttaatgtagtaagactatcgttttgttctactttatatatattttttattctcaatattttaactcaatattggagttaataattgaggctatcttgaaaagaacttattgagcagaaattggcaatatttattaaaattaggactgagtatatcctctgctccttccgctgctggagattttatagttgctacgtgggcagaaacgcatatgcatttcccaggatgtttatgtcagcattgcagagactaaggaaaaactggaaatgccctaaatgttcatccatgaagacaggaagctatcatgaagaagagtgtgctagatctccatgtgcctatgcagaagaactttcaagcaggaaaaacaagatgcagaacatgattatcgtataatccatttgttaaaaaagtagaggaggagaaatgaatatttatgtgagatccagggaaacgtgagctgctccatgacctttgtctgcacagtgatgtattcaaaggaaactccagcctggaatcttaaaatcaacaagcagctgaagtctttaagacagttgcttgacaaggcatccacggggaattccactgaaagcacacagacacactgctgaactcctttgcccagctcttcccaaaaagctcacaaaatacagtctctgtcatcaatcttaaacctcgttctctcaagaaagctcccaggtgctacccccaaagccagcttgtcttgttatgcatgtaggtttctgtttctgagtctgtcttcctccacatctgccctttccaatgcagacacctcagcccctcggcaccccttccctgcctgcccagcaccaggaaggtgcacttggacttccttagggtaaaggaggaggcagaggcggccagatgggacacctcctcatgggtttcgtccccgccgtttgaatgtgacttat

SEQ ID NO: 16910 - DNA, 1452 bp, Homo sapiens
tgagaaacactcagtaaactagtaatagaaggaaacttcctcaatctgataaactgcatctgttaacaaaaaaaaaacccataactaacatcatacttaatagtgaaagactgactgctttctccctaacatcaggaacaaaacaaggatgtccactctcactacttctattcaacattacactggaggttcttgccagggcaaagacaagaaaaagaaatgaaatccaaattggagaggtaaaactatattttccggtgacatcatactgtacgtagaatattctaaacaacacacaaaagacaattagaactaatagttcagcaaatttgcaggatgcaagatcaaaatgtaaaaatcaattgtggttgtatgaattatcacttaacaatctgaaaatttaattaagaaaacacatttacaatagtatccaaaagaataaaaaatttgggaataaatgtaacaaaagaagcgtaagatttatacaccaaaaactgcaaaacattgtggaaagaagttaaaaagaacctgaataaatgaaaaaacattctgtattcatggattggaagacttaataatggtaagatggcaatactccccaaattgacttatgcattcaatgcagtctctttaaaatcctagctgaaattcttacaaaaatggcaagatgattctaatattcaaataaaatacaagagaatggctaaacctataaaactcttaaaagaaaacaggattaaatctttatgaccttggattaggcaatagtttctcagatactacaccaaaaacacaagcgacaaaaggaaaaataggtagtaagttggacttcatcagttaaaaatttttgttcttcaatagacataatcaagaaagtgaaaagaacctgtgaaatgggagaaaatatttccaaattatttatctttaaaggacttgtatctgattatataaagaactctcacaattcagcaacaaaaaaacaacccaatttaaaaaagagcaggccgggcgcggtggctcgcgcctgtcatcccagcactttgggaggccaaggcgggcagatcacgaggtcaggagatcgagaccatcctggctaacacggtgaaacgccatctctactaaaaatacaaaaaattagccgggcgtggtggcgggcgcctgtagtcccagctatttgggaggctgaggcaggagaatggcgtgaacccgggaggcggagcttgcagggagcagaggttgcgccaccgcactccagcctgggctacagagtgagactccgtctcagaaaaaaagagcaaagggtctaaacagactaaatagacatttatccaaagaagatgtgaaaatggccaatcagcacatgaaaagatgctcaacatcattaatcattatggaaatgcgaagcaaaaccaccatgagataccacttcacacccaacagaaaggacaacag

SEQ ID NO: 16911 - DNA, 1100 bp, Homo sapiens
gatcatctcaggtcaggagtttgagaccagcctggccaacatggtgaaatcctgtttctactaaaaatacaaatattagccaggcatggtggcatgcgtctgtaatcccagctacttaggaggctgaggcaggagaatggcttgaacgcgggaggcagaggttgcaagtgagctgagatcgcaccattgcactcccacttgggcaacaagagcgaaactccatctcagaaaaaaaaaaataataataataataataataaaataatagtattattaagagtaagtactaatatatgctacaacatgaataagtcttgaaaacatgctgagtgaaagaactaagtcacaaaaaccatattgtattattccacgtatatgacatgttcagaagaggcaaactgtagagatagaaagtagattagtggttggcagggacctggaggaggaagtgggaactgactggtataagcgtatatttgcagggtggtacaaatgttttaaaattagaaagcggtgatagttacacaactctgtgaatatattcaaacccactgaattgtacacttttaaatggtgaattttatgatacgtgaattatctctcaataaagctgtgatcttttaaatgtgaccgatgtatccatcttttattacttctgggttgtgagccacagttaaaggggttatacactcccaggctaaaaaggaatttgcctgtgttttcttctaatgcctacatcgttttatttttttacattatatctctaattcatttggaattatcttggtgtttcacgggagtaacggatctgatcatatatttttccatgtggctatccagttggacaaacaccattgattagcccactcttctttgtggggcccttctcacaggacctgactcctgccctggcccactctttcctctgatggagacagcattcaatcccagcatacctttccctggaaatggtatcaaatgcttgtcaggctttcaggtacatccacgttttatcacagtaatcattcccatcagtgatttttatggtgattaaccagacaattaactcggctgcctccaggttttaagtctgcgtcata

SEQ ID NO: 16912 - DNA, 1078 bp, Homo sapiens
tgcattttaggcacctttctcaaagattagttatttgtatatgcatacatttatttctggactctccattctgtttcactggcctatgtgtctattttaacacatagaccaatgcatacaattagaaccatactgttttgcttataatttgtaacacagttttaaatcaggaagtgtgatgcttctagctatgttctttctcaagattgctttggctaattgggggtcgtctgtggttccatacaaattttaggatttttttttctatttttgtgaaaaatgccattggaattttgacaggaattgcattgagtctgtggatcactttgagtagtatggacattttaacagtattaatgcttccaatccatggagacaggatatctttccatttatttgtgtctttttcaatttctttcatcaatgtcttatagtttttagtgtatagatctttctgcttcttggttaaatttactcctaagtattttctgtagctattgtaaaagggattgttttcttaatttctttttctaaaagcttattgttggtgtatagaactgcaaatgattttttgtatgttgattttgtgtcctgcaactttactgaatttatttattagttctaggagttttctggtggagtctttaggttttctgcatataagatcatgtcatctgcaaacagagaccaattgacttcttcttttcttatttggatgtcttttatttctttttcttacctaatttctctggctaggacttctagtagaagtggcaagagtgggcatacttgtcttgttcctgatcttggagaaaatgctttcagcttttcaccattaagtatgatcatagctgtaggcttgttttatatggcctttatgatattaaagtacattcctgctataaccaacttgttgagaatttttattttgaaaggatgttgaatttttactaatgtttttttctgcatttattgagttcattatatgatttttatcctttattctgttaatgtggtgtatcgtgtctgttgatttgcatatgctgaaccatccttgcttcccaggcttaaactgaac

SEQ ID NO: 16913 - DNA, 1027 bp, Homo sapiens
agtctcataatactttgtacttctattataccaattgtaatgccccctatttcatttataattgtatttatttgagttctctttcttttttttcttagtctagctaacgatttgtcaattaaaaaaaaaaactcttactttcgcttttctttccttttttttttcttttttttttttttttttgagacagaatctcactctgtcacccccaggctggagggctggagtgcagtggcacgatcttggctcactgcagcctccacctcccgggttcaagcaactctctgcctcagcctcctgagtagctgggattacaggcgcccacaaccacgcctggctaatttttgtgtttttagtagagacagggtttcaccatcttgaccaggctggtcttgaactcctgaccccatgatctgcactccttggcctcccaaagtgctgggattgcaggcgtgagccaccatgaccagcctgatcttttctattatctatttagtctctatttcgtttatttctgctctaatacttattttctttcttctaactttgggctcagtttgctctttttctagttccttaaagtgtaaagttagtttgtctaattaagatatttctttttgcttaatgtaggcatttctggctgtcaactttcatcttagaactgcttttgctgtatcccgtaagttttggtatgttgtgtttccttttcgacttgtctgaagatactttctgatttcctttttgatttcttctatgacccattggttgttcaggagtatgtggtttaatttccacatatatgtggatttttccattttcttcttgttattgacttctagttttacaccattatgataagaaaagaaacttgataatatttccatcatcttaaatatgttaagacttgttttatggcccaacatatgacatttcttggggaatgtcccacgtgtgcttgagaaaaaattatattctctcgctgttgaaggcattgttctgcatatgtctgttaggtctatttggtcta

SEQ ID NO: 16914 - DNA, 1031 bp, Homo sapiens
ccaaatagaaaatgtatgagatatgtgaagagacatttcactgaggaagatacacagatggcaaataagcacatgaaaagatgttcaacatcgttagccattaggaaaatgaaaattagagcaatgataagatgtcattgcacagctttatgaacagcaaaaataaaaaatagtgacagtaccaaattcagattgggatgcagagaaggggtatctctaatgtgttgccactgagaatgtaacatggtacaatcacgctggaaactagtttgtcagtttctttaaaaaaactagaaatacacttatgaaccagcaattgaactcctgaacatttagtctagagagaggaaacttacatgcacatgaaaacttgctcatgatgtgtcataccaactttatttgtaatggcccaaaactggatacaaccaaagactctcagtaagtggatacttaaacatatatggagtactactaagctatacaaaggagctctcctgaaacacgcagcaactcagatggatctcaggacattatgctgatttaaaaaaaaaaaaagccaatctcaaaagatcatattctctatgattccatttatgtaacattctcaaaatgacaaaattttacaggtggaagagagattagtgtttgtcaggggttagagatggtgaaaaggaagagaatgagtgagactaccatgggtgcgtggcatgagggagaccttttgatggaacaggtgatggaacaggttcgtatcttgattgtggtagtggctactcaagtctacatgtgtgacaaaatgcagaactatatacatacattgtactaacgtcaagtatcttgctacaattatgtaacatattgccatcgggggaaactggatgaaggatactagggttttctcagtactatctttgtaacttcctgtgaatctctgattatttcaaagcaaaaagttaaaaaaaaaataggtaaagtataattccacttttacagcacttaaaaactggcaatagttaatctgtggtgttaga

SEQ ID NO: 16915 - DNA, 1024 bp, Homo sapiens
actatcttaaaatgtttcatgatttttaaacaagaagccccattcttttcattttgcattgggcctcaccccttatatagtggtcttgtttgagggtttccagctgtgggctttgatagatctgtgctcagcgttggttccaagctagtgttcccctcatgtgtctgaacagaatgaggttatgggcagaaatcagggcaattttagggcccatgagaagcatactaagacaagacataggagggcagagaggagcttgggtgctcctgaggagccaaaggctgacctgcctcttctcggggagccccaagattagctctgttctagccctgaagagtctgcaccagctgactccgtcacctaatgttagctaatatttattgaatactgtcaagtgctgaaaactgtgtagaacgtgagagacagataatttttttaaagattttcccagccatttagtacctcctggccaagcaggggaaattgaggcagaaaggagtaacactgtgcaatgtaactacactgaggttgaagtatttttacgcagaggtctgggagcacacatcagggggcagggtagggtctccgaagggaggctgacatctgacctgggctttgcagagtgaataggagtttacttggcagacaagtgaaggaaggacttgggttgcctgcttttgcagagcaggaagtgtggctgaacctcgtcatggttttcaactgctcccaggagcatcgtatcttcagctcaactctgagcaaagctgctgaggactgaaggatttcagaccattgtggtgggctttgcagaaagtgcagagatgggcaaaacagtgtgtacccatccctgcacttcctgcaaaggagttcccaagctggaagggaagtcagccatggtcaggagtaagtcaagacaagaagacaaacaagagtcaggctggacatgctggctcatgcctgtaatcccaacaatttgggaggccaaggcaagaggatcacttgagcccaggatttcatgaccagc

SEQ ID NO: 16916 - DNA, 1024 bp, Homo sapiens
tgactgaaatattacagaaaaaagtacaatgttgctttttgttttaaaaacctctctacctgttttttaagaattttagcaaagaaaaagtgatgaattttactaaacacatcttttggcattcacttgcttaaaagagaagctcagtttccctttctctgatagggtgtgctgtgctcctccctaaattactgtcacgcccttgtctttgttcagaccctacctggccagagaacttaactctctgagtttagttgtagctgattaaatattttgttgcagttttgtatccatgtgcgtacatgtaattgggctggaattttaatggcccttgcaaagtaactggttttgactcataaaatgaaatgagtcctgtattaaggaaccacttacataacataggaactatttgttatttgaaatatttgactgggaaaaaattatattgaattaggagacttggggagctgattctctattttccttgtttgtttcatacaatgtttgttttttctctgatcgtgtcactgatgatttttattttggtaagtaaatctgacatttctacttccagattgtttgcctagagtctggacttgtagccacagattgttacaacgactgtttagtacagattgttacatgttgactgtttaatatatgatcagaagtgtatcttgtaagttatttttgtacttaggtttctcatttatctggtttcaacggtaatatttcctttctttgtttaaacatattggcagccaaccactaattctgatatttacaatattttttaacagacatgctattgtcaaaactgacttcattgttttatctcattcagtcttttatttaagtgggtaaacccctctaagattagaaggaaactgtcccccattttcttgtctctcctttccctactccctgtggtggttattctcaagtcctttctgaaattctccatttacatcatagagtcctcacaggctttccccaaatttaatagctgatttttctgtcattg

SEQ ID NO: 16917 - DNA, 2146 bp, Homo sapiens
tttggtcaccatggtaacccacattccagtagggaggcgggggaggtctgcagccccagagcaccccagcagccctttgagcacatgggccagtcagttaccaacagcacggctacacccttgtggtccccaaaacccttcctacaaatgtcaatgttgggcctacttgtgagccctgcagttgatttatgaacaagcagtttctgcactttgattggcagcttttccttggcctcgaattcccctgccctgggagtgtgccccttcccctaatttcttttacccagaataaattaaccccacaaatcactgccagtaggaaggcaaagggcatcgctatagatcagaggctgctctgggtgggcagggagaagctatgaaagaggcaggaagacataaagttggaaaagtgggttggagccaactggggggctgtcaggctgcaaaggagggactttggatgttctgctaaaggcggagtgggctagggagagctgaaaggtcttgcgcagactttgatatttcaggatgattgatctggtaagaagtgcacagagtggatagcttgcaggtcttggtggcttgaatctcttcagctcacaaacactgatttagtgtctgctgcatagtgggtatgaggttgagctgcagaggcagccaggcagggctctgcactgtggggtgtgcagtccgggttccggttggccatgctgtctgccacagcaaaagaaatgtgggctgagtcagtgccacacagatcagtggagaggttaatacaaagtgtctcaagctgaacagagcccaaaaaagtgctcacctccactgcggcttgcccagagtccacgtggagttagttaagcagcctgaggctgagcccctgctccttctgcagttcagggctccagccccagctcaggggatgtggaggaggtgctgagagggaggctgccattgtaaggacagccacacctaagcccttccccaaggtatttgtaccataattgggtcatgttacagtaataatttgattacttgctgttgttttgtttattttatgatggtccccagagttttatttaaagattttcaatagagacttaagatttgttgtcaaagccaaaaccataaccagcctcccctgcatcttgcatttggctgccatttcagtttgggtaccaaccattccatacggaaagaccataatggccacgcagagtgagtggagagggttggattgcaatctggacaccttgattccatgttcagctgtctggcccttgcccctgagacctgggtgtgtctctgtgaatccaggaaggagaggcagacaggccctgtggagccttttttgacttggcattgcaaagtccacatggtgaccttcctgtcagcctgttgctgggctgactgtcatgcttatccaaagactcctacccaaaggccactgtactttgcaagacgaccaccggaaacaatattgggacgagaactgacctaggcatcatctgatccaagccacttatttaacagattaaaaacaatgataatggaatgaagagtgatacagtcgtgaattgtggattatggaaagatgagggaaaaaaacccctttgctgcattgaattggaggcatcagaacacactcatgttaaatacagagctgtgtcccatcaatgggctgaaaagcagtgacaccccagcggtgatgagcacacctcacacccagatcttggtttctaaataccaatttttgctcaagggaatcaaggcctgggcttagaaagtacaagaggagactggaagatcttgttttgccgggaagtaaggaggcgtcccaaaattgacagcgatatgtcacaggaacacagggggctctctcccaccccagtggggctccccctggacaaattggggatgacttgggtgtcaaaaaaataatgatacttgggaaaaaaaagaatccatgagtccatagtgatacttaaacaggtgaggaggcaatgcttttctatacagaagaatgccaggtaatacatgtagaaagaaaggtagctttagcaaaactttctcattgcaaccaccgttgtactaattgattcaggccaggatcagcaacggaggctaaacccatggggcaaaaggatgc

SEQ ID NO: 16918 - DNA, 1049 bp, Homo sapiens
ttggaggttagggcttcgacacaggaatgtggggggaaacagcccctaatggtgtcctctcatttttaatttttagtctgctggagaatcttgtctctcacttcagcccaatctgtaattctgttcaaaagtctctgctgatcactaactgaaatggacgtggaattgaataaaagcacccagccccaaagccttccaataggtggaaagccgggatgagcccagccagcctctggagaccagccgcccccgttatctgcagaaggccacttctgcagtatcacggtggaacttgcaccccaaggaggacctctgcggggaggggtgggggcagtgaaaaaggcagccgccactgcagcgtgcgcccctgccaggccctgaagagttgcacatgaattgctccctatctccgtggcttggcattataacatcacagccaaaagtaatgcttttgtcgtgctgtcctcaaattttgtctctttttcctccccccagaaatgaagatggactgaaaacgaagcgtattgcctttttcaccaccagaggtcgccagcgctccgggactgaggcaggtgtgtgtgggttgggagacggtgttcccagatgagacagccggggtagcctggttcctgctccaccaaagtggggatcgcccttatcttgggccttccccttcaatgccctgttgcaatgccacagatgtccaagttcaaatgaaaaccctgcatatgagctgcgcccattctttctgtcccacgtgtgacacgcaagtatcctcaagccccactctcctgcgtggaggccagtgatgccagcagctaatatgtgcagctgatctacacaccaggcagtgccctaggcaggttacatatgtgagagtttctcatcctcacaacgtgaggtatgggccacatttccccattttgcacgtggggagactgaggctcccagggtgtctgagcttggctgccacaccaaaataccaccgaccgagtgcttcagcagcagacacttattttctcacagttctggaagctggatatctgaga

SEQ ID NO: 16919 - DNA, 1032 bp, Homo sapiens
tttcatcccaggactgtgggacttcagccctggaccagcagctacgtgctgttaagtctctactgccacacgatggtatcttgcaaagcccacatggatcacggccgcctttggacccacaggctgaggtgaggccaaggttgcacaggggctcgtggtcttccccaaaactcaacagagacagaactttcctagtttttgtgctggtcacacaacaaggccagttcagcagagagtacatctaggtaaacaagctctttttgttccattatcttctgtgagacacaggggaaggtatggagctgtccctttcattaaacaaccagctctgcttcttaacctcaaagctacaacttccaaagccagctctgctcacagaaatatccctcaggatgctggcccagaaaaccagaacccacatccaggttgttttaaacataatacaactttcttcttcagtttgatagatggttgttggcaagtacagatagtatgaggtagggatgagtgacgccacagaggccaggacacatttgcaggaggtgaactagggagtttgccgctgctacgctcttggatgaactggtgtgcttgtgtgttgagtatgatacacatagagatctgtcccataagagcgtgtgtatttatatgtgactgaaaaaggaatatcagtggaccagataaaagagtccaaaaatagacctcagtaaacatagaaatacatcgggagtccccagcgccccccaggaagcgaaccggtattggtccctggcctgctaggaaccaggccacacaggaggaggtgagcggtgggccagtgagcatcagcgccacctcctgtcagatcagcggcagcattggattctcataggagcgcgaaccctattgtgaaccgcgtctgtgagggctctaggttgtgccctccttatgagaatctaacgcctgatgatctgaggtggaacagtttcatccctaaactgtccccctcaccaatgctgcagtccatggaaaaattgtcttccacaaaaccgg

SEQ ID NO: 16920 - DNA, 1066 bp, Homo sapiens
tttctcctattcatccctaaagccagattttacctctttctcgctagagggaggctcctcccctaaggggaggtcctggcaaggccacgcggagtgagaggtccctggacatcccagtttgcaggagcacctcagtgccacgcaggccgcacacacgggacacagagggaggaaaggcaattagtatgtgcttggggtggggcaccaccagggcagggaggccacactgtggcccaaaaggaaacctgtagcacacacccaccgatcctgcaaaactgtccacagtttcaaaaaatgtatatagtgatgactttggggcagtaggttttccatttaatatatgatcctgtatttcctaagcctgtagaaacagaatgagagaagaatcttactgagcttagtggcaagggagttgagttaaactcggtcatgagccattcacaagcagaaatttgggtcagtggtgttttctggacgctttgggagctgagtcaaggatgcatgatctgattgcctctgtggccttccagggagtctgactcttacagacaaagcccatggacgcgaactcatgcccacagcccgtctttggactttataaagcctaagcccacaggctggccactggggagaagtggtgcatctcagcacaccccagagagggctggcaagcagacacactcccctgcccttagccagctccgccttcctcagaaggcacagggggagggtcccaaccccacccgagtgggaacccctgtgagtttcctcagacccccttctctctgcagggtgctggtggatgctgccgtggtggcaaaggacactgttgtgtgcacctttgaaaatgaaaacacagagtggtgcctggccgtctggaggggctggggcgccagggagttcgacattttctaccagtcctacgaggagctgggccggctggaggcttgcactcgcaagagaaggtaattcctgtggaatgactgtcacacatcagagctggctggcccggggctgcagcctgacccctctgccatcggcctctagttctccaaggacctagaag

SEQ ID NO: 16921 - DNA, 2099 bp, Homo sapiens
ctaggtggcccgcctggggcaggtcgccgggacaaccccaccgccccgcaagtccagcccggcctcgggcacggtagggtttgcggttaagcttgtgacctttagacttctgaatattcatatgtatgaaatgtgatatacataaaagtgtgcatatcaggaatttacagtgattaatgaccagagtgaacacagctgcgtagccgacaccgggatccaaaacaccgctattctgaaagcctccctctttcccaaaaggcaaccgcgaactcaacactacaaattcggtttgcttgcttttgctataaatagaatcatgcagtatgcttttttttttggcctagtttcatggagtctatattatgtctggagtccatccaggttgcatacagagatggtttgtttgcttttgctgctgaagagaattccattgtatatattataccataaattacttattctgctgttgatagacatcaaagttgttttcagttagggctattctgagtaatgctactatgaattttctggtacgtggttctgatgcacgtttgcatgagtttgtcctggagtgggactgctgggacatagggtatatctatcatcaataagtaatgcccaacagttatgctaagaggctgaaataatatacacactccagcggtgtgtaagggttttcatggcttccagcttcagccttcttggcattttaactctataacttcagctattctgatgggtgtgtggtggtattgcactactgctttgctttgcttttctctaataactaatgaagctgagaaccttctcatgtgtatggtgcccattctgatagcttccttggttaagtgttctttcgagtccctggctcattttttttttttccttatggagttgtctgccttttttcttattgatttgtggaatttctttatatattagggatatgaacacactctgtggcttgccttttcactcttaatggtgttgatgattagattttttttttttttttttttttttttttttagacagggtctcactctgtcacctaggccggagtgcagtggtgccatcaggactcactgcagccttgacctctcaggctcaagagatcctcccacctcagcctcccaaatagccgggactataggcacaggtcaacaggcctggctaacttttgtattttttgtagagacaaggttttgatatgtggcccaggctggtctccaactcctgagctcaagtgatccacctgcctcagactcccacagtgctgggattacaggcgtgagccgcctcgcctggctgagaagtttccaagttttatgtagttcaattattttctttaggttagtggattgggtgtgtgtgcatgtgcatgtgccttaggaaatcttcccttacccccatcatattttcctatgtggtctactagacgattgttttgcttttcacatttagttctgcaatccacccggagatgattctccttgaacttttattgaagtatgatatacatatagaagaatgcaaactgaacacacccaaccaactagcatcctcgtaagaacaggacattgccacattccagaagccctcctcctgtcttcatctagtcaccacccttgccccaagggtaaccattatcctgccatcttgtatagatttgctttatctagttttgtatttatgcaaatgaagtaccttgcatattttttgctaaacattatgtttgtgtgtagatgtagttaatctattctcactgtaatatggtatttcattgtggatgttttacaatttacttatccattctgctgttgatgaacatttgggtaattttcactcttttatattataaatagtgtacctacaaactcaataatatatatctttatgtgaacacatatactgatatactcccagggatggaattactgggtcatagggcttacttatgttcagcttaagtaggacatagttttccaaagtggttgccaacttaaactccttgctaacgtttagtattgtctttttaatcttagccattctggtagataggtaatggtatgaaattgtggttttaactgtatttccct

SEQ ID NO: 16922 - DNA, 1057 bp, Homo sapiens
acaaatcagcctaagcagcggtgactctgactttccccaccttccctgtccccacgcccggcagcgcaaggatggcgttgcactgtccacaagcccagcagtggggtgtgcctttttcctgtgtgaagacaccccttggctccagggtgggtttcgggtttgtggcctaagtgttcttcccgagtgagagtgaattgggagctggggctccctccctagtcccggcaaagagagcagagcagaagacaggatgggagtggggtcctcgcggcgacaagcagaggagaagagctggcaggttatccctctctacaaaagtctggttttgagaagctgagcgcagaaatacatcatgggaaaataggcattgcgggggacctgctgggctgtggtgtacacgaagtggccgggctgggtggggctgaggaattgcagctgaagtcctcgccctttagctgctctctttcctcaagagcacagaaggcacaaacaccattgcttctgcaccccctgccctgtccctctccaaagctgcccctcccttggtgccctggtccccagggaatcctgccctctgcagggtcatgctctggcagttccccaaactcctaaccctctaatcttttcctgtccccagatccttccccttagttgcacgtgtgccagagctcccccacccggctctgagaaggcttcttacgccttcctgcccctgccgccccttcacatcacctctgacctcctgccttcacttccccggggttccaggaaaggtcacatgacgccgctcttcactctcgggcctctccatgccgtcctctccctctccctccactcggctggatgcaggtggagaagaaacacagccaccccggctgctgtcgcctggcagccatcattacacacctctggcagtctctcgaaacgcccacccctcctgtccaactggcgtcctccatactcaccctcagctgacagccttgcttccttcttacctcctttctcggaagagatcttcctcctccacccacacctgcgccgggctctgcctcacagc

SEQ ID NO: 16923 - DNA, 1021 bp, Homo sapiens
ggggagctgtgtgccctaagatctcattgcctttttatgccgattaacatgcttttagcccctactgagcttatagttaacagaagtttccgggtctttcttcacctgaactgtgtctaaagcaagttccctccaccttctgtatttatatgcttgatttttaaaacctaaatgttgggcttcacatttgttccttgtaaatttcatcttggtgattgcagtctaccctctggcctttaaaaattgtctgagccttgattcaatcatgaaaccagcttacccttcccctgtgtgctggccccagttttctaaccaggtgttgaatgaactggatggactctgccagatccctccgtgcaaggctggaatcagtccattgttcaactgtgccctttggggctgtggttcatttggctctgatttttcctatatgttctctcctccaacccccatagctccatcttgtctacaagattttgttagaagccgtcaaaatcctgctgacttgagatgcactgtgctgcatgttttccccgggcacagcaggctaataatcctgttacaaagagaaatgctgtacatttcgagcagtgctggcccctggggctcaccgcggccttttctaagtgcttacagactctctgtttaataatccattccagaaattttccagggctcattgttgagcttggtgttcgcaactttgagtgatcagcccttctcctttgtgggagcaccaggacagagcagcctttgtccctccccagtctcagttccctcccactgcccctgtggacctcgaatgcagagcttatgcacctaccgaaggtcgtgtcagcacccaaagcagaatgaggctgccctgggaactagggtcaattaagacagcttgtgctggaggaccctttacagcagatgaaggcctctccccagccagaaaagatggagcacacgctgggtggtggccccgcttcctcactggaaggagatggtgctcttcttttttctttctgaattgtgg

SEQ ID NO: 16924 - DNA, 1112 bp, Homo sapiens
tgtggccttgatattaatcttcgtggtgggtcctcgccatggacagacaaacattcttgtgtacataacaatctgctctgtaatcggcgcgttttcagtctcctgtgtgaagggcctgggcattgctatcaaggagctgtttgcagggaagcctgtgctgcggcatcccctggcttggattctgctgctgagcctcatcgtctgtgtgagcacacagattaattacctaaatagggccctggatatattcaacacttccattgtgactccaatatattatgtattctttacaacatcagttttaacttgttcagctattctttttaaggagtggcaagatatgcctgttgacgatgtcattggtactttgagtggcttctttacaatcattgtggggatattcttgttgcatgcctttaaagacgtcagctttagtctagcaagtctgcctgtgtcttttcgaaaagacgagaaagcaatgaatggcaatctctctaatatgtatgaagttcttaataataatgaagaaagcttaacctgtggaatcgaacaacacactggtgaaaatgtctcccgaagaaatggaaatctgacagctttttaagaaaggtgtaattaaaggttaatctgtgattgttatgaagtgaatttgaatatcatcagaatgtgtctgaaaaaacattgtcctcaaataatgttctttaaaggcaatctttttaaagatttcactaatttggaccaagaaattacttttcttgtatttaaacaaacaatggtagctcactaaaatgacctcagcacatgacgatttctattaacattttattgttgtagaagtattttacattttcatcccttctccaaaagccgaatgcactaatgacagttttaagtctatgaaaatgctttattttttcattggtgatgaaagtctgaaatgtgcatttgtcatccccactccatcaatccctgaccatgtaaggcttttttattttaaaaaaacagagttatcccaatacattatcctgtgatttaccttacctacaaaagtggctcctgtttgtttgatgatgattggttttatttttgaaatatttattaagggaaaacta

SEQ ID NO: 16925 - DNA, 1032 bp, Homo sapiens
gttggccaggttggtgtcgaactcctgatcacaagtgatccacccaccttgcctcccaaagtgttgggattacaggtgtgagccaccatgcctcgcctgatgggtctctctttttttttttttttgagacagagttttgttcttcttgctcaggctggagtgcaatggcgtgatctcggctcactgcatcctccgcctcttgggttcaagttattctcctgcctcagcctcccaagtagctgggattacaggcgcccaccaccacgcccagctaatttttgtatttttagtagagacagggtttcaccaggttggccaggctggtctcgaattcctgacctcaggtgatccacctgcctcggcctcccaaagtgctgggattacaggtgtgagctactgtgcctggcctgatctgaaaatttatgtctgactcttgggaactgaattgaatactcctttgatattcttgtttgctctttgtgagattcttattcatctgtttattgcagttcctgacctagatcattaattttcttatcttttctttccctcattttaccattttgtctttttgctctgcctttggggagattttctgttttttcttccagcccttctgagtttttatttctgcggttatattgttaatttctaagagtttcttgcctctgttctttgattcctagttattttaaagtctttgtctgctaactttagttttagaattctttgtgggcctcctgtggtggtgtttctcttttggcttttaggcattttttaattgaatgctggatgtaggatattagaaggtgtagaggttttaagtgatgttttttcttccttcagagagaatgtaaatttcttctggtaggcagaaaagaatacagtagctcaccttcaccctgaaggtattgttttaagctttgttgggcctagtttctttcagtttgcctttattcttttttttttttttttttttggagacagtatctcactctgttgcccaggctggagtgcagtggtgtgatcatg

SEQ ID NO: 16926 - DNA, 1041 bp, Homo sapiens
ccagcactttgggagcccgaggtgggtggatcacctgaggtcaggagtgagaccagcctgaccaacatggagaaacctcgtctctagtaaaaaaaaaaacaaaagaattagctgggcatggtggtgcatgcctgtaatcccagctactcgggaggctgaggcaggagaatcgcttggacctgaaaggcagaggttacagtgagctgagattgtgccgttgcactccagcctgggcaacaagagtgaaactgtctcaaaaaaaaaaaaatattctgaagacactgagccttgactgactgttcagtcaacaaatacttattgatcatgtcttgtatgccaggcattgttctaggtgctggagatacatcagtgagaggaaaagactgaaaaatctccacccacatgaagcttacattctaggtgggagacattaaacaagataaagaagttatgtgtttatgtgcctgtgcgtgatgataaatgggaaggagaaggagtgaagtcggaaggagtgttgtgaaatggaggatagataggtttattaggatgttagatctgcagccagggccagcctcgctgaaaggtatttgggtagaagatgtaaaggaagcgagtgatctgcccatatgatatttgggggagaaacccttgaagcaggaggaaactgtaactgtgaaggccacgagtggggagcatgccaggccaattaacgtgtgatacatagccctcagtgactcccctcctggtattcacacctttctctaatcccctttcacagtgaattagtgcagttcaaaacggtgtgatccaagaataccacagaagtgatgatgtgtgtcttccgaggtgaagcagagagaggcattgcagctttttcctgattccttggattgctcactttgagagaagccagctgctgtgctctgaggacactcaggcagccatggagagctccccaggctctcactgtgccaggacctacttgccagtcctgtgagtgagctaccttggctcacctgttgtgtattaaaaaatacacaa

SEQ ID NO: 16927 - DNA, 1029 bp, Homo sapiens
ggccctgcctcatggctaattcttaagaagaaaaaatatctctgttgcaggctctcccggctgtgatagaccttcagttacagagagagggagcagagtgggaccaggtctgagaatagtgaagcaactcattcctttcaggacattccctctgatgtcctattttcaaactgtaagtcagaatgagatcacttattttcttggtggcagaaggctgctttataatttgaaggcttgcaaattgtatgctgcttgtcatcccccagccctccacacatacaccctggtacagttccatgcatgaagaaacaaccagatcaccttatttggtgatatgcctcattctagaaagatttgtaaatcaaatttgctaccgtaaatgagtgccttttgtggggaaaccaccacagaaaacctaagtaattgtttttaaggaacttaaagagtttaccttgaagatagaacagtagttgagaattaaatagtaaagaagagaaaatgcctgtgggctggagttaattgcagaagtctttgtagcacagcttaaggtgtaccctggccttgagtggagagcaggctttgggttgcaggaggaggaggaggggagggcctgtctgagggtgtcaggtttctgtgttaggaaatgaagtgggcaggagaggggtgcctggccagggggactctcgaaagccatatgcacatgatggacccagctggtcagaaaaggccttctctctgctttttgtgtttgaaatttcccataacacataaattaaaataaaagggaaaggggaaaatagattttaaatagcatcatgaaactttatgtaaaataaatatggagaaaatctcatatgatagccttagtaaggttaggaataatgttcattggccttaggattaaatgagtaaaattccattatatgtattgttttaatcacctcttcaccttgtcagtgagagagggatttccatcccacagtactgacactggacagacgagatggacggaagtttcttagtctttcg

SEQ ID NO: 16928 - DNA, 1528 bp, Homo sapiens
aagatttcgtagaaaactaagagctctatatatagtttttttttttgtttttttttttttgagatggaatcttgctctgtcactcgggctggagtgcagtggcacgatctctgctcactgcaacctccgcctcctgggttcaagcggttctcctgcctcagcctccggagtagctggggttacaggcgccggcgaccacgcccagctaatttttgtatttttagtagagacgggggtttcaccttgttggccaggctggtctcttaactcctgacctcaggtgatccgcccgcctcgaccccccaaagtgctgggattacaggcgtgagccaccgcgcccgacctaagagctctaaagtgttaatgtaatgtgggcagccgggtgtagaagtaaagtccctttctgtgtggtcctctgcatgtgactcttttttacccctgggaggtttccttagctgtaaagtgataccttcatcttattgcgtagaagagaaatgagtagaaatgatgcatggaatagtgcctggggaggtgttcagtaagtggtagctattgttagggagagataataaaaagaatttcacatattttcagaatgtttttaataggtaaatatggtttactcatatttaaaacacatgactttgaatattacatttttttatagatggtgtaagcttcatttaaactgatttatttgattgctatacattgtgatattgaacagaaagataagacttctgcagagaataaaaggtggggtgggggtgggagaggaaatgggagatttaggtcacaggatacaaagtagcagatattcaggatgtacaacttgagaactacagctaatgaaattgtattagagattttccttcaatgagtagattttagctgcttttgtcataaaaaagtaactacatgagatgatagatatgttgatttgctctactgtggtaactgtgttagtatctgtatgtttcccataacataaatctcaaatatacacaatttgcaaagatttatctgtgttgtagaattaaatacacccctcagactagattagagcatccttaaacatttctgcatatctatttgttttatgtaaatgaagttgaaacagaactacttaaatagttctgtaatggctccagatgaaaataaattatgatctggccaaataaatgggttgcagatctgttccttgccttttgggtttgtgtatggcccatagggccccacgtgatctgacactcacctttttttttcttctgagatgcagttttgctcttgttgcccaggctagagtgcagctgtgcgatctcggctcactgcaacctccgccctccagtttctagcgattctcctgcctcagcctcccgagtagctgggattacaggcgcccgccaccatgcctggctgatttttgtatttttagtagagtcggggtttcaccatgttggtcaggctggtctcgaactcctgacctcatgatccacccgcctcgacctcccaaagtgctgggattata

SEQ ID NO: 16929 - DNA, 1072 bp, Homo sapiens
tatgccagtatttgaatcaaagaggtcattctctgtctatagtgttcccatccatgtgttccaaatgggagcatagcatgaagtgatgcacatatttcaccacggtatcatgtacttcatggccagtgttttatctcagcagggaactacgccaagttgaaagatggggttgggtaaagtagattaggtgaagtagaacataaaattgaatagtacccaattaaagttcctcagtaagaaaaaaaatgtgtttttgtaggcaaaaagaacatttctaaagtctcaaggaatagcttcctaaagtgttgagtaaagaggctaaataaaatgagactagtttaatatagagagaaaaatacctttatggagtaaacgtgtacatgatgatcatgggttgtcagtgatttgtgaactgagagcagcaacaacattattttttaaaaatcttaaatcctctcaatggatggttaacaaatgctcaaagtccattactctttttattggctcttgcaggttttgtgttttatcatcagtgcttttagaaatgcaggccttaacttactgaactgaactttctgaaaacgtaatgtagcagtatcaatatacttttgggcataaaaatagtttcctaggtaaggggtgtgagatattcaaagaatacatgtggctaacaagtgtaatgagaaagttcatgtgtcacatgaaaatgatcatgtttgtgttgctacagcttttgtgggaaatttagtttaaaggcagctcttggtgtaccttagtatattttaatccacaattataccattgatactgagaggtgatacccgatgatcttctctataatattcttagagtaaaacaaaatctcaaaagtattaatagctcttctacccttgaaggtgactggtcctgggacagttagaatctttcaggtttacctctgttcagcagatacttcagtaggatacatagcttttcttccagtgaaacaaagttcatatcatccattgtttttcaagcacgtgacaccagcctcaaagtaaatgacatgaccagtggttgaacagtctaattt

SEQ ID NO: 16930 - DNA, 1053 bp, Homo sapiens
tctgtccgtgtgacaggccccaggactgggtgagatggtcaacgcgcgtgaccttataaataggatggcctgagaaagcacctcacctccccaatccacggccctagcgtaagcatgaggaaaacaccacacaaaccggagtagaagaacatcttgcggccgggcgcggtggctggtgcctgtagtcccagcactttgggaggccgaggcgggcgggtcacaaggtcaggagatctagaccatcctggctaacacgacgaaaccccatctctactaaaaatacaaaaaattatcccggtgtggtggcacgcacctgtagtaccagctactcgagaggctgaggcaggagagtctcttgaacccgggagacagaggttgcagtgagccgggatccgccactgcactcagcctgggcggcagagcaagactccatctcaaaaaaaaaaaaaaaaatcttgcagtacacctgaccagtcctctgtgaaggtcatggaatctgaaagcacgtcacaaccaggaggagcctaagaacacgtgaacaccagatgtaagacattagggaaaaacgaaggaaagctgaataccagctttagttagttttctaaaaagttgaggaaaactgtgttatttcaacccaggtcatgtggctcaaaggaattggtgaataggaaaataaacaagcgagtagccttttaaaaaaaacatgataagctgggtgcagtggctcacacctgtaatcccagctactcgggaggctgaggcaggagaattgcttgaacccaggagggggaggttgcagtgagccaaaattgtgccattgcactccagcccgagcgagaagaacaaggctctgtcttaaaaaaaaaaaaaaaaaagataaatgctgtttcttatacctatatactatgctttcattcatttatttattttttattatgatttttttttgagacggagtttcgctcttgttgcccaggctggagtgcaatggcgcgatcttggctcactgaacctctgcctcccgggttcaagcgattcgcctgccacagcctc

SEQ ID NO: 16931 - DNA, 1049 bp, Homo sapiens
agggaaactgatgcttcagaaagatgccccatctgtatcctgtggcactcaaagtaccccaggttgagatgagatgaggaagattcaagttgtcaagtccagtttcccaagatctcttgcacagaagatgagcaaatctcacttcaaagatcactgactgatgggcactctggtcccagaaccatggagaattcaaatatgaggtggataacttagaaaaaactgttaaagtctctctggagagtagaagcctgggagaaaaccaaaccaaacccattctcccatcagtgctgcgcccaagttgcctctttgagattggcgtggggtcacagggttgggacccaggtacttggagacgtgagcccaaagagcccagggaagtcaggcttggggcagtggtaggtgagggctgagtatggagtggggagccccaggagtcacctgcccaaagtcaccctggggtgactggtgagggcaggtgctggggcatccagttccttggaaacgtgagcccgaagggcccagggagatccgtttttggacaataggaggtgagggcagagtaccaagcagggagccccacgagtcaccggctgaaagtcaccctggggtgaccggtgagggcagcggccggactgctgaggggttggggctgacacaagattttggttgggggagcccagaggcactgggggggcccagccctgtgtgcctctggagtgacacggattctggcagctgttctgccatcagaggggacctggggctgggttggggttggggtgctgcaatccgatgcattttacctttctcttggccccagccaattttctgtgtcaggttttttctgacatcatggggtggggagggaggtggggttggggccacattggcgtgatccaggcgaggacagtgatatgcctccagtcacgtaccacgcagctatgtgactgagccacaggaggtgtcaccagggtctcactagaatgcagaaaaggggcgtggccttaatgatccaagcccattggtcaatgagaaagatgaaaggg

SEQ ID NO: 16932 - DNA, 1092 bp, Homo sapiens
tgctcctcctgcttccgcatctgctcctcctgctcccccatctgctcctcctgattcctcatctgctcctcctgctcccccatctgctcctcctgcttccgcatctgctcctcctgctcccacatctgctcctcctgctcccccatctgctcctcctgctcccccatctgctcctcctgctcccccatctgctcctcctgcttccccatctgctcctcctgctcccccatctgctcctcctgcttcctcatctgctcctcctgctcccccatctgctcctcctgcttccacatctgctcctcctgctcccgcatctgctcctcctgctcccccacctgctcctcctgcttccgcatctgctcctcctgcttccgcatctgctcctcctgcttcagcatctgctcctcctgctcccccacctgctcctcctgcttccgcatctgctcctcctgctcccccatctgctcctcctgctcccccatctgctcctcctgcttccgcatctgctcctcctgcttccgcatctgctcctcctgctcccccatctgctcctccttctcccccatctgctcctcctgcttctgcatctgctcctcctgctcccccatcttctcctcctgctccctcatctgctcctcctgctcccccacctgctcctcttgctcccgcacctgctcctcctgctccatctgctcctcctgcttccgcatctgctcctcctgcttttgcacctgctgctcctgcttccgcatctgctcctcctgctcccccatttgctcctcctgctcccccatttgctcctcctgcttccgcatctgctccttctgctcccccatttgctcctcctgcttctgcatctgctcctcctgcttccgcatctgctcctcctgctcccccatctgctcctcctgctcccccatctgctccttctgcttcagcatctgcttctcctgcttccgcatctgctcctcctgctcccccatctgctcctcctgctcccgcacctgctcctcctgctcccccatctgctcctcctgcttccgcatctgctcctcctgcttccgcatctgctcctcctgcttccgcatctgc

SEQ ID NO: 16933 - DNA, 1050 bp, Homo sapiens
gagcctgcatctgagcgagtgagccgaggcctggtggaattgccctgcggtctcggtccatcgcgtcctcctccagtgagagcccctgcccaagcacaccccacctgccacctgcctttacctttcctctgtggtccctgactctgaactcttcatgtaatgtggagttagtcagcactttatcgcttctagggaagcagaggtgagaatttaggggtggaccaagaaagctagatcctatctgtggagatccaggttgtgggaggaggtttcgtgacatttcttagctgttcctaaaacacgtgaagcttcacatggttgggcttggtaagaccatccaagaggctggggctgccaatataatttgtaattttgattattttttttagaagccgaacaaactgaaaggaacattcaccccactgcaatgatgtttaccagcactattaacttactgcagactctttgtctgtctgctggagttcatgctgagatcatgcagagtgaagccaccaagactttatgcggactgctgcgaatgttagtggaaagcggaacgacggacaagacatgtatggaatgagagatcgagggcccagggagtcagcgctgggggccgcacgcttgtcgtgtctgggtgtgcatgtgggtgggtgtggatgtgtgtggattcctttcctgtggctgctgtaacaaagtatacaaacttggggacttacacagtagaaattctcacggttctggtggctggaaggctgagatcaagggtagttccttctggggctgtgagggagaagctgcttcagggctctgccccagcttctggagtttactggtctctttagcgttcctcggcttgtagaggtgtcacccctatctctgccgtcatcttcacatggcattctccctgtgtgtgagtcgcctccaaatctccccttttcatgaggacatcattcaacctcatcaaactgattacatccgcagcgaccctatttccaaacaaggtcacctgccgaggtacggtaggggttagggcttcaacatacgaat

SEQ ID NO: 16934 - DNA, 1055 bp, Homo sapiens
gtattttgattattaactgaacacattttctaattttcatagtcattttttcttagaattttgggttacttataagtgtatcttgtaattttcaaatatgtggatgaatatttttattttctgtgtatacagagtcatttttattttattttgaatgaatttttgaaaacctatttgtaatttaactgcattgtagtcagcacacatgctctgtaagtttatttctttgaaatctgttgagatttactctatggcctggcatggcccgatttggtattcatgctgcctagacttttttttaaagcattctatatttaacagaatttgtatgtgtggtattagtttcagagctaggtatgtatttctcccattgtgattgtggatttgtttatttctgcttgtagttctttcacacagtttgttcttttcattttacctgttgattgatcaatggactgattctggtttctgtatatacagagtcattttttacaggtcagaactgtagaaataatgagaaagtgacatttgtacgcatagctgatttggagaaccataataacgatggaggcttctggactgtgattgacgggaaagtgtatgatataaaggacttccagacacagtcgttaacagaaaatagtattcttggtaagattacacttgttatttcctggttaaaagttacagcctgtatcattttaagcagagtatttggcttataaatgattcctttagttttgtgccagcccccgcatattttaatgtatctgtggctttggtgtctgtcttatcaacaaattcagcacattcgaagaatttcctttcattatgtatcttttgttttaatacttggaactcatttcaagttccgagttggcccaggcaaccctgggagacagtgggaggtcattatattctggtaaccctcacttttgagttaagagcctaacttatttcctactcactatttctcctgtagctcttcaggcaagctgaattgaactcatgttgctttttccctttttgtttcagctcagtttgcaggggaagac

SEQ ID NO: 16935 - DNA, 1051 bp, Homo sapiens
tcaaaagttgaaaagctactgggcacgtttaggtaagtcagctactaataaaaagctaattggagacagttgtagaaataaatactctcactttacaaatggaaagtcccattcatttttttctttttctttctttttttttttttaaatgaatagggtctctgtcacccaggttggaatgctgtggtgtgatcagagcttactgtaacctcaaactcctgggtgcaggtgaccgtcctgctgtagcctcctgagtagctgggattacaggcacgtgccatgcacttgggtaatttttacatttctgtagagacacggtcttaccatgttgcccaggctgatcttgaaatcttggcctcaagcagttcttctgtcttggcctcccaaagctctgggattacggcgtgggccaccacgccctgcctgtagtctccattcttctcagtgccacggctgtcttccagttgttcccaggctgctgcttcctcagtcaggatcctgtactgtttgtgatctggagagctcttctgggcttcacttttgcttgttcagagtctaactctctggagacctcctccagtgaggcttgctttattgccttagtaatgttccacctttaaggtgcccaaatagttttttgaatggtgcttaccatttatttgggtcatcagttcctaggaggcttccacagtgcatgtccttccaggagtccagtgtctaccttccaaaaaagaattccttgttactcagaaggacaaggtctggcctatcctcttccttcccagtgctacccaggtaataatcgaaaggtggtggtaattattcttgtttccatgtaaactgggcttcctctttggcttagtctttaaatgttccatcttttggctttttttttttaaatggtacctctgtaacactaatgtttctcaatctaggctgtaccgcagaacactgatgtgtggagcccagccagtctggggcgatcttagagtgctttcagggctgggcaggggtctcccctctctgcttgggtgttggcatcttctccagg

SEQ ID NO: 16936 - DNA, 1049 bp, Homo sapiens
aagacaaaattgacaaatggggtctaattaaactaaagagcttctgcacagcaaaagaaactaccatcagagtgaacagacaacctacagaatgggagaaaatttttgcaatctactcatctgacaaagggctaatatccagaatctacaaagaactcaaacaaatttacaagaaaaaaacaaacaaccccatcaaaaagtaggtgaaggatatgaacagacacgtctcaaaagaagacatttatgcagccaacagacacttgaaaaatgctcaccatcactggccatcagagaaatgcaaatcaaaaccacaataagataccatctcacaccagttagaatggtgatctgtaaaaagttaggaaacaacaggtgctgcagaggatgtggagaaataggaacatttttacactgttggtgggactgtaaactagttcaaccatcgagatgatcatatgatttttatccttcattctgttaaagtagtgtaacatttgttgatttgattatattgaactatcctgcatccgaggcatgaatctcacttggtcatgatgtatgccattataatgtgttgctgaattaggtttgctagtattttgctgagcatttttgcatctatatttatcaagggttttggcctgtaattttcctttctcaaagtgttctttttaaatctttgatatcaaggtaaaactggcctcttataatgaatttgaaagtgttttctcctcttcaatttttttggaagagcttaataaagagtggtattaatttttttaaatggttggcagtcttcaccagtgaagccatctgatcctgagcttttctttttgtgagatttttgaatattgattcaattcccttattcattattgatctgttcagatcttccatttcttcatgattcagtttttgtaggttgtatgtttctagggatttacccattgcaagttaactaatatgttggcatatagttttctcttaatttgtatgtctgtggtatcagttgtaatgtctcctctttcattttttattttatttgagtc

SEQ ID NO: 16937 - DNA, 1036 bp, Homo sapiens
gaaaaaaatgaacaaaactaagagttgctaagagttggttttttttttttttgaaagataaaatcaacaaattcttacctagactaggagaaaaaaagagtactcaaataagatcagaaatgaaagaggagacatttactactgatatcaccaaaatacaaaggattataagaaactactatgaagttatgcaccatcaaattggatgacctaaagaaatgaataaattcctagacatatacaacctacaaagagtgaatcatgaagaaacaaatctgaataagccaataacaagaaaagagattgagccagtaataaaaagtatcccaccaaaggaaagcccaggattaggcagcttcactactgaattttaccagacatttaaagaactaataaaaattctcaaacttttccaaaacaatgaagcagagggaatacttctaaattcattttacaagggtagtgttacactgttattaaagccagagaaagacactttaaggacagaaacttacaaagtaatatccctgatgaacatggatgcaaaaatcctcaacaatatattagcaaactggattcacgaatacaaagaatgattcaccatgatgaagtgggatttatccttaggatgcaagggtggttcaacatatgcacatcaaaaagtgtgatataccacataacaaaatggagggtgtaaatcaaatcatatgatcatctcaatggatgcagaaaaagcatttgacaaaattcaacctggtttcatggtaaaaactctcaacagattaggtatggaggccatgtacgaccctcatcactttttgacatagtactagaagtcctaaccagagcagttggacaagagaaagaaaaaaaaggcatcctaataggaaaggaataggttaaatcatctgtaattactgatgacataaccatatacaaaaaactgtaatgtctccaccagaacaaaactaaaacctggtagaactgatacacaaactcagtaaagttccgtaatacaaaatcatcttacagaaat

SEQ ID NO: 16938 - DNA, 1833 bp, Homo sapiens
tctcctcttgatactctttccacatttcagttaaggaattttcttacatctttttttcttctaataacctttgcctggagtgtaagtaaattcatgatagagactgtcatttttaaaaaaaaaaacaaaccattttgcctttcacatgttattacctccatctttctgttatcttgtcagtgttgccacctaaatgattgaaaatgaccgagcatgcagtagaatgtagtgaagtttcctatttcatccattttttgcataagtgcattggtatctgtatatccatctgcccaagcaccagttgttgaaaagactattatttccccatgaatggtcctggtacccttgtcaaagaacagttgaccataaatataagactttctggattctcagtcttactccattgccctatatgtctgtcgttataccagcaccgcactgtcttgatggctgtagcttggtagtaagtttagatttgggatgtgcaagtcctccattttttttttttttttccccaaaatcattttgtctgttttgggtcccttgcattgcatatgaatttttatatgatcattgtgtcaattcctgcaaaacagctgggatcttgatagggatttagttgaattggtagataaatttgagaaataactgctattttaatggtgttaggttttctgttccatgactgtgggatgtctttgcatttgcttaggtctttatttcagtgatgttttagagatttcagtgtgcaagtcttgacgtctttaatttttttctaagtattttactgatgccactttaattatatgattattttctaatttttatttttgtattcatcactggtgttagaaataaaattaatttttgtatattgattttgtatattgtagcttttctaaaattctttttttgtcacttagtattttttgcatatgagatcatgcatctgtgaacagaaatacttttacttcttcctttccagtctagattcctattatttcattttcttgccttagtgtgctggctagcacctccagtacaatattggatagaagtgacaagagcagacatctttttcttgttcctgattttaaggggaaagcattcagtctttcaccattgagtatgatgttagctagctgtgggtttgcttcaagttgaggaaattcttttattaaacctagtttactgagtgttttttaatcaaaaaaaaaaaaaggaggggctgtgggttttgttaaatgcttcttctgtatcaagattttcatgttgttttgtcctttattaatatgttgtattaatggacttttgtatattgaattaactttgcattcctgggataatctcagttgtccatgctacataaaccttgttctatgctgctggatttggtttgctagtattttgtttagaatgtttgcatctatattcataaggaatattggtctgtagttttcatattatatatctgtccagtttggggatgagagtcatactcctgacagaatgaattgggagctttccctgttcttaaacctactgaggtattttttaagtgaactacttggagaccttcacctgtgatcttcagatgctgggggacacagggatggtacctgactctgaaaaggctctcagggtaagacgtgtctgaactggcctgtggcagttaactaaagagtactcctaccaataatggagtcaagatgtatgtttcccataggccacgctggtcactgaaagagatgggctatgagccatcttgaaaactaccctgcacaaatggactgccggcctggagccaggcaccctgcagctgagtgccatata

SEQ ID NO: 16939 - DNA, 1037 bp, Homo sapiens
acaaaaagcatgtgaaagtgcacttaagatagagtttttattaattacttacttattacctagattttaaatagacaatccaaagtctccccttcgtgttgccatcatcttgttgaatcagccattttatcgaggcacgtgatcagtgttgcaacataatgaaaaagatggctactgtgccttgtgttacttaatcatacagtaagctgacctggaaatgaatgaaactattactcctaagaattacattgtatagccccacagattaaatttaattaattaattcaaaacatgttaaacgttactttcatgtactatggaaaagtacaagtaggtttacattactgatttccagaagtaagtagtttcccctttcctagtcttctgtgtatgtgatgttgttaatttcttttattgcattataaaataaaaggattatgtatttttaactaaggtgagacattgatatatccttttgctacaagctatagctaatgtgctgagcttgtgccttggtgattgattgattgattgactgattgttttaactgattactgtagatcaacctgatgatttgtttgtttgaaattggcaggaaaaatgcagctttcaaatcattggggggagaaaaaggatgtctttcaggattattttaattaatttttttcataattgagacagaactgtttgttatgtaccataatgctaaataaaactgtggcacttttcaccataatttaatttagtggaaaaagaagacaatgctttccatattgtgataaggtaacatggggtttttctgggccagcctttagaacactgttagggtacatacgctaccttgatgaaagggaccttcgtgcaactgtagtcatcttaaaggcttctcatccactgtgcttcttaatgtgtaattaaagtgaggagaaattaaatactctgagggcgttttatataataaattcgtgaagaaatgtgtgctcttcagttctcaagttttattattatggtatttattaaagttctacaattgtaa

SEQ ID NO: 16940 - DNA, 1039 bp, Homo sapiens
tattcccctttaatccgtgttattggaagagttttttctagtgctgaggcattggtacagagcttccggaaagttaaacaacacaccaaggaagaactgaaatctcttcaagcaaaagatgaagacaaagatgaagatgaaaaggaaaaagctgcatgttctgctgctgctatggaagaagactcagaagcatcttcctcaaggataggtgatagctcacagggagacaacaatttgcaaaaattaggccctgatgatgtgtctgtggatattgatgccattagaagggtctacaccagattgctctctaatgaaaaaattgaaactgcctttctcaatgcacttgtatatttgtcacctaacgtggaatgtgacttgacgtatcacaatgtatactctcgagatcctaattatctgaatttgttcattatcgtaatggagaatagaaatctccacagtcctgaatatctggaaatggctttgccattattttgcaaagcgatgagcaagctaccccttgcagcccaaggaaaactgatcagactgtggtctaaatacaatgcagaccagattcggagaatgatggagacatttcagcaacttattacttataaagtcataagcaatgaatttaacagtcgaaatctagtgaatgatgatgatgccattgttgctgcttcgaagtgcttgaaaatggtttactatgcaaatgtagtgggaggggaagtggacacaaatcacaatgaagaagatgatgaagagcccatccctgagtccagcgagctgacacttcaggaacttttgggagaagaaagaagaaacaagaaaggtcctcgagtggaccccctggaaactgaacttggtgttaaaaccctggattgtcgaaaaccacttatcccttttgaagagtttattaatgaaccactgaatgaggttctagaaatggataaagattatacttttttcaaagtagaaacagagaacaaattctcttttatgacatgtccctttatattgaatgctgtcacaaagaatttgg

SEQ ID NO: 16941 - DNA, 1025 bp, Homo sapiens
ggctcactgcaagctccgcctcccgggttcatgccattcttctgcatcagcctcccaagtagctgggactataggcgcccaccacggcgcccagctaatttttttttgtatttttagtagggacgtagtttcaccatgttagccaggatggtctcgatctcctgacctcatgatccgcctgcctcggcctcccaaagtgctgggattagaggcgtggcgtgagccactgcacccggccataaaacagtaattgaaggttaacctatatttcaaacaactgaaaatactgatttgttcatatttattttttcatgaaaatcgtcttgttctatatttaataggtttttgttcggttcatggtactaatgagttcacaattgtaggtttagtcttgaaataatctaaattcacttcatcccattgtaacagaccctacatcatactgaatatagttgtgtcacagatgtctcttacagtctatttctacaaggcctagaactatttaggataccgttgctcactcttacaaattttaacattaaaaataactttgagatggaatggagttttgcaacgtctcagaacaaagagactccacttacgagaaattactaagcagtggttcctagctttatagactaattatataagccttcagttgtttctattttatatctgttttttagattcctcacatgttcattctgctttaccttctgtataatataaaggtcactctacttacagtcacattttccttttaatctttccgtttttattttttattctttgctttgttcaccattagtttttatattgcatctcacagttcatgtttcttttttgtcatttctgattctaattgtaattctaatcttacttgtttggcgttcactgtcacatcttcactttctggcagctgtttctatggcttcatcttcttagtgcttgtattcattgcttatattccagttgtcttgtaaattcatttttttagtgaactaagccagacacggaaagacaga

SEQ ID NO: 16942 - DNA, 2104 bp, Homo sapiens
ttaatcactcggaggctgcttaattttttttttttttaattcttagtatattatctgtcttgattaggtaaagccaaagttgttataagactcaaggtactattgaccaaaatgcttcagaaactataacattacataaaagtacaaggaattattacattttctcaaatgaagagatcatttaagaaaaacaaaatgctggaaaatagtccttaaaaacttttctataataattactcttctgatgaattttacattgacacctaatttgaagctttgaatattattttttgaacaatgaattgggtttatatattaaagtgttctaaccaaaggtttgtttaatttattagagttattaagcctacgctcagatcaaggtagcagctagactggtgtgacaacctgtttttaatcagtgactcaaagctgtgatcaccctgatgtcaccgaatggccacagcttgtaaaaggtaattttgaattattttacagcctttaaaaggctgtcattgtaaagtgaaatacatactgtaaaaatgaagacaatgtatagttggcaggaatactgctaagaatagtgggcctgagagttgacctacttcatttaatctccttaaaatattttagtgtctttttttctcattaaaaatatcagtagccactatcaaagacctatctgtatgtataaacaggaaagtatttctcaaaaaaacttcaaggttttaaacattttactataaacattatagaaaacattaaaaatttcttaatatgcattttaaagtatgccttttatgtggtgaacgttttaactaaacatttctctagaagtttttataacattaataaaactagtatacttttctctcctagagagttacagtggaggtaaaaggagtggcttgcaggatggagaagctgcaccagtgttattggaagtgagccaccatttgaatttgctagctcatgctgcagtattcagattagtgggtgttttgtgatcatattttctgcgattcaaatcaagacctaaaattgattctcattctgagatttacattttattatccaatgttatttggttattgtttcagttttaaaatttctgacttgttattctgacacactttaggataacctaagtcaatagtttaatacaaaaatttccctttggttatatgttttgaattaggttatatgttctgcatttacaagcacatacaggattcttacttccagcaacttggcagtaaaagaataagtagactctttaggagccaaagtcaagcttgggaactgttgctaggtggtatatatttcatagtttatgtttgtttccaagacaaggtctcactccatcgcccaggctggagtgcagtggcacgatcacagttcactgcaactttgaccttctgggctcaagtgaccctcccacctcagcctcccaagttgctgggactaaaggcacccaccaccacacccggctaagagacgaggtttcatcatgttgcccaggttgaccttgaactcctgagctcaagtggtccttatgtcttgacctcccaaagtgctgagattacagacatgaactaccacacctggcatatgtcatagttttgagagtttgaattctaacctcgggactttggtaacttatttataatattctagaaatatactgttattaggatgagtagaaattcattcagacagaaactattataaattactgcaagaaaaatgtctgctagttctgcatatattcatttttctcttgattaaaaaacaatttccaatttgagtagaacaactttgctatgtttaatagacccaggacagatttattttaaggtaataatctttcaatccttcttcttctatactggattggtttaaattacttagcttgtcttatcaatggtttttaatagcctactttaatatatgtaaaaagtagtaattaatatgttacagtttggtggcaaacattttgatgccaaagttcacatattctcttgcttagggaacagaaattgggaagatagatgtagttatcatttgataatgtatttaaactctatcccatttcaggatctcaaaa

SEQ ID NO: 16943 - DNA, 1004 bp, Homo sapiens
gtaatcccagcactttgggaggccgaggcacacggatcacctgaggtcaggagttcgagaccagcctggccaacatggtgaaaccctgtctctactaaaaatacaaaaattagctaggcgtggtggcacacgtctgtaatcccagttacttgggaggctgaggcacgagaatcgcttgaacctgggaggcagaggttgcagtgagctgagatcacaccattgcactccagcctgggcaagcaagatttcatctcaaaaaagaaaagaaaagaaaagaaaatatgctgtttaagatcattcaaattcagtttctaagaagtgtaaagttttcctaattacttaagctgcttcattctcattcccttttgtaacacattttgccatctctgtaacatgttgaacatgtttaaagaacagagtgggagaataggaagttacgtggataaagtttggtaatcaaggtaggaatacatcctgcttcacagaatgggaatatttctgaaaagttgactgtagtattgaagaacacttaagtgtagtgtattagacgaactgagctaattttggtcttttatacacataaatcaagatttctgcatttcaaatcatgcatatttctttaaatttattgctcagtgtactgtatttcaaatattgtaaaaatgaaaagatcttgtggtcttatttaactcagtatgggataagtccttcccaccttcccattcttattccctcttttaggctgaatgaaaggctgggggagtgaatttaaaaatagatggatctcagctggagaatgggttggtcacgtatctcaactgatattaaataatttcttaaatcctggattgaagattataagaaaacagtaaatgtttgctctcagttcatttctttgttttgttttttcatgtacagttttaggcacttgtaactgctggatgcatgaactactttctagttctttcaggcctacttttagatatctgctgtggggacagtcc

SEQ ID NO: 16944 - DNA, 1003 bp, Homo sapiens
gcgcgcgctgcctgccgggatactcggcccgcccagccagtcctcccgtcttgcgccgcggccgcgagatccgtgtgtctcccaagatggtggcgctgggctcggggtgactacaggagacgacggggccttttcccttcgccaggacccgacacaccaggcttcgctcgctcgcgcacccctccgccgcgtagccatccgccagcgcgggcgcccgccatccgccgcctacttacgcttcacctctgccgacccggcgcgctcggctgcgggcggcggcgcctccttcggctcctcctcggaatagctcgcggcctgtagcccctggcaggagggcccctcagccccccggtgtggacaggcagcggcggctggcgacgaacgccgggatttcggcggccccggcgctccctttcccggcctcgttttccggataaggaagcgcgggtcccgcatgagccccggcggtggcggcagcgaaagagaacgaggcggtggcgggcggaggcggcgggcgagggcgactacgaccagtgaggcggccgccgcagcccaggcgcgggggcgacgacaggtcagtgttgccgcggcctgcgccaggcggcgctggctcccctccgtcactcggccggccttcggggcccgctgtggcgaggtcgacaccccccttccccgccccccgccgccgaggcgagtgtttgggggcgcgtggtccgaaggggctggtgccagaagtaggcccctggtggccgcggctgctgcagccgtaactgtcagtcctggctgagcgacggcgggagggttttgtcgcccgaggggacgcgagcgggcccggggcggggcgggacgtgcgaggcgtcgagatttgggcctcctaggagccaggctcttcgagccagccggggccccagacagggaagggcaggccctttccttcaaaggggagccctttctcggcgttttcaaggtttttggctctcttggggaagacatatttagccgt

SEQ ID NO: 16945 - DNA, 1042 bp, Homo sapiens
tggatattttccaacatttcttcaattattttccagtctttgaccagaatacattaattgcaaaataaaaatgagagggaaaaagtgatcctctttcaaaaagtaaattaaaaaagtaatagtagtagtagtaatagaatttgcagtagtagtggcaaaaacaataatgcataccatttcagtaacattgacaaagtacagaattacaaagtattaagtcactactttatacattttaaatttcttagcagaaaatattgttttaaaggaaggtcaggcccagagaggttggctagttgttcaggacgcacagcaaactcacctcccattccagggcttggctatgatgccttcctcgtgggcccgcaggcggcttgctcagctcagggaaccacagcagcctcagagttcacggcaggccttgacgctgtgcttgggaataatgtctagacttagttattttaattgttttcaaattgaggaaaagtaataggcgcacaaagtaacacaggagagaaggaggaaagagctgaaccacatgaaggcaagcatacaaaattagaagactaaaaatggcagaactggtaagccaggaggcgattttggggggtaaacattattgatagtacaggtagagttttagcgtcaagaaagagaatgggaaagcaaaaattaacaaaattaagtatttaaaaagggaatacagtagcagaggtaaagaagattaaagtcagacgattacatgctgataaaaaaaatacagatttcacacaatgggtgattttctggaaaaacatgtattattaaaattctagaaactagtggaaccaatggatactgtctttgggatctcccacgcccattctcctctctttgccattaaattcttcctcgctgtggaacacaagtctcaaagtcacccctgcagccacctcagctggactcggcccgcggccacggagcaccccccagctgggcgctgcctggagaacccacgcctctgcggagcacacggaggggcggcccattgatttccgtgcgc

SEQ ID NO: 16946 - DNA, 1056 bp, Homo sapiens
tatgtgtgcctgtgtatatggggggtgccagtgaagaagtggatggaagtgggtcagcccctcctgctggggtcaggagggtggaggggagagaggccctctgggccagttggaggcccttcccactaggctgggaccccggagagcctgcaccccatttctcatcctgatgtggagtagctgggtgacggtggtccaggagctgtggtggactctgccctttgctctcacactcctgaggcaatgccacccccagagacctgcagcacctgcccctttctccttgttcctctgcccagagaagcaccgagttctcagcagtgacccctcctgacccttgacacctgtgctgctctcttgccctctctatgtgagtgcggtaggacactggtgcaggagcctcctggggagggggcagaagggagtctctggggcatctgtagtgggcatgtggggaagtggggaggaggaggaaaggaggtctgtgatggaggaggggcatcttaggcatgaagcagctgctgggctggctggggtgagggccatggcacagccttagtattttacttctagtcaatgaaacaatagcagctgaagtcgcagtaagagacagatcctgttaatgtgcatggtatgcacccagggaatcctcacatcacatgtttctccctttaagcaaaagggggctctcttttgtttccttttgcaattggatattactgggaactttaaaaaaggaaagcaacttaagtgttttatattctgaacttggaatgaataataactaaaatgacagtcccatgggacaaggtggaatttatcatttcacaatgcagcttaacgtacaattggctttaattaatctttttttaatgaaagatatattttttaaaagttttgtttctctgtatgtcaatataaaaacctatcatgaactttttccctggagaaactgccacccctgtcattgcctgtgcatgagatcggtgagggaggccagcaccttccctgcgtctgcacctgtcagggatgccagtcccctccctgtgctcctga

SEQ ID NO: 16947 - DNA, 1025 bp, Homo sapiens
agtcccgcactccggtgtttaatagctagtgtgcctcaggcatcatgcagtggggagtctcgatgccttaggccgctggggttcatctggatggcctcatctgcccactggccttgccacccccatttgcaaggtaatatctacagagttgtgggccagcctgagtttctttcctgggaatgtggagctgggcctgaagaatctggatccagccacagaggaggcatgaacgcaggagtcggtgtgctaagagtcaccacatgctgagaaaggataggtcagcagtgcagggagctggggaaaggagggggaggcagtgtccaggcctgggttccgtctacacagagcaccagttgcatccctgacatggcacagttggctgtgggagtgtagtggttgagggccgtgcctctgcgcttgaagcttgaaccctagtcctactgtttactgctgtgtgtgtgtgtgtgtgtgtgtgggaagttccttgacttctctgtgccttgtaaaatgagactgcaatcaactgctgcctcataatactgttacaggcatggaatgcagtaactttcatttaggtaaaagcactcagaaaactgcctgatacacaactctgcaccttccctaacagggcgcctggggaagtttccactgtctcccagaacactgtgccgggcaaagggcaggccattgcttaccattttggtggactgtagcccagtttcctatggacctatgtaaaaaagctcctaatggtggctcatgggtagtccttgtatttacttgctcagttctagctggcattctctgcaatcttctcagctctcacacccagtcaatagtctggaattgagaagctgaaaatcattttatttccttagatatgatctaatttagaaggagaatctattgcacaaattcagatagtgcactgtgaagctaaagtagaaatggttcctcattatctccctggtccttttggtcctggccggctgccttccatggggactggggcatagtgggctggg

SEQ ID NO: 16948 - DNA, 1055 bp, Homo sapiens
ttaactggaaccctggggagcttcaccagccagctctggcctccaggatttgtacctgtcctgtcattcagggttggcaagaggagagctcaacatgtaccatgccctgctaatgcagtctagtgctgtgcttgaatatatattatttttgaaactgaaaaggtctttttaaaaattactcaacaggctgggcgcagtggctcacgcctgtaatcctagtactttgggagcccaaggtgggcagatcacgaggtcaagaggttgagaccatcctggtgaacatggtgaaacctcatctctactaaaaatacaaaaattagctgggcgtggtagcacacgcctgtaatcccagctactcgggaggctgaggcgagagaattgcttgaaccccaggcgtggaggttgcagtgagccgagatcacaccaccaaactccagcctgggtggcagagtgagactctgtctcaaaaaaaaaaaaaaattactcaacaaagccctttgcaaactctgaatgatggaactgtgctgtgatttttgtcatctttgagccccaccttatacatgccaggtagatatttggtctattactccttactattaaaagtatcccttagttccccagagatcagcagacactaggctcacatggatcccaaatgtcaaagcccaggttgtctaaccagaataccgatggcattacggggactgagggtcatcaccttgtgacaaattaaccatcacaggggctctgtgaaggaagaggatcagaggggtgacagtgctggctagggaggatttagaatgtctaggaacttcgatggccagcactgtctcatctcggcccccctaggactccgtgggtctatgtcttaacccatggggtaatgttagtttggctccctgttcttaaagtcactaatgaaaggctgcctctgttctacgagcctgctcactctggcttgtactctctctgtgtgtgtgtggccaggcataccggctctcccggggacgggtgtgggccatgatcatcatgctctgtctcatcgcggccgtcct

SEQ ID NO: 16949 - DNA, 1030 bp, Homo sapiens
tgcaagcctagttgccatttttctggcctcttgtatcagcttttttggtgcctcctgcccaaccttgaaagtcttgccatatattttagcattttgcttctggagtgccccacatctgaaccaatttctgttagccagtgtttgccgtgtcagtgacctacttgaacatcttggtgcacacagcccactctgttgtacttatggtgcagagtgccgtgagcccggcagctctcggcctctccaggctccaggtcgcctagctggaatccaatggcagagccgatgctgcagagaaccaggtgcctctgtggctcctctgcagctctgcccggctgggcatttgtcagggctgtgcacggcctccgggcatcgctgaggtgcatgctgtcctccagcaccacattctggggctgcagctccctgggggcagtgctgtgagttcaggcagctgtcctgtggcttgggtgccttcatctcttccttcctgatgtgtccaagtcatttggaagtttctctgcaacatttttcctgcacccttcctccttgttctttatttttttcctccttcacagacacacaaggaaagaaaaatatgtgttttttggcaagtagttggttatgttttaaatgagaaatgtagaattaaatccaaacccttccctgaccacactgccccagtgcccagctctggcggtcagctcttcatctcccacaccctcctctccttccacccctgaccccagagctccctttggcctcatataagtgggatcatgcagtatttgtctttctgtctcacttatttcacttagcattcaggttcgtccatgttgtcccaaattggcaggatttccttcctttttaagggtgaataatattctatttgtgtgtgtatgtgtgtgtgtgtgtgtgtgtttgtatgtatatgaaacatgttttctttattcattcatccattgtggacacttaggttgtttctgtatcttggctactgtgaataaggttgcaatgaacatggccgcacagatat

SEQ ID NO: 16950 - DNA, 1048 bp, Homo sapiens
ggataaatacaaccctccagaccacttcctccctgagtcctacacctgtttcttcttgctgaagctgcccaggtattcctgcaagcaggtgctggaggagaagctcaagtacgccatccacttctgcaagtccatagacacagatgactacgctcgcatcgcacttacaggagagccagccgccgacgacagcagcgacgattcagataacgaggatgtcgactcctttgcttcggactctacacaagattatttaacaggacactaagatggggaaacgtcctcgtgagatgagagcctgagccaggcagcagagcgctcgctgctgtgtagactgtaggctgcctggtgtgtctgatgagaagcgtccgtcctcgagccaggcgggaggagggagtggagagactgactggccgtgatgggaatgacagtgagaaggtccgcctgtgcgcgtggaacactgtggacgctcgacttccaagggtcttctcacccgtaatgctgcattacatgtaggactgtgtttactaaagtgtgtaaatgtttatataaataccaaattgcagcatccccaaaatgaataaagcctttttacttgtgggtgcaatcgattttttttctttctcctttctttcaagtgtcgtgagtcgtcttgattgtatattggaaataactgtgtaacaaatcgtattataaatatttcaattaattttactctgaatttgtttattaaaagacttttgaacatgaaatgattagtattacttgaatgcatccagaggatatttaaaccaaaatgaaaaaccagaaggccatttggtgtcccccctcccaggtgtccccttgtagcatatgcattatgtcatctgaattgaggcctttctgtgaacagcatcataacttctatcatggaaagtgtactatatataatgtttgtgtcatgtatatgcctaaattttaattatctataaataaaacatctgacataaaagtgtaggctgagctttcttaaccagtacaaccaaaaaatcaattagttcttgatata

SEQ ID NO: 16951 - DNA, 1044 bp, Homo sapiens
gctcctcgttaaagcctttggtgaattatataagcatgcaccctttaatcatttcattgagggaagaggctcatggatgaatgagcaacttctgtggcctgtagtggaaggacattgtagttcttgatccagaactttttatttgacttatttaattcttttaaattttgagacaaatcacagttggaagcaaaccagttggaagtacattacctagaacttgcttatcccagtccacatgagagtgagttgctgtcctgctgccgcgtcctgagcttttcagtgtgtttcccacaaacagggaggctcgtcctgccagccagttcacactcccccaccccgcctgacgcccatgcccatttgcagcacattgcctgccagtcagctggcaagctgtaccctctgtcctgtgacactctctcagtgcctggcatcatcgtttcacttcctcgtcttcctgggcttcttgcaacttgacaccagttattttgtagcacattcttctgtttggattttttgcgatgtttctgcgtagattcgggttgtgtgtctttgatcgtcacagttcatccttgcaggtgacatgcagtttgtctgcttgctgatgatgctcactacagttgcttggttacattgtctgccatgcttttcactgcgaacattctttataattaacaagtatttagtagggacatcctgaatctatttaaatattcctttctcatgcagctttgaatcaattcatgtatttgttttatctgagtgggaatcatggatcctaatgtattcattggggtatatagtctatttattttgatgctctagttgtgctctatttggctggctctgccccctttttgtgtgtccccgttgtctgggagtacttccttgctctggcagaagaagatgattagcctccacttgttcccgccatgccccacgcctcgacctggccatttctccaaggagccctggcatctgtggaggagaatggccttgagaagacaaggtctggatgatgggtgtgctcattgctattgaggc

SEQ ID NO: 16952 - DNA, 1024 bp, Homo sapiens
tgtacaggaaggagataggaagtggtgaacttttgagtttaggtctgaatgattcttcttgattgatttaacaattaactgattaggaaggtgtagattgagaggtatttaatacactgaaaaatgtttaagaataaaaatgtgtttccattatatttggtgacttttttgcagtccgtgtgaccgccctcgtgtcatcgagtctctgagaggaattgaagtggtcgatgttgctgctggcggagcccacagcgcctgtgtcacagcagccggggacctctacacatggggcaaaggccgctacggccggctggggcacagcgacagtgaggaccagctgaagccgaagctggtgaggaggcgccgtgtgcagaggccggaggctgcatgctcctcactgctgctgtcagatgggggcggtttgccaccgttgttatgaaaaatgctttggcttctagaaggcccactgtatttttgggtgcaagaagtgaataaacagccttcatggtgatgtagggttggctcatcaaagacgctgatacctcctcctgcggtttagatgcatgtagttcaaatagatgaaggtgctttctcttttgtcttataggattttagaaatcacctctttgtaaaggcttaaaacaggtacccccataaaaaaagaatggcagtgttgtgaagccagtcctgtggcaagccttcttgtgttgtgcttggccaacccaagtcccttttctctgaaggtggaggcgctgcagggccaccgtgtggttgacatcgcctgtggcagtggagatgcccagaccctctgcctcacagatgacgacactgtctggtcctggggggacggggactacggcaagctcggccggggaggcagcgatggctgtaaagtgcctatgaaggtatttcccattctttccctgcccagtgctctcccagctcaccgcagtcgggcccccagggcccctctgggaaaacacagcctcagagccaccattactgtcccccgtgtgtgctcctt

SEQ ID NO: 16953 - DNA, 1049 bp, Homo sapiens
taaaatgtatttgtgttcttttatgggtatgttttgtggctgttattgtcagagttttgcatatagtagataattaaattgttttttatttttcttggtgttaattgtagttggtattctacacaaaaatggaagagcttccagcaagaagaccttattttcacaatatgttttctgaatttggaatttctaatagtcatgtttttatttcatttctagaactttgatagagcatgtataaaggcataaacttatattcctgagatttttaactttaaattttatttctatgtggtaaaaatgtctaaagcatggattaggtttatgaattagtaaatttaggggatattgagattaaaaactgatgttactattgctttttcttttcttagctgtatgccactgggtatggtgcaggtggcagactaggcattggagggacagagtcggtgtccaccccaacattgcttgaatccattcagcatgtgtttattaagaaagtagctgtgaactctggaggaaagcactgccttgccctgtcttcagaaggagaagtttactcttggggtgaggcagaagatgggaagttggggcatggcaacagaaggtatgatgtgaaaaaattatttcaacattctatttgtctttgtttttgtttgttttaatgctgctacaatctattggcgctttgtttttcaaggcaacatttacaatactctcaaactaaataatgttaatgactcatttggcagaaatagttttatgttccaatacgaaggcttacccgtatgattcctctgttgagagggaaaaaaaagtcaattctgtgtttttgatgacaagtactaagtaagtgtttttttgtccttctcccttaaatcatccactgaatcacgtttggcattttgtgtaacgtgcgtgatactaaaactgcaaatacagaggaaatagcaggggtgaggaagaaagaacgcacaattgacaccatttgtaaaagaatgaaccaaactcacaagtattaaaaaattaatgagaactaccagccagat

SEQ ID NO: 16954 - DNA, 1058 bp, Homo sapiens
ggtatggagcattctagtacaatttctagatttgtgacccttggggaataaaatgttgctttagtagtctaaacctctaaatcgttgagaggagttggggagtttcacataagaataaggaggccttggaccgggcgcggtggctcatgcgtgtaatgccaccactttgggaggctgaggtgggcggatcacgaggtcaggagatcgagaccatcctggctaacacggtgaaatcctgactctactaaaaatacaaaaaattagatgggcgtggtggtgggcacctgtagtcccagctacttgggaggctgaggcaggagaatcgcttgaacctgggacgtggaggttggagtgagctgagatcccgccactacactccagcctggtgacagagcgagactccatctcaaaaaaaataaataaatgaataaaaataaggaggcctttgtcccatccagacttctcgtatgttgcagtgtatactgagttcaagttggactttgatattctgaaaatctgtctcgacagctgtgaacataggattgtgttgattggactttacaatgaggctaactgattggcctcccctttattttgctgactaaagtagtcccttttgatcctacccatgggacgagacaggcagcgtttgtgggccagagaggggctatttctctggaagcggatgtactgaaatcaagaccaaacattctgagatgagtcttcaaactcctcttttttatttcagtgtttatgttcttttagcttttttcctacttgagaattttgataagctttttttttttagtttttttagaagagttagtaccaacataataaaacatttgacggtagaaacaaatggtcagcctccccggcacctggattcctgcgatagaatactgttctgttgtttcttagagttttacaggtagtgctcttgctgctttggtgaaaggtcttccagaagctttgcaaaggcagtttgaatatgaagatcctattgtgaggggtggcaaacagctgctccacagcccattctttaaggtaatgtttca

SEQ ID NO: 16955 - DNA, 1030 bp, Homo sapiens
ttccttttatttattttttatattttatttatgtatttatttgtttagagataggatcttgctctgtcatccaggctggagtgcagtagtgcaattatagctcactgtagcctcgaattcctgggctcaagtgatcctcctgcctcagcctcctgagtagctaggagtacagacacatgccaccttgcctggctaatatgctgattccttctactcaaattcaaaagtatggggtctgtacttcttctgttacatctgtctctcctttcttccatatcaaatcctggttccaagagtgtttgataaaatatctcatgatttttcatttgctttacataaccacatttcatacacgacagacttaggatataatttcaatactgccaacatcagtataattactgaaattcttaaaaatcttagaatatgccctaattttctcgaatttattaaaataattatactgcatctacaagagcataatagctgttacatactatactttctttcagtcttcaagtcttagttttactgactggtcctcgtggggtctgaagtggactctagtgaattcctcattagtccctgagatcagacttgtccatgagagtttttgtccttcaaatttgaaaggtagtttttctggatattaaagccttggatcatgtctttttcctctgtgaaagtatgataatgataacatcttttccccttagaagtcacgtgtgttttttcagtaattttactagaatatacgttcgtgtggccattctcggtgatgttctcggttagttagaagccgcgtgtgttttttctgtaatttcactagaatgtctgtgtggccgttgttggtgatgttcttggttaggagccgtgtgtgtttttttggtaatttcactagaatgtacgttcgtgtggccattctcggtgatgttcttggttagaagccgcgtgtgtttttttcggtgatttcactagagtatacgttcatgtggctgttctcggtgatattctcggttagaagctgcgt

SEQ ID NO: 16956 - DNA, 1047 bp, Homo sapiens
tctgtaggactttgtcattgtggaaatgttctggaccggagccatctgggaccattggcaccagccacatatggccactgcacactgaaatatggctagtgcacctgaggaactgaaggttttaaaacactcaacttgaggcacatgtggctagtagctgctgaattggtctgtaggtctgcagtataaagtgagcgtcttactagtatgtcttagaaataggactgatcagtcgtaaaggccgtgggcttccttaagaactcttctttatcagcagccatgctctgccctgccagggagcctgagatgtccttcctggctgcagacacttcatccgtttctctgggtgcctactttgtgtggaggaaagtcttactctgtcacttagtttaggcagtttctgtgcctattaggatttttggctttagttagaagaatattctctttaaaggaacttctgaagtttttaagtagaattatatttaaaaaaaaaatcattaaatgtaagttcatactcctttatctgaaattctgaaacgttaaagctctgatggtcagaaattttagtaacttacatgatcaccaaaacgataaagtacttaagtagagttgagcagtcttgaaagcgcagcagagtttggtagatattttaggggcttgttatttcttcatctgctattcatgaagaactaaaaagctgtaggtatccttttttctagttttttgagacaagttacttggcataattctaagagatgaaatcaaggtgaattaccataagcactattattatttttcataagtttattgcatttgtgagagggaagggtatgaatgagaactttgatttaaaataatgctgagcggggggcggtgccaagatggctgaataggaacagctccagtctacagctcccagtgtgagcaacgcagaagatgggtgatttctgcatttccaactgagataccaggttcatctcactggggcttgtcggacagcgggtgcaggacagtgggtgcagtgcaccgagcatgagctgaagcagg

SEQ ID NO: 16957 - DNA, 1054 bp, Homo sapiens
ggcaggagcaaggtctgtttcccaaaagggagaggaaccttgttcctaaatcagagtggtgtggtttccagggtccactggttgggtcattttccccttaaggggaacatgtggggctgtccttcccccagcctgtttatgtttgtggaaagagttgcactggatttgctgaggtccagaaagcaggagagaaaagcggcacttccctggctctcgatcttcctctggggagccagactctgcctggggaatgagaagggcttgacacactcctgctctgcacagggtcacagcggttcccatgctgggtcggaagcggtgggagtccctggcactgacaagggcctttcccgtttccacaagctcagccccagtgctgccctccaggaggcttctgtgtgccaacaagcagggtgggggcggccatcctgggcaaggcacctccatagggtgggagctgggggtgcagtgatgctgggaattggctcatagcaaacaaggagaggagttgaaggatcaagatgtggtatgtttaggctgacatggcaggaatgggaagtacacgagtggtaatgagaagacttttatgtatgatgttttcaatgaacccaaggagagagagagactggatagtgtgttaatgccagtgagttgcttgaaataagattccaggaaagaattatggagaggatctagacaaaatgtatacaattagagaatacaaatttagtttgtaaacgattccctagcgtatcttatgggtagattatacaggatgcagcttcattccaaaactccccctgtagtatctgcttatgatccaaacttggtcccagtaataaattgtcatttctttatagcttaagtcatccctttttgataaatgccattggtaatacaacagttaattggtcttgaaaacatagtacatggcttggtggagattttaggggccgtcgtttcttaatctgtttcttaaggtcttaaacaccttcaggtttcttactcgttggtattcatgtgttctctgagtttatgggtaaactggtgactc

SEQ ID NO: 16958 - DNA, 1018 bp, Homo sapiens
ttgatcctgaaaaagttaacatgtgtttcttgtaaaagcttattttattaatatgcaaaagagcaggtgcctggactggctgtggatggtgtgtcaggccttagtgccaatgtcatgacccgaggcagcttgagaaagatgtataccagataggactttggataggtgtttgcagtagtgtgtcttattttcagtctctttatatgaaaacctacaacagtaacttaaatatcataaaatatgtattaaggtattaaggtttttcccagctggcttaataagttaatttgaattaatggtgtatgattttgaatacaagtttgaagaccttgggtgctgtgtgtgatgtcattgagctggctgtgaaagatgtgagacaatgagtgtcttcttgtatagcattgtcagaccataaccgtattgtaactctccaccatgggccttctctcaggggaaagggggattacttcagattgggccacggctctgacgtgcacgtgcggaaaccacaggtggtggaagggctgagagggaagaagatcgtgcatgtggctgtcggggccctgcactgcctggcggtcacggactcggggcaggtaaggctgcaggtggcctgggggtggcgtgccatcctgacttgggggacgtgggggtcatgacacggccttcgtcctgttgaaatcacagctgttgatgaaatcagctgagtcttactgcttggagaaccatgagggcgggtcctgttccttttgcccactggtgtatctgcctgctttgcagcaggggttgggggcggggtcctcagaaaagaggcgttcccactctgaagtccacgtgaaaagtgtgtggaaagactgttattcttgaagatgctcctagtgcaagatattagcaagactttcctttagagaattggtaactggcgaggagggatccatgcctcattttagagacagagctagtgcctgacaagtgttacactctcttctgcttggagaagcatacgctatgactggct

SEQ ID NO: 16959 - DNA, 1011 bp, Homo sapiens
gcaacaaaaatatctgtacatatttagtacacgtgcaataaaaaatattttcaatccatgggtggttgaattcatggacgtggaacctatggatacagaggaccaactgtattttatttttcactttctactatggaactgttcagatgtacccacatagagtgaatagcttcatgaaccctcatgtccctggtacagcttccatagttaccagcagctgtctacgtttttctgtctttatcctcccattcccccaactctggtttaaagtcaatcacagtgtatcatttcattcttaaaatactccagtgtgaatctctaagggataaccaatgcctttggttaatgtaaccatacatattagtagtacagtcatgcattacttaatgatggggatatattctgagaaagttttggttgggtgattttgtcattgttggaaaatgatagagtgtacttaacacaaaggtagatggtgtagcctactacacactcaggctatatggtatagcctgttgcttctaggctacaacatggaactgtactgaatatggtaggcagttgtaactcagtggcatgtgtgtatttaaacatcgaaaaggtacggtaaaaatacattgtaaaagataaaacatggaacacctgcatagggcacttaccatgaataatggagtttgcaggactggaagttgctctgggcgagtcagtgagagagtggtgagtgaacgtgaaggccaggacatcactgcatgttactgtagactttagaaacactatatgcttaggtgactctatgcaaaatatttttctttctttaataataaattatttgtaactttatgaacttttcactttttaaaaaactttttgactcttgtaataatacttagcttaaaacacaaacacagctctgcacaaaatgttttctttacattcttatgctgtaagcttttttctatctttaacatttattcttttactttttaacgtgtttgttaaaaactaagaccc

SEQ ID NO: 16960 - DNA, 1055 bp, Homo sapiens
tccagaggacttactcctgtacatgcttgaggtttttttctattaaagcaaaattttaagagtttctgaaagtaaccataaaactttgagtgcttgaggttgcttttctttttattttttaaatgttttatgctgaataacctctcttttctttttcttttttttttccgtttggttagcctcattagaaagaaggctgctgggctggaatcagcagctacgataagaaccaaggtgtttgtgtggggcctgaatgacaaggaccagctgggcgggctgaaaggctccaaggtacggcctgctccctgggacccagcagggtggggcactcggcagcagccacacctcgtgaagtttctataataactttactctctatatgttgtattgtttctttacacgaactaaaagacattatcaaattacccctcagaagcgtctctccttgaaaaatttcactttaggtataattgtcttattgcggtcttgtaaactagaaaatgaacttttgaaaagatttgacaagtgcataaatgaaaattatagactgtcaataggtgtatcttgccttccctacaataaacatttttgactatcatgaacaaaataatgtgtaaaaaggctgtagtggcccacagatgagcaaattgttgtctctgtcctccaggtgcttcgcgcctgagattcttcagggtgaagtagcttgcacagagagagaacgctttgcgagcacagagaaacaagcagaatgcacatgtgtgcgcatacacacttgccttattctctgcagggcttgttgtgggtggagagcgccatgatctcattcaccttgtcagtaaaccatgaagcttgcacgggaagccgtgccatagcctctgtgttcacaacgtccttcatcccctaggtacttggatgagaggttaatttgtattttgagttgcttaggagaaaaagaccatattttgaaaagaataggtgtaagaaatgatgcatttgaattggagttgaattcagcattccttgtattacttagtgtctcctggctgaggagccac

SEQ ID NO: 16961 - DNA, 1063 bp, Homo sapiens
gttttctaaacttttgttcctcagttcttcattccagatatttttactttctcttcagctgagttcagtgtgttctaaacttactcattaagttcttaattttaattattcaatttatcagttctagtctttctgttttattttcagtagtttttggttctctgctgaaatattatctttttgaacacagtaagcatagttattatattaaagtctgtgtcttctaactccaatatatggagcctttgtgggtctgtttctgtcctatcatttctggtaatttttagtcatattttcttgccttttcatgtgtcattatgtactggacattgtatttaaaaagttatttcttgactcattttgaggctaagatgttattgttctccaaggaatggaggagagaaggttgttctgtgagctacttggtaaaggttagtgactatctgggcttaccttaatcagcattcattgattgagatgattttatgctgagttgcaatctgttggaaaaaaaaaaagggaaacccaaaaacccttcatagttcactctgacttttggggtatttcctgttggggttccaagtgtgggttgtatttctgtagcatcctcagccttcctggtctttctggaccccattcctttcccttcccttcacgaggctgtcaaaatgctatgtgtcgtctcagggactttgcttggaacctggtgatgccatcagggaacagcagcctctgatccgtggtgtgcgtcatcttgacacctccattcgcctcgggtcttcctgcggttctgaccttgtaattctttattttctcctgaattctgatagttcgaagagaatttatttatttttgagtgttttgtctggctttactagttgtctttgatggggaatgccagttgaattccagatttgccattaatggaagtggaagcactttacaatttactttttgccttgtatttataaaagcatttttaataagaatggtttttgtgagtgctgttattgaacttttcccacagcttattttgttttctttggaaatatattaatctgct

SEQ ID NO: 16962 - DNA, 1140 bp, Homo sapiens
tatcattgtcgactttccccagcagtctcactggactgggttgctatcagaaatggagttggtacccagtattcatcctggggttacgtgagttatttttatggttgctagatttgctttgggacgaatggttttctgttgaattaagtttaataaatgacctttcttaactcagttgctattttacaaataggtgtgatggatgtcagatgtttcctatcaatggatccagattcaaatgcagaaactgtgatgactttgatttttgtgaaacgtgtttcaagaccaaaaaacacaataccaggcatacatttggcagaataaatgaaccaggtatggcagaatgtttatattctctcttccaccaaatattaatgaaatacttattgtggaccacagtgtattggaatttgttattttaaggttcctatgtatacagtaattctgtagagtgagtacagtgagacggaagtgacggtcctacccgctgatgactggctggctttttaaaaaaatcaggatggggtgtcggggaagaattagaataactaggcttgtttgcttgtttttccataaagaaacattaaaagaatctcaagaaactagtaagtgtttagttgcatggcatgtggaattggttagatggagagtgagttttttaatttatataccttttattgtatttgtcattgtggcaaaatatatataacttaaaattagccacttaatcattttctaagtttataattcagggtattaagtaccttaagtacagtgttgcacaaccatcacaactgtctcttaccaaaacttttcaccactccgatcagaaactctgtacccattaagcaatttaactgccctacttccccttaccccaaccctggtaaccttgaatctaactttggtctctatgaatatgaccactccagacatctcatctaggtgaaaccatataagatttatccttttgtgtttagcgtaatgtatttaagcttcatccgtattgtagcatgtgtcagaacgtcatcctttttaatggctaaataatattccactgtatgcatatatcactttttttctttgtgagacagagtctcagtctgtcgcccaggctggactgcagtggcacgatcttgg

SEQ ID NO: 16963 - DNA, 1048 bp, Homo sapiens
caacatagaggattagagatgttcattccaaaatctttcttgctgtgtaatacattaaaaatctggacaaaatatcagagacaaaaataaaactatcagtactcagtttggcaatcagaaattaccctaacagaaaccctcagatagcagggcccttctgggagcaagggtccagatgaggcagccactgccttggacaggtgggaggcctcccccagtcctagaacgagctggaaagatggtgggggtgcaaagggagaaagcaagaaacgggtgtgggcaggaagggaggaggttggccatgagctcttctgaactccagcttcttctcaggtctgggaacctccaaggtgaaggttcattttaaagggcctggttgtgtttccagtctccctggcagagatcaaaagaagacgctgagcaacttgagagcagtcatgctgggagatgccgagtgtgaacaactggaaggccgtgtagagttgtccttcaggaactgagaaggactgttgtacaaaaagagaccttccgctgttttgtctccatggattctgatggagagttgttgttctcttctttttcatgaaatgtcttttttctgtggttgcttttcgtattttctattatctttggttttctgcagtttccctaagctgggctcatgtatacaatggtggcacaccccgcccaccccaccgtcctccttgaaatttgctgaagctgcttgcatctttggcttgatttttgttcccctaccaaatttggaaacttttgactattgttttttccccctgccttgctctttttgttcttttctggaaatactattatacatctgttacactgttagtgagtttccttttacgattttaatagaaagtcttctccttgttagtagcttggttagtttgtcttgatctgtttgaaaggtcaagatgctttgctttgttgggcctaatctgttgttatatccatccaagacatactttattttatatttctcacatctcttatttccatttggctctcatttaatagttttatatct

SEQ ID NO: 16964 - DNA, 1044 bp, Homo sapiens
gtgttttaattgggttttttgtcttgttgggttttaggagttaattatatattctgcatagatattatttgcaatctgttttgcattctttcggttgctgtttcactcttgatagcctcctttgatgcacagaagtattcgattttgatcaagtccaacttacctatttttttccttttgttgcctgcactgcttttggtgtcctattcaagacacgtcaccaaattcagtgtcatgaagattttccacagtgttttcttctaagaattttatagttttagcacttatttttaggtcttttatccattttgagttagtttttgtgtgtggcgtaaggtaagggtctacctccgttctttacatgtgcatgtctggatttcccagtaccatgcattgaaaaggctcttctttccccattgagtggtcttggctcccatgtcaaaaatcgtatgaccaaatacgtgatggattgtttttggggtctccattctattccatttttctgtatgtttgtctgtccagtgccatactctttattattgccttcttctttcttagggtttaatctgctatttttcttgctttttgagaaatgaatacttattagcactgtgatgtttttgtaatctgtttattatgaaaattttctaacatagataaaagtagaaaaatagtaaaatgaatctagttttaacaggtgagtatgttcccctctcatacttctctgtatttttgattgattggattatttttattttattttattttatttttttaatttttgtttttagacggagtctcgctctttcgcccaggcgggagtgtagtgacgtgatctcagctcactgcaagctctgtctcccaggttcatgccattctcctgcctcagcctcccgagtagctgggactacaggcgcctgccaccacgcccggctaattttttgtatttttagtagagatggggtttcaccgtgttagccaggatggtctccatctcctgaccttgtgatctgcccaccttggcctcccaaagtgctgggatta

SEQ ID NO: 16965 - DNA, 1028 bp, Homo sapiens
cctgagcacttcttacaggcattgccttgtagtgcatcccaaattggaatgagacttatcttctcaatgttttgagttttgggtttttgaatctaagtcaccatgctttctatggttctagcttcctggactcagaatcaatcaaaatcagggttaaactttgatttatatgaaatctcaagctggatgggctttttttcttctcgtgttttagaccatcatccccctaacatgggagcttaaaacaagaggtagcagttgtcctgaggaaaacagccccaggacattgaacatggttttttatttttaaaacagtcaatactttgagcaccattcttccccttttgttaaggagtgagcttagtcctgtgttattttgtctctctactatcatactgttgaggggcattcatttgatcagatcagcagcttactcactgtaaagcctcttgaaattgtgataagtaacacatacacaaaagtacctagtagatacctgtaattgatcatagagagaactgtgtcacagccattcaaaccttagcctggatggtggcaggaccctcccaaactcggactcatttctctgaaaagtgcccttccccaggctgtgtggtcatcgccaccttacttctgatcatcttatactaagttcttgtccctacccaacatcattttaattctgtctgttctcggacttcatataagtggaactagacggtacgtaccttttggtttctgagcttcaccccgttattgagttctttcatttttattgccatatgtagtatacttttgtttgaatatacaacaacctattcattctacttgttgatggaaatgtaagttgtttccaggtttaggttaaagtaaatatgttacctttttttttgaggcaagggtcttgctgtgtcatccaggctggaatgcaatggtgcaatcatggctcactgtagccttgacctccccggctcaagcagatccttccacctgcgtgggactgcaagcatgcgccaccatgcctggct

SEQ ID NO: 16966 - DNA, 1031 bp, Homo sapiens
caaggcagatgtggcaatgcaggcgagtcttgtcttgaagagtagtatcacattgctgtttgaaatgcagctttggacaaaaaataatgacactgtgtttgttctttctagagggtcagatatttctatattagcctcatcagtattttaaatttcgttgtcttaatgtttacattccttaaacattgggaatgtggaagtattcctttggaagcaagatcttctgcagtttggaccactgcgcgcagctccataggcgcacattagtgaagcacgagggcatcattatctcttttgagccttccgtgcccttctgctccgttttggctgaggttgcgcttgttgcagatacattggacacacttggggagggaagccagctgcaggtcatcatgtatgatctgtgtttgtgatattaatttgtcatgatttaccccatcccattttctttttagtagaaatatcttgtttaattttgtaatcctcttctttcctgtatagaaacattgcttctcagactgtagccagattgaaagatgttgcccgtcggatttcatcatgtctggactttgagcaacacagtcgtgaaagatctgcttcattggatttgttactgcgttttcaacgtttgcttattagtaaactttatccaggagaaagtattggtcagacctcagatatttctagtaagttgcttaaaatgtgaaagtgtcttgtatgtgatcggggctcgttactttaggcttttcgacgtgtccatcctatatgcccagatgtgtagttgttatactactaaatgcaccaattttggggcttcattttgcatccacttttttgagttggacctttctataatagcctcgttaatatttttaattttgttgccttaatatttaaattctttagacatcagtaatagcatcctgtatgttcagtttagtcttacagaagatttatcagatttgttccatgtgctatggaatgctggagactggcatgatgtaggaagtaaacagtgacagcctattcat

SEQ ID NO: 16967 - DNA, 1048 bp, Homo sapiens
cttcttgtttatattcccctccattagtataggaaagctacgacaatcattagtatagaaatcatttactttgagggtatttaaattactgttgagaaacaccttttttgttgctgatgttaacttatggtaagttcctaggatagaatttttccccttactgcagtgtggtttttcagctgaattattttatatactgacatttctgcgaaacaccctttgtgttggccatgttagatttaccaggaaggaaaaatagaatattttgctaagtgtttaaatagaaacaatgttttaaatatcagttatatctaactgagagaacaatagatttcttcttaggaaaccttcctcactgaagagtgtgctatgcattgttaaatctcggatgggagaatatgatctaatagttaattaaaagcaccttgtttctttctgactgaaaatctgaatgaggaggagaaaaaaaaacagatcctttttgtatcctagtattatgatctttgtagactgtgggtcctaacgaattgtagctgacaaaatacagcagttttaataacacacccaaagcaaatgaattgtgcttaatattaaagcaaagcagattatcctcaagaagttaatgttaaaagctgtctgacctgaatggcctaggaaatatctttcttgcagcggaagtcataggcttgaagctgcatctgcatccctcttcccttgtagggaagaaggtgattgatgtggctgcaggctccacccactgcctggctctgactgaggacagcgaggtccacagctgggggagcaacgaccagtgccagcactttgacaccttgcgcgtgaccaagccagaacctgcagcattgccaggactggacaccaaacacatagtgggaattgcctgtgggcctgcccaggtactgaatatagagcttgatttggtattttggaggattttggtttccagttgttcattaccagtatgtagaaaataccactgagttttgtttgttgttcttgtgtcctgcagttgtgctaaactcatttatta

SEQ ID NO: 16968 - DNA, 1454 bp, Homo sapiens
caagacatttaaaattccttatacatttctttgattcttaaagagaaaacttttcctttacaaaagacatttgatgaaagttgttaaacaacaaaacgaaaaatccacttgtgatcctgtcacttgaagaaaaccattggtcggattttggtacacaccctttcatagtattgattttatgtagtatctgcaccctctgctgctgactggttgtatgttccgtgtgtgtcgtctgcagttcccggcctgcgggcaaaggtgtggaggggctcgccagagtgggatcccgagcggcgctgtcttttgcctttgccttcctgcgcagggcctggcgatcaggtacggtccctggtgtggcgcgttgttctgcttccctaatacatcaacagactgggtttcgaactcggttcagccaccatgtgccctttggctgatcccatgtgctctctgtgcctcagtttccttgcttgtgagatgagaggctgcagaggctgtttggcttttcacatctgtgctttaaagaaaaaaaagagagtgtatgcacccccacccccacgtcaaccactaccatggaacacctgagtacagacttaattctagaaggacaagaagttagtgtattgctcatgtgacagccgtgaaacacagaattgactggagcagctgcgctagattttggcctgttgagtgagggattggaaaggtgacagtggcgtcatctctcgctgaggggtgggaagcccagcgggagagtgaggggagtgggggggctcctctgacgcgtgtgtgcgcccaggcgaggatgcggacctctgcagtgagctgttgcaggagtccctggacgccctgcgagcacttcccgaggcctcgctctttgacgagagcaccgtgtcctctgtgtggctggaggtggtggagagagcgaccaggttcctcaggtccgtcgtgacggggtgagttctttcctttcttgccttctgcacgcagacagctggcctgcttgaggctggttcttaccacccttgctttagagctaagaagcctagtaggttggtttttcacctgttttcagcgggctgtcagtgctgtgattccgggtctgggttctcagcttttcaggcgatttgatttatgatactctgactagacccaggaagctgtgatactaaatgagacggatgagagagaatgcttagagatttggccatcagtcattcgtagaggtttgagtgcttacactgtgtgtctctctgtgatgattaggagctgctgttctgagtgcggagtggtgcttggtttgaagtcttatagataatgtgggagtaaacaactactcaagatcaaattctttagtcctgtagctgatctttttagtgtaaaaaattttgaataggaatcatttgtgtgtaagaaaaacatgaactctggtcttgggtgctatgcatttttgttaa

SEQ ID NO: 16969 - DNA, 1784 bp, Homo sapiens
catcttgaattgatttttgtataaggtgtaaggaagggatccagtttcagctttctacatatggctagccagttttcccagcaccatttattaaatagggaatcctttccccattgcttgtttttctcaggtttgtcaaagatcagatagttgtaggtatgcggcgttatttctgagggctctgttctgttccattgatctatatgtctgttttggtactagttcaaccattgtggaagtcagtgtggcgattcctcagggatctagaactagaaataccatttgacccagccatcccattactgggtatatacccaaatgactataaatcatgctgctataaagacacatgcacacgtatgtttattgcggcattattcacaatagcaaagacttggaaccaacccaaatgtccaacaatgatagactggattaagaaaatgtggcacatatacaccatggaatactatgcagccataaaaaatgatgagttcatgtcctttgtagggacatggatgaaattggaaaccatcattcttagtaaactatcgcaagaataaaaaaccgaacaccgcatattctcactcataggtgggaattgaacaatgagatcacatggtcacaggaaggggaatatcacactctggggactgtggtggggtggggtggggggaggggggaggggtagcattgggagatatacctaatgctagatgacgagttagtgggtgcagcacaccagcatggcacatgtatacatatgtaattaacctgcgcaatgtgcacatgtaccctaaaacttaaagtataaaaaaaaaaaaaaaaaaaaaaatggaagcccttgctagaggagtcagataagagagagaaaggccgggtgcagtggctcacacctgtaatcccagcactttgggaggctgaggtgagtggatcacttgaggtcaggagtttgaagcctggccaacacggtgataccctgtctctactaaaaatataaaaattagctaggcgtggtggcgggtgtctgttgtcccagctactcgggaggctgaggcagggaaatcacttgaaccccggaggtggagattgcagtgagctgagattgtgccgctatattccagcctgggctacagagcaagactccatctcaggaaaaaaaaaaaaaaaagaagaaataaagggcatccaaattggaaatgaagatgccaagttattcttgtttgcagatgattgttatatttggaaaaacctgaaaactccaccaaaaaatgattagaactgataaattcagtaaaattgcaggatactaaattaacatacaaaaatctgtagcatttctctgtttttttttttttttttttttttttttgagatggagtctcactctgtggcccaggctggaaagcaatggcgcaatctcggctcactgcaacctctgcctcctgggttgaagcgatcctcctgccttagctgcctgagtagctggcattacaggcgcctgccaccaggcctggctaatttttgtatttttagtagagacagggtttcaccacatgggccaggctggtcttgaactcctgacctcaggtgatccgcctgccttggcctcccaaagtgctgggattacaggtatgagccactgtgcccggccaaatcagtagcatttctgtatgtcaacagtgaacaatatgaaaaatcaagaaaaataattccatttataatagctacaaataaagtaaaatacgtaggaataaaactaacccaagaagtgaaaagatctctac

SEQ ID NO: 16970 - DNA, 1026 bp, Homo sapiens
tattgtgatacagtttttgtatgataagcctcacccttcaagtgtacagttcagtggtttttagtatattcagagttatgcagccattaccactccctaatttcagaacattttcatctccccaaaaagaaccccgtacccactagcagtcactccctgtacctctctcccccaccattgatcctggcaacctctgatctaacttctatctctgtagatttgcctatcctgggcatttcatataaatagaatcatacaaaagtggcattttgtgactgatttttctttacagtgattataaatcaaatgcctgaagacgctaagcttaggatagtgtttgctgtacaactttgataactgaacttttgtaaagctgaaaatgtgactgtgtctgtatatgtggcatattatccttagatgatccttacttcgattattaagaattttttcccctagtaatcttcaactgtctcaatattcagcaggaaccccttggagacaaagatcagtatgaatttggaacacctattgacaaaatgaatgtaatttaatttagtacagtagtaaagtcaaccacttttaggtgttgatgctgctgaaagtgtatattaaggaaaagtttacttaccctactttttgtggaggtgctagaactacttctgtcttgtgtttagatttcaacagacctttgcatgggcattatgtggttgcacaaatgtacttcgttttgacctgaaaatgcaaaaacttcctttcttcccactttctgagactctgcaaccttaaaggaagagtggggttctttaaaggaaaggtggtggtggttgggtcatgggtaacaatgtctactgtgtacttcctttcccaaaacaagtccctgtctaccgtcagcatttcgaaaatttgaagatcaagtgtggtgttaactcatgaactaatgactagactttgagcggttgtggcagcaaaatctcagtgagtgcctggatgttctaattctgttaagtcagtgagtgcatattctgt

SEQ ID NO: 16971 - DNA, 1026 bp, Homo sapiens; identical to SEQ ID NO: 16970

SEQ ID NO: 16972 - DNA, 1031 bp, Homo sapiens
tgcttgcgagaggtgatagataggctcccaggagctgcctcctctggaaaccaaatctgaccgggagccagaaggaagtgaatgatgcttctgcacaacatgaagtgaatccagtttcctcctgaccttgtcccactgtatattttctttctcttgttttatttatatttctttattaccagaagattttcttttagacagcggagttctaagttaaccacccgtctacgatccaaaagaaaagcaagtccgagagagggttagatacgggaggggagacacaggatgaaacaaaccgttaggacattgttcgctctttgtgattcagtggaaggttctggacagagatttccaggactggttattggcacataatgacttcagtgaaaaagcaggtgggtgctgatggtggggtgaattctccctcaccgattccctcccagcagaatgagagggctaaggaagaaaaatagtatggaccgtattatgcgaaagcatcttagtgagatcaaaggacgcacttgggcagctctccgtcttctctttgtctcggaaccacctctcgagccccacgctgtgggggcagctcacaccctttgtgtgggtgggaaggctgcagccccagcccccgccctggtgtcagcctggttgaagaggagagatgaaggagaccagctatctgattgaagtggcgggagataagggaggcagaaatgtaattacctgagctggaatcagagcaagtcgcaggagcccccctcaccttcccagtctcctctggagctcattatttgcaagtgtatccccaaagcaattctgaaataacacagggattcaaaaaattgttttctgaggtagcatggggtgcatgggggtgctcatgcaacatgtgtgtagctggcatcacatccaaacatcgcatccgggaggccctgatgccctctgaggtggaaaccatggcccacgcagaatgggcaaaatgaagatggggcagagagcagaggaggtatagccttccccttattctgagg

SEQ ID NO: 16973 - DNA, 1110 bp, Homo sapiens
gggtcaggcccactggtaactcagcctccacatgtcccagaccacttcaggtgttttattttttattttttttcttccagacagagtctcgctttgtcgcccaggctggaatacaatggcatgatctcggctcacggctacctccacctcccaggttcaaccgattctcctgcctcagcctcctgagtagctgggattacaggcatgtgccacctctcccggctaatttttttatatttttagtggagacggggtttcaccatgttggtcagactggtctcgaactcctgacctcaagtgatcctcccgcctcgcatgagccactgcgcctggcctgctgaggtgttcgttaagactgcttctctcccacagtccctggcccacgcgcaggcatctcatgtttccactcaccagaatcatctttctactatatctgcaccctcatcccggtctcccctactccagtaaacagccacgcccttttgttctgaacttcagagtcaccctcagaccggcatctgcatgcctcctcctgggctctgcttgactcctctccggtaccgcctcacgggtcactgccctgtgtccagtctcacttcaaccgatgtttactccatctatagttctgtgctaggccctccctgcaaaggtgtctttctcaatcaattctcaaaacaggttgcatgggctaggcaccgtggcttgcacttgtaatcccagcactttgggaggccgaggagggtggatcacctgaggtcaggagttcgagaccagcctggccaacatggtgaaaccccatctctactaaaaatacaaaaaaaattagccagccatggtggcgggcacctgtagacccagctactcaggaggctgaggcaggagaatcgcttgaacctgggagatggaagttgcagtgagccaagatcacgctactgcactccagcatggactggagcaagactccatctcaaaaacaaaacaaaacaaaacaaaaacgccaccaccaccacaaacaacaacaacaacaaaaaacaggttgtatgacctctttcccagcatcacacatcttcagtggcattccattacctgcaaaatacaatctaggctcct

SEQ ID NO: 16974 - DNA, 1051 bp, Homo sapiens
tagaacagtgagaacacatggacacagggaggggaatatcacataccagggcctgtcaggggttgggggcaaggggagggagaacattaggacaaatacctaatgcatgcagggcttaaaacctagatgatgggttgacgggtgcagcagaccactatggcacatatatacctatgtaacaaacctgtacattctgcacctgtatcccagaacttaaagtaaaataaaaaaaatttttaaaatgggaggtgatttgtgaattagcttgattcaatcattctgcaatgtaaacattactaagacatcacactgtaccccataaatatgtaatatagaattatttctcaactaaaaataaaattaaaaaaagaaactagataaagagcagcataatcaacccaaagcaaataggtgtcaggaaatcataaatgaaagagcagaaatcaatgaaatggacaacagaaaaccaatggagaaaaaccaatgaaaaaggagctgatactttgacaacatcaacaacattgacaaaactctagcaagaaaaaaagttagaagacacaaattcccaatgtctgggaagaaaccgggatataactacagacccagcagacatcaaaaggataataagggaataataggaatggctttacacaaatgaacttcacaacttagatgaaatagatcaatttcttggaaaacacgaactaacacaactcgtacactatgaagtagagaatttgaatagccctataattattaaggaaattgaatttataattctaaaacttccaaaaacaaaatctccaggtccagatggtttcactggagaattctattaagcatttatagaattaataccatttctacacaatttctctgaaaaaatagaaggaacatttccaaattgatttttgtgaaagtaatattgccatgctaccaaaatccagacaaagacagtatagaaaaataaaattacaggccaatatcccttattaatgtaatatagatacaaaaatccttaacaaaataataacgaataaaattcaacata

SEQ ID NO: 16975 - DNA, 1112 bp, Homo sapiens
ccctcgcctcagggcgcccgccgggcccaggccgcccccgccgtggggcccaggagccagaagcagctggagctgaaagtgtccgagctggtgcagttcttgctgattaaagaccagaagaagattccgatcaagcgggccgacatactgaagcacgtcatcggggactacaaggacatcttccccgacctcttcaaacgggccgccgagcgcctccagtacgtcttcgggtataagctggtggaacttgaacccaagagcaacacttacatcctcatcaacaccctggagcctgtggaggaggatgccgagatgaggggtgaccaaggcacgcccactacgggcctcctgatgatcgtcttagggctcatctttatgaagggcaacaccatcaaggaaactgaagcctgggactttctgcggcgcttaggggtctaccccaccaagaagcatttaattttcggagatccaaagaaactcattactgaggactttgtgcgacagcgttacctggaataccggcggataccccacaccgaccccgtcgactacgaattccagtggggcccgcgaaccaacctggaaaccagcaagatgaaagttcttaagtttgtggccaaggtccataatcaagaccccaaggactggccagcgcagtactgtgaggctttggcagatgaggagaacagggccagacctcagcctagtggcccagctccatcctcttgaaaggtggattcagagggacccccgggacaagggtctgagacccaaaggcacagtttagaggattgggggaagggagaacgaacccagggagcatattgctgtaaacgcttcaatgtgtgtagctttaggatgtgtttgcaaagttttgtttttttaatgttgtgttattttgctccagattttcatctataaacaaaggagcatttgttttgattttactctttttggtataaaaaattttgctagcttagtaaaacgaattggaaaacttgactatgatctggaacagataatgcaagaaggaacacataagtaagttgctttggtgccaagaaaataaaaaagctattatcaggtctcctaactaccccagtttgtaagga

SEQ ID NO: 16976 - DNA, 1024 bp, Homo sapiens
ttttatgggtgttactcagaataacatcattgtatctggtatttgaattgggcactaattgaggaatacatttgggcataaatttagttctattctagtattgctattttgtgtaattataaaaccaaaaggcttcattctttatttcctctttaaaactccatgtgaaatcttactttgatgtgatgtttaggaaaatatttttagtaatttggcatagttaaattcataccaaaataaaaaataactggcctttgtttagttctgctatatgacaggctttgtaatatgtaataaaacaaatttgtaatatttgtttcccccagtgattttaagtgacctctttatcatatactaatttgtcttgtaacttaggtttatgtgtcttctttttaaaaggaaggaattcaggttcccaaaacataggaaatttttacaaactggctgtgtgactaagtagcagagttattatctgaacccatattttcatatttttcgacatttacattgtggatatctcaactatatacacaagtaaagagaatgacatattgaaccctatgcatccattactcagctatagctgccagccactcctggacattcttgcgtcatcagtaccccaccacttctcccttggatgaagaaagcaagcctgagacatcacattattttgtgtcaaaatacatacatgcctacctctaaaagagaaggtggcccttattttttatttttaaaatgatatagtcacaatgccgtgatcacaactaatagataccaataatttggtttatcatcaaatacctcatgttcaaatttctgtgtgcctgtttctctctttttgcattgggttgttaggtctcttaagtctctctgtctctcttctttattttcccttgctggccccagtgagcagaggccaccagagctcccatgtctcttgattatccttcaggaaataaaccacttgagatatacaattaaatggtgatatgttacagtcagtttaaaccgctctctgtgg

SEQ ID NO: 16977 - DNA, 1049 bp, Homo sapiens
acgttgagagtgctttactttatgtaaatatttagactgtaggaatctagcttttttttctactgacagttatgtttaaaatgtatttcatcttttctgttttaaattaggaaatatttattaataaaatattattaaacatgaaatatatgacacgtacaatgaaattcatgtattgctatgaagcaggcaattgaaggccccaccaaccagcaccagaagtgtaagctgcccactccaggaccctcctgtgggctccttcccatctggtctcctgcctgtcttcagagcagagattcaaggttcatcattcttttacacatatgtacacatccctaaataatgtactgcttacttttgcttttgaactttgtgtaaatggaattgcactttatgttctttgattacttgctttttttcattcaccatgatatttgttgattcatacgtgttcatgtgtagctctacatcaattattttgattgttgttgcagtcttccatggtgtgaatagatcacaatatgtttgtctgttctccttcagtggctgcatgggccatgtatataatattttgttcctgtgacctgtgttgctgtgaatgtttaaatgcccgtctcctcaggtacataggcatgggttcctccagggcactcacttggacatgaaattgctgggtcatgggcagtgtgattgatgaaatgatgtcgcatggttttcccaaagcaactgtactcatgtaggtgccccaagtgttccgcattcttcatggcatgccttgagaggtttgccagtctggtgagtgtgccacggcatctccagtcccagttggtgctctccttgttcctaatgagatcaaccagttttttttttttttcttttcttttcttttcagagtctcgctctcttgctctgtcgcccaggctggagtgcagtggcacgatctcggctcactgcaagctccgcctcccgggttcatgccattctcctgcctcagcctcccgagtagctgggactacaggcgcccgccaccacgcccggctaattttttt

SEQ ID NO: 16978 - DNA, 1043 bp, Homo sapiens
gagaatctcttgaacccgggaggcggaagttgcagtgagccgagatcgcgccactgcattctagcctgggtgacagagcaagactctgtctcaaaaaaaaaaaaaaaaaaaaaaaaagattaaaaacaaggtagacaaagatacccaataaggtaattatgtgctcaaaaatcataattaaatgcatcatcttgaattcacctggaaacaattgtaatcaacttttccctgattgctgcttctgactggctgagaagcttctgagaaagagtgagttattctcatagccctgtctgggtaatgttactctcttcctgtgaaggtagagactgagtgggtggtaaggtctgtggaacagcactgagtgggggccgtctctgggagctcagaagccctgggatgtgcctctggatggagtcccagagtctgtgtgtttctttatggctggagtgattttcctgtgatccgtgtctgttggttaatgtgctgtgaagtgagttgcatgtagctggaccccaagaccatgatacatttcttgattacaataaaccacttagtatccccaggtgtgggcatcagcaaagcttaaggatgtttccagaagaggggaagaatttgtccagctgctgctaatggaggctttgttacatgtttcctggggtgcttccccattggacctgtaagtgtctaaccctgggctgattctgtaacctgcctggtcagcagttccttgttctatctgtcctggatacataaaggacaccatcagcacaccgtgagcacagagtggtcgtcagaattgccatgagatgaggctcagagcctgttgtgccgcagtaatgaaatgcattgcacagggccctgagccgtgcaatgacttggaaactaagaaggttaagatatggtatttaggtttaggttctaggtgaggttatgatatgagttggggaaataaaaatatcaataaaatgttaaagatacataaagttgtataagataatgggaggaaattgctgcaagttagaaatcgagaaatgaatttt

SEQ ID NO: 16979 - DNA, 1085 bp, Homo sapiens
caaatcaataaatgtaatccagcatataaacagaaccaaagacaaaaaccacatgattatctcaatagatgcagaaaaggcctttgacaaaattcaacagcccttcatgctaaaaactctcaataaattaggtattgatgtgatgtatctcaaaataataagagccatctatgacaaacccacagccaatatcatactgaatgggcaaaaactggaagcattccctttgaaaactggcacaagacagggatgccctctctcaccactcctattcaacatagtgttggaagttctggccagggcagtcaggcaggagaaagaaataaagggtattcaattaggaaaagaggaagtcaaattgtccctgtttgcaaatgacatgattgtatatttagaaaaccccatggtctcagcccaaaatctccttaagctgataagcaacttcagcaaagtctcaggatacaaaatcaatgtgcaaaattcacaagcatttttatacaccaataactgacttgcactctgaatggtctgcctcattgtgtgtgtgcggagagcgtgagagctcgctttctcctcgtgtagagctaccagtcccattgtgaaggcgtcatcctcatgacccagtctaatcctaatcacctcccagaggccccatctccaaataccattacattgcgggttagggattcaacatctccaattggggggtcacatacatttagtccctaacaattgttttctgttgctgtgtagcaaatgaccataaactttgcagcttgacacaacactcacttaatacctcatagttttcttgggttaggagtctggaccttgcttagtagagttgaaaccggaggagttcccttatccgcctcaccgggcgtgtgacaagggtgtggttcgcttcttcggtgccccgctgttcaaactccaagggggaacatgaagatgggtaggttttggggagtgttttggggctccatctccacggcatcgtctagggttgagtgtttgcaggtcccaaagcctcagtgggtgtgtgttacagagtgctctttcagttttgccatctgcaggcagcttgt

SEQ ID NO: 16980 - DNA, 1053 bp, Homo sapiens
cttgttttgtggagcacattctgcattagtttcacctaaaaagatgctgcaggggcagagggcatggtgggaccagcctcagaatgccttctgttgcctcatgttgctgcattgtggtctggggctggtcagtccacagcacagacctgttttgatgtttttaggggaacagtccttcagaattctgctagggtgcagggctgggaaatctgttttcaagtagctgtccaaatttccattccttatcttagccctccttcccaagtgtcatatagaggccaaaggtggccactatatattggcctctaggttgtttatttcttcatagcagactgagatctgttagctcagaagcccactggtaccaaactcaaatttttacacgtctaatttttttcaaatagcctgaattagcagatttttagccattaagagcctgactgctttgcatacccggtgagctggcctctggtaagatagagccttgtggttataaagctccaagccactgctaccatcaaagctctctgaccctgggaccccctgctgtgctgctacagactgtcacctggctatgtcagcctcctctctgaccccctttccccaggagttcccttgtcctcttccccttctggatagaccccttgcttgaagcctgtggatgtcatactgtgagggacttcccctcccacataaccttttaagaaagcttgcatgtgttactgcttcctttcagcatatctacttccttgattagcccccaaatccctcaagccttctacaccaaattagccccacttccagaggtgcccattgagactcgtgcctgaatcttttgagggttctgaggtgcacaatgggttgttctctcttctctgctgctgctgttgctgctttaggatccatctttcttaatttggctaaatcagtactgcctgtctgtccttttcataacttccaaagtttggtcgcagtccatattcattcatccctttcatcaatcttcatttcttcgtccttatttgggtttttctctaggtcatttttcttttc

SEQ ID NO: 16981 - DNA, 1030 bp, Homo sapiens
tctcaaaacagaccacagttaaatagttgcaggaaacaagtctcactgggtttagagcagtttctcaacctggatcatagctgagattccctgggagccacaaactcccattttgagaaactcgagtcttggagtctgcctaacactcgggccatggtctgccatgctttcttcttgattgttttaccaaaattccattttgaaatgttagtttttaacacaagacttttttcaccgtctaaggcattgtttctcaagcttcgtgagactccatgtgcactgccaccgccctgccctgccccagtgtcctctgatctctgcttgaggagcatggatgagctgtaaggtttaactccagtggaagtagtttggttattcatgtgtgctctatgtatgtatgtcatgtatgcttcaggtcaaacctgcgagagtgagattcttttctccttcatggtttattttgcaccatgtggatgtgtctgtgtgatctgggtattctgtaatttgcagcacatgacccttccagagactctgagtctgatttatgatacattgcacagctgtggattagtgtgggacactgaacaggtgaagggatgctgaggaaaggcaaggatgtggttttaatcacccaaacatccagtaatcacatagcttcttatgtgaggcttgtttaggaaggcgaaggaaacactttgcaatgttgacctatgcaccagggaacatctttttgaaaggcttaatgaataccagacctattacagaacaacagtctcttccaaagcagaggcaatgaaatgcatagatactcgctcatagattgctgaattctgcaatcagggaagccccatgatccctttgaaagattgcaggaattcctgaattcctaaaactcaagatatatcctaaagtggcatgccagctagagccacggtaaccacacagtcgttagttcattcagcagatttccttggtcatccgtttctaggtactgttgtacactctaagctcacattctctaggatagaca

SEQ ID NO: 16982 - DNA, 1030 bp, Homo sapiens
ctggcgaagactgtgctatgcagagctccctgtactctgttttttatgagtaaaggcatgcccactgatcagcagaggtggtagaaggggcctgttctcatctaatcccagaatgacttcttttctccatggaaatcttagcattcttgattcattgtgctttaaaggttggactttcttttttgatttattggattacagtcccaatttttaatattcaattaaaatattttaattaaaaattatttgatttgtgttttaaataacaaaaggaatttgcttgctgtaagaatttgtggttggctgaatagtgacccccctccacaaagatgtccatgccttaatccctggaacatgttaggttatgtggtaaaggggaattaaggttgtggatggaattaagattgctggtcagttgacctcgaaaagggatgtaatcctggattatctgggtgagagaaagtcccataagtggaagagggaggcagaagaggagaatcagaaggaggtgtgactgcagaagaatggctcaagagataccatgctcctggctctggaagtcaggaatggaggaaggtggctgacaaccaaggaatgtgggtcacctctaggagtgggaaaaggcaggataatggattcagccctagagtctccacagggagacctgtttgggacttctaacctacagaaatgcaagatcataaatttgtgttgctttaagctgctgactttgaggtaatttgttgtggcagccatacaaaactaatgcacaggtgaaacagtatacacgtatatcaagaaaaagccatgatctcactccccaccccatggtgccactggggaccgaggctcctcctcctttctgctggccaactttggcatgttggctttgctctgtgcgtattgtctcaggattactgcagggcttctatttctccaagtagcgtgtctgtcttccaggcagcaagaattggaaacagaaacgtggggaacctgttccaggaaaaaaaaaccttccaagaaccaccta

SEQ ID NO: 16983 - DNA, 1131 bp, Homo sapiens
atattcctttgggtttatcctcagtactaggattgctgggctgaatggtaattctgtttttagctctttgaggaattgccacactgctttccacaatgattgaactaatttacacccccacctgcaaagcaagcagtggggaaagggctccctattcaataaatggtgccgggatagctggctaaccataggcagaagactgaaactgggcccgttcccttcaccatatacaaaaatcaactgaagatggattaaggactaaaatgtaaaaacccaaaactataaaaaccctggaagataacccaggaaataccattttggacatggaaactggcaaagatttcatgacaacaccaccaaaagcaaaaattgacaaatggtacataattaaggagcttctgcacagaaaagaaactatcaatagagaaaacaggcagcctacaggatgggagaaaatatttgcaaactatgcatctgacaaaggtccaatattcagaatctacaaggaacttaaacaaatgtacaagcaaaaaactaagaaactcattaaaaagtgggcaaaggacatgaacagacacttttccaaagacatacgtgcagtcaacaagcctatgaaaaaatgctcaatatcacttatcattagagaaatgcaaatcaaaagcacaatgaaataccatatcacaccagtcagaatggcttctattaaaaagtcaaaaaacaacaggtaccggtgagtttgtagaggaaagggactgcttaaacacttcttaatacaagtaaatattaggatttcccaatttcaccataatgtgaatgtgtatttaaaagatagagaattatagtactctacaaaatgtttgtctaattaaaaccatgaagtggacctttgaggatgagaaaaataaagtcttgagtcttaagctgccacattgttctgttaacaagtttggtgtaattttgttgtaacaaacttctattttcttctttaatattaaagtttttgtcttgttcatcttactctgcttattcttctgtgcttcagagtggttctttagtgtgactaacatgttggttatttattctgctgaggtttttgtcctataaaggacataaagggtgatcattcacatt

SEQ ID NO: 16984 - DNA, 1078 bp, Homo sapiens
attagccaacagttgggaaacgtttttactcttagtgatggagccttttctaccaatgaaatcttatgaggaagctcagtatgtgaaaatggagttgatctggatgaaggtggggcccaggcattacaaccctctccacttagcaactccccacccaggaccatcaatgtcccctagatcctctggggctgtgtggggcactataaaaaaccagtgcattgggctgagctctgcttaatgaattcaggagtcggcaggaaaatgtggagtgattccaatgccccacctctgtttacttagcagagtcacttcgagccatagccagtattttgagttggtctagtgagatcacctgtaatagtggttgctaatgtgaaacaaggcatgacgtttgtcaaatgactgtgacttgagcaatttttaattgtgacttggtattaaggaatgaacattaattaccaattaaacaaaaaattaatctaggaagagaatcaaggaggaactgctcactgtcagggctagcatatctttgagggactgtctcatgtcagacgtcttgaaggcagagcgtccttcaggctcatgagccccgagctggccactgtcaggatgctgtggaagagtcacacgcatcaccttgtctgccagtgcttgtcagttgattgtggcttccggcagcgtttgtaggactgggaaggatttcgaagtgcgtctgggcttccctggaaaagaccatatggttgattagtagcggcagccgcggtgaaggatgggccctggttgtccgagtgacgagtatttgcctgccctggattgcaacagaggtgaacttggcaggaaggagggaggcgtgaggtgaatgaagtttgcaagggagctggcaggaggctccccgagacgaagcaggtaaatgtactctcacctgctgattgatgagtgtcctgtagcccttggcagggcccaggacctgtgggcttcacctgtgacctcagtgggctggcactgcctcaggaccctccggatgctcaaccacacatagaacaaacgtggcagtggggggcaccgagcagcccctctg

SEQ ID NO: 16985 - DNA, 1055 bp, Homo sapiens
ccaggtttggtgtttctctggtcctaagattccttgaaaaatttaatgggctttcagcgtgtatccacagttctccaagctctaagggctaataaccaaagccagaatcttcatttctttgtctcctagcaacagtttctctcctcagcccttatttttttttgcactttttgttgaagtctaacatacatgcagagaactgcacaaacagttgagtgtatagctcagtatgttttttacaaactgaatgtctctgtgtagccggcacccaaaggcagaacatcagttgcacctcaaggtcccccttgtgctcccttctacttactgcccccaaaggtgaacctttcttctgatttttagcatcctgtattaatttttcttgcttttgaactttatataaatggattcatacaacatgtattatttagtgtctgatctcttacactttcaacagtgtgtttgtgaagagccatctgtattgttgagtggttcattcatgtttattgctgtagagtgctctcttgtatgagtgcacttacctaccagtgtgctgttgatggcactagggtagtttccagtttcgggtcttagagtcagtgctgccgacacattctcgtacgtggccttggtgagcatacgcgcctgtttggatgggtgtatgcctaggagagtggaattgctggggcacggagtgtgcctgtgttcaactgttgtcgtggctggcaatcggttttccagggtggtggcatcgctgtctgctcccgccagcagcatgtgagaggtttggccgctccttgctggcacttggtgtttctccgccctcactttggtacctctgtggcttctactctagggaagtgtgagagactcactcgtcccctgcttccaggtgtcatttctgcctcatctttgcagtcgagggaaatgtctgtcctcaggtccagaagtgtccaggaaggacaagggtggtcaggggcagaggtggggtattggggacgcatgtccaggtctggccctgcctggtggtggtaaaaccttggtggctggaccacgaa

SEQ ID NO: 16986 - DNA, 1049 bp, Homo sapiens
ggatcagaggaaatattttatattcacagtgccaactagtgtcaattccccaagggacagtgtggtcagtgccacttactcccctgtgcgtgcagtgctgttcaggagaggcccctgaattgctatagggtgtctaataactttgccctttttctgccccagagacaaagagggagagactcttactctgcaatctaaacaaatcctctctggggagaggaggaaagttccctagttttattttactgaaaggtagcaaatggttgcaagacagatatgtctctaaatctctcctgggcgttatactacttctagctttcaaggcattcaaatcctctatccttatttttacagtgctgcttgtttagaaaaaccacatatgcagaagttcatggagaattgtctgttaacatactttgacttaattcttgaaacctcttgaaaggttatgttaattctctttgttcctcttcttcaaagttgttgcggctatgctatatcctttgaatttctgtgcgaattttagaattagtttgtcagttttagaacaaagcctgctgggatgttgattggaattacactaactctgtacatcaggatttttccacctcggcactgggagtgttgacattttgggctggataattctttgttgtggggctgtcttctgcattgtggggtgggtagcagcatcccatcctttactcattagatggcaacagtaccttctgccaccaagtagggacaaccaacagtgcctccagacattaccaaatatctcccggagtgacaaaatcacccgtggttgaaaagcacttctacagatcaacttggggagagttgatgtcataataatattgagtcctctgccctatgaatacattatatcttcccaattatttggtctttaatctttctctacagtagtttgtagtttacagtgtacaggagttacttatcttttgtcagatttcttcctatttattttacagactttgatgctattgtaaatggtattgtttttaaatttaactttctgattacttact

SEQ ID NO: 16987 - DNA, 1079 bp, Homo sapiens
tctgggggaaaagcaggagggtgtggtttcaaggatgttgaaagcagaaaatatcagcagaaggaaagtgtggccaaatgggttggtgacaactgagaagctgagcaaatggacaaacacgtgccccccggattccacagcatggagatcgttagtgaccatttgaggacaggttttgtggaaaatcagtgaggaggccagatgggagtgatggaagggagagtgggagtgtggaggcagacatggttctctgggggtgttaggttggcacgactggaaagatgggaaggtatggggcaaacatgatcctttccaggctgggcacagtggctcagacctgtaatcccagcactttgggaggctgaggcgggaggattgctatggcccaggagtttgagaccagcctgggcaatatcgttaagacaccatctttaaaaaaaaaaaaatttttttatagtagccaggtgtggtgacatgtgcctatagtctgttactcaggaggctgaggtgggaggattgcttgaacccaggagtttgaggctgcagtgagctatgatcacgctattgcaccctagcctgggtgatggaatgaaaccctgtctctgaaaaaaagaaaatactctgtacagggggagattaagaagtagcagtctgtgggctgtggcttgcctctaaggtgggaatttatcagtgggggttggaggaaagagggaatgatgtggagagtcagaggctgtccaagagggacaccatctttgagaagcgtgaggggagccttggtttttggaagatggacactttccctgtaacaagagagagttgtgatcctattttttcttttcttttttaaccagatgattgagttgtttgcaagtgcctttcagttcactctacagaaaagctttttgccaggtgtagcactatatcacgtacatggaattttaattttactttttgcatccaagcttgcacaatcaattcttgtacttcagggtatagaatgtacctttctcctgccatagcatattaaatctacccattggaaacatttgcatttaataaatacagaattgattagc

SEQ ID NO: 16988 - DNA, 1034 bp, Homo sapiens
gccacttgcagctcttgggagcttatgtgcccacagctccttgaccggacatgcaagaggcttttgttttgcaggttggagaatcccagggaagactcaaataggctggtttcatgtcatggtcctatctctggactagccacagtggctggggaggggctagaaagagtataattggaagtttcaagtacaatcacatgggacaaaggagaatttacaagaagaatagagttttacgcagataaaacaatacatatcacttgagtaacatagttttacccagttatttttaatggttgtatatacaaaattttatgaacataatctatataactgttctgcgatggatggagtttagacagttccatttgaaacacaaaaaatgtgattttcaagtgcagagatctgaaattaagtgaattacctgtgagtgggcctttaagtgaattacgaaagagcgttggcatatagatttcatggtggagctaatcctactatctagaattacagttctttgtaatgagacctttggacttgatttgctatcagaagatgtgtttggtgaggaagtatcatttgactcatttcaggggctctgtttttacatctttatttttgggttcctttatcattggaaactggcttgttatctttcaagtgggcacaaggccagtggaccagatggtctgtactgtaggcttgctaggcaggaatgtgtcactctcacttgggtactagcggctggatttctactgggagtggggagccaagaggaggagcatcacttcattagtttggaaggacatgcagcttctcttccaactcatcctatttttttttttttttggtcagcctttaacattgagactgtatcttcttattttgaaggactttgaggttttacaaatcttgatgggatttttatggaatgcaatctcagatgctgtcacatgatactacggaccacccaatatcaaggatctgaccccgtcagatgaccccttgaattttggtataatgccatcacaacctgt

SEQ ID NO: 16989 - DNA, 1057 bp, Homo sapiens
cttaccctcagccacctttggagcagctttttcctgctgaccagtcctgcctagcattagttattcaaataactaccgaattttttatttgaaaaccttaagaaaaaaatgttaattgtggtaaaatacatgtataaaatttaccatgttaacaattttaaagtgtacagttcagtagtaggtacattcacatggctgtgcagccatcaacatcatacacctccagaacttctcatcttgcaaaagtgaagctctgtaccccttcaacattttcctattgtctgcccccagctgctggcaaccactgttatacctcctgtctctatcaatctgactactaactgtgaattattctgctccaaatatcaattaatattgaatgtggaaatgtccttactctaatgcctatttttctggcttggagaatgttcctaacagtaaaacttcttatgtctttcttctgcagtgttactgtattttgtaaaattattaaatgccttaaagggccatgtagcaattttttatatttacatgtatggaatacaattattcagagcaaaaatacttttaataaaagctgttttataaatacaaatttatataatataaaaataaaagaaaatataaaatacagttgtattcaatagaatgtgtttaaacagctctagtaaaagttcaatttcatttacataaaatcggagtggaaatgtaaagaacaaagaaagagaatggaaaatttgacatcattttggtaatagaccaagaccaatctttgttgatcaccttctttatgaaatttaaagtcagattgtgggtttgaaaaagttttttgggggattttttttttttttgagatagagtcttgctctgttgcccaggctggagtgcagtggcgcaatcttggctcactgcaacctctgcctcccaggttcaagcgattctcctgcctcagcctcctgaatagctaggaccacaggtgcccgccaccacacctggccaatctttgtatttttagtaaagacagggttttgccatgttggccaggctggtctcgact

SEQ ID NO: 16990 - DNA, 1093 bp, Homo sapiens
ggttgtttccaggtttgggagattattagtaaactgctataaacatttgcgtacaggtttttgtgtaaacgttacttcatttcgcttgacttcagtttgatgaagtctagtttaatcagtttgttctttcatagattatgcttttgtcatatcttcactaagatgttctatcctaagagaaatcttcacttagcccaaagtgtaaagacttctcaagtttcagaattttttgttttatatttatgtctgtgatccactttgagttaactttatgtgtagtatgatataggtgttgagttttctgttttaaatgtgtccttattgtaaacacagacacacatatataaggcctaaataagacagttttcatttagataaattagggaaacaatttattgtgaaagggacacaactcagtaagtctgttttttgtccccctaccttttagtatgtggcatgaacacctggtcaggtgtagatacctagagctccttcctaaggacatttctgttgcctaaccatcttcccacagcactgagcatggtgcagtgagttcattcagatggccaagctttagggtcagaattctgcttttgcccttcccctatactaacgttacaatcaacagaaggcttagtgaacatccactaatgctgcgtgagtcagttcctcctcttgacctctgagcaagtacttaatgcagtacacaaggcactgagcagatggagatgactcaggtgaggagacacagacgttgacactgggtggcttccgtctagacagggagcagttggctaggaagggatgtggcagtaaatgcaggaaggccacctagcaggcagatggggagtaagttttcggttttcttgactcgcagtttgaaaaccatttactggatgggaagccaggctctgttttccgtccaatttgcagaaagcaaaccagagagctgtgtacacagatgcatccgggcacacgttactgcggctgcccagcagccctacatgtagagagtgacctggcactctgtttccaggctgcttagccgggtttccccagatggagtgtgggaagacacattgttgatgtgctg

SEQ ID NO: 16991 - DNA, 1030 bp, Homo sapiens
tgcttttacttcctaaacaaatttagttcgcttttttgtattttgccggaatactgacatctgattctgtactctgattttggggatatcctgttttaaaaaccagtaggactgactgtgttggccctgcatgaatctctttaaccacctatggagcaaacaaaacattttgaaaatggaaaatatatcacattcgcaacaagcacatttgaatatgttttttattatagacccatatgattgaatgcagtagccactgcctgcacgtggctagctagcacttgaagtgtgacaatttgggattgaaagatgctggaaatgtgaaatacacaccaagttccaaagatttcatatattgattacatgttgaaataacagtgttttcgttatattgagttaaaatattaaaatattgtaagatttgatatcacttgtttctttttactttctaacgtggctactgggaaatttaagattccatatgtggctgctgttacgtttttttgtggtcagtgcgactgtagagaactaactccattaggctttcaagcatataattagaagcagggtgaggaaaactgggattctagaagaaagaccacatccatcctctctgcctatccccttttccaactccaggtgaaacactgctgagtcctttggtgatgtgtggtccccatggcctcaagttcctgaagcctgtggagctgcgcttaccacactgtgcgtccatgactcctgacggttggtcttttgctctaaaatcatccgactcctcgtcgggtatgctgtcttcactctgtcctttgggagctttggggactgtcgttgattaatacctgggctgatgatgctgcccatgctgtgtgttagcaaatctctatctctgttcctgtggccttgtaggcatcaccagtgttttcacatttatttgtggtgcatatattgtaaataaatatggaaaggtagaagactttctgccttttaaaaattgataatttgggccgggcgccgtggctcatgcctgtaa

SEQ ID NO: 16992 - DNA, 1058 bp, Homo sapiens
ggccaccacctgacccatggttaactgcagtccacatgaagatcacttgaaacatgagtccagggctgaagagacagtttagaagaaaagggaacccttatacgttgttgatgagaatgtaattgatacggccattctggaaaacagtatggaggttcctcaaaaaattaaaaccagaacgaactagcacatgatccagcaattccacttctgggtacatatccaaaggaaatgaaatcactgtctcgaagagatatctgcactctcatgtttgttgcagcattattcacaatagccaaggtatggagtcaacctgaatgtcgaacacatgaatggataaagaaaatgttcacacacacaatgaaatgtgatttagcctttaaaaagaaggaaatcctgccatttggaacaacatggatgaacctggagggcattgtgctaagtgaaataaaccagacacagaaagacaaacactgcatgacctcacttactgtggaacctaagcaagttgaactcatagaaacagacagtagaatggtggttaccaggggttaggggtggggaggaatggggagatgtttgttaaagggtacacagtttcaattataagatgagtaagttctggagacctaatttacagtgtagtgacaagagttaataacgtatacttgaaatttgctaagagagtagatcttaaggcattcttttgacacacactaagaaaagtaactatgaggtatggatatgttaattaacttggtctcggtcatcatttgaatatgtatatcaaaacatcactgttgtacacctttaatagatacaatgtttatttgtcaattggacctcagtaaagctggaaagaaaaagtaaatttgggtctagatctgaagagatgatttaggattagagatgttgaattgagacttaacttgcatagaggtgttagctgaagccatagaagtcactaaaattgctaagagaaacagtttggaaagaaggcagagaactggataacagggagcacgttcttttaggaaggtgaagaggcgagggagaag

SEQ ID NO: 16993 - DNA, 1051 bp, Homo sapiens
ttagtttgtgttgcggatatatttcagttgatatactgaaaatactgggaagtgagttaactggtgaatgatctcaattctagtttatcatgtccggaaaggaggtaaaacagaagctgatattactttctgtggattctaattaggaacataagattagcgtatacctggtttaattaattttttttgacttaccgaaatattttttcctttttaaaaaaatgtaaattcccaaagactgaaaagttcatttttcttcttggttatcttaggaattttcacgcttttggaattgtcattatcttggagattgtacaacagtttctggtaactgaatatcaccagttaaacttaatataagattagctcacttaatttagtatgtaattttaaaattcaggaggataccagtaatgactaattctttttgttagcttaacacatattaaatgagtacattttgtttgggatcccgatcctagaaatttacagttttcaactgctatacgctgtaatgatcactttgtgaattgtgtaactcattgttgaagaaacaaaggatttgcattgtttactcttaaaaatacgagcaaacttatggtcatcctgtaataacagagcattcttgtgtgctttcttcgttggaggaggtgacaaagtcattttctaaacctgggcttgctgtttagcagagtttctgtatttttccttgttaatgtttttaaatgtttgaattgaatctggatacattgatgtaagtgttttctgcatatgtttggtatcaatatctcaataggagggagacattaagaattataaagtaattggcttatatgcttaacagctccttgaatatactgacaaggcaaatgaacactatactagctgttactgttacatttagggttcaagaagctgtgaaatatgtaacaatttggattcctaaagcggaattttacattcagcagatatttgttggttacctcgtgtgtaccaatcactgttgtaggtgctggagatgcagcagtgaacacatctctgtactgatagg

SEQ ID NO: 16994 - DNA, 1096 bp, Homo sapiens
acttaaatgtttttgttaagtctcgggaatagtagtattgcccgctgtggctatctgaaattataatgtaagtatgaaaatgatttatgtcattttttactgttacactgatttacatgatacccaggaattgatttattgtatcaagtggagcacagtgggcttttttttttttaattaagttctgggatccatgtgcagaatgtgcacatttgttacataggtatacgtgtgccatggtggtttgctgcacctatgaacccatcatctaagttttaagccccacatgcattaggtatttttcctaaatgctttccctccctttccccccaccaccaacccgggtaacaggccccaggtcctggtgtgtgatgttcccctccctgtgtccatgtgttctcattgttcaactcccacttatgagtgagaacatgtggtgtttggttttctgttctggtgttagtttgctgaggatgatagcttccagcttcgtccgtgtccctgcaaaggacatgaactcattcttttttatggctgcatagtataccatggtgtatatatgtaccacattttctttatccaatctgtcattggtgggcatttgggttggttccatgtctttgctattgtaaatagtgctgcagtaaacatatgtgtgcatgtgtctttataggagaatgatttatattcctttgagtatatacccagtaatgggattactgggtcaaatggtatttctggttctaggtccttgaggaattgccatactatcttccacaatggttgaactaatttacattcccaccaacagtgtaaaagcgttcctatttctccacagcctcggcagcatctgttgtttcctgactttctaataatcaccattctgacgggtgtaagatggtatctcattgtggttttgatttgcatttctctaatgatcggtgatgatgagcattttttcatatgtttgttggccgcataaatacctccttttttttggcagcataaatgtcttcttttgagaagtgtctgttcatattctttgcccagtttttgatacggatatttgttttcttgtaaattagtttcacttcca

SEQ ID NO: 16995 - DNA, 1047 bp, Homo sapiens
tttcttacaacattgactagaaagcaattcctggcgcggggccactgtctgtgtggagtttgcatggtctccccatgtctctgtaggtttctgcaggtactctggtttcctcccacattgcaaagccgtgcatgtgaggtgaaccatggtgtctgcttggtcccagtgtgagtgtgggtgtgtgtgggtgcacctgcggtgggggatggcatactgtccagggttggttccctccttgcaccctgagctgttgggacacgatctggcagactcaattaattattcctgataatggaagaattgagtaaatagctatcttacttgttcttattaatctttcttaaatgtatgtatagctcacatttatttcaatgcttaatagttagaagcgtttggggcttttatttagaagtttggtgatgttttcatggccagaaatacgctccaggaacttaactcttgtttatatcaatgaacctatgatacaactgcttttgttatacgtcgtttcacttaaagtggcagtttctaagactctatcaatgatgttaagtgaggacttactgtatctggaagctatcatttgctcaaattttcatcgctctttcaaaataaaatagcctaagtgggtatccccgtcagcgtttaccagcagatcaaaaaatcttactgtaccctaccacttctggaaatgttcctacttatgggaattcttgatggggttctggctttaaaaagccccagttatgatgatgaaccaactttattatgtatagtacatacaagatattggaagacagagaccacaaactctaattcgatgcttctcaatcacatgtaagttatggtcaagaaatatataggttgtattttttatgataaatgttactaaaaatcagggaagaaaggaaggaaaaaggaggggagggagggaggaggaggaaggaaggaaaaaaacaggggctccaattttgatcttttaaaaatcttgagaatttattaatcctgctattctgactggcaagttgagaaacagcatcaggattt

SEQ ID NO: 16996 - DNA, 1040 bp, Homo sapiens
ctgtgggccgggtgcagtggctcatgcctgtaatcccagaactttgggaggctgaggagggtagatcacttgaggtcaggtgttcgagatcagcctggccaacatgatgaaaccctgtctctactaaaatacaaaaatccgccggcgtggtgatgcatgcctgtagtcccagctactcgggaggctgaggcaggagaagcgcttcaacccgagatgaggaggttgcagtgagccgcgcactgcagcctgggagacagagggagactccgtctcaaggctccagcctgggcgacagagcaagactctgtttcaaaacaacacacaaaaaaacagtcactctggtgctctgcccaccctagcccagctctgctgcttctttgctctcctccccttcaattctcactctgcttcagcccactgatctccagctgtcctcagatacatcaaggcctctcccaccttgtggttactgtcccttctgcctggaagcattttcctggatgtacatgtgactcactccctggcctcttccagcccacacacccacactcacactgggagcacgcagaccacacccttcctgaatccatagattgagccgtcccctgccttccccacagatgccctatcctcctccttcactttcttcacttagtttttcctctctagcacttactaccattgaacatttcacatatttttcttatttgttttatttgttgtctgtgtttttctagtacaatggaagctgtggggcaggggaagaggattttttgtctgttccttactgctgaaaattgaatttggtctagaagataactttcttcatcttaggaatggttgcttaactcctccaactttgcattgatagaaaaatcaaaggtaggctgggcacggtggctcacgcctgtaatcccagcattttgggaggctgaggctggcggatcacctgaggttgggagttcgagaccagcctgaccaacatagagaaaccccgtctctactacaaatacaaaattagccaggtgtggtggtgggca

SEQ ID NO: 16997 - DNA, 1026 bp, Homo sapiens
ttttctttgagacggagtcccgctttgttgcccaggctggagtgcagtggcaccatctcggctcactgcaagctccacctcccaggttcacaccattctcctgccgcagcctcctgagtagctgggactacaggcacccgccaccaggcccggctaacttttttgtatttttagtagagatggggttgcaccatgtcagccaggatggtctcgatctcctgacctcgtgatccgcccgcctcggcctcccaaagtgctgggattacagacgtgagccaccgcatcaggccccttgttttcttttgtagggctgatatgttgacccctggctctttaagatttccactgctccaatttacctggacctccctaacctcttcaatatgtctagaatgagtgaataaactgatcattttgctctctctgcttgtcatttcccccttttatccaggtctcccttctcttgtgtgtaactccctgatatcaaatcagcaagtgaatagagaagtagttattaaccgaaagctttctaatgtgccatgtcaggcactggtggagaaggcaatgaaaggcgcagcataggtgcagggcctgagctgggaaggagcatggtgccatcctagaactggggggaccctcactggggctatcgcagtgaatggaaagacattggacaagcctgggaggaaggtctgatctgcaggagctgtaggccatattaaggatgtgggcttcagttttgcaggattataagcaggagaggttatggtgatgggtctcttaaagatcagttgagtgcagtgtagagaatgcattggaggggtcaggaggcaagagaagaaagacgcaaagataggagttaagtgtgtgtggttaggaggtgtgagtgcagtgagttgggggaggaggcagtttgggatgatggagaagtcccttgtgtgcccatgcatatgtgtagctgagagggaatggagataagactgggaattgagaagctcatggtaatccatgtgaatgttgacctcc

SEQ ID NO: 16998 - DNA, 1051 bp, Homo sapiens
caaagcctcccagagtgctgggattacaggcatgagccaccatgcccagccaattcttctttaaaatgtttttaaaacaaattttttacacactgagataatttttaagggaatatacacacccaaggagctcatagagagttgagaactgtattaaaagctcccacatagtggcaagggaaagaaatacttcccctgacatagcacacatgggccacgttggagccagcaaggcccaatgtgaaagtgagacaggaagcaagttaccttcttccagggagggctgcttttacttgaacagacagttttactgttttgcccttgttgccttttgtgatggttatgaccttatcaaaaccataaataattcatttttttcagttgatttcttgctcataaagtgccatttgctttgacagttaaatgacttctaatattagccacaaacagcatgtctggtctgagtctcgctcaacatcgatgggttgaattttctcgtgtccaggaatgttcctgtgtcagtcagaaattgctctttccaccttttacattttatatactacataatttatcttatttgtctgaaataaatgtcttaagtccagttcaatggattctgcaggagaacacagagaacacagaaacaactggaagcataggcatctttgagtacccacgtgaatgaaactggaactgagtgaagacgcgctcaggctcagtctgagtatctttctgagtgctcagggtgacggtggctcttgtgggtccttgtgtgctgggggccatcccgctgtcttcctggttgtctcaggttagggcggcccctggaaagagcctgcagatctccttctccaggttcctgacagctcggtctccagccagacggcctcgttattttttattaaacataccttaccccttcagttaatttgttgttgtgaaagacaaattatattttttaatggatcaaaaacaccagaatactttccagacattccggggtattattttctgatgtgacatttgacttacataaaagcagcctgttttt

SEQ ID NO: 16999 - DNA, 1031 bp, Homo sapiens
atgaaacacatttattaagcaatctcttttcttgaaatgctgcctttataataatataatatacctttattgtatacctttatagaaaatgaaattcccttatatatttttaatttgttgttgtgatccattgagctgtgtcgattatttcttctccagttccacacttttaatatggaagcttcagaatgtgaagatttattatctgtctgctagggccagtttctgctcattattactcttttcagattttgcctgtgccaaaacctttcttttcaaagttttgcaaactttgttagcagtagcaaaatctttctcttatgtccccagaactgatctttaagggaagtttcaacaaacttaaaacttgggctattttgtttagagggttcattttcttaagaaatacgggaacccagtggataccagcgccattcatgatctaactgtttcattctcttggtttattttttccttccctttcttcctttccataaatatttatttgacattatgtggtagacactgtgcttgacttggggattgaaaggagaactcaacagtcctgattcatttattcatttatattatagtgagcttagccttggcctctagaacgctgagagccacacaggcatgcgtggaccagtattagagctcacatgtagattttatatgaagccacaacactgaaaagggaaagaagcctcctcagctcctgtttctgtattttatcctaagcttttgcacaaccattgagcagagttagccacctcctaactgaccagttatttttaatgcccggaaaattacaaagagggaattaggagctattgccgctgattttttccttttgagagagggtctcactctgtcacccatgctgagtgcaatggcacaaaacatgactataactttgaacttataggctcaaacgatcattccacctcagcctctgagtagctgggattataggtgcatactaccacgcccagctgattttttttttttttttttgagacagaatctta

SEQ ID NO: 17000 - DNA, 1046 bp, Homo sapiens
ttgctactagccacatgagactatgggttatttgaaatgtggcttttgtgtgtctgaagagcagattttaaaattttatctaattttaattagtcacgtgtggctagcagttaccatattggacaaggcaggtatagagttttgacttaagtaacaactatatttggtcattggaaatgccacctcacagggagcctggtgacaatgttcctcctaatattgaggagaactggccaggcacagtggctcacgtctgtaatcccagcactttgggaggccgaggcgggcagatcacaaggtcaggggttcgagaccagcctggccaacatggtgaaaccctgtctctaataaaatacaaaaattagctgggcatggtggcgcacgcctgtaatcccagctacctgggaggctgaggcaggagaattgcttgaacccgggaggtggaggttgcagtgagtcgagatcatgctactgcactccaacctgggtgacagagcaggacaccatctcagaaaaaaataaaaataaaaaaatatgaagaaccaaaacccacaacatgtatttgggggagaatttatggatttgaacaccgcatctttagggagaaattagtcctcagacacttgcacaaaagcaaatgcatgatttgctttaggaatagtagttggaaaaggggatgcaaatgaattgaagacaataaggccggctgtaattttcaatggcaacaagtacttaagtaaaatgaaataaaaccaatgaaaacaaggtcagtatcactcttaaaaagcctcccaggtattggttgaaaagtacagattagaggcttatcttctgcctattctgcggatggccacagtgccttatcatagggctgcacacctaacaggacagagtagaaggttttgcttgaagtccccagtgagttgccagacttggatttcacactccttataaggaactgctaggtaactgatgggtgtgggtgtgtggagagtgggcctacatttaaaataaaaaatctttatgtaataggatttctcatcctt

SEQ ID NO: 17001 - DNA, 1033 bp, Homo sapiens
ttatgaccacatgctgcataatataggaggaaaaggtgtgctttcaaattttgttaaaggagagaataatcattagggtatccttgttttagtagggataccctagtttagctttcagcctaaaatcgttttcctgggaatttttaccttctaagaattcccatacttgtcacaagcattttgtttattaatagcattgtacgagtggatataaattgtgataatttcaccaccaaatacataagactgtcaaaccctgtgtaaattttgtctattcctttataaacttgaggtgtaaatattttattaataaaatacatccacaaattctacaagatttataaaaatataatcatttgttgaaatacagctcttttatcactacaggcattttcttttcttttcttttctgaaagccataacctcacaattaaagccagaaatgaaaaaggaaactcttactcaaaacaatcctttttcttctttgtcatctggtcattccattaaatggccttaatagactaaatcatcctgagattaaaaggaaaaaaaaaaggacacgtaccacttcactgctgaaaagttgtttgtgtgtggaaggaggtagggaaatggttgctgtgaggaatgtaggagattatacttacttattttataattttatgcctcagtcatgatacagaagaaatttaacctccaactgaggagcaaatataagttatttgagcaagcataaacaatgcagagtgagaaggaacacagaacaccatgccacattccctgcattccctgtgcatttcacccaacgcagtcaacaaggctccctgagagcctcacttgcaagtgtcccagggctgcaggaaacggacccagcgtcacttaagtcccaaggcaagctgagagtttggaagaaatcttttactttgttaaattccaaattaaccttctttgacaatagttggaggaagcagacagatttccagtgggctttgggttgtataaaatcaaaggtctccacagtttagcctgggaa

SEQ ID NO: 17002 - DNA, 1027 bp, Homo sapiens
cagcaaactctgcagaggctgcacttttggaatagatccagtatgtgactgcttaccaccctcacctaaactcttatcatctctcacctgtactgttgaagtagcctcctagtagcttctgctgtgacacttgccctgttgcagcctgttcccactgcacccctcagagaaccagaaggatcctgttaaaggtaagctgcactatgttatttctctgctcagaacttggcttgccctttcatctcactcagtcaaagccaaaggaaggcctgtacctctcccttctcaccatctcctccttctctttcccctgtagctctttccagccaccctggctgtgttcacgtgcccagcacactcctgccccagagccttttcaggtggctccttgcttctggacagccatgcagctcctcactcactacttccagtctcatttccatgtcacctttgcctgaaccccctgtaagatcacatttgccatccccccaccctgagtttcctccttctctttctctaatggcacttaaccaccgtttaatatactatacattttgctcattcattttattagttgtgttttccctactggaatagaagctccacgagagcaggagcttttgcctgctcactgctgtatcctcagtacctataacagtatctggcatggagtagatcaaaatgtaaataaatatttcctgaataaattaatcagttaatccaacttcctgccattggacaactattttgtgttagtgtgtgggtgagtgggtcggtggggtcctttttacttaatgattttcttcagggactaacacattgattaggaggtaaaaagaaaactgacaactttattatgattattgaactcctaatgtagaatagctttaaacttcaagcaaacctgtagtgatgtagatgtggctgttccattttactgaagatgaggttggggttcagagggctccacagttgcctgtgctcacacacctggtgagacaggccttgactccctgtcaggtggtct

SEQ ID NO: 17003 - DNA, 1008 bp, Homo sapiens
attatgtactgtcaatatgtcagatagctttttagaaaggtggagtaacaaatgaatatagagctgatttgttgcatgccagtggtgaaactcacacacattagaataacacataggcatgtttagctgtaagcatgagggtactcaggtggcaggggtcacgcaaacattccacatatgggagagcttttggtttttaacagctttattgagagaatttaaatgccatacaatgcactcatttaaagtgtacaattcagtggcttgtattatattcacagagttgaatatactactacatgcatagagttgaatatgcatccatcaccacagtcatgtttagagtattttcattaccagctgtcaccccctactacctccatcccaagtctgcaaccactaatctactgtctttatagattttcctatttgggatattccatgtaaatagaatcatataatatatggtcctttgtgtctggtctttgactttgcatgctgtttttaaggttcatccatgttgtagcatgtatcaatacttcattcctgtttattgctgataggagagcttatatcacatcagcagaagggcctgtgagtctgcggttagagaaagggaattgaggacccatttgggagcagtgatcatgaattatagtggcactgattttctttattatgtgactttctccagcatccttacattttcagtgactgtagcagtagtcatttttgtgaatgtacctgtttatttaccctatccattattagtggataagtctttcctaatcttcactcttttgaaaactgcttcaatagatagatctttgaacatttatgtgattgtcttttgtgggtgaatttctagaaatagatttggtgggtgaaggggtatggtcagtttacattttgacacagagtgccactctgccttcccaaaagctggaaggaacttgtcttcatcacactaaaaatgtcagtcttcttaatctgtggtgatttgcagtg

SEQ ID NO: 17004 - DNA, 2089 bp, Homo sapiens
gactagtttgatttgttatatagtttttttgctgttgtacatgacttacagttgacccttgaaccatatgggtttgaacagtgcggctccacttatatgcagattttcttctgcctctgccacccctgagacagcaggatcaacccctcctcttcctcctcctctgcagcctactcaatgtgaagtcaacaagaatgaagacctttatatgatccacttccacttaatgaacagtaactatattttctcttctatatgatttttttaacaacattttctttcctctagtttattgtaagaatacggtatatacatataacatacaaaatatgtgttaatcgactatttacgttattggtaaggcttctggtcaacaggaggctattagtagttaagttctggggggagtcaggagttataggtgggtttttgactgcatgaaggtcagcactcctaacgctcacattgttcaagtgtcagctgtatatttttatttttatgctcatgtctagacatgtaactgactattgtattttcaggttataaccaggaacctttcattttaattctaataacttatagattttcttagttattctgtgtagactttcctattctctgcacattatgacagacttgcctcttcctttccaatccttacgccagtcctttttgtcttacttccatgtcaggcacttcagcacagtattgaatggaggctgtgattgatagtgggcacccttatcttagtccagattttaaagggactgcttctaatgtctcatcagtaagtatgatatttgctgtatgtttttgtaggtagtctttatcaggttagagaaatcctctgttggtcttggtttgccaggtgtttgtatcaggaatgagtgttgaattttaaagagtgattttcctgtacctgttaagatgataatgcagtttttctcctttagtctgtcaatgtgatgaattaaataatcatactaaagtattttctagtatgatattgttttgtgttacttggataacttgtacttgacaatggtgttgcctaagattttgtaaaattgtattttctaacattttatttaggtttttaaaatctgttagtaagtgagatgttcatgctgtacttgtttggcttggtttttgggttttcttagcttcattatatgagttgggaataatttctttttctgtcatctgtaatagtctgtgtaaatagagattatctgcattttgaatgtttgatatgatttgctgataataccatctagggcaggtgtccagggttttatttgtttatttttagtttattttgagggaataggtttttaactactggatcaatttctttagtaggtttgttcaagttttacatttcttcttgactgaattttaatgttacttatttttggaattgtccacttttccctaaattttcagttgtattgcataaagttgttcatagtattctttttcaaaaatgtcagctgtatctgtagttgtaatcattttttcattcctatttatgccttctctattttcctgtagtcttttcaaaaaggcagctttcagttttgctgctgttttaaaaatcaggattttttttttgtttcaagtttcattaatttctgcccctgttatcttatactcttgttctttttctgacttcttgagtcatacatttatttatttatttatttttaattttattttgagacagagtttcgccctgtcacccaggctggagtgcagtggcgccatcttagctcactgcaaccgccacctccctggttcaagtgattcttctgcctcagcctcctgagtagctagaattacagacattcaccgccacacccagctaacttttgtatttttagtagacatggggttttgccgtgttggccaggctggtatcaaacttctgacctcatgtcatccacttcccccggcctcccaaagagctgggactacaggcctgagccacagcactcagcccgagtcatacatttaaattattggttttcaggctttcttcttttctaatacacacgtaaaactctacatttctctctaagtagtggtt

SEQ ID NO: 17005 - DNA, 1032 bp, Homo sapiens
gcaggtccccccgggcctgcccttgccagccccagttcactgagcatacagcctgtgttgctaacctgggtgtcagtgaactgcacgggacatcagagtgtgctgtggcccactgccagccctctgcggaggtacgcaccgctgtgtggtaaaggagtcttccagaattatcaccgttattaatcttccaaacggagaggagtcagagagacttgaggctcttttgcagaaaaaggaatccagctatttttataactttgggagttccagaggccagtctgaatgcagtttgccaattgacaactaattggtaggagatttttgcccttaatggatactttcttgattaaactgtgaatgttcagatatttctaaaggagtcttctagacaaccttgcaagaactcttgttttaaaaaatggttgtaagtacaaaggctgcaaagactccattcttgtgagtggtaccggccttcatctccacctagtgggctttctggatcggttttgcagctcagtattttgtctccattccagttgacctgtgccatcatctctcatctcttcagagtttcttttcattagcaactgctagttcgggagcttattgactctgactttaggcagaattttattcatcagaactgagaagaaaatataggccttttagaaatttgggtcttaatgaaaagaatagagaaaatgttatttcaaagaagagaatattatgcgttcagtattctggtttaacaaatattttgtgaagtctctcatgaaagcagttcctggattttgcttgaccctctctgtctagggctgagacgcagctctggtgggcgggcatggagaccgcagccacctctcctccccatttctccagtcgcttccctcctcacggcctcttcatgcagaccagtgcaccagcctcacacccagagcagtttaagcctaactttaggttcatctgagactcccctgtcccatcacatgcaaacacatacacgcatgcacgccattgtcatcatcttgtctg

SEQ ID NO: 17006 - DNA, 1030 bp, Homo sapiens
aggctaatttttttattcgtgtgtgtatatgtagaggcagggtctccctgtattgcccaggctgggctcgaacccctgggctcaagtgatcctcctgccttggccactgaaagtactgagattacaaggtgtgagccaccacccacagtctaataaatcttaatgttgtactatttgaatcctgtcaagatgtcttaactagctaagaaatagttagaaagggtatctgatagaatgtagctctgctgtggttcttagctttttggctggaaaaaggagtgtgacatttccaaagctgcctttgagtaaatgcttacctcaaacttgagaaatgtgttcacctgtaaacctgcctttttaagaatttttttctttcttgcagggtaacgccatcctctgaaaatcctaatggtgctacttctagtgtcagccaaggaaaaccctctttaagacgaattaaagggagattacacagaagcaaaagccttgatagcatggatttctgtgagctcactgtaagtggactgatcaatgcttttctcatttttccaaagagtatgaaagtttttattttattattttcataaaaatgcagcagacttattttgtggcaggcattttttaattttagaaatggttcacccaacagtttaccaaccagaatgttttcttaactagcatggatatgataacattggtaaaatggttcataatgatgattctgatccaaatatgaagatagagaaatgcttcctgacctctacaagaaaaattgatttaagttcgatagagtattaatgtgaatatcttataaaatcacaaatccacatgttaatataagtagagacttaagtgtctgattaaccccaaacacccagcttcctggtagtgccagacaataattactctgatattattagtacggatcccaattcagttaatgatggtgctttctttctattcttttttttttttttttttttttttttttttaaagagccagggtctccttctgttgccctgactggag

SEQ ID NO: 17007 - DNA, 1112 bp, Homo sapiens
gtctctaaaaaaaaaaaaaaaaaaaaaaaaatttaatttagccaggcatggtggcatgtacctgtagtcccattccagtctggggaacacagtgagaccctattttttttagagtgagtctctaaaaataataataataaaaaatacataaaagaaacaaaaggaaaaataaaagggaaagggaaagaaataaagcatccctaaatcacaatcgtgtaagtaacacagatgcaaacttatgagatattctctgtctttaatgattgcacactgaacacttgacactcacttttctgaaccctctagagtctctaaaatacaagctctttttattaaatgataattggaaacaaaaaggagggctaaaagtggactagaaagtttgagaaaatctcagatgacatgcacaaatagaattaagactgacagagaatcaacaaaggaatcccctgtctaagaaccacaggtagacagacgttcccaaggaagcctcagggacttggaataaactaagacaaaaagaaagaatgagccacaggacaataatcagattaaacaactgcacaaggaaaaattgtgtccttgtacaaggaacagcagagccaatcaggtcctgtctcttttccatctcccttccctggtacacagaataaaccctgcagccctggcctcctgggtaaatgtggaaaatcattcctacagtgagcaatccaccttgctcactggatggatggatgtgggaagcagcaactgtggtcctccagataccgaagcggggaagggaataaatgaggaaagccagttccactgcaaagaaaaacccaccctggcaattgcagaggcctccagcctgcctactgatcttcagccagctggaatcccaaattaaagtcaaccagtcaacaggcctcacctacccacataccagccctttctttaaaggagaagctattggagaaagagacttaggcaagaataaaggaaactcctattgccaacttctataccaatcaatttaatcatttattcataatataaatgaagaaccagagatcaccaggcatttgagaaataaacagcattaaaaagcaggaccatgatgaaaaagaagt

SEQ ID NO: 17008 - DNA, 1047 bp, Homo sapiens
ccccattttagaggtggggaaacaaaggcccggagggctagggaggagggcaagctccccagtttgggcaacgcaccggctcctcgaagacgctctgtggcttggccagctgctgaaggctcttgtgctgctcctgaatcctctcctcctgcttccgaagcctctcttcctgctcctgaatcctctcttcttgtcgctggttcaggagacttatgcgctgattctttttgacctgggcctggagctctcctgccactctctctagttccttcctcaggtgctgcagctccacctcagagggcactgctgggggctccgggggcaagggttcagctgacaaaggaagcagataataagggcctctggattctcggaaaagaaaaaccctcctcttggcgcacagctcctctcaggctcctcaaacttggcctcactgctaatgattcctcgcacccagatggtagccagtcttccaaagcacattcagagaaagagcactgcgggtggctggcaacgggccctctttcctgatggggacactgagacactgagactcattgagatgacaagactcgccgtctcctggcacagatctctttccctctgcctcaaagcccttccatccacccacctccctggggcactctaagccaccctcacagccctctgatgccagtcctgctcccaggtcatgccagccccatcttacccatctggtttttgagtttggacaagctcctctccagcttctctacccgacgcatatcttgctgcttctctttctttaatgtgcaaatctgcccaaagcacaaggggaaagggccttggagagaggggctggaggctggacaggctgccctctccctctctgcccccacctccacaaagcccagacccatgaccacctctggctctactattcccattttacagatgcccagaaagatccagtgacctatctaatgtgggggggctgaagggtgagatctcacctcctgcgacatttttctcatcctctgctgccaccgggccctctctccttttaga

SEQ ID NO: 17009 - DNA, 1707 bp, Homo sapiens
tgtgactgtctagcagagtagagtggttgtaggctcctctatgggtaaaagttttcaaatggtctgtataaccatctctcagcaagctgcattattgaaaattcaactagataactcttaaagcctctttcacctgttcgattgtgctgtttgtgattttggcattttactaatttaaagtgcctattatatagaaggactttagaattcatgatgtattagactgtacataaaatatttcagacaggttaattcctcaagcttatttatatttgtaatttaattgatcaaagcatcaaagacctgcttatgaaaaccttaagatgtgtagcatctcaagattagggacatcacagaacttgctagattgagttaggacagcatattcctaaggaagaaattgatgcaattgaccggatctctttcggaaagttcaattctccctcttttactgtatttttcagtttacactattttaatgagtggaaataataattatttggcctagttcttgaaccatctgtagtacttgttggtcatttttcatgttgaggcagtgtgctaaattttgcaagtagaaagaagggtaagatgcagtttcttgccctagagaacttaaatctagtgaagaagataaagcatgaacaaatgaaaagtaatggtacaaagtggcagcataaaatcaactacacaaatagttgatttccagatgaacagagcataataagtgctgtggaaattcagaatatcccctatgtgttgtgctgctggttcatgaagagggccttactaaaccgtctgcacaaaacaagccagtccctcatatgccctttcctaagaccaagtttcagacaaaaatcttttccccagtatcctaaaatataaaaagcatgtgagtctctgtcttttgtatagccacgggggttgcagggcaggggagggtgcaggaaaaaaaaatagatgcaatgagaatataaatagtttttttgggatttacgcatttcaaacagggttaagttgtatatggctaccaaagcttgacggctttgtgagttaaaaacaaaaattatggcatattcttttatttcaagtgaaaagttttcatctaaaattcggtagcagttaggaaattatggctcatttttacctcctggaagcttggaatactgttttctctggaaaatgctttgctattttatcagttgctttaaaatgatgaaatgcatgtttggagttctctggtgggtaaaccgttgattcattttgaaatacctaagccatttatgtttttgttttgaaaaatgaaattcaagaatactaaattggttcacattttgttaaatgttctgaacccttctggttgtcttgttggtgttgtttcaattgtattatgacaaaattagattgctttgggcacttgtactcattaatattcatcctcattatcctcgagctgtcacaggaaaatagtgatatttgggaaaggtctgtataaagaaagaaggaatttgatggtgcagaattggacatctaacctcatagcaacttagaaccaccattttcttttgcagaacctttgctcaaaactgaagggcaaaataataaaggttgtttttaatgatttatctatatatctgtctgtgtagataaagataaatatatagatacacatgagtgacaagtgaaatacatgccttttgtctccac

SEQ ID NO: 17010 - DNA, 1042 bp, Homo sapiens
tgcaaataacagaagaatctgtggataccctttccttagattccccaataaaaccttgacgctttggaagattattattcaggtagtgtcttgtagtatgcctcttggtttggatttgtccgatgttttcttttgattaagcagaggttatggattttgggaaagacccacagaggtggtatcctttgcccttgtgtcatgtgagcaggcacaagacatcaacatgattggttattggtgaggttaacctcgatcacttcaggttaaagtgatatctgtcaggtttctcctctagaaagtgactgtttttccttttctgtactgtttgttagaaacaaatcactaagtgcagcccacattcaagggattgggaattaagctccacttcctggagagaggagaatcacgaatttatgggcataccttaaaactaccacagtaattagtcaatacttttgggaagatagctttgtgcttatacaaataacctgtttctccttaaagtttggctctctgaatttagcattcatcaatgcatgttgcacacagcagtcattcagtctatgacattgagtccatgatagtttcttgatctttactgtaatgttctaatcatgattttgtttccttattcctcctacatttattaattggaattcttctgtgaggaagatttgtctcttctccgccatttatttatttattattcagtcatctgttgacaacagtatggattcacagatactttttaatttactttctaatccggcatttttgttatttcttttgttgctcagattgttccagctttggccattgagagttatttcatcttggctcttgtatcctttggaaatgccgtccccccgcttttcttcacccccacttccatattttctggtattctggcattaccagaggctacagactcatcttctgtttcccctgccccagccttggaatcagccatttctctaaagagccctagttctttttattggaaaatggtattttaaaagcaagagctgggtactgagtgtgt

SEQ ID NO: 17011 - DNA, 1033 bp, Homo sapiens
agcttcccacgggcaggggcgggtgggtccatgggtcccaggcactgatacagacttgtggcacaaaattacaaaccagtagaggtcagcaacacccttgctcacctgacttgcacattcggcccttctctgggacgagacaggagagctgagccccaggcccacctgcaaggtggcctcccaaagtgtgcctaacctgcctagatccttcctagaaatagcagaggcagcaatagcttttttcccattctgctgcccaatggagtatctgccattggacagacccaaagagagccagggtccaggtgacgcttccaactgctctccactgtccgcaataaatacgaaattttaaaaactagcaatagtggttttggtcttcatgctcctgctggcacagatctgtgtagatgtccactcggtgcatttgtcacccagatacctggcttgggaatttccttgccatcctgcctggggactgccggggctccaagcacggctctgtctcttctgttccagccgtgatccccctgacggattctgagcacaagctgctgcctctgcactttgcagtggaccctggcaaggactgggagtgggggaaagacgacaacgataacgcccggctggcccagtaagatcctactctgtccctttccccagcgcccacagggagggctatggctggggcatcctggggagggaatgtaccacccctgctcctcctgggacagctggcatgcaagtggactgggtgctataagggccagctcagaccatttcaataggatattcttctcttgccagccttatcctgtcgctagaagccaagctgaaccttctgcacagctacatgaacgtgacgtggatccggatcccctccgagacacgggtgagcctggctgtgctgggaccagacctggcagcagggtccaggctgctcagctccagtctgaccagggtgcatcctcccaaatgctcccacactcttgcctgcccctgcccggccgcccaccccagccatacccacagc

SEQ ID NO: 17012 - DNA, 1032 bp, Homo sapiens
aataaatatccacgagtggaattgctgggtcatatggtaaaggtaggtaatagtccatttcacactgccataaagatactacctcagactgggtaatttataaacaaaaggggtttaattgactcacagttcagcatgactggggaggcttcaggaaacttacaatcatggcagaaggggaaggggaagtaggcaccttcttcccaaggtggcaggagagagacagcacagggaaaactgccacttttaaaaccatcagatctcatgagaactcactcactatcatgagaacagcatgggggaaaccgcctccatgatctaatcacctaccaccaggtccttcccttgacacctgggcattacaattcaagatgagatttgggtgaggacacagagccaaaccgatatcagagtatgttgaactgtattagaaattgccaaaagtttttctaaaataattgtgcctttttacaatcccaacagcaaagtatgaaaactccagttgctccatggccccttagacatctgtgctagtatgcaaaatacaattgactcttgaacagcacaggtttgaactgcacaggtccacttccacttatatgtggatttttttcaaccaagtgaggatcaaaattacagtattcacaggatgcaaaatccatgtatatggagggccaacttcttagacatacaggttccacagagccaactatcagacttcagtatacacagatttgggtgtatgtcggcggggtcccagaaccaatcctgtgcagatacttggggatgactgtaccattgatttgtgtatattgatcttgtatcctgtgaccttaaaaaattgcttattagttatggttttttgtagcttccttatgattttctgtgtgaactatcatgttctctgctaagaagaatagtgttatctcttcctttctgatttgcgaatacagattttatttctttctcttgacttatttcactggctaggacttctcatactatgttgaatagcagtggagagagggcgca

SEQ ID NO: 17013 - DNA, 1059 bp, Homo sapiens
accgtgtttccaaggccatcgaagtgtctcatgtgggtgctgattgatgggcccgggaggagcatgggtgcccctggacaacaggtgcccactgttgagagcagccttgagattgtctgtcccaccgattgcaggtgcacatagcacctcgattctctaatgcctgatgtccctctccatcagattccgaaaaatggggcagttccttctttcccagatacaaaaatggtagtttgtggcaagatgagtggcctcagcatggcttgcacgaggcagaaagacacaagcctccactgctcctgcactcaaggacctgaaccagcgtgggaagcaatgggccgtcccccaccacccaagctgggcccatgtgctccctccctcttctttctaatgtcctgtgtggtttaacttctctttttacctttctgcaaaatacaaagaacttaatcctgttggtctctgaatgaaattgaaggtgaatctaaaccacccattgcgaaatgtagtctgtctctgtgactctgtattcattttaatgggaaaaatacatgaaccttctggaaattagcttcggatttaaaactaacttgccataggatcaaaagcttatgctttttagtctgttgtaacaaaactccatgaatgccatttctgtccagtgctcttgcaagtggggaaggaaaatgctgctgttccgggtgaaagctggggctgggttttccgtgtgaccgtggtgtgctggtcagtgtggacctcagaggggcattgcaggagcacagacctcaccagtgggcaggctgaactggaggacagtgggattccttgggacctcagggaatagcctcaggaatttgccacagggcttagacaatgcttatttatacttaatttaggcaacacaggcagcaggcttttgaataaaacaccagagaccatgctttcctgagaaaaatgaaagatctactgccctgctaaaaagacttctccttactgaaaacactatgagaaaagataacctattcttaacatatatttaagcattcttgttttatgttcaat

SEQ ID NO: 17014 - DNA, 1017 bp, Homo sapiens
ctttgaaatccctttgtgtttcttgctaacccatcatgttgcctccccctgggaaacgaccactcacctgaagtttgtgtttacctttcccttgctttcccttagcgtgttgccatgcatgtctgcacctgtagtcaatatgttgcttagtattgcaagctttggccttcaaataaatggagccagactgcatgaatatttaggaactttctcctttcctacaacaagatattcctgagactcctctgtattgttgtatggaattaaattgctttttcattgccacatagcattccattgtttgaataaaccaaatgtatttgttcattctacttttgatgaacatttgacttgtttctcttttgtgctgttatgaacagggctgctgtatgcatctttagtggctctatgtgcatatggcagatgtacgggcatttctgtagggattataccaacaagtgggattgctggatgccaggacacagggtattttagataaaaaggtcagggagagcctttctgatgaggtgatagctcaggagagaccacaatgaagtgagggagaaagagtgcagatattttgagaatgcataatccaagcagaaggaacagtgagcgttagggccctatggcagaaagccctggcccaggtcagagtggctggagcccaaagagggacagcaggcgaagtcacttggtgcccggggccagattgccaagggcctggaggccatggggaagactccgaagttatttggaaagtgattgaaagtccctggggtttcaaaggagaggaacatgataagatttacattttctttttttttttttttgaaatggagtctcagtctgtttcccaggctggagtgcagtggcacaatctcagctcactgcaacctctccccctgggttcaagcaattctcctgcctcagcctcccgagtagctgggattacagacgcctgccaccacacctggctaatttttgtattttttttttagtagagacggggtttca

SEQ ID NO: 17015 - DNA, 1048 bp, Homo sapiens
ttaaaaagttcagcttgagacttccttttcctttgcctctgactgccccccgatccctgtggtgacaggcaagaatggcctgcttggggacccagtgagctcccagggcctttcccgctgcctcctctacccctgtatttcgctcagctctctaaattgactctgctccaggtaaggtcagaaacttctcccacaaactagaccttcagtttccccagtgagagtgtgtgtttgggggcagaggatttccctttcctgcttctgcagtttgggcactcccagtatttggggcatctaccaggtcctgcaggagcagtctgcttctttcagagggtctatagattcctggtttattcctgcagtcattctggatctaaaattcatgatgcgagcctccgcacgctgctctgttcttccaagttggagctacagtctagtcctgcctcatgtccaccattatcttttaaaatattgcttctatcccatcctgtatattcttcctttctggaactcagctacagctggtcactgacttatgatagttcaacttacgatttttcaactttataataggcacttacagtatttttgatttaggatgggtttgttgggacataactccatggcaagttgaggagcttctgtgcacatgtgtcaaaaagcccctttcccatgcttatgtgtatggtcttgtgcttttagctctcattccacacctccacctcccactgtgtgtctgtgtgtctgcatgtctgtaagtctgcttcaaacaatattttcttctgaacttatctttcactttatttattctcttttcttgattgcccagtcagctcttaaccatatgcaccgagttcttatttttagttcatctatttttcagttctagactggacttatttttatgtttctcaattcaattccctgccaaaattctttttttttcttctttgagatggagtctcagtctccaggctggagtgcagtgccacaatctcagctcactgcaacctccgtctcccgggttcaagcgattctcctgcctcag

SEQ ID NO: 17016 - DNA, 1058 bp, Homo sapiens
aggggagagagaaggtgagggagagatgtcctcagagcagtgcctgacagacctcccatctgcccctgtgccagaaggatcccaaggcattctgccaagactcagaccgcggttgaagcctgtgcctgtggggtctctgttggtacctggaaggtcacctgggcacggtggcacagccagtcccctacaattccctgtcctcttccagttggtcagagaagagagtctgaatgatttcagccttttgaaatttgggacttgctttatggcctagcatatgatcaattttggtaaacgttccatgttcacaaagaaacaaaaagtggattttgtgattcttggtgcagtgatctgtatatgttaattggatcgtatttttcatgtgatttaaatccatactgattatttttgtctgcttgttctatcagctactgacagcactttgttaaaacctccaactatgatcgtggacttgtatatttctctttattttctgtcgatttttcctttatataatttgaagttaagaatagacttgtcatagcttcctgtaggactgatattttattataaacttttttctgtcattactaaagttttattttcattaacgtcaacttgtctgacattggtttttctacattagctcttttgattagtgtttgcatgatatatttttaaaatcattctactttcaacctttgtgacagtttgtgattcagatgtaagcaatgtaaaattaaggttttttaaatccagtctgatcatctgttttttacttgaagcattttagtttacctacattggatgtgataactgatctagttggttatagatctaacatctcattatttgcttttgtttgccctgtcatttcctttttcatctttcctgcataattttgtataaatcaaagtatttattaatgttctattctattagcttcttcccggtacattcctttactattcttttggtagttacgatagaggttacgatatacatccttgactatcgagtttcccttaaaatagtacttgtaccatactttggacaat

SEQ ID NO: 17017 - DNA, 1077 bp, Homo sapiens
cagtgagaccctgcctcaaaaaaaattatattctgattttctgagtccatgaacacattgtccaaatggatttttctagctcctccaagttacagatagttccatgcacacacagaacccaccactctcaaatattttccccactagtatactattaaatttttcaaacatgcaaaagatgaaagaattgctcaatgaacaccatgtacccaccacctagattctacaattaacattttaccctactttctttgtcacatatatgtacctatccatctacccattcttccatgaatccatcaattcatctaattttttgtatatttcaaggtaagttgtagatacgtagcttacatttcaccttaaatgtttccgcctggctattattaactggagtgcaatatgtttttggttctttatggtaaaatctatgtgcaatgaaatgcacaagccttaggtatgccattaataggtattgacgaatagacacaccttgtgtctgaaactgtaataaaaaaatcaaacactaccttcctttcaaaaagtttcctcacttcttttcttggtcaaaacccctccccacctcagcccacccctcagcaaccattgttctcaatttttttttgcattcctagattgattttgcttgttccataacctcgtataaatgaaagtgtacagtgtgcaaggtttgtgtctggtttttccaccaagcacatttctgaaattcatctatgttgagtatattagcagttcatttcttttgaagaaagaatgaagtgtgctaagtagtgtttcattgtgtggctataccacagtttgtttttttatccatcactatttaatgggtatctgggtggtttctggctttggctactatcagtaaagctactacagacatttctgtagaagtctttttatggagatgtggctttgcttttcttgggtaaacacctatgagtgaactctctggatcccaggtagatgtagctaggtcataggcagatgtatgttgagtattacagaaactgctagaccttttcaattgtgttcatattgttttatactcccactgta

SEQ ID NO: 17018 - DNA, 1039 bp, Homo sapiens
tgaggcaagtgaacactgacctgcctccaaacagaagagggtggccttgcctgttcacctgcttcctgtgttaccagatcaaagttgggtctggctctctggcacagcaaagccaaaaactggcgtcaagactgcagtaagagaaagtgagacatttatttcagggcaggaagccaggagaattgggcagctcatgtttaagccctgaatcccccagtgccatataggtaagcgtttttacaggcaggaagaggctgggcgtggtggctcatgcctgtaatcctagcactttgggaggcctaggctggtggatcacctgaggtcaggagttcgagaccagcctggctaacatggtgaaaccctgtctctcctacaaatacaaaaattagctgggtgtggtggcatacacctgtaatcccagctactcagaaggctgaggcaggagaatcgcttaaacccaggaggcggaggttgtagtgagctgagatcgcaccattacactccagcctggagacagagcgagactccatcttgaaaacataataataataaaataaaggcagggggcagaagttacaggcaaagatataaatcaatacacggaggctgtacattggtttgacctaaaaagacaggacatcttgaaccagatgtggggtggagggcataggtcataggtagatttgaagattttctgatttacaatgggttaaggagacgaagctttgtctgcaaatttgtgatcaggagaaaagaacgttagctctggtctctgggcatgacttcctccaggcccctcaggaagaaatttagaacaaagagtggtggtccaagctcagtcctcagtttcccctgtctgaggtctgcatgccagcagatagcacttttcatttgttggtgtcctggtttctggaaatcagctcaaggacttgtgttaaaatgttatctttagtctctgtgggaactttgatctattctgtgacttaaacttccctggctattgttttaagttattcttcccttcttgcttcagttgctc

SEQ ID NO: 17019 - DNA, 1051 bp, Homo sapiens
gggtgggaagaggatgaggataaaaatactacctagcaggtcctatgcttattacctgggtggcaaaataatctgtacaccaaacccccatgacatgcagtttacgtatatcacaaacctgtgcatgtcccccgagcctaaagtaaaagttagaaaaaaataaacaagtattatgggaatcgtttaaaaaagagttttaaataaaaattagcaaaaccaaatcaaaaagcacataaaaagaaacatcaatgaatgattaaaggagatttattccagaaacatgagttaggttcagtattaggaagcacattaatataattcatcatattagtagattttatgaaaaaaatagtatgaaagtcaacatctatccataataaaaccactcagtagaagaggttcatgtataccttttaaacgtgtgtgtcactacccaacttcaaactatactacaaggctacagaaaccaaaacagcatggtactgctacaaaaaacagacacatagaccaatggaacagaatagagatcttggaaataagaccacacatctgcaaccatctgatttttgacaaaaacaagcaatggggaaaggattccttatttaataaatggtgctgggaaaactggctagccatatgcagaaaattgaaactggatcccttccttacaccttatacaaaaattaactcaagatggattaaagatttaaatgtaaaacccaaaactataaaaaccctagaagaaaatctaggcaatgccatctaggacgtaggcatgggcaaagatttcatggcaaaaacatcaaaagcaattgcaataaaagcaaagattgggatctaattaaactaaagagcttctgcacagcaaaggaagctgttgtcaggtgaacagacagcctacagaatgggagaagattttttttttttttgagacggagtctcgctttgtcccccaggctggagtgcagtggtgcaatctcggctcactgcaagctccgcctcccgggttcatgccattctcctgtctcagcctcccaagtagctgggacta

SEQ ID NO: 17020 - DNA, 1052 bp, Homo sapiens
ataatcataatcatacctatctttttaatttttttatttctgtgggtgtatagtagatgtatatatttatgaggtacctatcctttttttggtacttgctatgtgccaggcactatgctatgtaatcaccaccacaaccatattaaaatagaaactgctatcctcatttcaaaactgagtcagtgagaaccagggactacacataaattgtccccaggaatttttggaatacctgcatggatttgtatttatataagtgtttctagtgactaaaaatgaaaacccaagaaactaaagaagaaaacaattactagattattaggtcataaagttgacagggtattatagaaagctgggtgggttcttcagaatccacctatctcactgttatctattttaaaagttcagagccatacatgatgacagatatttatttcctttatgtttatttttttattttggaaaattgtttattctatttgaaaagatagacactaaaataaaacactgaattttaccagtcgctgacatgtgtaagtagtccactaatatgggccgataagaaagcccaaaagctgaaattctcctgtatttgtgaaatctaaattattttttcttaatggaaagagccactgccgttgactatcttgattccacttactctaagtggtctggaaacttccaagtataagcaaccagcccactggaatttctaaccaaatgtcccttagacacccttccctgtgtccctttttaacacgcacagtcacacacagttatgcgaatgtgcacatacattcatacacacatgcgcatgcaaacatgcacatatattcacacacactcaacataaacatgcacacagaagtcacaaatacacatacacactattaaacacatgcacactcacatggacatgcacacacacagcacatgcatgcacatgctcacacatggacacctaaacatacaggcacacctagtctatgatccattcagagttaatttttatatatggtgtaagatgtagattgagtttactttactgaagt

SEQ ID NO: 17021 - DNA, 1907 bp, Homo sapiens
gctttaaatgcagagggttgtctctcaggcaccgtgggctgctatcacagaatactgtagcctgggtggcttaaacaacagacatttatttctcacagttctggaggctgggaagtccaagaatagagtgccaacatggttggttctggtggggctctcttcctggttgctgacaaccaccttcttgctgtgtcctcacatggcagagagagaggaagcagatgtctcttcttaacagggcacgaattccattcatgaggctgcaccctcatgacctaatcacctgccaaaggcctcacctcctaataacattaccctggggggctagggtttcaatatatgaatttggtggggacacagacattcagttcataacaggaatcattagtatcataggagagagaaggaaaaataaagcacacatgagacccagtgggaggaataagagtggaggacaaagggcagagggctgggaagcatgtagagagaaggaactgatagagcagatgtggataggaaggttaagaaatctgacaacgagcaggaggctacagctgcaaccatcgtttggaggagccttgccctccaaggagagtgtgaggtgtgcttatggaaaggtgcattgacctcagggcatgcatgtgggtgaggtgggattaagcacacagaaagcagagggttaaatctaaaagtgaaaatgaaaataatacccaattttagctatattatttcccaggtaccacatggaatgcccgtgaaggtaaactagatatcagatctaagtgccagttttaactttaaaaggaaaaccaaaaaagggccacactcagtagccatgttctttactactttaaatgcaagcttccgtattaatgtgactgtggccataacccattgcctgccatatgctaggcattgaagtcaccatgctgttatttcttctttgtcatgacagtcagtgtcagagttattattacagaccaggactaacagcccatgctttttttgctcatccacagggtatcatggttataaactttagttatttatttcttcaataaacagatacagtaaccccttaacacccccatacgtggagaatacattccgaaaccccagtggatacctgaaactgcagctagtaccaaaccctatatatactaactttttttctgcatacctacctatgataaagtttaatttataaattaggtatagtaagagattaacaacaataatttagaaataattatcacaacatactataataaaatttatgtgaatatggtttctgtcgccctctcaaaatattttattgtactgtactcacctattttcagaccctggttgaccatgggtaagaaaaaccacagataaggcaggactactgtatacacatctgtttttagctggtgctctctaggtatctctgcactgggcatcaggccaactgctggatctccaggggagaatgacagacatagtccatccctacctggacgtcacagtataataaaagataagctagtaacacacacatgcacatagttgcaatgaatgtgaagcatagtaaaggaaaaaagtgggttcgtgagaaaataaaggtgggacttcgttgagataatttaaccaaggaaagcatttgagcaggtgacatagcacctgagacctaaaggatatgtgtgagtccttacaggaaagattctgggccaaggaggaacgatcctgagagtgttgagggaagaaagctcacaaagcaggaggatgaggaataaagaaaggtcatgcgtagagaggtggagagttaggcaggggctgcccaggtcacagaaagggtcttctgtttaattctctctgtaattctctgtaactgtagaattaaggtgaaggaaaagtatgaacccatt

SEQ ID NO: 17022 - DNA, 1044 bp, Homo sapiens
ccagcaatgtataaatgttcctttttctccacaaccttgccaacatctgttattttttgactttttttttttttttgagacagagtttcactctgttgcccaggctgtagtacagtggcgcaatctcaatcttggctcactgcaacctctgcctcccaggttctagcaattcccctgcatcagcctcccgagtagctgggattacaggcgtgtgccaccacacccaactaatttttttgtatttttagtagagatggggtttccccatgttggccaggctggtcttgaacccctgacctcaggtgatccacccccgccttggcctccccaagtgctaggattacaggcatgagccaccatgccctgccattttttgactttttaataaaagccattctgactggtgtgagatggtatctcattgtggttttgatttgcatgtctttaatgatcagtgatattgaacttttattcatatgattgttgactacatgtatgtcttcttttgagaagtgtctgttcatgtcctttgcccactttttagtggggtttttttcttgtaaatttgtttgagttccttatagatactggatattacacctttgttagatgcacagtttgccgaaattttctcccatcctgtaggttgtctgtttactctgttggtgtttcttttgctgtgcagaagctctttaattagatcccatttgtcaatttttgcttttgttgcaattgcttttggcatcttcatcatgaaatctctgcctgtacctatgtccaggatggtattgcctaggttatcttccagagcttttatagttttgggttttacatttaagtctttaatccatcttgagttgatttttgtatatggtggaaggaaggggttcagtttcaatcttccatacatggctagccagttatcccagcaccacttattaaatagagagtcttttacacgttccttgtttttgtcaggtttgtcaaagattaaatggttgaaggtgtgcggtcttatttctggtctctctattgtgtaccatt

SEQ ID NO: 17023 - DNA, 1018 bp, Homo sapiens
tgaggtgggtggatcacttgtggccaggagttcaagaccagcctgtccaacatggcaaaaacccatctctactacatggtggtgcatgcctgtaatcccagctactctggtggctgaggcacaagaatcacttgattctgggtggtggaggttgcagtaagctgagatggtgccactgcactccagcctgggcaacagagtgacactctgtctccaaaaaaaaaagatatggtgagcaaatgtgggcattgcattttaaaaaccttagtagttatttgaaagttttatgtctcttttgtctattatgttaacattaccatagaaatggcaacgtgcatatttatctaattaagtctaaagttagccaaactgttattttcctcctggattttgcaatgacttgtgactacttttaagatattatttcatttcattttatttcattaattttttgagaaagggtacaaccaagagtgaatatccagttgtttttgatatactgaatccaatacttttagcattggactggatgacatcaggcgactagtagacatggaacctcaaattgcattcattatagaaagccaatccacaggtgtttgttgggtccctacactggctccaagcactcagtactatgagagttttgagtggtttccaaagtcttttgatccaagatgagtggcataacaatacctggggtgtttgtaaatcagtcccagacccacatccagaaatttctctgtgacaagtctgggctgctccccagaaatgtgtgctttcataagaccgtggcctttctgaagcccccagcgagtggacagccccttccccagcaggtccagtgtcctcagagacctctgtacttggtatctgatctgatgccatgtggcatttacaggaatcctggcatggtgtgggaatcccttgctttaaggatacttaataggtgtaaatgaaagtttaaaatcgtccgctgaagagtaatttgagtcatcttaaaatcaggaaggctgct

SEQ ID NO: 17024 - DNA, 1039 bp, Homo sapiens
tgaatgtttgccctatcttatgttcttgggatacactctacttggtcttgattatttttcatttattacaggactcaactaatacagtatgagtgattatggcaatgttcatgttggttgttgatctgttcttttcttttcacattcttcttttagtgtcagaggtatgctagcctcatgccaaacttgggaaatgagtttttctttctcttatcttcttaaagttgtataaaattactattatttcttccttaaatatttgatagaattcaccagtgaagtcatctatgtcttttttaagggaagaattttcataataaatacgattttcttagcagatacagattcagaataaaatatgcagttcagattttctgtttccttttatgtcacatttagtaagttgtgttttaaaagaaatttgtctaattaatctaaatgtctaatttatgaacatatttcttcacagtattttcttattctttttatatgtgtagaatctgaggtgctgttccctccttcatctgtgatgctgatgatataagcgagctcctgctttccctctttccctccctcaccttctcatttctctctttcatcagtcttgctaggtgtttgtttaccggtcttatgaatctttcaatgaatcaaattttagattgtttaattttctcttcttttcttttcttttcttttttttttgagatggggtttcaacatgttggccaggctggtctcaaactcctggcctcaagtgatgtgcctgccttggcctcccaaagtgctgggattacaggcatgagctaccatccccagctgttgattttatttattttctatttcgctgatttcacctttcttttttccttctttctacttactttggtcttgatttgcttatctttcatatatacttaaggtgaaaacttagatcactaattttaagccattcctcatttatgtgtttagtactataactttcactggaagcacagtttagctgcattaccaaaattatatgtttttattatcttcaagt

SEQ ID NO: 17025 - DNA, 1051 bp, Homo sapiens
ttttgatattgcataatatatagtatgtcaacatttgaaaaagtttcataactcagcaagctaatgttttccagatgactaatgcatgatgtagcaaaattatgcatgaataaaagattcatttgaagtgtaagctagaccaatggattttagagtaacagagtacaaaatgttcattgatgtcatgttagattccacagtgccactagcttttaagcaactatcacttgtcaagtttcagagtgatatcaaagaatatcctacaattatttgaaaaacctactaaaatactcctcacttttacaactacatttctctatgaggatagattttcctcatatacgtcatccaaaacaacatagttttgctttgtagttgtactgtatttgtatgtatccatacacatcatactttagcattgcatgttttcaactttacataaatggaatcatactgtatacattttgtgtttttctttcttgtttgattcaacatatacattgaatcaaagcatcactgtaggtacctggagttctttcatattcagtgttttatttgtatatgaatatgccacattcatttataaattattttaaaattttaattttagattcagtagctatgtgtgcaggtttgttacaagggtatattgtgtgatgctggggtttgggcttctgttgatcccatcatgtacatagtgaacatagtacccaacaggtagtttttcagcccttgcccccctctctccttctcttcctttggagtttctggcatctgttattcctgtctttatgtctgtgcatacccaatatttagctctcacatacaatatttggttttctgtgttaattgcactaggataatggcctccagctccacttatgttgtttgaaaaggacattatttcatcctttttttggctgcagagtattccatggtgtatatgaaacacattttcttttttcagtccatcactgatgggcatctaggttgattccatgtctttgttgctgtgaatagtgctacaatgaatatacgtatgcttgtatct

SEQ ID NO: 17026 - DNA, 1049 bp, Homo sapiens
acttaaaaacatctcatatagagaagaaggaagtgatgaaacagtggaaatcagggctaattggaaggatgatgtcccttagtaacttttagcaggtgaggagggtagcatccaaagggaggtaaggtgagagaaggatgaaggatgagggtacagaagctgaagaataatgatagggaagatcaagagttctccattagaccactgtgtggagtaggtagcaaagttataagggagactgaagggaaagagtttgttggaaatttgagaaaaacagaaaagtatgaaattgtcatcttggggaataacaaagtgaaatttccatgaaaataaaacaatttagcagttttcagtgcctatatgatataaatttgaagacagcctagtcatcagagttctaagatttttttccagtgatgttcaggtttggtacaagtccagagtaagtgatgcagagtagagggaagcatggacaaagcatgaatattatgtgtaaaagcatgactctggccgggtgtggtggctcatgcctgtaatccagcactttgggaggctgaggcagcaggatcacttgaggtcaggagtttgagaccagcctggccaacatggcaaaaccctgcactactatacaaaagatagccaggcatggtggtgcacgcctgtatcccagctactcgggaggctgaggtaggagaattgcttgaacccgggaggcagaggtggcagtgagctgagatcacaccactgcactccatcctgggtgacagagcaagactccatctcaaaaacgaaaaggcaaaaatgcatgccaatgtggtaagccacgatctattaggtgaggcagttaaagaagcaggactcagaaggaggaaagtgtgagaagtgacaggattagcagaatgtaggccctgagaagggcagactcatgcacacatggccattggataccttgcagaaattagtagttctctttggggtaggtgccaaataagtggtaattgactctggccacatattatggtcacctggggacctttaaaaaatttatc

SEQ ID NO: 17027 - DNA, 1079 bp, Homo sapiens
atatggggagaggggagggcaagggatgctatggagagggcggcaggactggagcaggtggaggtcctgtgagcctggccatggagtatgggttttggcccaaatgtgatgggaagtcattgggaggttttaaactggaggtgatggcatccggtttctgtgttaaaaaatgacccttcctgctgtgtggagaatcgaatgtagtcaggggtgtcagtcaggagacacattcaggcagccagacaagaggttttatgaagtaaataaagtggcagagagatgacaagaggtggagggatttgagatgtgttctggatctgcctgctgattgcacatagttgctgaggagcggacgagaaatgcggagggctttgatttttggcttaagaaacttggtgggtgctgagaagaaggaagtgggagagggagtggtggtaggaagtcaagagtcctggttgggcagtacttggtttgcagtgagtaggcatgtgaagtggggagctcggttaggactgagtatcttctctacatcatccaggtgctatttagagccttcatgggagtgcatttggggagggcataaatggagatgagatgcaatccaggctgagccctgcattccatgacatttgtcaacagggtctgaggagcagccagtgatgaaggaggaggaccaggagagggtggggtgtcaagacagccaaaggaaggccatgtttcagaaggagggagggggccagctggatggaattctcttgaaggctaattaatataaaatacacttcatgaatgatcctagaaacccacatcagcacaaaggccagccagcacaaagctgaatagaaagcctcttagatgctggggttggtccgggacgtgttgtaccttactcatccatcatgtgtctgtgtcgcatgcgtccctttagttgagctttccctattctacaactagaagcagagatgtgggcatttcattgaccctcctactcaaaagagggacacagcaagagaaccaaaatagaaggtgggatgatggaatacaaaatttgaagaatcccagaggagtcatcaacccac

SEQ ID NO: 17028 - DNA, 1002 bp, Homo sapiens
cagggaagttatcttttggggtggatagaagagagggttcacgcgtcaggcccttcctgcatacagggccctgtgaggtcggctggcatcccaggcattcagtgggccctggggagggtcaggaggagcccaggcctgtcctttgccaaggtgcatctacaggagcctgccagtgcaggccattgccaaattgtccagctctctaggttaccaggttggttacacctgccttttctatttcattacaaatcaggctcactactcctccctcagcacttggcagcctctgggctgatgggcctctttagtgctgtcttccagccttccaacagatcctagaccctacagggaaactaactcacccgacctgttgcctctgcaggggctgtgtgtatgtggagatcgggcaagaaaaggccaaggatggctcctggctgttctttgttcaagatgcctggccagccgaggagcttctgcacacagctgctttctgatgcctgtcttcttccttgcctttcaacacggtgcctgggacaattatgatgttattatgtgctgtacccattatttctttagcaattgcttctgcacatgttgtgaacagttctcctagagcttaacagaaatagctcagtggcacttaaaccaaagtggtctatataaacacaggatttagctttgtgccaggtgggttggtttgaaacttatcacttgtcatgggtgcatcagcaggtgatttccagcccaggtgagatgatgtttatggaacccccatgatgacagctcctctggggaaggagagtttcttcggttccatctagcatggctgggattggccatccctgccccacccctccccagcacaagagaggtgtcggtttctgaagtctgccatcattcactgcaccagccttcagacttgtgaagtcgaggggcagtaggagaatgaggcagaaattctcagacccctcacagcactacatcctgaggtctccatggagg

SEQ ID NO: 17029 - DNA, 1034 bp, Homo sapiens
ctgacccaaaaggaggtggtgtcaagaacaacggtacaactcaagctcatgctggacctccgagtcaggcaccttctcctctttccagagcctgttttctgagaagcttgtcgcggctcatgctctgaaagtgctcctgtgaatgaggtctgtgctggggaaatgcagtgggtatcacttttgaagcttagttgtgtttcaagaagcccagcgctccatacaggggctcctgtaatggaaaggcagtgctgctcaagtaggaagatggttttgctgttttatttcattgctttgacagttcatcctggcacttgctgatggagtgtcaattcttgagttgtgttttagttgaaaccttgtgaaggaaaaacctggtgaggatttgtttgtgtgtgtgtgtgtgtgtgtgtgtgtgtgtgtgtgtgtttggcatttgttagctcaattatataacaaaatattatgttttggggttttctctcttctggcccctcctctatgtaaaagtgctacgtgctctgagtgtcgctaacttcaactgacagacgaaactggcacctatcagcagcagggaagcttcctcgaggttattaaatacaagaaacagcatattggtaacagcggctctctcaattggatggtttcctctaaattcctgggaaaggttcaggtcaacagtctgtgaggcttcagtgtatttgtgggtttttttggggggttgggggagtggaggtggttggtatatgatttccattttacttctttaggaatgaaagcatcttaatcaaatatagcatactaattcctggaagaccagctccagggggctctgctgatggttttaaaccatctcaggcagacaagtgttactgagcatagccgtagtgttaggcagggacccttaacccaccaaatccacgacaggcacttcccaaactctccctctataatcctgccaaaactggagctggggatcttaactgccagctccccaggtaggagactgggaatttttctgcctttcctgtggcatg

SEQ ID NO: 17030 - DNA, 1024 bp, Homo sapiens
ggatacatatcacacacaccacacacacacgcacttacacacataccatgcacatacacaccatgccacacacacacatcaaatcaaccaaaaggtctcaataattcatttcctaaacatctctccctctgtctacctctttccattcctgctctactagatgcagccatcactgtctctccctagctagaagtattattatattttccaccaaatgtgatttaaattgcccttgaaagtggggactgagacagaggttgaatccgtgcaccttctctgcatgcctcacctgtgtataatgtttgttctcactgcagcccctcctgctccataggagatcctggaccctgctttgagactttcaatgcaaggcacactccttcacaggcacacaatacaggctgcagtggcttggctttgcacctcatggactggggactttctcatcagagagtaccctgtgttgccctgctgggtgtcctttagggctcagagcctcctggggatggaggcctgagctggctgataccacagagctaggagagactgacttttggacagaattccagaaggggccagcctagtccttgtagtgcctagcctccaacagttagtagagaaccattactaaaatggctctttggagcagcagacatagaggccactggcattagttgaggtggctaccttagtctgcttggactgccatacaaaataccacagactgggtggcttaaacagcagtcattgatttcctcacaattctggagcccgaaaatcccagatgaaggtgctggcagggctagtttctggtgagggctctctcctcagcttgcagacagccgccttcttgttgtgcccacacatggcctcttttctacgcatgcatgaagctagaaccagtgatctctggtgtctctttttcttcttatatggacacaaaccctattggtttagggccccaccattatgacctcatttatacttaattacctctttaaatgctctatctccaaatgcagtc

SEQ ID NO: 17031 - DNA, 1022 bp, Homo sapiens
tcagtggctcacgcctgtaatctcagcactttgggaggccgaggcagacagatcatgaggtcaggagattgagaccatcatggccaacatggtgaaaccgcatctctactaaaaaaaaaaaaaaaaaaaaaaggtacctgggcgtggtggcacacgcctgtagtcccagctactcgggaggctgaagcaggagaatcgcttgaacccgggaggtggaggttgcagtgagctgagattgcgccactgcactccagcctggtgacagagcaagactccgtctcaaaaaaaaaaaaaaaaaaaaagaaatgaaaaactgatttatgccacaacgattgaccctggaaaatatgttacgcaaaaggagccagtcacaaaagaccccatattatatgattgcatttatataatgcccagaataggcaaaccaatagagacagaaagtagtctcgtggttgcctagggctgggggcctcggagggaatggtaagtgacggctggtgggtgcagggtttctttcagggtgatgaaaatgctctagaattagattgtgccgatggttgcacaactctgtgaatatactaaaaaccattgaactgtgcacattaaatgggtgaattctatggtaagtgaattatatcttaataaagctggtcaaaaaatgaaaatttacaaattgaaaaaataaaaagaatctttcagccctgatttcaaattcctggagaagtactctggtctagcttgtgggcagccaaccactggatccagtgttgggacctgttataagagcacagctaccagaaaatggtggggccagttttctatgaagcaggcaggcagagagagcaataggtatccatgcatgaggatagcaatagtgtcttgttactaggattaaaataaataaatgcatgggaagcatttagtactgtgcctgacacactgtatatgttgaccataacgattgcatcaatgtcagtttacatggggaagaatcgtgcgatatctcgtagaaaatatagctc

SEQ ID NO: 17032 - DNA, 1068 bp, Homo sapiens
ttttaggtctaacatttaagtctttaatccatcttgaattaattattgtacaaggtgtaaggaaggtatccagtttcagctttctacatatggctagccagttttcccagcaccatttattaaatagagaatcctttccctatttcttgtttttgtcaggtttgtcaaagatcagatggttgtagatgtgtggtattatttctgagggctctgttctgttccattggtctatatctctgttttggtaccagtaccatgctgttttggttaccgtagccttgtagtgtagttcaaagtcaggtagcagccagagagaaaggtcgggttacccacaaagggaagcccatcagactaacagtggatctctcagcagaagctctacaagccagaagagagtgggggccaatattcagcattcttaatttcaacccagaatttcatatccagccaaactaagcttcataagtgaaggagaaataaaatccttacagacaagcaactgcaggcctgtttctaactctgaagttggaaatagcttgggatgtggatccataaaaggacagggcagcaactggtgcatttgtatgccaaggcctgagagtgcccagtgcatgctctctgactttgagtgctgagctactgttggagcaatgtgggcccctccaggaactctcagctgggcagaggcaaagaactcaccagcctttcacaactgagcataccatatttttcagaactctatttgtttgctatcaacgagattaaaaaatacaaagcattggatatggaagagcacatgatctcaagagatgactgctgagtcagaccaggggaaggcagggaaaggctttgggaaggccggagggcaaagaaaggagagaggcagcttagaggttgatggctgggatgttctggagcctatttgtggacttctgactgaaatttcttaaattctgcaagctcagtgagagaaaactgtttttttttaaaaataaaaagcacagttttttagagtattacctacaactggggaaccattacttaaagttcagggtttgatgcttcccc

SEQ ID NO: 17033 - DNA, 1033 bp, Homo sapiens
ttgaaaataactcttgcctgattataaaggtcttgagttgcataatttcctttaaaactatatagagatatttctcctgtcttttagcacagagttatgagaaatttgaagtcagcctgttttgcctagatgttcatgtgattcttttaattcggttaatttacttgaatgtttctggatgctggtattgctgtatcactttcttttaaactaagtaaagtaaaacccttgtaattgacagagataagtcagtttatttcagaagttttcttgtattatatctatgaccttttttctgttaacaattcaagaatgttaattatatgcacattgtttcttttgtcttatatttgtcatctctttgataaagttgatatttcatattcttctccatttcatttgcttatctctggggttgattgcctttattctattatttagttgcatctaatatggttttcatccctattccatttattttaatttttatttcttcatttcttttccatgctctgattctctttctgttggtttatgatctcttctttgttgttgttgtttttttttttcctttttaggaaagtgtggtaggcaggaagacaacccctcaaagatgtcagtatcctaatcccccaaacctgtgaatatgttaccatgcatggcaggaaattggaactgaaaaatgaaatgaagttgagcatggaattaaggttgctagtcagctgactttaaaatacggagactattcctggattgtctgcataggcacaatataatcagtagggtctttcttaaaagtggaaggagggaggcagaaagatgagaaccagagtgatggcagcttcaggactttgcctgacatcattggaggtgggggaccaagagctgaagcatatgggggtttcagaagctgtaaaagaagagggaaacgtttctctttatggtgggcagaataatgaccccccagagatgttcctgtcctaattctcagaacctctgcatatgtcatcttatgtggcaagagggagttttc

SEQ ID NO: 17034 - DNA, 1029 bp, Homo sapiens
aatggaagaaaagacatgtgatcgattaagataattgattacaataccttcctatgttaaaaaatggtggcaaatcctaaacctcaaaatctcttaatatctccccagaaaggaagataccactgccaggcctgtgtcactgctgggtacgtgctcagagttgcggctgtcctggctctctgaagggcccgggccagaggtcctccacttcctattgaaacgataggggtactttaaaaatcttaatgtctgggcacttcctctagaggttctgatatcagcaaccaagccgcaaccttggaacccattgggacttttataaaagcccctattgattctgggtttgagaaccactagcttcaaggaagttcttgtaactttataaatgcagggagacaggtccaggagaaacagggaggaccatgagttcctcttctcttcttatatattatcccacaagggggaaagaaagttggtctccttaaagcagaaaattgaaagacatctgcaaggtgaactggtagaacctttactatttgatcaaatgataattttatatcacttaactgaatatatagctggcttacaaatgtttatgttcatgagatctgttgtataatgtggtggctaaattaataacaatgtattatagacttgacaattgctaaaagtagagttgaagtgtttttaccataaaaagtaataagcatgtgaggtaaggcatacattgattagctctatttagcccttccatgtacaacatgatgtgttgtacaccaaaatataaacaacaaaaacatacagttttgtcaagttaaaaaataaaataacaacaaaaaaatacaattttgttagtaaaacaaacaatagtaagatgtacagccatgcagaaggaaatcaaactgtttgccaggtttgttaacttgcatacagcatatcatcatgtctttgcagttttatagtgctttgcagtttgcaaaatacttttgtgtagattatctaatttgatcttcccaataactctgttgt

SEQ ID NO: 17035 - DNA, 1072 bp, Homo sapiens
ctcaggtgctgctgtgcataagaataacaggcatacaagggctcattgggcaggatcattacagaacgtacttccttatccttggggatgatgaaagattagtcctttacatgaaaaactagggggtgggagagaggaaaagaatagcattccaaaggtagagtcctgggagtagatttcagggaggagagtgggcagtgactgtgacctgaggtactaccagagagggtggtcttggcattttcccctgggggaggcatgacaccaggctagggtctgcactgtcacccccaccctaagtatattcccttgcagagcctagagctgctcccagagcatgtccttggctctgagaccactggccatctcttgccattggtgttgactgccatggtgaaggacacaggggtgtctgtgccatctgtgggatgacatggtccccccaaggaaggatgtgggtcctttgcaagtacagcattagattattagattgagtgaaaactctctggttgtctgtttaacttggcattgtgggtctgcagctattgggtaggcacattgaaaggctgtacttaatcccttggaaatatgtcctagaattgccaggatgggttgcagttcatccccaaatctcttgattattctgtctctaccttgttgaggtattgaatgtgaactcagctcttgggtccacgtggttttaagtgcccactgactctgggttctcagacacggcatgcaaccagttgggacatccctccagggtcctctgcctgttctggaagaggtagacaaggtttcttctaccaaagctgacttatcccatttacaatctggcaagcagtatgttcagaaatgcatcatcagaaaaggtgcttcaggggcctagaaaaggagtggatacaggtgagccagcccactgcttagcatgtatggtttattagaagatcggtgtgtggttgcattcacattagactctttccatgcccgttgactagtgactagagaacctggtccaggctggggaaagaaagtgcccccagcctagaggaggcctcattctggcttgggt

SEQ ID NO: 17036 - DNA, 1085 bp, Homo sapiens
ctgtgggtacacagaagtcaagaattaaggtttgggaacctccacctagatttcagaagatgtatggaaatgcctggatgcccaggtaaaagtttgctgcaggggtggggccctcatggagaacttctgttatggcagtgcagaagagaaatgtggggtcagagcccccacacaagtccctcctggggcactgcctagtggagctatgagaagagggccaccatcttccagaccacagaatggagatccaccaacactttgcaccgtgcacctggaaaagccatagacactcaacaccagcccctgaaagcagccaggagggaggctgtaccctgcacagccacaggggtgaagctgcacaagaccacgggcatccatctctagcatcagcgtgacctggatgtgagacatggagtcaaaggagatcattttggagctttaagatttgactgccctgctggattttggacttgcctgggccttgtaacccctttattttggccaatttctcccatttggaatggctgtattaccaaatacctgtacccccattgtatctagaaagtaagtagctcgcttttgattttacaggctcataggcagaagggaattgccttgtctcagatgagactttggactgtggacttttaagttaattctgaaatgagttaagactttcagggactgttgggaaggcacaattggttttgaaatgtgaagacatgaaatttggaggggccaggggcgtaatgatatggtttggctgtgtcctcacccaaatctcaacttgaattgtgtctcccagaatttccacatgttatgggagggactcagggggaggttattgaatcacaggggatggtctttcctgttctattctcgtgataataagtaagtctcacaagatctgatgggtttatcaggggtttccgcttttgcttcttccttatttttctcttgccactgccatgtaagaagtgcctttcacctcccgccatgattctgaggcctcaccagccatgtggaactgtaagtccaattaaacctccttttgttcccagtttcgggtatgtctttatcagtgg

SEQ ID NO: 17037 - DNA, 1049 bp, Homo sapiens
atgcatctaaagccttgtttggtaaaattgcatgattccacaaaaccccagtccttgctattagcaattactgctctacagcatctcacattctgagaagtcaaatacacattaatgctaatacaagttttaaatacatctctcttagttaagtagataagtctaaagtaaactcattttgtaggattgaagtattttgcgtttctccttccaaggaaatattttctatttgagcatattttattcttaatctcgttttccttataaatataatggaaatttgatgtctgaatgaatacacatgagtaagatgcagtattgacttttatgaaatataaaattagaccttggaaattcatttccttgtctgttcagcgtttcatttgttttattagattactgttaagtttcacatggtgctggggattggtgtgaacagaccatacacccatccctctgtgagattagattaagtttctcagttactgagacaaaggtttaggagctcactcaagaggaggtggctgcctggagtgagagcagacgtctgtctgtggtgcagacaggttgaaccttgctacctctgagaagaccccagttttcatgcccccagggctaacacacccatcttcaaataatttacccaaataatttctgcgctcacattttaggaactttctatgaattaagttctccgagtttttacagtaagcttagggttagcctgttagcctgtcatgtcttcgttgcagaagagaccacacaatgcacagtgtcctgggactcagcacgtcctccttccccagatcaccttacatcatccctgaagtccatgcaatacccttttatcttgggggtctaaaaaccataccatggttgcagcccatttcctcacaattcctctaatgatgatttgaggtttcaagacaacgtgtgttattgtagtgtgggcaacacatttgcatgtataatttttcatgccttttacaaaaattgtttgacatccaagaggtacatagttaactttttctttttaaaatgtatgaatt

SEQ ID NO: 17038 - DNA, 1041 bp, Homo sapiens
tggaggagactggacattggtacatatcctacaatgcctgccccatggctctggcctcatgccatgccatgcaacatggcacctggcatctcagtcaacagatgtcccagatctcagtcgttggcatttattaccaaattattctgccatcttatattcaagtccttccaaagcctttcttgttgtgggagggggagaatcttattttttaaattttattttagttattttatgtatataagttgtacatcatgatggattttttaaatacatttaattgtgtatgtttaaggtaagcatcatgatgtttatatatatatatatatgtgtgtatatatatatatatatatatatatatatatatagtaaattggttaatatagtgaagcaaattaatgtacccatgttttgtgtgtggggctgaagtatctacaatcaactcatttagcaaaaatcctgaatacaagacactgttagtattggcggtcctcatgctttacattagatctctagacttgtccaccctccttatctgcgactttgtaacccttgacctacttctctgcaattccttcctgccacactgcccctggtaaccacggtgtaattctctatttctgtatatttgaatttgtttaaaagattttacatatgagtgagattatgcaatatttttccttctgcatctgacatatttacttagcataatgtcttgcaattccatccatgttgtggcaaatggcaggatctccttttttgaggctgaaggatattcctttgtacatatatatcacagtttctttacccatttgcctgccaatgaacatttaggttgtttcttatcttagatattgagaataatgctggaatggacatgacagtgaagatatctccctgagtgctgatttcctttcctttggatgcatacccagaggaggaattgctacatcttatggtacttctaactttaatttctttaggaagctccacttgctggtgtcaggtgataacgcataatggttttgatttgcatttccctga

SEQ ID NO: 17039 - DNA, 1147 bp, Homo sapiens
agaaagaataggggaggacttccttgcctgatatctcagatcatgaagctacagttctctccctgctttagagaaaaaaaaaaacagactttttgcaaaaatcaattattgaacatattcctatattctagatttataatgaagcatttttgtacatattcattaaaaagagcaattagaacatttttctctggtttatagtaactaggatggcaacacatatatatcttggaagtattttgtggtatgattcttcaacataaaattatttttcaaaacttcttagaagtctccaggtactcaggaataaggtcattttaaattattccttattgactataagaaaaataattaggcaagatcacaaaataaatgtttagactgtttctcctgtttcctgattttcaggttattttttatcccaattttattttgctgtatagtcataaatttcatctttgaaataaagcatataatcactttttttgtttgtttttttgagatggagtctcgctctgtagcccaggctggagtgcagtggcgcaatctcggctcactgcaagctctgcctcccgcgttcacgccattctcctgcctcagcctcctgagtagctgggactacaggtgcctgccaccacgatcggctaatttttttgtattttttgtagaaacgaggtttcaccatgttagccaggatggtctggatctcctgaccttgtgatctgcccacctcggcctcccaaagtgctgggattacaggcgtgagccacagcgcctggccatgctttctattttatatgctgtttttgtttctttttcatccctgatcttcagttagctgctggcattttacttgttcccaactaatttttcttctaatgacttgaaaagtatatgtttagttcctatatctttatatttttatacacatagctacacatatgattgacatccagagctaatcgtatagataaaatgagactcctagcatgcttttacttctctctccttcctcctttccagacttcataactttccatcccgagttatttcagattttagttttttattataggtttatttttataatttagacttaaaagtaaacttcactgattatcttgctcacctgtgcttcttatatccc

SEQ ID NO: 17040 - DNA, 1051 bp, Homo sapiens
catgccattctcctgcctcagcctcctgagtagctgggactacgggcgcccgccaccacgcccggctaattttttttgtgtttttagtagagacggggtttcaccgtgttagccaggatggtctccatctcctgacctcgtgatccgccctcctcagcctcccaacgtgctgggattacaggtgtgagccatcgcgcctggccaaaagggagttcttatattggcagtgtatcatgattaaagttatcctccctctttctctccctcccacatatatattttcgtgtcagtatatgtatatgtgatttgtgctatttgtgtgtgtgtaggtaaatgaaagtggcatcaagagaatctcacattaaaaaaaatttgagatagtacaattcttatgcatcatatgttgcataacgtttgactattaagaaatttgcatcacacgtctacttatttcattaaacatgttacagtcaattaattcacttacaccctccatttccttcttccccctctctcgttctcctgctgcagggtcattatacgttcctactcacaaaatgtccttgttttttcccttactcctgtcattgatcttctgaatctttccggcgaacttaacatggatgttttgatagaaagctctggcattaactctggagttgttttgcaaggaaggttgttcgctttttcaccattttttttttttcaggtccttgaagtgttttcacatagatatttcacaagagccatttcagaattgagaacatttggcgtgcactcttcctcttttggtcccacagtttttatgtgtcctacttgaaattatgtttgctcccgtttcaattgtaatattgcacttactcattagtttttagtttgaactctcctgcgaggtctaatgtagagtttggacaagaacacagattcataataaacctacccagtcaatttggtataaaggcttagaaggtggaactggccacattttgaattggaggtaaggatcaggaatgctaatggagagacataggattttcttatggaaacaaga

SEQ ID NO: 17041 - DNA, 1056 bp, Homo sapiens
actcgagcctgggcaacggggttgagaccctatctatctcgaaagatgaggactctctaagctacaaaatagagagagaagggggaagagctaggctggggagcagagcccagcattttattttttttcttgtaaatgaacagttacagggtctgagttatcaggtaataaaatctatacactctatacattctgttttaagttttataggaagtccctagcacccaataggttcaagtaacttgttattcagtgaatgctttaccgtagaataagtgaaacacttattagttgcctactgggtgccaggcattgttctaggtactgggataaagcagtatgaggctgggcacagtggctcacacctgtaatcctagcactgagaggccgaggcaggcagatcacctgaggtcaggagttcaagaccagcctggccaacaaaaacaaaaaaaggcagtatgaaaacagacatgcccaaaaatatcccaggtcatggggcttagctattaatgagaaaagacagacatgatgaggcctgaaaactgaacacagaatttagcaacatgcaggttacaggcccctttgacaagacccaatattatgatgtagtgggaggaaagcctgccagtaggaggttcacaggagaatgaaaagagaaaaattgaagacagtgactgagcatggacagctttcaattgtgctgaaagggaaaaagaagtagggcaatagttggaagtaaaagtggggccacagatttttctttgtttaggattaaaaaaaaaaaagcatatttatatggtgatagaagaagtccagtagagaaagagaaattgctggaggtatgtgtcccggatggaatccaatcacaggttgaggggctggccttttgctaggagcgggaattgtccacaacacacgtctatcacacatgggagagacagagtctatggacaaaggtacaggctcatggggactcctggaagttcctttctggttactctttttccagcagagactgaactatatgacctaattggctttatttacgctacagct

SEQ ID NO: 17042 - DNA, 1012 bp, Homo sapiens
ccaaacctgcacattcattcttgctctattcccagcacaggctgtttgggaagcaagaagccatgtctctctgacacatgctggcagggaaggagaaaaatccccctctgccccaaacaagcaaaactgaaaccaatcaatgtttgccactaaacatacttaaagatttagcaataagctgattccatgccgctggtggaagacggaggaatgcttgagggaacgtttattgcatgctgaatccagagctggaaaccaggtacctctcccattgaatgagtgaactgtaaagttttcctacaaagccaatgatgtttgaatatttgataactgactttttcctcccttgttctctacctttccatttctttttcacatttagtcacaaaatttgacacatcctttcactcatcctctcacatgcacacctccaggctcctgtgtcacccacacatgaggtcgttatctttcttagcctgtctctcactccgttgtactctgatttttctgctctttgttgcagccacccactccatttcttattgtcagacaatttcttatttcatattgtctctgtaatgttctccccacctccagctcttctagtctgaagcagtagctataagcatttagaaaatgtcagtgtttgttgggaaggataaacaggaggactttggcttcttattgagtcacaaaaaggtgatgggaaaatgcattcacgggattaatggggccatgtatgtatttcagataacctatgccctactaagtctcaagatttaggaaagggagatctaacacgggtatatgattcttaatttctcacctgacccgtgtgctctgtttcatctttattaatcaaatacatcagaaagaacctggaacgaggaaaagatagtattagatactctggtcaagacccaagttcattcgcatggattaactgtgatcagggctcagaaaggctagttggtcccacgctatctacagtgacttaaatgatcagggaagt

SEQ ID NO: 17043 - DNA, 1033 bp, Homo sapiens
gttaggtacaggtctatttctggacttacttctttggcatctgtgcgcatacgtgctacacactgttttaatcacaggcttttaatgtgttttagtatttctcatggctcttccttttcagtgtgttcctagctgctactgtatgtttatttttacattcaaactttataaagaaaaactataaaaccactgtaaaagagctcatagctattgggggggggttatattaaatttatacattaacttagaactgacattccactcctcccattcctcaaatgtaagcaccttctatgggtataattctattcatctgctcctccctgctctttgtgctattgttaacttctacgtatgctgtgaacctgactttacaatgttgttatttttgcttacatgatcagttgtcttttaaagaaattatggaagaacaatgatattttatatccacatatttcccattttcagcccttttcatggatttctgtagatctgagtttccgcctggttatatccattgatattgttgagatatccttaaccaagaataaggaatggtcttttcattggttcaaggctacttttgtattcttgtataatgagaagtggtgggagaggacattcttaccttgctcttgactttatgggaaaaatattaaatatcctaagactagttatattctttatcatttgattatgactcagagggctggttttcagttttacaggaaatgtacaaacttcaatgacttaaggtaatttgtatgagttactggcattagatctcatcctaggctcactgtacttgctacactcagcccggatgctagtcaccctcaccatgggtcttaggaaatactgcaaggtaattttaatattagatgaagcaaaacataattaggaatgtaaatctgctcaaagccccttatgttctgtaatgagctccccagtcccaaattaatgatgttttggttgtctctattatcctcctcattaatagaggaattttaatgttgagaatttgtattatttg

SEQ ID NO: 17044 - DNA, 1025 bp, Homo sapiens
ccctagaaaggattcaaagcttacttgataaacaccattttgttatctaacctcctaggactgagtgtttttgttgtttgtaatttagggcaggctgtccctttattttctttgttgttgacatggctacatgtacaaaagaacacttactatcaagaaagcaaacactggaaagctgaagtgtgtaaatagctaacaatgtgttctacttgtacaagtattgcctatcctctgcaaatctaagtcaaccttcaagcaatgacgttttccatatgaatgaggagtgtaagactattgtcccataagttctatttttttttgtttttaatagattttcttctttcataggatatgtcttaaggcttgtccatctttagtttttatttcccttattttgctggtaatttaaattattctcactttgtattttaattaacttttgcttaaaagtttatttttgtttttaatgtaaattgtgcggttcccaaactgaaactagaacaaccagacaagatataagttatactgtgacaggataatagcagtttacatacttggaccagacagctggtggtagtttctgtcacatgtgaccatattctttgattggtaggtttcagttgcgtgtgtcaggaggaaagtcttactgttcgtttaaccttaaatagttggatgttggaaaattaatatttagaaatagataaatgattctttgaatggtacagtgtcagaagcaaaacaaaaaaaaaacagtttcagtttagctatgtgaatttaatctaataacaaattttcagcaaaagattttactcaagtaccttccaaagtgagttccttggaataccagttttatagggtattagtaaacattctgtgaagaaagggtgttaacagtcacatgggttgagaaaccctagattaaacagtagaaatcagatttcttaactctggggcttctcaaagcctttaatgtttgaatgttcattgtgaattgattaggaatgagggataacctgtagtgtttc

SEQ ID NO: 17045 - DNA, 1041 bp, Homo sapiens
tatcattgatggacatttgggttggttccaagtctttgctattgtgaatagtgccacaataaacatacgtgtgcatgtgtctttatagtagcatgatttataatcctttgggtatatacccagtaatgggatcgctgggtcaaatggtatttctagttctagatccttgaggaatagccacactgtcttccgcaatggttgaacttgtttacactcctgccaacagtgtaaaagcgttcctatttttccacatcctctccagcatctgttgtttcctgactttttaatgatcgccattctaactggcgtgagatggtatctcattgtggttttgatttgcatttctctgatgaccagtgatgatgagcattttttcatgtgtctgttggctgcataaatgtcttcttttgagaagtgtctgttcatatcctttgcccactttttgatggggttgtttgattttttcttgaaaatttaagttctcgaaagtttaagttctttgtagattctggatattagccctttgccagatgggtaaattgcaaaaattttcttccattgtataggttgcctgttcactctgatggtagtttcttttgctgtgcagaagccgtttagtttaattagatcccatttgtctgttttggcttttgttgccattgctattggtgttttagtcatgaagtccttgcctatgcttatgtcctgaatggtaatgcctaggttttcttttagggtttttatggttttaggtctaacatttaagtctttaatccatcttgaaataatttttgtataaagtataaggaagggatccagtttcagctttctacatatggctagccagttttaccagcaccatttattacatagggaatcctttccccattgcttgtttttgtcaggtttgtcaaagatcagatggttgtggatgtgtggtgttatttctgaggcctctgttctgttccattggtctatatctctgttttggtaccagtaccatgctgttttggttactgtagccttgtagtatagtttgaa

SEQ ID NO: 17046 - DNA, 1035 bp, Homo sapiens
taggcattattcacagacatgttgctgagttattttctcatatggttttccctaaagatggaaaataatttttaaaagtctttgagatagaaagagtatactgtgagttttaaatatttgtagcagagaaaaggctgccttttttttttttcctaaatgtatgcctgtttttatacatcttttgggcatatgcgttttgttgctttggagtaaagcattataagtcctcatttgatacaaacttttaacagggtcttcattaaagcttttccttaagttagatgaaatccatattagctgtataaaagaatagatttttaaatgtcaatttcataatttttgcacttcagtttttaaatttaaaattcaaatttttaaaactgcacttcagtttaaaatttaaattttaaatttaaacgttttttccctgcctgagttctttatgagtgtatctagacaatataatgtttttaaattttaaaaaattattatggaacatttcaaacttacacaaaactctgaaaaataatacaaaaataatacatgaacctccagaaactcattaccaagattcaacaattgtcagattcaattctttgctaaaatattttaaagcaaatctcatttcacctatttgtactttagtatgtatatttttaaagtatggacactttttcacatgaccctgtgccattatcacacctaacacattggctataatcctctggagtcatataatatccagttcattttaaattccttgtgtctcagaaactatgtctttatgtaggttttttctgagtgagaatccagacaaagtatacactttaattgttagccaatagaattttaaacactgacagatgaacatgtatgagaaagaagtgaattttagttttatagtggtctttgacacacatttgtaataggaatatttatgcaagagaacatatctttagaatattttcttgaacttttcccacttaacattgcatgatactgaaaaggattgtaatttcatatggtaatgattgg

SEQ ID NO: 17047 - DNA, 1024 bp, Homo sapiens
ttctctggtttcttctaagtttgtggtttattaatatatccttctaatatttcttgggtgtaggaaccaggggaaagggaaaaagtaaggccgaattctgtttttctcaaatgcctggggacgaatttgtacaccttaattttatttatttttatttttatttatttatttatttattttgaaacagagtctcactctgtcacccaggctggcatgcagtggcgtaatcttggctaattgcaacctctgcctcccaggttcaagccattctcctgtcttagcctcccaagtagctggcattataggtgcctgccaccatgccggctaatttttgtatttttagtagagacagggtttcaccatgttgatcaggctggttttgaactcctgacctcaggtgatcctcccacctcgggctcctaaagtgctgggattacaggcgtgagccatcgtgcccggcctgtacgctttaattttcatttgatgttttatttccaattattaaatgtactcccccactctgtttttctcactcaagagacttcctgtgtctacagtgggtttgctgtagtctagtaccacacatgttcagaggatgctcaggaaatattagtaatacgtgtcactttgttcagaacggccagtctgcattggttctgcctagagagaaatttcctctttcttcatgtacttggatcgctaaggttttctggttgaatttctatgtttttaaaatagttttatatagacatagtgacttttgaaatggtcctccctccctccctacctctctcgcttcctcctccatccttccatccctccctccctccctcccttcctctcttccttttcttcctttctttttccttttctctttctctttcttttcttttcttttttctctgttttgacagggctcgttctgtcacccaggctggagtgcagtggcgtgttcacagcttgctgcggctttgacctcctgggctcaagcaatcctcctgccttggcctccaaagtgttagaa

SEQ ID NO: 17048 - DNA, 1050 bp, Homo sapiens
ctcagcctcctgagtagctgggattataggcgcccaccaccacgcccggctaattttgtgtatttttagtagagacggggtttcaccatgttggccaggctggtctcaactcctgacctcaagtgatcctcctgctttggcctcccaaagtgctgggattagaggtgagccactgaacccggcctcatctgggtaccacgttctaatagcatctagtgtatccgtctcaattgctattgtctcttctttgtatgattatcttttagactcatacctctccttaaaaaaattaagataattttaggtgggttttgggaaggagagcaaataaatgcttctgatcaatgtcatatttaattggaagttgataaattctctttacttgatctggaaagataataaaaggttatttttgataaagtccttaaagaaaatcagggtagaagctcttctaaaataaaacacatgaaacatgaattcagagactatgaaaagggacggctgtagtgttagtattgtggtaggaaaggcatcttttcagtagtgtgcctgaagtgtagtatatgtgtttaggtggtggaatagaaggaacacttggtgggcgtcaggggatcttagttttggttttggttgtcttagaaccttttttttttttttaaactccaaacaaaaccagctgttagaaataatacctccttgctttaatctaggggtagttgtgacgatcatgtggaattattttacaaattataaagttctatacaaaagctaagaattactttttaggtgaagagaaacaaactgttgggttagaatatactgtgggtcatatttgaaattaggtcattaacacggggctgtcatgaaaatatccaagcatggtactaacatatatatgtaattagaaaaataaatgatcattaactcatcttctcttttatttagcttttttgtgtgtgtttgtgtgggatttgttgaactattttaacttctgcaactatagaggtgatacagggaacttgaaagatgattaaaaataagaaaaaacag

SEQ ID NO: 17049 - DNA, 1063 bp, Homo sapiens
atttgtaggaagcattataaagtttctagaatatatgttctcttttttttcctttttttaagtagccaggtatatacatagtagtggatatgcacatattggagctatatgcacttgaacaccaagtttttgtttttgcttttggatagtcttctctgtcaataaagtgaaaaacccagcctttccgtgatcagctgtaatctaagattgattgcaccttgagtgatgtgatgctggagagcagtaacagggaagaatggaggagtgctgggtgtacagatggctgcagggtccctactgaggtgtggcgtaagagtttaaagaataactggaagatagattagtgatttccaggtgttggggatgggagggtgggaggcggatgtgcttataaaggggcagcgtgacagatccctgggatgctgacactgattagtatcttgactgcggtggcagatacacgaacctacgcaggtgataaaattgtgtagaacttaatatacacacgtgtgcacaaatgagtatgaataaatttgaataagattggcagattgtatcagtttcagtgtcagtcttctggttgtgatattatattatggttttgcaaaatgttatcattggggtaaactgggcaatgtgtacaagagatctttctgtattatttctttataactgtgtgtgaatctgcaattacgtcgctaaataattattgccaggttaaaaagatataaaggatgcagatgtgagaagcagggaagtaaaacaaaaataatactttgggactgctttgaattttttcttcctcatgactttgatgttgctgtttagttctacctttcttctttatctgcctgtatttttgaatgctggcaccagactaagaacaataaagtgatgcattctcttctaacttaatagaatgtgcttttccgagcaggaaagaagtagatcataaaattgtgagtcaggagcacaggattcgtcattaccgtagatgattcaaatagcataacttctttaggtttgtggattgctctcaactcattgactgttcaagaactgg

SEQ ID NO: 17050 - DNA, 1045 bp, Homo sapiens
tttcttaaaaatgaagacacaaacaattacatccattagcctaggcctacacagggtcaggatcatcaatagtaagcggtgaagccagctggacttactgggttgagtggggacttggagaacttttctgtctagctagaggattgtaaatgcaccaatcagcactctgtgtctagctaaaggattgaaaatgcaccaatcagcactctgtaaaaaaaacgcaccaatcagcgctctgtgtctagttagattgtagatgcaccaatgagcactctgtaaaaacacaccaatcagcactctgtgtctagctgaaggattgtaaaaaacaccaatcagcactctgtaaaaatgcaccaatcagcactctgtgtttagctaaaggattataaatgcactgatcagcactctgtaaaaatgcaccaatcagtggtctgtgtctagctaaatgattgtaaatgcaccaatcagcactctgtaaatggaccaattagcactctgtaaaatggaccaatcagtaggacgtgggcagggccaaataagggaataaaagctggtcaccccagccagcagcagcaacccactggagtccctttccattctgtggaagctttgttctttcactcttcacaataagtcttgctgctgcacactctttgggtctgcactacctttatgagctgtaacactcaccacgagggtctgcggcttcattcctgaagtcagcgagaccacgaacccaccgggagaaacaaacaactctggacgcactacctttaaaaactgtaacactcactgcgaaggtatgtggcttcacttctgaagtcagggagaccacgaacccaccggaaggaagaaactcgacacatctgaacatctgaaggaacaaactctggacacaccatctttaagaactgtaacacaccgcgacggtctgcggcttcattcttgaagttagtgagaccgagaacccacaagaaggaataaattccggacacaatatcactgtcttccacctccacatcttgtaccactggaaggactttag

SEQ ID NO: 17051 - DNA, 1043 bp, Homo sapiens
ccagtctcgtcatcttttactcccgtgaggtccttggcctccgtggctgccgcagcaacacacacttgactttcacttcatgggcagtccccttcataggcacttgacacaggctctgtgcgccgtcttccaatccagagtgccgggagttaagggcagtacttccgccttacttccgcctcgctagtcgatcggccatgatctcttccctctggttggatcccacagcttatgacagaaacgggcgcgcagtgatgacaacatcaagccgccagcggcggcggtggcggccgggagactgggagggcttccggggctgccggtctgagtgcagagctgctgtcatggcggccgctctgtggggcttctttcccgtcctgctgctgctgctgctatcgggggatgtccagagctcggaggtgcccggggctgctgctgagggatcgggagggagtggggtcggcataggagatcgcttcaagattgaggggcgtgcagttgttccaggggtgaagcctcaggactggatctcggcggcccgagtgctggtagacggagaagagcacgtcggtttccttaagtgagcatcctgagggcagcgggaaaaaggctgggatggaggccggacagggaccccaccaggagagttaagtgtcaggacgggacaacgtcgctgtctcagactgaaggggagggtgccgctaacggtctatgccgggagaccttgggaggcagtcggatgctttccctttcctggtcctgtacctctggaatgagcatggcaggcgctcaccccctgccatggtcagagcatggagtcagttatttccaaccttattttggccccatgtggggacgatcattcctgggccctggggacaggtggacccttattagtctcttgttggattcttttatatctcatctggtttccctagaacctagtcgttttttgcattcacttcagtcttttggtagcttgttattatgtagaaagatgcgacacaagtgggaattctcaaaacccaaagggcttctagtga

SEQ ID NO: 17052 - DNA, 1047 bp, Homo sapiens
ttcatgattcatattgtttctttataaattttagtaattctttatagagacattttttcttgggtgttgaaatatagaggctcaaatgacagaaaaaggaatgtgatcttatattctgtcaaagcattctaaatgttccatttatattataattagcatgtagcaaccagatttaaagtttaagaagtcgtttgctttgtttctgagttgttcagaactttctaaaaaccctgtggttgttaataggtatcttctaaatgaaaaatatatggtacatctggttcctgtgattcacttgctcctttgaagctagaaagaaaaagaacatttgggccgatcacagtggctcatgccttgggaggccaaggcgggctgattgcctgagctcaggagttcgagaccagcctgggcaacaccgtgaaatcctatctctactaaaaaattggccaagcgtggcggcgtgcgcctgtagtcccagctactcaggaggctgaggcaggagaatcgcttgaacccgggaggtggaggttgctgtgagctgtgatcgcaccactgcactccagcctgggcgacagggagagactccatctccaaaaaaaaaaaaaaaagaaaaagaaaaagaacatttgggtcctcactacccgagaactcctaatgctccttcctcaaggtatgtacacttttttcaccacccttttccagaccagaacttgacttagagcctaagaaaagaagagtgaatgcattgctaaccagctgcccaaatgattgccatttaaccttcaaagctctgcattcaattagagtcaaatgcaggcagtaactaagataacaagtcaggggagtattgggaaggggcattttcctggtaggccttccttgctgtaggtatatttgggtataagtctgaatattagaggaaaagccagaccctactatgaccattcagatagaccagccaggttgagcactgaaaaccctaatcacagatgaaaatgacatgatatactagcataaagagaatttgcagtctgattataacttatg

SEQ ID NO: 17053 - DNA, 1032 bp, Homo sapiens
gaaactggaatcctcatacattgctggtgggaatgtaaaatagtgtagttctttggaacatagtctagtagttcctcaaatggttaaacaaggttaccatatgatttagcaatttcacttctagatactcacctaagagaataccaagagaaatcaaaatctgttcacccaaaagcttgtgtatgaatgtccaaaccagaattatttatgatggccaaaaggtgaaaaacacccaaatgcccataagtgattaatggaaagataaaatgtgtattcattcaatggaatattatttgtcgatgaaaagaatgaaatactatacatgctacaacatggtgaacctttaaaacactatactaagtgaaagaagccagtcacaagggaccacattgtatgattccatttatatgaaatgtccaaaataggcaaacatgtacagacaaaaacagcagattagtggttgcctaaggatatacggatgggaaaattggggagtgacagctaaggggggatagaattgggggtaatgaacgtgttctaaaattgtgatggatacacaactgaatatattaaaagccagtgaattgtatacttaagtgaattttatggtatgtgaattatatctcagtaaagctatttgaaagaaaaacttaatggcagactggcatggtgattcatgcctgtaatcccaacactttgggataacttgagcctaggagttcaaggccagcctgggcagcatagcaagaccctgtctcttcaaaaaaaaattaaaattagctgggcctggtggtgagcacctgtacccctagctacttgggaggctgaggtgaatgatcgcttgagcccaggagtttgagcctgcagtttgagttataattggttttggtgggtgtatgtgcaccactgagacagaaaagtgctacaaattagtgtttcctggtttgagtattagagcaaggaacaaagaaaaaaaatagaatggcatcagaattctctctaaagaaggggctgcagtctttttgtgcttag

SEQ ID NO: 17054 - DNA, 1028 bp, Homo sapiens
ttcactgagttctggttttgtgtagctatattttatatagctagatattcctcacagtgaacatgaattgtaataattggttatttccttaagtctttagattataataatttcagattattgcacgtctgtgatttgagaggtgagttatttaagaggccagttttcaggacatgggaatttgaattgtaaacctgttatctctgtgaaacttttaacatgataaaatataacctttctttgtgcttattcctgtagttatcactgtcttatgtagcagtttgaaccagttaacttggttggagtatggtgctaaagaggccgtggacaggagtttgatgcttttgtaggttcattaactttacatacacacaaaatgtttttatagctgtcgattgcaccttccgtcaggtatccatctcagaaattcaggaagatggtatgtatagcttagcataaacctttcgcctcaaatggaaagattactcaatgggtatatgtgatactgtagacttttaatctaacatttaaaataatagattcaaaataagatatctaaaatactgtgtaatgtttagtttcaaagtattaagtaatattacatcagatatttttcacatttttctctgggtcagatcattgactaaacagtatcttcaaaaatcaaacttcaataaatcagacttcagaaaaattaagtacaaatgacatatagtaagaacaggtattatcttggtaacatttatacctaaatttaggttttttgaaggcatgtagataatactttatcttacatactcagagctatataagtcagcagagtttttagctgacaaagattattgagtagcatatactcctaatttctgttcttggcctttgcagtttccttagtacctacccctctcagttattgaattgattagtattaagtgatttttaagattcttggataaatgatattagataaataagtatttttgaacacttgtgttgctattaagccctttcatgctacagcattttaa

SEQ ID NO: 17055 - DNA, 1896 bp, Homo sapiens
tagaacagtttttattatgcatatttatgatgaaagtttgtatcttaatgtatttgctttctcatttttcttccttttttttcttttagaaatattcaaattttaaaacaacaattaagtggattatgggaacaggaaaaccatcttactttggttccaggatatactggtaatatagctaaggtaatctatatttaagcttataaattaaacattaaaaattagaaataatattttacatttataaattaattttcaagtctctaggcaaaataatatggtactgttctaatgtctaaagtcaatttcatattttcaaatgcttcaggtcctctgcgtgtaactgtgaccttggcagcaagcacaggaattggccattgaacatgtttcatgtacagcccctgaaatgctatgctagaggatatttacagagggttttaatcagagaaaagtatttgaaaaaattttgagaatccaataaggacagcatcagaaaacaagacgaggaactcaggaaacaagggataagaaacataattaaatggttttggagattaagttttacttttgctaatgttatgctttttgagaaggtaaactatttaaatcacagtgaatttgactttggtctttattgatttgtctcgtaaaggaaaaagtaaaaattgctagtttgaattttaatatttaaactccagaaaacattggtagttaggccgggcacagtggcttacgcctgtaatcctagcacttagggaggccaaggcaagcagatcacctgaggtcaggagttcgagaccagcctggttggtgaaaccccgtttctactaaaaatacaaaaaattacctgggtgtgatggcacgtgcctgtaatcccagctactcgggaggctgaggcaggagaatcacttgaacctgggaggcggaggttgtggtgagctgagatcgtgccattgcactccagtttgggcaacagagtgaaactccgtctcaaaaaaaaaaaagaaagaaaaaacattagtagttaaaaattaattgaagaaaaaattgtcattaagaaatacttttactttattaccgggcatactgctatcataaatgggcattagccaggaatataaaaagcattctttggttttaaaaatatatatatatatatatttctaaataagaggatttatgtcatggacttagttataacatttttctcggagacaaaacaacttcttagaattcagggggaaaaaaatacaatgctaagggaaacagaggcttgggcaaacctaggtagccttgagggataatctggcttctactccaagataagttcagctcttacaggagacagaagctttcagggaattaatgtagctgagggaagaaaagcaaatgggagtgataccaacagtgaccaaccagaagcttatctcctgtcaaagtgacagccacagaggagctctggccattgctatggaagaccatggcccctctcccaaaaaaaaaaatttctcagataccttcaaaaaaaagaagcaaaatgatatatcaaccaagtttgttaccactgtgtgggattttactctatagaattcttttttttttttttttttttttgagatggaatctcgctctgtcgcccaggctggagtgtggtggcgcaatctcggctcactacaagctccacctcccaggttcacgccattctcctgcctcagcctcccgattagctgggactacaggcgcccaccaccatgcctggcaatttttttttttttttttttttttttgtatttttagtagagacagggtttcaccatgttagccaggatggtcttgatctcttgacctcatgatccacctgccttggcctcccaaagtgctgggattacaggcgtg

SEQ ID NO: 17056 - DNA, 2117 bp, Homo sapiens
ctgagtagctgagagtacaggtgcacatcaccacacctggctattttttaaaaaaattttttggaagacatgaggtcttatgtttcccgggctggtctcgaactcctgagctcaggtgaaccttcttcattattctaaactgcctatatgtagcttcagtagagacagtatggcttaaattacattcctcacccatctaagagtaaccaaaatacagaaaacaatgttttatcagattgaacaaagctgttacctttcctgactgtcattcttacctataaaactaagagataacgatatgggaaaactaaccttctaaaaatcccttttgaggccaggtgtggcagttcttgcctataatcccagcatttgggaaggttgaggtgagagagtcccttgagcccaggagtgagagactgagcaacatagcaagactccatctctacaaaaaataaaaataataagccaggcacagtggtacgtgcttgtggtcccagatacttgggaagatcactttgaacccaggagttggaggttgcagtaagctgtgattatgcaactacattccagcctgggcaaccgaatgagacccgtttcttaaaaaaaaaattactaaaaataaaaagtaaacatcccttttgagtgggaatttgaagcattactttcctcattgtattcaagtctctcagatgttaccttagggaagccttctttgaccaacttattttaaaatacctatttctccactccctatctcgctttcctgttttatttttctccatagcacttatatcaacctgctctatatgtcttatgtcttgttatttgtttattgcctgtctctgtcccaccccccaacccccacagttgctcacacactggaatacaagccctgtgtctttgttcattgctgtatccacagacatgactcattgtagatactgacattgttaaatgaatgaatttctcaaaagcggtgtgaataatcataatatgaaagtaaataaggaaatcagctctctaaggcaatgctattctttttatactctcaggatagaagatcttggcgttgtggtagattgccttcctgtgctcaccaattggtaaaaacaatatttttcagaaaaaaaataagattaaaggaggtcaaattatggcccatccatatttttataacttggtatttattttagtttacaggaagaaaaacaatatatctcacttggctgctgtgttgacttgttgcctctagtaaagtcactacttaaaagcaaatttgaagagtaagtgctaatctgaatcttgattcatttttctttttcagcatccttgattttgtgctttgtgagtacatagtagattgggctccatgagacatgcaaggtttctgttttcaagaagctaatagtacaattaggaaaagaatatgaaatgactaaaggacaattataaaagcatctctaaacaaattacatgaaatatacttttgtgtaatagatcatgaaggtaacaattttttaaaagggaagggaccaatgtgtgtgtgtgttttttgggagggaaagtatcatcttttataagaagggttcttagatgaaaacacttgaattttgtaacaaaatgtcatttcagatatgttatagttggtttaaactggcttcaagcagtcattaaaaggtggtggtcagaactatcatccaaaacagaaattataaatgatgggtgagtatacctttaaagataaactcatgctgaaattttcttcaggaaagcagcttgattaaactaggtaataattttatcccattatcatcagtgtatggtatttattctttttatattcagagagatactaacttaagagactgttcatttgtgaaaaccacacctggaaattgaattccagagcctactaacctcctgtatctcttcttctggcacaaccctacccttcattttagaagaaaaacacaatagtggtttaattctcatattcattatgagtaagggaggaaaaagagatgcccacagtgtaataaggaatggaggcaccctgcggggtcctttacctagacattaacctgagagtccggtgttgatgtttacagttctaaaaa

SEQ ID NO: 17057 - DNA, 1036 bp, Homo sapiens
aggaacagcttcccctaactgtcagctaaatcagtacaatccagtacaggctattatctcaaaccctctaagttcttccccttctctaagccaatttccttctttaagccagttttataatatgggggctgaggtttcaggagcagaccctatcagatcctttgaaatattcttcattgctcccccaccgcctacaccttcccctaagccttcttccagaacctcccacaacaaaactgttgttcttcctccatctaatgacaagacgaaggtagctattgtagaagtcaaagtcctaaaagaaactttagcaattgagacgggatatcaaaatgccaatgcctggttagaatagataaaatatttcatccgcactttaaacaaaagcaattgttatgctcgtgcgcatggcaggccagagggccagattgtcccctttccactatgatggtcctccagtcaaccaggcatgggctgtatggtagctctttttccaggattccacagcctggggtaacaagtcgtgccaagctctttctctgctatatcccgaagttcaagaccccacaggttagcccccgagggccatccagcttctgtctcccgacactgagttcattttgtgtctctcacgacaaagaggaaacttagcatcccttagagacctaaaaggatgcggtgagcttaagactttccaagagctcaccaaccagtcagcccttatacacccccgagcagatgtatggtgatattgtggtagacctttgctggacactctgcctagtaactggagtgtcacttgcgccctagtgcagttggctatccctttcaccctggcatttcatcaaccagagaaagaaaaaaacacaatgtcataaagcaagggaagccccttatgggtctttcgactcccacatttatttagatgcaattagagtcccacgaggagtaccaaataaatttaagacctgagatcaaatagctgctggatttgagtcaatattttggtgggtgacaattaataaaaacgtagatt

SEQ ID NO: 17058 - DNA, 1028 bp, Homo sapiens
ttacccatcaagcaagctttcatcatccacctttctcccacccctacctctctgagtctccattctctattattccacactgctttcatatgtacacattactataagtgaggacatgcagtatttgtctttgtgtctgagttgttttacttgagataatggcctccagttccatctatgttgctacaaaagacattatttcattcttttttaaggctgaatagtatcccatattgtatatgtaccacattttctttatccagtcctctgttgataagacacgggttgattccatatctttcctattataaattggtgctgcaataaacatatgagtgcaggtgtcttttggatataatgatttattttcctttgggtagatacccagtagtgggattgctggatcatatagtggttccgtttttagttctttgagaaatctctgtgctgttttccatagaggttgtactaatttacattcccacaaatagtatatgagtttgttttctccacacccttgttatctgttactttttgtctttttaataatagccattctgattggtgtaagatgatatttcattgtagttgtaatttgcatttctgtgattagtgatattgaacatttgttcacatgcttcttggccatttgtcttcttttgaagaatgtctatttgtgttcttaccctgttttttaatgggattatttgggggtttttgttcagttgtctgattgtctgagatccttataaattctggatatcggtccactgtcagatatatagtttgtagatactgtctgttcactttgttgattctttggttatgcagaggctttcccttcccaaccccacctccacacggtcctgctctgttttctaggctggagtgcagtggcacaatctcagcttaactgcagcctccacctcccaggctcaagctgtcctcccacctcagcctcccaagtagctggaactacaggcgcgtgccaccatgctcatgtaatttttaaagtttttttttcttat

SEQ ID NO: 17059 - DNA, 1033 bp, Homo sapiens
tgcccaacagggtggtagacccaattggctatacaaaagaaatgtgccgcaagaatgacactatggactttggggacttggtagaaagagagtgggagggggatgaaggatagaagactacacattggatacagtgttcactgctcaggtaatgggtgcaccagaatctcggaaatcacccctgaagaactgattcatgtaaccaaacaccacttgttccccaaaaacctattgaaataaaaaataataaaaataaaataaaaaatgtgccaggacaaccaaccttagggagattaatctagtttgggttatgagattaacaacaaaaaatatatatgacactcttcgttagtacagtggatgaatgcagaactgaactgggtaaagcttctgcgaaaaactaacaattgcaggatttatgtagggcactgaacagaagggtggatggtggggctaggcagggttggtaatcccaacactttgggaggccaagacaggaggatctctggaagccaggagttcgagagcagcctaggcaacatagcgagaccatatctctacaaaaaatttaaaatattttgccaggcatggtggcatgtgtctgtagtcccagctacttgggaggctggggtgggaagatcgcttaagcccaagaggtcaaggctacagtgagccgagattgtgccactgcacttcagtgcagccacagaactggtgtggctcacacctgtaatcccagcactttgggaggccaacggtaggaggaaagcttgagcccagaagtttgagaccagcctgggcaacataccaagactccatctctacaaaacattttaaaattagggccagtgggtcatgcctgtaatcctagcactttgggaggctgaggcaggtggatcacaaggtcaggagatcgagaccatcctggctaacacgatgaaaccctgtctctacttaaaatacaaaaaattagctgggcgtggtgtcacacgcctgtagttccagctacttgggaggctgaggcaggagaatc

SEQ ID NO: 17060 - DNA, 1156 bp, Homo sapiens
taaaacttcatgaagttctaatgtctgtgttccaaaacacatcacattattaggttgtagggagatatgtaggtgtgctccctggggtggggagttttctagttactagaccatctccatttttagcacttggcagcctcatgatccttttataaatgtgagattaacaggagagcagcaatacgattttgccaatggaataacagatttgccggcattcactgaaagagggcagatattgggtccttgtaacttcaactgactcttccaaattgtatgaatttatcaatgtattacacaaatccagtttcagaatgataaaaaatgttagaccaaataatgcggctaattaacagtcgtatgatttctagcccatgggtttaaaactgtatcttaaagagtcattttaaaataatataaatattaaaaaatgtaactgctatcttaatgttctgaaataaaacattttaaaatataaatcctgtagtttaaaaggaagaaatggtgggaaggaaaagtagagaaagaaatgccaattccaggccaaagcgttatttgccaagttttcttagaatgaattttaccaatgtatgagttcttgttaacagaatgtgtaacggaaatactgaaagacttttgcttaaagtggcattattgactgctgatgtgatgctactgtaatgcaataaatttttaaattgttgcaaagtgctgtttttgccttaaaattttattttgcgtgtcttgaaaactatagtattaaaagtattgatattgtgcaaatactgggcatgcttggcatgagataatctgtttcattgttacaaaaatgtagtataactatgcaagtgtttattgaaagaacacaacataaaaaaggtatgggattaaaaaagttttggggtgaaaaagttatcggataaaaatgtaaaaaagttgtggcaaaaagtagaaaaaagttttctgaaaagttatcatggagcacggtggctcaagcctgtaatcccagcactttgggaggccgaggtgggcagatcacctgaggtcaggagttcgagaccagcctggccaacagagtgaaactccgtctctactaaaaatacaaaaattagctgggtgtggtggtgggtgcctgtaattccagctactcaggagg

SEQ ID NO: 17061 - DNA, 1050 bp, Homo sapiens
gtcctaggtggggtgtggggtattgggtacttgtactgtgaaggtacagaagggtacctttagtatgttcccatttctgtagagagaggaaacgtgtgtgtgtgtgtgtgtgtgtgtacatagtatgataatatacataaaacatgtctgcaagtgttcgtaaacaactcaggagagagcagcagggtggctgggagatacttccctttgataccttccgagttttggactatgtgaatgtatcatcttttcaaaaagtgaacaaaagattaattttccccttcctaaccgtgcccccacccccagcagaaaaatgggcttagagaatctgatagacctgggtgttcaaatcctagctctgcctaagtgatcttaggcaagcacttaacctcaaacactccatgttttttcatctacccaagagagggcatcatagtaactgtctcctctggtggttgcgaggattaaatgggattgctagcaaggtacctgctgaagcactccacaaaggttcaaacagtgggagtaataacaatagcaatattatctgatctctctccttgtcccttccaacttcactgagtttttttcaaaaccagaccacgggcttggaaatgccttgatctttactgaccgagttgtatattgagcctagccctagcccttttaaggggcactgtgtggaatggcccaggctccccagatcgaaacttctcactcttcaccatccagttctcgagccgcagtaaagcacttctcaagcggcagttagagcagtccatacgggagcagatactgctgaaaggacacgtgacacaggtgaggttttgcagagggagggatgtggaaggaagatgaccccaggtggccaggagcaggtgaggaccagtgacggcccttcctaacttgtgtggccattcttgcagttgaaggagtcgcttaaagaagtccagctggagagagatcaatatgctgaacaaataaaaggagagagggcccagtggcagcagaggatgaggaaaatgtcgcaggaggtgagatctgaccctt

SEQ ID NO: 17062 - DNA, 1033 bp, Homo sapiens
ctcagagtttgtcttgactcatcccgagaagggcacgtggaggtctgtgtcccattcctcaccagccactgagttactatggatggaggagatgagatgtgtgcaactgttctgctacagtaaagcacgcagtcagtgcagtcaccagggttaggatgtgtgagtgttttaccaacctgcctgctgggtttcagacacctggcactacctccagcctctaactgattctggctagtacgcgtgaaagctgtcagctgagtgatgagtgggccgattttggccacaggtccctgcacttcccacctggcctgactgctagattctgagcccctgaggcaggactgagtgggtcagattgatggctgattgtctcgggaatggcattgggtgaagtcgagattttcctgacccacagctcctactagaagtgcctttgttttgtgcatgtattgtgaagattctgcctgtgaactttctctaccctttgagtcctaaggttcaggtacctggagaggagcgtgtcatcgttttgcaggtgggatgtgcggttgttggggaagacgtctttgtgctgtgttgggttggaagctttgagagcagaagcccctccagaccaagaactcctgattgtgtctttcccttgagctttcacagatttcagcttctaaattaactgcattttattaagtaatggttttcttcttgatcacaggcgtgcctgtgcttaatcagcactgaggactggtgctacttcagttgatttgatacacctagaggcagcctcatctccaacttgtcttggtttcatttggggagctgccgtgggggacccctggactggcagcattcccactcctcactttggcaaccccggcctaactccttgtatgtgttgctccttttatctgtcacatagggtggcttaatctaatagtggaaacaaaggggtgcgggacactaacctggtaggtctcaccttgcccgtcattcacctctcagtcctttgacactcaaggactctgcagtggtacaa

SEQ ID NO: 17063 - DNA, 1065 bp, Homo sapiens
aaagcccccagtacattttcagaaacttttggcctccacttaatacaacgttcaggttagctctgactctcagccaaagtaattttctgcttctgcttcaaagtataaggttagaagcagggagggaactgctaaaggcaattaattatattttcagtagtgtgaagtgattgctgacaacttgacaagaaaggcaaagaaacaaaatacagagagcatagctaagctcagcaatataggtcctacatatatcaaaatctctgtgtttactgctgtattgcaacccaagatgataatgattttttacagtgatacctttccaccatcaagaagaattttcattgtatctgcttattttacgcaataaatgtttgatgcaaaatgaatgcttaatagatttttatgatgatttcttacaaatgctttgttgactcgttaaaacacaaaaatatatttctacaataccacaaactaggaatactggttggagatcgtccagacttcagtagaaaggttaattaataaaaaggcagatgagaggcgcacatagaacagtgaatccttctggagaaagaaaagtagatgacattttaatgtattcattctatgtataattcatctccatttgtcttggccattattgaccacggtcattgcgaaagacctgacttaaaaatggtcatgatcatttaattcttcaaatttaccgttatctccttttattctgcattgatttgaggcctcgaattccaagaagttcaatataggtgaaaaattcaagtgaatgtggatgtgctttatgtttaggaatgtaagcttggcagaaggaaggcgtgaagcctggtaaagatgtgtatcacttctaattatctacaattgataaagggctggacctatcaaaaagccttctgcctgagatctgttgagaactctacgaataatcagatggggttatagtttgaatgtgtcccccaaagttcatgtattaggaacttaatcagtcaccaatgctacagtggtgagaagtgggacctttaggtacatacacacatacatacacggttt

SEQ ID NO: 17064 - DNA, 1101 bp, Homo sapiens
aggggagtagggaaccagggcggaggggagactgggaagtccataggggcgacaggtgggggcaccgttttctctggggtttccagtttgaaaggcaagggggcttgcctcccgcccgggggagcccacctggaggagaaggggttagcagggagggttggaaggagccgccacgtgggcaggaaccgggaagggcgggcgggccctagtactcccagagcgaggcggggtgcacggtctccgcggaggcccttaggacccctgcgtggtcgcccttcaggtagcgcccgtccatcttgatggcctccttgttgtagtcgcagaactcgaagaagaagtccacaggagtgtcgccgctgctggtgaccgcggagtcactgcccaccgtccagtatttgcctgtggagtctttgatgttgtaggtaccattgttgaactccagctggaagacgtcatagctgcagcggttggcgtccagggtgccccgaccttgcggcagccgataaagccgtgctccccgcgcaacacggtgatggcgcggttgatgaacttcatgaggaagagctctgagtcccctgctgtctccaccgaggcggccagctgcccattcttcttagatgtcacaaacttgccattggacgcccgcagtgtgatgcgccggtcacgccgctcaatgtcgaagtagcagctggcattcttggtggaggcggtggactgcacgcccccagtggccgtcagcgtccagtacttgcccctgtgggtacagaaggcacacttgttgttgtcgcggtcgatctccagctggaaggtctcctggtcggtctcctcgtccggattggcagacaggtccataccctggcgcgtggacacattcctcccgttggccgcctgcagcacgacctgggcgcagctctgctccagggcaaagagctcgtccttgcccaccttggtggccttgcccgccttgagcgtgccgctgggccccgacggcgccaggtaacggccctcgcagtcgcggaaggccacattgccggagcggaactgcagcgtgtagccagtggccggctcggggcgcgccaccaggcgcctgtcatggcgcag

SEQ ID NO: 17065 - DNA, 1049 bp, Homo sapiens
ccaaaatgtaaatcattgaataaaatagtgccatttacttttaagatgaggatagtgttttgatgggaggacataggtgattttgtgaacaacaaaataatcttgaagccacatacatatggtaaatgtttacacttaggactatgtgggaatggcagcagtcatttctaataaataacgtgtgaaaatcaacaggtcagttccaaaaacacctcctgcttgttcatggcataaagccaaagctccgctatatgaatattacatatgcttttgacaaaacatctagtcttacaccagacacaatattctagtttcctgaagaggtaactttattaaagcatgtgctaagtaaactataagattcatattagaaactttagtcctatagctgtttctatttatttggagtttaaaaaaatggcattattgtacaggtacctgctttatagttaaaaaaaaaaaaaaaaggaagggggcaaaataaatcaatcacactctcaaagcatcaaggaaatttatagtggaattatgaatcatatcattgcggggtcattttcctttatatcatgatatcatatgagaccaatgtcaaatggaataggtaaaaaatggacaaaaagtttttttgggggggggagctgcagactgagttattttatttcactatttccagtttgaagctactatcatgggcgtttggagttatacaaatgacacttacaaaaaataaaagaccaggacacccagagtgagatgcatgtcggggacgggacgggggagactggcagcaggggggccctggcggctcaccccagggctccccgagggggcgacgcctggcttcatccacccaggaggcccaggaagcaccaatcacagcgggggctctggcccaggcatccgcagcccaggcccagggctggggctggaccggaaggacggaaagagggggctgagatgcaccccctggggagggtgctgagacgccccacccacatcactcactactacagccaggcttgcctgggacgcctccagcaataatattt

SEQ ID NO: 17066 - DNA, 1620 bp, Homo sapiens
cataagacatcctttaagagtttaaatgtctctgaaacaggcatacaggctctagtcaagaatgaattagagtgaaggaaagctgtgtgacacctggcattcctctctgttcatggagcttctttgaggcttgaagtttgattttactatctagacctctctggctaatacctattcttcaaccacctcggttactctgacataggaatttacttcttttccttgagtggaaaacactttagaaaataataacaaacattattataaactaatatatgtgagagtacttagttgaaacaaaaaggaattttagtagacagtattatattatctttgaaaatcaaggagaagtttatgcaactgaaaatgtttacacactgtgctgcaatctactgtttgtgaatgtcaatgtattatcaggaaacatgtctatacgatcgcagagttgtatttcctcacaaacttctttacgaagagtgaaatatgtttttgtacctctcagtttcagtcagggacatattttgtgcaatatttctgtgattgtgcctatgcgtgatgagtgaatgcatttcaatcatacattgcctaaatcataacttgatgatgcttgggaaagaatcaacagttaaaacttcatgaagttctaatgtctgtgttccaaaacacatcacattattaggttgtagggagatatgtatgtgtgctccctggggtggggagttttctagttactagaccatctccatttttagcacttggcagcctcatgatccttttataaataggagattaacaggagagcagcaatacgattttgccaatggaataacagatttgccggcattcactgaaagagggcagatattgggtccttgtgacttcaactgactcttccgaattgtatgaatttatcaatgtattagataaacccagtttcagaataataaagaaaaaatattagaccaaataatgtggctaatagtggtatgatttctagcccgtgggtttaaaactgtatcctaaagagtcattttaaaataatataaatatttaaaagtgtaactgctatctttatgttctgaaataagttaaaacattttaaaatatgaatactgtagtttaaaagaaagaaatggtgggaaggaaaagtagagaaagaaatgccaattccagtccaaagctttgtttgccaagttttcttagaatgaattttaccaatgtatgggttcttgttaacagaatgtgtaacagaaatactgaaagacttttgcctaaagtggcattattgactgctggtgtgatgctactgtaatgtgataaattattaaattgttgcaaagtgctgtttttgccttaaaattttattttgcgcatcttgaaaattatagtattaaaggtattgatactgtgcaaatactgggcatgcttggcatgagataatctgtttcattttcacaaaattgtagtataactatgcaagtgtttattaaaagaacacaaaataaaaaaggtatgggattaaaaaagttatggggtgaaaaagttattggataaaaaatgtaaaactgttgtggcaaaaaagtagaaaaacgttttctgaaaagttaccaaaacaaagtt

SEQ ID NO: 17067 - DNA, 1031 bp, Homo sapiens
atgtaaggtggtgcatctgttgttttgtgtttcaaggatcaaaattaagagaaaaaaatatgtggttgagatacctgcgttgagtgactgtggaaatattttcatctctagttgtctggaaacggaaacactccaacatttaaagatggttttcatggcgaaaccactggaatgaaacacgcatcatcgggcaattctgtgtgttgagttccatccctctttgtttgtcattttaaataatttccctacaaatccagaaggcaggtcttgtcttaacttcgcgacgaggaggctggggacaggtagctgagctatgggttgcctaagagcactctgctgtgacggggcagtgctggcctttgagcctgagctggagagagtgtgaggcccatgttttctctctgtctcctgctggggcccattttgtatcagatttgtttttaacggggtgggcatgactaggacttatgaccattggtgggcaagtacaggggctaattttcaacacgtgctgagagactgatggctggcatcggagagttatggaaatgccacagatgacgtgagctcttcacagcgatggggaaagggcgtgggagcttgccctccaggaaggtggctaacatggttggtgggacactaaggtgttttccattttgcacttgaagccaacatggattcttagcacttcttgtccctagaatcaactgtgcagagagacgcttggttgtgaaactctcaggcaaagacagttctgaggaaacttactagtaaatagtgagtcagagaacactactgacatttaggattttcagttgagatacatatgtactgtcatgcatcacatgacattgtttttgtgagtgatagcgtatatgacagaggtcccataagaatatcatggggctcaaaaattcctattgcctagtgacattgtcgtaaagttgtagtgcagttactttattttttaaaaaaatgtagcctaactgtacaatgtttataaagtctgcactagtgtacagactgactca

SEQ ID NO: 17068 - DNA, 1047 bp, Homo sapiens
tccaagcaatgtacatcactcttgcctagatgagtgaccatacttttttctttgctgcttggtttttctatcactaaaaagcaaatttaggtggaagatggatgggtaagtcctttgtccttgtcaaaagaatttagaaagggtaaaggtggtgggatttgaattcttttaaacggtttattcattggaaaggcaagtgagtggcagttgactgtagaatcttgggaatttttgaaggaatttaagagctgtacttattttaaataatgaggaaacaatcagagagacttaaccagggtggcaactatggaagagtgggggtagaatccaagtctacagttctacggcactgctttgtttattttttcaatcaagcacacatgagggattgcttaataaattcaagagttttctatatagtttgggattactacagacacaggtactctagccatgtgactatttcagattagtgttcccattgctctccatcctatttttcatatctaaatgtgtcatgattttagaatctctttgtaaagaaaaccaaaaagagccatgcccaaaagaatgagcatgaaatgaagcaattcaagtatttagaatttcttcttcttttttttttttttttttcaaaattctgagttaagaaagttcattgccaacagttgaggataaatagctctattgatttaggcaaatgaatgagaagatttaaacatcatcaagactcccaaagttggtgtaataaaagttgagatgttttgctagatgctgagagaaaaggcataaataggccatttgtgctcctgtaaacaaatgaaattttgtaatgatcaagagacagcaagatattataaaacacactttggactcatcgagacctggctcagagttgtacctaatttgcttatcagcatttggttagaccttagacaaattttataacctctctaagcccattttctttatctgtaaataaaggaaaaagatctgtttggatttgggacaggagagttgtctgttttatagggtaatgtttatgaa

SEQ ID NO: 17069 - DNA, 1049 bp, Homo sapiens
actgatgttttcattacatattggttttttggaatttcttctttgagtcagtttcattgcctgagtcatactgtagtattgattgaaacatttttatccagattggttacctgtttttcttattcattaagcctaactctagatgagtttttagcgattcaagaaataaatatattttcagatgatgatttgccactattaaatatatttctggagagttgaaaacactgtcccccaaaataagaatactatgcatttaagtgataacatttgaagaattagtgtcgagagggaaagactaggtggataaatgaataaaagtcactaatttgaaggggacttgactcatttggagcgagttctaaaatgtttggtcacaatacagttcatgttgttttattgttaatgcttcatgtctaacctttgggcaaagtaccaaattgggcagtgttaaagaactagaaaacttaaatgaacttgtaactcaagctgtgcgtcacaaagaaccagaatataaatgatatttttagaagtcttccagtaatctttcggttgcctttgcatgaaatccagcttcctttttttttttttttaaatattgtgtttatattcttattttactttcttctttcatctagtactttggatttagtctctactgaactggaccaaagagctttgtgtgtggttcctcacctttaagttgaataagccttagttttaagctcctttctagtctgtaatttaacagtaaaccagactgaccaatttgcggtcacatcctcatcccacctaaagtgatctagtagaagtgacaaccattacgcagagaacagaaacaaagcatacaaaaaacattaagaaacatgaggaaggaggaaaagcactgtgcaaaaattgagtcaattataatactgctaggtgtatttgctattaaactgggtattgtattggcttcttagttactttgttcctttatagttttgtgtctgtgtaactacagttgtggcacattgtatagaattttttttttttttttttttggagat

SEQ ID NO: 17070 - DNA, 1092 bp, Homo sapiens
atatgttgagctagaaatatggtcatgatgtccctcagttccagttgtgtatggttatgccattttgtcttcaaatatacaattatgttaatgaagagaatgatcttgttaatctttttaacagattgccttttgctttctatttattgaggtaatttttcatgctgccagttcaaaactgtacaactttaaatgattcctttttcacatcttattcaggaatttaatttgcatatattttaggtgccaattaggaggttgatttatttattgaaatagaaattacgggaggctgacgcaggagaatcgctgtaacccgggaggcagaggttgcagtgagccaagattgcgccattgcattccagcctggcgacagagcaagactctgtctcaaaaaaaaaagaatgcaaattagtgattaatgataatataagctttggggttataagtataacttcagatgcttcttgccagtttggctggactttgtttgatatcacatactgtaaattgactaaaactttacaagtcggatttcttctgccattagtattttaatttttttcattcaaagttgctttataatgtctcattttatttatatttaaatccatttttaaagcccaattttagataataagcacaattaacagctggacatatttaatgtagcctttggctattaaacatgatatttgatgaattgatcatagacattaaaagagttttaaattattatgtgcatctattttgagttcttgtattatagagcttaccaaacacttagcttctaaaaagtcactatgttgcagaggggcaaagaacaacatgccataagttatttagggctctatattcttaatttcagattagccagtaatacttttgaattcatcccataggtatttcctcattttaaagccaacttacaaaggtaggttagactctaaaatctaataattcagaattcagtgaacatgaaggtgctaatagaatatttgactataattacaattatattgaagtcgaatttatggtttttaaagaatattagaataggggtagaatttttacaatgatttcaggtaccac

SEQ ID NO: 17071 - DNA, 1044 bp, Homo sapiens
ttttatcttgctactaaaactgtaatttccttagagggcagagccctgatcttattcatcattgttaggtgaatatactcatttgggtattcattcattcacccattccatatttaaactgttctagatccctactcttgtgggaattatattttagtagggattaaacaaatgatagtagggatagtagggataaaacaaataaccaagtacctgaacaagagaatgtcaggtactggtaagtgtaagaacataaagcaaggcaacatgattaagggtgtgattaacatatactatcttatcgttttcaaaagttgtataacagttatgatttaaaaatggtcggtttggttattttattctttgaaattaatagcctagcctccaaatttctatatgtgagatagctcactttgttgaaatgatttttggaaagtctaagaatttcccttggctttttgtaattatttttgacagcatatatgctaactactataatgaccttttgttgtagtcctgattctttccttctgaaattttatttgatatttcctttatttttatcattttgttcgcttttttatttcttctcacagtcttaattttaatatttctaagttgtgacgtttcatcacaattgaagcatacattaatgtgcttctggttgtgggtgactttagcattaaagaactatggaatataaagagggaaaaattccaggagttactgagaggaagtattttctttaagggtttgttctatattgttttttttactgctgtgtccacctgagtctggttttcatcctactcaataggagtcaaatggtaaatttatttatgtcattctgtctaagcgaactcttaacggataaactgttcttgctaagtttggtcttttgtttaactcagtgtgtggtatcagctgaaaatatagctgttgattcagtctagccaagcacctgtcagccagcggaaaatagcttcttgctctgaaacactcgggaattctggattagtgcagccagctctgcattccagtaag

SEQ ID NO: 17072 - DNA, 1035 bp, Homo sapiens
tactttaccatattttttttaagaaacactctaaatatctcttacagttgtccaagcttttttgtgttcaatgatatattttttcttcttaaatttgactattttaattcattgtagtggtggttcttaattgggaacaatactgtcctgcgtttgaaaatgcatagtgatatttaggttttcaaatgaccgggatagaggtgaggaatggcaggctcttggcattaggtaactgtgagccaaggatgctaaacatctgaacagaaataaaagaaggaattatcctgcataagatgccaactttaccgcatttaaaaacactgctttacaaaattagtcagttatttgatttcttatgtgtatcacttattatccctttgaaattctttcttctgttgtcctgacttcctttataatacttattattaaattacaactgcatacatgtctagtgcttattttacaatttggttgttgtacttcttttgaaactttagtcagtttatgctatctgtggtttagagattatatcattgctaaactgctgatgattaagttatttatctctagaatgagaggaaataggagaagggaatggaaaatggatggaataagcataaggccacataatggaaccaaagttcgaggtctaagacccccccttccccccaccccccccaaaaaagaggagatatgtcagagaggaaagaaaaggctctgggctttcaaccattagtatcctacatttctgtgtatgtgaaatttcttttcatgctggttatactaggtatggaatgtggaaggatgagaaaagtgatgaacctctgtcaaattaaggaattaatgaatagaaaactatgccttaaattctaaaatacatatatttaattagaaaatatttattgaatacttactatatgtaaggcagtagtgggagctatgagtgacaaaagtaaagataagttctttgacttctaagtactcctattttagttgagtgtgtgtacaaattattgcaagtcatggtgttgcatc

SEQ ID NO: 17073 - DNA, 1048 bp, Homo sapiens
ccctaattcttaatagccaacatttattaatctggttttaacatctgtgtgaaaacaaaaataagttgttatcagatatgctgcatttcaggcattcattagattcttatagttttgaggtgccagttttttaatacagagaacaaatatctgattaaaagaataattcaggccgggtgcggtggctcacgcctgtaatctcagcactttgggaggccaaggtgggcagatcacaaggtcaggagttcgagaccagcctggccaacatagtgaaaccctgtctctactaaaaacacaaaaaattagccaggcatggtggcaggtgcctgtaatcccagctactcaggaggctgaggcaggagaatggcttgaatctgggaggcggaggttgcagtgagacgagattgtgcaggtgacagagtgagactccgtctcaaaaaaaaaaaaaaattgaaatatggatgtttttttccttttcaggttgtcttgctcttcccaaattgaatttgcagtttttgactcttcatgactacctgctaaggaactttaacctcttccgcttagaatcaacttatgaaattcgtcaggacattgaagatagtgtcagcagaatgaagccatggttagtaaattggttccacctgtaatgaagagatgcaaacagtgactgataaacttctgtcagaaaccttataagtatatttagaaataatatactgagacaaaagtgccctctaaaataggagatatttactctttgagacatttttaaatgtgaattaacatacatcaaaagtgctaaaatataaaccacatatctgggtacttgggaatgggagtgggagactggggataagggagaagaagtcgtcatgctcaagaagggaagggggaaatgtagagggagtaggtcagaccttacttaaaggccgattggaaggctaggggttggccaagcaggcccgtactaggtcagaacagtttaagtcctggaggaagcttatgataaaggggtgtaccattaatccacctactcttgtcactgttg

SEQ ID NO: 17074 - DNA, 1053 bp, Homo sapiens
tagcagtcattcatgagatctttcaaattctagctctgccagtaactaacttctaacttctgaggatctcaataacttcatctataaaatgaggatatttgattagattagtaattttcaagctatagtgtaggggaacatgaggagaggaaacaaagacaggaatctccacatagggatttgtacttccttttttctcagagcaactccacttttaaacatacacacggtatatattgggattttatgtaggattttgttggaaaactactggccaagatgatctgtgagattccttagtgctagattttctttctttctttttttttctgagacagtcttgctctgtaatccaggcttgagtgcagtggcacgatcttggttcaagacaacctctgcctcctgggttcaagcaattctccctgcctcagcttcccgagtagctgggattacaggcgcccatcaccacacctagctagtttttgtattcttagtagagatagggttttgccctgttgcccaggctaatcttgaactcctgacctcaggtgatccacccgccacgccaaagcactgggattataggcatgagccaccgcgcccggcctttattttcaattttatcttaaaagttcttttatcatcattattgtttttaaaaccaaaaacattgccactgggtttatttacagcatgaacgggacctcttgcattgtatacagtgtgtctattggaaggttggagggtaccttgtatgtgattaatacttgagagttaaatatcactagatttcacttctagctgtggagaatagatgcaaacttactgttatgatgtttgtttttcccaggccctgctacccacaaggcgctggtttaataccatcctggatgattcccaccttctggttcactgttacctttccaatcttgttcgtagagaagaggatggccatcttttttcccaggtgaatattgatgtatctgaacgtatttattgttttactttctaaattgatcttttctttgccacacaactgggagtatcagggca

SEQ ID NO: 17075 - DNA, 1025 bp, Homo sapiens
tggtgaaaccccgtctctactaaaaatacaaaaatcagctgggtgtggtggcacgcatctgtaatcccagctactcgagagactgaggcaggagaatcgcttgaacccgggaggtggaggttgcagtgagctgaaattgtgccactctactccagcctgggcgacagagcaagactccgtctgaaaaaagaaaaaaaaaatttaaatgaccagttttttaggctaggtcctgaggaaattattttgctgagctatgtgctcacggcattttcagtattgggggaatggcttgatgtaacagccatgttactgtatggtacattacacaattgattcatatttgctgttcttgccattatcagatttggcaggcttatcttaatgaattcttcatccaagtttgattttaaaaatatttgaaaaataatagttaagtgcttactatgtgccagattctgctgtaagcaccttgcattctgctctaagcatctagctcatttattcccacaacaaccctgtaacactattattgtcctcattttatggatgaggaaactgaagtggataggttaaataacttgcccaagatgtttcccagtatttagaggcacaccaggtattgaatcctggttccctggttcttttttttttttttttttttctgacttcttactgaatattctgttctgttcttttatttttttgagatggagtttcacccttattgccccaggctggagtgcagtggcgcaatctcagctcactgccacctccgcctcctgggttccagcgattctcctgcctcagcctcctgagtagctgggattacaagcatgtgccaccatgccttgctaattttttgtagttttagtagagaaagtgtttcaccatgttggccaggctagtctcgaactcctgacctcaggtgatccgcccacctcggcctcccaaagtgctgggattacaggtgtgagccaccacacccggccttgaatactctgttcttaaataagagtcctttgcct

SEQ ID NO: 17076 - DNA, 1026 bp, Homo sapiens
ttccacctggaacctccttccctcttctaaataaagttccccttactcaggaaacccatagttcccttgctgtgaagtctgaacctgcttccaggggttgcttgagcttctgcccttctcttgtctttttaggggtggattatactgcccaaaatgtggtcaaggggcagctgtgtatggtgtttggagttgtggatagagcttggatatgtggggtagagtctgagcacttacaagtctctgtgaggtcagtatggacagaagggtgggtgttccattggagcagggtgagaaatatccattggcacattcccattaagctcacaaatgttgagaatgagcctacttgtgagatacacaattttgcaaagagagatatagagcagtcaagaaaagtggctcttcaaaggttctatgagttacctgtggccacataggaggacccctctgtctgaagcgagtgcgcagtaaaaagaggatgactcatctttggctctagctagattaaaattctggacacaaaggtaacttataatttcttatctggacttcatactgccaagctagagtcatgatgttatgcacacaaagtatgatattatattaacagtaataataatgacagtagattattgagcctaacctcattcccatgctgacattatgtctctctgtttgtgttggtccattttctttcaactgcccctgccctccaccatagaagtcattaggtaaagcaaagcaatctctttaggttgatttagccaaccttcaattaactagtaaatctgagaccagagttttaatacatggcctattaaaaagcatgtaaataacgaacctcatttagccatttcttacatcacagtgtttttcaggattaaaagtggtgattttataaatttggttctgtaaattatattattatatttcaaaaggatcaagatgtaaaagtatgtgctctttaaaatggtttcagttgtagttctattcaagtcaaaaaattagcttgggaaaatactaccc

SEQ ID NO: 17077 - DNA, 1061 bp, Homo sapiens
aaagacatagaacacattcacatgaaatgctgagacaacacaaggaactagtgatgcaggtcataaacgctacagcctacctccagttggagtgattaaagaatgttacttaaaagaaaacacatgtttgaataggcagaaaggttcagaagaacaaaggtatgaatcaagtgagagagacagtaaatagacaaaggtaaatggattagaggcttgtatgggggacaggggaaaagttcagccatggaaaggtagattggggtcaaattactgaaggccttggctgtctgatttagcttgcattttatggtgaaggagcaacaatgttttcaagactattgacctaataaaatgagcttttaatgataattttgccatgtgaataataaaggatgaataaaaaatattgtgctgggaaagggaataactaatatattcatactttctatgggagaaaatcaactagtttaaaggaaaaggagcatgtattttcttcaatttatagtacataaagcttctatagaactgatgctgtataatgatgccaagaaaataagactgattcaaacccagattttttttttgtatatagtgaacatttcaatacagtgcctttttataaacctgtgattcaactttcatattcctccactcactcattctgaagatcgtaagcctttccttgttggatctggaattcataccaattttcttacagacctggaaattccaaacatactattgtcgttacacctcatctgtcatcctagggaatgccttaatttattcttgtaatttggagaaatgaggtgatggtagaaagagctcagaataatggaaagaaggtgttggcttcacagaactagcaattcctttcttagttccttagttcatttcctttacatgttggtaagggttagttattaatggaagccccctatactacaacatgcagcattcactcaacaagtatttactgagcatatacaatgtgccatatactgagccaagcactaaggacagtgtttaaaaaatagagctagtccttgctcttatgaagc

SEQ ID NO: 17078 - DNA, 1031 bp, Homo sapiens
gaaaacagtcaccaaggggagtacttacaaaccagaacacagtagtgatggtcacagaaagagacttttttaaaaatcaaaattaagaatgtctctaaaactcttcattgatcttataatttagaaaaaatgaagtatatgtgagagatgactcatgggctggataggaaagttgtggacactgggcagaggtagggaaacaatctcagggaagaggaatattgggtagaaaaaataaaatcccttttaactttttaaaagttattatcaattagggttaaaatgaacaaaatattttggatcaatttacataaaggcattgaaaggtctccacaatgagactatagaattaccttatttcggaagtaatcaaggtaatattttatttgaaaagtgtttgggcaataatagcttttattagtcagggttctcctgagaaacagaaccaatgggatatgtagatagagatataaatatatttatacatacatacagagagagagagagacagacagacagacagctcatatgattttggaggctagaaagtctgaaatgccaagaggctggaaattcaggtaaaagttgatattgcagtcttgagtctaaaatctgctgtgcaggccagctggtgggaaactcaggcagagtttccatgctgcagtttcaaggcagagctggagtttcaagcaaggcatgctgcagtttcaaggcagagttgctccttcctcaggaaacgtcattctttaatctgaaggccaactaattgggtgaggccctcttacattatagagggtaatctgctctactcaaagtctactgattataatcgctaatcatatctaaaagcatcgatacaatcaacacgtcacattaacatctagacttgtatttgaccaaacaactgagcactgtagcctagccaagttgatacgtaatattaactatcacacgtaaaattaaccaccataatacctttagagactatcctcacttttgtaccttttcgtttttcatagtgtctggaagga

SEQ ID NO: 17079 - DNA, 1030 bp, Homo sapiens
atgggacaataattaggatgtgtggtctagaaaagaatttttttttcaacttttagtttagatgcaggggatgcatgtgcatatttgctgcaaaggtatattgcatgatgttgagtacgattgaacccatcacccaggtagtgagcatagtacccgataggtagcttttcaatccttcccccacttcttctcccttcttgtattctccagtctattgtttccatctttgtgtccgtgtatactcaatgtttagctccttataagtgagaacatgcagtatttggttttctgtttctacattagtttgcttaggataatggcctccagctccatccatgttgctgcaaaagatgtgactttcttttttatggctgtatggtattccatggtgtttatataccacattttctctatccagtccaccattgatgggcaccaggttgaatctatgttttttcttattgtgaatagtgctggatgagcatacagatgcatgtgactttttggtgacgatttattttcctttggatatatatgcagtaatgggattgctgagtcgaatggtagttctcagttctttgagaaacctccaaactgcttttcacagtggctgaacaaatttacatcccctgcaacagtgtatacgtgtttccttttctctgcagttctgccaacacctgttatttttttttaattttttaatagaagctattctgactgctgtgagatggtatctctttgtggttttgatgtgcattactctgatggttagtgataatgagcattttttcatgtttcttggccacttgtatgtcttagagaagagtattttttaaatgagagatactgcagcctgcatttatgctgattcagtagaaaagtagaaactgaagatacaagagaaagaatagctgtagaagtgaatggtcaagaaggaatgagatgcattgcacaagcagaggagttggtcttacatgggaacatggttcccgttgtaaagaaagaaaacgcagagtacatggaggtagat

SEQ ID NO: 17080 - DNA, 1056 bp, Homo sapiens
gaggcccaaaatagatcttcagaaactggctctgaaaaaatgaaaatctattaatatgaattacttgacaaagaattcaaagtaatcattacaaagctcaatgtgctgtaagaaaacattaaaataaacaactaaatgaaatcaggaaaatgatgcataaacaaaatgagaaaaccaacaaaggaatagaaagtatgaaaaggaaatagaaaatctggaaccaaagaatataaaaactgaaccaaaaaattcactggagaggttcaacagcagattttatcaagcagaagaaggaatcaggaaacttgaagtcaggtcatttgaattttttgagtcagagtataaaaaagggagaaaaaaagaaagaagagtgaagaaagcctaaagaacttatgggacatgatcaagcagaccaatctatacagtatgagagtacaagaaggataagagagggaaaaaaaaaaagagaggttatttaaagaatggctgaaaatttcccaaatctgagaaatgatgtagatatccaaattcaagatcaaaggactaaaaataagacaaacctaaaaaggcctgcacttagatacattacaatcaaactgttgaaagttagagagtgacataggcaagatggtggaaaatgaggttccccagctcatatccctcaatattaacaataacttggcaaacattcacagacgaaaatgcccttgtgggagtattgagatccaggtaggaggatgcagaacctcactgatgcccaagactttggagggccactttgagaagactagcctatgccccagtggcaggctagctgacagtggcctcagctgcatgtcagtaacagccctattctcccgtagtctcagttccggacacgcttggtctctgtcctgcccatgatcccatttgtcagggcacatgggaggaatcaggttggcttataccttcattagaaggccaacaaacttagtcccggctgtggatcctgagacctgtgactcagctacagccctgctttgctgtagggagaagtcctgcctacccaaggacctg

SEQ ID NO: 17081 - DNA, 1563 bp, Homo sapiens
ttttttaaaaatgtagttattcagttgttccagcaccatttcttgaaaagactatcttttctccatcatattgccttgttcttttgtatatttgtgtggtctatttctgggctccccagtctgttccactgatggatttgtctcttttgcaaataccacagtcttgattactatagctttgcagtaaatattcaagtcagatagtgtttgtcttccaacttttttcttcttccgtattgtattgaccattttgggttttttgtctcttgataaaaaccttacaatcagtttttccgtatccacaaaaaaacttgcttggattttgactgggattgaagatcaatttgggaagaattgacatcatgacgatattgagtctttttatccatgaacatgcaatatctctttgtttagttctttgatttcattcattggaattttgtttagacaccttttttctcttcattgttatagcttaatatgttacatgttggctcaattaggactatttgggatttttctttttttttttttcatataacaggctttaaggtggtattcttggtgtgaattcagagttagttgatatgcctctcagtcacagggtccagggctaaactttcacatgttgccagctttactcctaaactaacccacatggtagagaaggaattctttagacagaaaatgaagtatgattaccaaaagaaagatgaataaatgctggataacaaaaatgtcaggtactcttctacatattttatcaaaatcacattgtatttcagatgcatcttaacgaattaacattccaccccaaatattagtaatatctagaatgtagtaccctgaataccactcttaaaatcaatctgttttctaaattccatcagttttcatttgctttataacacatttgcaatctagcttgaccttaattactttgatgaactgctgttggccttttttcattcttcataatccttaatgcctttccttgataatactggccaccatctctttgaaaatttcccctataatggtcatatgcctctgtactagtctgacttttctgcctttctttagatttctcctatcttcttcagtagcttctcttctttttaccttcaacatgcacatatgctgcaagttctttttataggtccattcttttctttttcaatattttctttttctggaattatgtattttctgcaagtttacttttcacctctttatccagatgattctaaagtcactctctttctagtcttttactaacatctactttctccttaactctaggttcttatttctgactggctgctgcacatggctaccaatacatgtcattctcattatgtacaaaacttgaactcattttcccctcaaagtgtctttattccctatttttgttatttaacacaactgttctcctcatagtaactcaaccacagaatgttggaatcatctcttaagctatcctctcatttactatgaaaattcaattgattatctaatcttttatattctagtcctaatatgcacatatttccatccccatgc

SEQ ID NO: 17082 - DNA, 1320 bp, Homo sapiens
catgcatacgtcatgcttttgtgctacaaagattctgctttttaataaggtgctgtgtcttagaagattcattaaagaaagtggctggcataggctttacttcttgaggaggttctctcaagacatcaaagggcctttgagctggctaaaagtaatccagcaaagctgaatttttctctcagtacttgtgtctattagagcttgaagcttgtagaatttagagaggccacagaagatattgtaaggatttagtcatactatttcctggttcctcagccatagaaaccactgggttctttatcccaatttcttgacttggaacctatgtgtcaatactggtgaatcagtaatagaaagggagaagacattgtgcctattcatttatagaggcaatatcgctgttgcgtcattagtgtgtgatgttaaaatacagagtacagtatatttggtaagcttcaagagaccaagaaggttgtctcgttatcttgtttacttttgaaacttcatcatctagcaaggcctggctaataactatttttcaaaaagtgtttgtcgaagaactgactgaatgaatgaatgtgatagaaatattttatgtgaattgaaaatatcactgggtacatccagattttaaagtctcctcttgaatatatgagtcttttataatggtaatattttggtttaacatagcagcttacattattttactagggactaagagaaccacttctataggataataaccataccaaatttaatttaaaaatgtagttattctttggtggtggattacagaaattacacagaacttcagtaaaacattttctaataaaagaatgctaataaatgataaggtatactccccacataaagagagtggtcataagttataaaggtgtaattagaaagttcatttggtggaaagttgttagaaagggtgaatagcatagagtagaaaggagagtgctccccagcactgatgccagacatatgccaaccagataggagatttttttactctcaatatcaagactatttaaatggtatggcttatatttaatgcaaatcataggtttttttgtgttttgctgcttggttttttttttcttttttttaatttcaggtttgattagacaaatttgtaagttacccaacctttcttgaagttggaccttcttaaggcttgtctgcagctttggaactttactagttctcagtgcccttggaactttcctaataacaactgcaagcataataaacatgtatgtgacttctttttgttcatgcctaaggaaaggccttatattgctttttctgtat

SEQ ID NO: 17083 - DNA, 1033 bp, Homo sapiens
tcagttagaaatagattgattcaaggagaaatgaatgagaaacaatagtgagcataaacattgtaaatatgttgataaccttaatttttcttgctaaaaataatggaacaaaaattcaacacaataataatagtaatgatgaagcctgtttagtgcctagttaaaacatactaagttctggtctaaaggatgctaaagatacttaatacattaagactttaaaaatatggttttgaatgtatgtaaaaaatcacagatgattatccgaaaagtagaaattcactctatagcattctgatcagcagagtaaaacattaaaataattttcaattcagtatgaggcagaaaaaaataaaagaaaaatatataaagcttaatgtacagaaaatttatactcagatggtagaaacaggtccagccatataatataaaatgattaaactcaattctttggagtcatatttataagattgggtggaacaaaagaaatccaattatatgtgggcatctaaaacaaaaacaatacaaaaaatttgagaacaaataatggaaaatatatataagaaagatattagcaaaagaaagctggtgtcacagtgttcatagaagacatatagattacaagataaaaatctgatggagatgaaatagtcactacttcttgataagcagaataattccatcaagaagttttagaaattatgagtttgtgcacatataacaacatagctttcaaatatattaaggaaaaatgacagaattgtaagaagagattattaaaaccaaaatcataatgggtgtttttttaatcttattattagaaactgatggttcatggagatcaaaaatttttaaggccataaaagatgtgaacaacaaaattaacaagtatgatcatgattttatgtgtttaggtacataatcttgctttcaacagatagaaaacatactttcattcgagcagaaatggagcatttatgaaatttgattatgctctagaccacaaggaaactttaccaaatttttttatttt

SEQ ID NO: 17084 - DNA, 1040 bp, Homo sapiens
ttgggagtgcagtagttggtggtgatgtcagagaggttggcagagtccaggcataaatacctttaaggctatctgcaaggagcttggattttattcttaaatagaatgggaagtcactgaaggattttgaattggggaagcttcatgccatggcttgtgtttagaaagatcactctgtttgtggagatagactgtagggaggaagagtggacttagggaggccagttaggaagctatggtaatagtcaaattaaggggtggtggtcattaggactagagtggtagtagtggaggtgatgagaagtggttggaatctgggatatttttggaaggtgaagctcacagaactactgattgataggatgcacgtcataaagaaaagagaaatcatgagtgaatctaaagtttttggcctgaataacaatatacatgttgtgccatttcctaaaatgaggagcaatagggaggatttctgtgtgggatggatatatgtgctggatcaagagctttgttgaatctgcagcctaactcagaattcaaaagtgttttacctaggatatccaaatgctggaattttagggggaaaatatagctttccttctatatagaagagagtaagtggttctttgaaaaacattaccctgttttttctttttcaacctaaatttttatagcttcctttgacatattcttggtttaaagaaatgtttaagaaatacaagaatatataaagtaaaaagtggaagtccgtacccccttccttcattctccacccattcccactctccagggtatcatcattattagcagtgtgccatgtatacttccaaaagaagacttggtccttctttccttaaaaaaaaaaaaaagatcacaactaagaatttctttcattgtatttaaaagaccaaaggctgcacttgactgatacatatacagcatgtatgtgcatgtgcatgcatactcccatgcactcccagttgcaaaaatcaactgtttactacatagtgcttcccagcctcagtggaggaacttgaaga

SEQ ID NO: 17085 - DNA, 1043 bp, Homo sapiens
ggcacctgccatcatgcccagctaattttcgtacttttagtagagacagggtttcaccatgttggccaggtttgtcttgaactccgaacacctgttgatccacctgcctcagcctcccaaagtgctgggattactggcatgagccaccgcgcccagcctctgcctggccttttagtctcatctcctgctaactgtccccttttcgccacccttaaacttcccatcattcttaccaggtttttttccccttcttgttttttctgttacgtgccccataacctctgataatcctgtccattggggttacagatttggtcccttaagtctctttgtttatgactatgttcatgtttagctccttagtcttgacccccaccccagagatttcccttgctcctaccgtgaaagggagaatggtagatgaggatagagagataatggggtatctgtcttattttgagtgagatatgacttagagggttttgagcaggcaagacagttagcttaagaacatggaagaagcactatgaggcagaggctgggacggtctgtgactcacctggagtggataggcagctcagtgattgttccctgcacagatattcacctggtgtttaattctacatctcatttattattgagaaatctggggcaagttatgcagctattcttgacctctttctcttctgtaaaatgaaattaataaaagctctcttgaaggatcgttaccatgataaaatgagataatgcatagagtaaagagataagcacaatgctttgcagatagtttcttggtaaattcagtttgggtgactgaatgttgaagcagattgaaatttgagaaatagccttacttgtatccaatgaaatatttttcaagaaattcagttttatgaactatgaaatttatttgatatttatttagacagcctgtgccacttaacaatgttttggttaacaaaggaccatgtatacggtgtttccgtaagattataatggaactgaaaaattccaatctcctattgacatcacagccatcttaa

SEQ ID NO: 17086 - DNA, 1050 bp, Homo sapiens
ttttatagccttttattatttgattttaatattttaaaaagttataaacacttttaaaagaaggttaataaaatagcccccaggtacttattagccagctacaattaagttataacccatcttgtttcatttatatatccatttacttccctccttctattattctttcgaagcaaatcccaggtcttatatttcatttgcaaatatttcagcatctatctctaagtgataagatttccttttttaacataataattacaccataatcatgcattaaaacaatttacagtaatctcttcattacatatccagtcaatattcaaattttaaattgttttacagatatctcacattgttttgtttgtttttgtttttacaatttttttgtttgaatcaagatccaaagaagtttcatgtattgcaattggttaatatgtctttcaagtcttttgtaatctataatcttctgtaatcttttctcttcctctttccttcttctaaaatcctttttcaataaaacaggttacttgtccagtagagtttttgacagactgttgaaatccccacagtgcagggcaatgtgttgctttgttctttatgatttcctgtaacttggtagttgggtctaaagctctgctgtagaatgcggtataccacatactggtatataaatttaaattctaatttgttaaaattaaataacatttaaaaattagttcctcagtctaactagccacatttcaaatgttcagtagtcacatgtgggtagtagttatcttgttacataacacagatagagcatttccatcattacaaaaagttctgttggacaacacagatctggaagtttgatcaaattcaggtttgattttttttttttaaagaataccccacatatggttgtatgttcttccatcaggaaacatatactatttatatttctgattatcttttttgtaaatggtgatattacaattctatcattcctgtttcatttattagctgaaatattccataaaaagagatgctcttcctattatctggttactc

SEQ ID NO: 17087 - DNA, 1050 bp, Homo sapiens
catctacttaaaaatgcactgaatggtattgggggaaaggaaatctttcctattgattatcaaatcaacaggatgtcagccattccccaggtcctttttgaaggttcatgaggagcctgtttttctttcagggttggttcttgaaagcttgtatgtgagagattttattattttattttattttacttaatttttttgctgtgacaaatgtctgttgttttctaaacaagaaagccagtgtcccagttaggtgcattgagttattttcattcacttgcagtcctgttgtattaatactgaataagcagagacagcctgactggtggtgaaagatggtaatccagcctcagggctttttctggtcaatcctaaacctctgattgccacgttttcctaatttcccatttccagggcatcactagaatgaccttgcttgctgaatatgatgctctgaatctccaagattttcacatgcatttgaaagtgggcagccaggcgattgtttacaggactccaaatgaactgtgcactcacagcaagtttgataaacacacatttcctccttttatcagtgagattgcaaaatgtgaagtatgagtttccagttttactgattcccctcaacccttttcctgtttaaaaacttagacatactaattggatgctgatctgtccctgtttttcattctgcttgctggtagttgacggcttagtttagtacttacctaggcaagatttggcaaaccttcaaaaatgaactttccatgtattcaacttaaaggagattcatcccaaggaatgtaatgtgaacactaattaacattaatgactgctaatcactttgctttttatactcctttaggagcactgctattatccaatgtagttaagtaaaatgcttgtatatgaatcaacaatgttgcatccttttagcagctattgctcacaatcaagctttgcataaattaaagttgactaaaattgattttaatatgctgctcttcttcaatagtaaactaaaatatctagttaaatatcctgcatattaaa

SEQ ID NO: 17088 - DNA, 1058 bp, Homo sapiens
acgagatctaaaggtctattccagtatatttctaagttcatttatatcacccagagctctgatgtgactcatctgttttgtatattttacccatattgatatttgtggaatcttgtgacaaccactgattatattattgattagcttaagatatcatatttctatgcacatttgtaactgctctaatgctctaacaatattgaatatatatctatctacatgttttattataaggtcctgaatatctgaatataaaatataccaaaatgatctgaaatttttcttaccactatttgtctcttattaactaggtagatctttaattaagaaaggtttttttttctacaagtctagatgacttcatgaataaccttgaatgatttgtaaaaacatttatgtaataaaaatatttaactgaataaactaatcaaaatttattggatacattactcttctctttaaatgtttaccatatatggtacaacaaatttatgtattaatacatttgtatttgtaattagtagtagagattattaggggtgatatgaactagatgcaactacagacaaatgtgcaattcttatgtttttattttactacataaatgcagagaaacatagtatagcaagctttcaagttctgtgtcgactattcaagcagtaaaacctggatgggctttcaaatccgctttctttttcactctcttttgctaattatttccattttaattgttgcagtggggtctgatgaactggatagctacatgtatcagacagtggggcaccatgccattgacttgtatgcagaagcaatggctcttcccctctatcgccgaaccataagaggaaggagcttggatacaagacaagtgtacaccaaatgtgaaggtgatgaggttgaagatctctatgagcttttgaaacttgttaaggtatgcagagtaaccaattaagtatattggatttagtgtgtaatttaacaaattacatttgccgaattatttagtaatccgtaatttgcaattgttagtagcccaactattctttaaaaggattttg

SEQ ID NO: 17089 - DNA, 1646 bp, Homo sapiens
ataaattctggctagactgatcctgtaatttcaagcaaaggataaaagcgttagccagaatcatcagtgttcaacgtccatgatggtggatattattcatgtaaagatttttaaaagaaaaaacgcactttaaaagggatgctgtggaatataattcatggttctatgtatttgcatgtttgtgcttgaaaataaatgcacacctacatgcacagtataagccatttaatgaaataaattaacttggaatttatataaacctttcacatcttttccatgatgggataggatttttgatataatataataatgtgctgcatgaaaaaccatgtaggatctaattatttcaacttcaaactgacatatctgtgtttaaattggagtaaaaaacatgtttgtaataaaaatttaccattacgaaaggaataatttaaaaccaatttggacggattcaggagtgattagagggaaaagttcccaagacatttggtagtcttataaatgatttcacaaaatatgctaagactatccgaccaattatattggctgaatactgaatcctcagatttgaaaagaaaattccttaagaactaggcttttgaaattaggtatatggtgggtatgaaaacccttgataacttcctcctttatgtaatttatttcatcatgggggtagaagttttgaagttttcctttgcagtttcttttctttttttaaccagctcacttatgtttgagtctacagtatatttatacagtctttcctgccagaatcgttgacagtatttttaaatgctttcccttgctgcctaggttataccaagcaccactctcctcaagttctcaaaactataccacccacacacacatcatgaatagagatgtgcatactttttttttcttttggaaaacaaagcgttcaatctaaaattactttggctttattgaccctgaaaatcatctcaacttcacaccttatggaggtagctggtttgagcttctgtttgatcctggtaacaagactatcattgtaagattttgttcgtaaaaatgtctacatttatatatatgtaatctctctctattagtaccataatttaaagcactctgacattctgtaagaacctcagtagaaggtaccttttgggctaaaaatcttttgcttcagtcttctgaatttacctgaagacatttgtagattcagttataatggattacatgagtttgacttttaagattgctgaaaatgcttaaccccaaactgttgtgcctgatagtgcagcacatacacacagcctttatattttaatatacaaatattttctgttagggatctaggaggtgatattccttatttacaaatgaggtaaccagtctcaaagattaagacgagcttaaaattatccttaaaaaccatcagattgcaaactttgcatcattcctctgatagttatcttttggttgaaaaacaaatgcttccattttattttcttcaccttgaagaaatatactaagagatccatctaccatttagaatataaaggacaattataagaaatgatatgatgccccaggagactttgacaagtggattaatactttttttaaatgaaagtacagtagaagaattagttaaataccggaat

SEQ ID NO: 17090 - DNA, 1039 bp, Homo sapiens
agtgtgctcatgtagccatgatgttgaaaaggcaagttaaataagcttttgatagtagatgtttcaacatggtttttatgaattggaattttttagaacatcaggtaaaatcaaccagaggctccaacatgactttctctgccccataatcttttttcttgtgtttttaaaattggtatatcataattgtacatatttgggggaagtacatgtggtattttggtacatgcatacaatgtgttaggatcaaatcaggataattgggatatccatcacctcaaacatttatcttttctttgtgttgggaacatgcctcataatcttgattgtaacactagattataatcttgatggaacattatctgccatgtagtgttttgttggctgatgtggctcaaagcctaccaaggcatgatcttagtgttatgcaagggatcctgctgggctttgtctgaccaagtctgggtcttgttctggaatctccatgggtactatcagtctgcggtatcaagagtgctaatgacaggccttgaggcagagatgtggacgtgtacaaagagcaagcagctcaatctgaagcacatggggcacatggggcatgctgacacgtgtaacagaatcatctattgaggccatttccagttctattattctgtgagtctatgacgtttcctgacatcatagaagattattttccttttcctggagaattggctgataatgcctacagcaatgaagggcctcacctgctcaggctgttttgtgcttgaacatcacagttgaaatttattgctagaattctgattctagcactgtattcaagatggcagcacttattagcagagaattatcaagttcacgtgctctctgagcaagaaaagcccttagttatcctaagattttggtatagataattatttctcttgagtacaggaagagcacttcataacctgtttaaaagtatttttttccctgtttttagctttggaatggtaagtagaaactgctaggcatgaccaacaattaaagtcatccagta

SEQ ID NO: 17091 - DNA, 1024 bp, Homo sapiens
aaaaggaattgaatgaaaagattgaagaatgaaaggcttattaaattaccatcaaaaagaaaccaaaataattattagctcaaagtttagcacccaatttcataaaatatcactcgaagtataattgtttaaaaatatgttaaagaattcaaggagatggggaattgaggacccttgaataaaggaacatagaaggcatgtgcatattgaatattcagctatttaaaaactccaagaatagagtgccattaaatgctatttagtgaaatccctgaatattcattcagatcatagggaaaatttccatttcttcgttccacatgaccacagtttgcaagtgtattccatggagaagtggagtgattgggaattacagggtaagttgactgggttatgagaatactgactgtccctcagctttgctgcaggatagggtcataaagtgaccctaacattcaagactaatttcgattttagaaagtgttactgcacagatttcagaggactcctggaaatgtcctgccttctccatgctgtagtctgtttttgcaatttggaacagattatgaagtgtaaagatgatatccagccccatttctcctgttaagaaatagtgacttaggtaggaagcattagggtggttgaatggagtttgccttattacatttaggtgctgtgtgccactttctaaattgattggcagcagttgtttacagtatgcagaataatcactggcaccctttaaaggtgtattatcctcttaaaacataatagtaatgccattttcatgcttttacatttgctattcatattctgaactgccaagtcccaaatctgccagaacaaatttaagttgtttttatctaatagtggataagttgtcaagtcacaatataatggcagataatttttcttaaactatagttttacttcttggttataatagataacatgaatatttgttgaatctgacttgattgtccacacacacaaaaattacaactcaagagatattgtcatggga

SEQ ID NO: 17092 - DNA, 1009 bp, Homo sapiens
ttaatttcaggaaatgatgtcacaatgcattaaattacaatgctgggtgatttattttcccgtggacatgctgtcctaagcattcctcttcttttgcaatgtttccaattaactgtaagcttgagtgttcttcctatttcataatgattttgaggggtggggatgggagataggggtgggcagaagggtaatttcagaggttgctgaggttcagagctaatggcacatccgtcatgtccttattgggatgggagggtgctgagtgctggggctgtgatcagcagtggcaacctgcaacagtattggttagttttaaagaatgtctaaaaatgaaagcctgagtgttctgatgctagctgtccaaagagccaccagataattttaatagtgacctgcatactgtagcttctgcctttatcaaagtttctcttcactcccttcttcagtaaagaatagaggacataagtcaattctgtgtgccatctgttgtcgtttttacaatttctcaaattaaagagacaggccaaaaatttaatgtcgtgttggatcctagaagctcctctagaagagagaaaattgcaactgaatttactttgtctctcttgagggggaaaaattgcatattgctatgtcataaccttttacttgtagtcccaatttggtgttttgaattggattatgagggcttctgcatggaaagactgatgtgtttgggattcagcagcctttgttcacatggttctgagtgacattgtggtaaagttgccagtacagtggtggtgcaatggcttttcatgggggtaatgaaatgcatagtctcctcaatgcaaaaacattttaagacgtttcaagatatttcaaattacatcagacaatcctgtttaaaaagaggttcacctcagatagactgagaaacttacctcccagattatgagctactaactggcagatacattttaaaaataggtaattgataggcagaacacagagtttttagggcagccaaact

SEQ ID NO: 17093 - DNA, 1028 bp, Homo sapiens
aaacaaatcccaaatatggccggtgcagtggcttatgcctttaaccccaacactttgggaggctgaggtgggaggaatgcctgaagctcaggagtttgagaccagcctgggcaacacagcaagaccccatctctataatttttttttaattggctgggcatggtggtgcatgcctgtggtcctggctgcttggcagtatgaggtggagcccaggagtcaaaggctgcatggagccatgatcacggcactgtactccaggctgggtgacaaagtgagaccctgtctcaaagaaaaaataataataataataataatatccaggctgggggcgatgactcacgcctgtaatcctagcactttgggaggccaaggggggtggattgcttgaggccaggagttcaagaccagcctgggcaacatggtgaaacctcgtctctactaaaaatacaaaaattagccaggtgtgtgggcacacatctatagtcccagctactggggaggctgaggcacaagaattgcttgagcccgggaggtagaggttgcagtgagtggagactgtgccactgcactccagcctaaaaaaaagaaaaaaaaatggaaatacccctcagtaggagagaacatggtctacattctgccttccgaaatccatattaacatttggtggctgcttgttgaagctaggtgatagcattagagagtcctggtgtcatgaaagccagagcatcctagtgaactttcagggatggggtggaaggtggagaagaaatgggctatggagtagttcagaatgtctccaatggggctacttttgagagagaatgctctctttcaccatttgtcttccaggatatgaacagaatatagagttgctatcttccttagagtgtgaaagtctaggctgtctgcaagacagcatgttatggtttttattattttttattgattgattgattgtagagacggcatctcgctgtgttgcccaggctggtctcaaactcgtggcctcaactgatcttcccacctca

SEQ ID NO: 17094 - DNA, 1050 bp, Homo sapiens
ttacaatgactttgccaaaatgacgatcacctttaacagttgcatagaaatctcacagtctccaccatcaatacgctcagagtcacaagggagaaatacggagaagccaagtgctgttttcttttcttgttttgaaagctccgtgttacccaatatagaaagccttaccacctgtattttgtgagttgaatctcacatgggagtgtcaggagcccttaataccttatctcccacctccctgcccagggcggcacccagcatgcaccatggccaccgattagagttgtgggtggctggtgatttctgggcacttgttgtacctctgctgtgctacgaactaacagtaagagcttgtagtcacctcaagaatgctttcatctagttgaatgtatgcaaggctttgtgcagaattctctgtccgactcaaatttttaatgactgcctgtcctccaggttgggagagaggactcaaatagcctaagctgggggagttgggaagtctgcattcatgctctgtgatcctctgtactggctgaacctcagttaagtccattaagttccctggactttctgtttccccatttttcaaatgagagggacacgttgcaggatggataagctcctttcccatgctcctaggttttggttctgctcaaggacatttagtcagagcaatgcccggtcccagcctcatgggtcattctttcctctctttccccctttctctttgcttttgcttttcactaactgctttatttctctcctgaccttcttcacaacatgcccctttcattactttctcccactagctttgtctcccatctttctctctgtgccgctcctctgccttttctgcacctcccttgtagctttaggaaattctcctctgcttgctctttgaaaatgttttccttcttcatccacacttcaccccactgcagagaagaggttcagtaactttgatgaggatggtcctgtaaaacttttactttccaatctttaatgagctgaaagatttactcagctgtaattctgagctcagaaaccaag

SEQ ID NO: 17095 - DNA, 1030 bp, Homo sapiens
ggaatggactttatttaaaatgatctaagaccctaaacagcatatataagtaaatttgttatttatgctaaaagtatgagagcaacttcggatactgcaacagcaaccaagggaaatggctgtaaggagctcacaaatccataaacgttgctgattacactgttaacgaaagctgtctcctctaggaggccaaaaaaaaaaaaaaaaaagcaccttgccacatgcatgtccaagctcacaatatcaggtgcagctttaattgctgaagcagtttacaaatatgtcatgtatttatatgacaaattcagaagggttataggtgctgtaatgcctttgtttgcaaggtggacattaaagattctttttttagctgctcaagtccattatcttaaaagctaaccatgttcacttctggaaacggttttactatgtgagacattttaaaagtaacaatttatctttatcttcctgtttgcaatccttgtatgtgtggatacatactgttgactctaagactcttatgacaaaaaaattacaatatatttttacagataaactaggcatgcttatattttactgttcatttggaaattctgggaaaccagtaaaaatttcagaggttgcttcttgctataatattgttttcaggccattctatttaggctaatacttaaaaatagagtagcacattgaaagctgaaggtcttctttgattatccaacttgtgtgttgccatgctgaatgacattagttacagtgtcatgggtccaggacaaggttccacttttatttatggtggtggctgctgatgggctcttcttgcagagctacaaagggcaaggggtggagcagtggtggggagggaaaagtgatagattcacattcctaaatcggccattttgatgtaaggacattagtagcaaactaaggtgtatcgatctggcctgtggtgtcaggattagctgggagaaccaatgaggcagctgtggtagtggttattcttgccttgcagctatggccatttcaaagg

SEQ ID NO: 17096 - DNA, 1027 bp, Homo sapiens
gctgggttgggcatctataatacaatatgctccataaatgtgaataataataatagcaattaagtgataataatatgcatgtgaccaccggctttattagttttggttccatagcttgaactttaagcccacatcacttatcactttctgtaaatttctatttcaggatacagtataatatgatttcttaaaacaagagaacaatagctcaagacactttctttctctattttcttctgttttttgtttgtttgttttataacacagacatacaaacatgggcagggtttggagcagaaggagtctcaggaaaaggcttcaaatctgggagaagtatgaggtcaaaattctcagtttcctgtgtaccatggtttggtactcagtcaaatgctgtcccattctaatttttttttttttttaatttctgatttctgttttctgcctaaagaccagaagaaagtgagctcagcagaccagagtctgaatgtgggccttctagttagccccaattcagttggaggtatgacgtgggacagctttaggaggcctggaggttatgggctcagacataagggtgggagagcctgggcaaggttccattctttactacctataaactaggcttttaccttgtaaaggaatttggtggaaggcataaggtgataatgtatacctggcacgttataaccatctgttaaaaattagttactgcagtctggacaacgtggtgaaaccctgtctctacaaaaaatacaaaaattagccagacatgatggtgcacacctgtaatcacagctgcttgggaggctgagacagaaggatcgcttgagcccaggagatggaggttgcagtgagccgagatcatgccactgcactccagcctgggtgacagagtgacaccctatctcaaaaaaaaaaaaaaaaaaagagttagttgctggctgggcatggtgactcatgtaatcccagaactttgggaggccaaagcaggtgaatcacttaaagccaggtattcgagactaggctg

SEQ ID NO: 17097 - DNA, 1058 bp, Homo sapiens
gcaattacgttaacgcttcaagcatttctgactccaagtcagctagcaacaccaggcataactcaacactgtgagtttttctcctctctgtagattcattaacaggtcaccaaggtcccaactgaaatttaaaactgactggttctgttgggttagttgagttatggcaagggagatagcaagaaagggccagagagaagaggaggtgggagaaagaagaacccaggttttggagtggggattacttgtaataacgagcaaagcataaagttttagcgtttcggttagttagttttgttttttaggaaagagaagaattctgagactgatatataggtaaaaacaatcacacaaacttctgtgctgtgggtagatgcacccacttatccaatgctgaaggatttgatccctgtaggattctgttcctttaatcatgtctctgcgggattaaagaatggacatggtagcttatgtgtatgagtactaggaagtcagtcattttactgtatcgaagtttgaaagaaaaaaaaggtatgatttctataaaatggggactattttggcatagaaaatttcctacctggcttaccacatcagtgattaaaacacatatataagagcattctggctttttacagcagactttaaaatttgaaggccagacttgagtgtatgttgtcatactcatgcctatattagtcttttaaacagggtttcaaggtattttgatattttgtcccaccgaattgtccagagtagtttcagtgggaaagattaattatctgcttcagggcaaagtcaacagagatattgactgaaatcgcatatgcttatcctaggttaaatcttagggttgatgtataatggaaaacgtgggagagaaatttatgtccttagtattaaatatattataatgtttcattggaaatcaagtttgtagtttcgcaaagagttttcgcattcagaatttattagcaaaacaggcatatggaaaactgtaaaatgattcagtttcaaaacaaattatgataaacacaaaaaatagggatgaattgtac

SEQ ID NO: 17098 - DNA, 1038 bp, Homo sapiens
ggtggggagcgaagcccagggaggccgaaacgggagaccgagcgccgagagcgcgagcaggggatgtttcccaggtctcggccccaggagtaaactgcgagaagtgagttatttcctctgtttgccggggcaggcggccgagccccgggcggctaacccgaaggatgtaaccactggcacggctgagggcgggctgggggtgggggctggggggcggtgaggggcaggccagcgcaggccacttttaggtgcgattcttttgctaatttgcacgatttcaatattaaaagtacttaaatccgctttcaaaggccctgcctcagcattcatcttgagtatttccttctttagtgaggaaggatttcgctgggtatgctgttctaaaaagctttttctatcctgagaagggaccttttttttttttttttttttttaaggaaaaaaaaaaaagttgtcctgaggtcgagggaggggatgtttaaagaggactaagaggagaaaaaaggcctggcccgaggaaagcagtcttacaaatagcacagtgaacatcagggggaaagatattaatgcttatgctcaggttgagtcagattcctaccccgtggccaatgaggcagagatgatcagtaatcacttgatttttctgactatttcttgatgtttaagtttttcctggccacctgcccgtttcttctccccagcccaactttctcaccaccatcctcaccccactcccaaccccaagacaggacctcagagtcacagagctctaactccattccctgaacttttctttcagatgatacaagcaatacaagtactaaggtttcatcttttggagttagaaaaggtaagcaggaaataacgctccccgtgttgattaaaccatttccctctcctagttgagttgggatgtttttaacaaacctctagtgtgagggattgagcacctggagattttgagcatgtaaccatgtccatccttcaactcgcttctcaacacaggggctcagagggtgggtgaatcaggacagcctt

SEQ ID NO: 17099 - DNA, 1019 bp, Homo sapiens
tgtggctaagccgcccggaggaacacaaagggcatacgcgcacgcacacttaaagttttaaaacacgatttatttatttttgtctgctgcaacgctgggagaaatgtggtctttggaaggaagctctccagtgtgtaaccttcctattattttggcccccacactgtggctttagtagaacaggagcaaacaagtttataaggcaaggaggtggagagattaaaagagcattctcttgcatttatgaagtgtcactccggtgtgtatgtaggtgaagcctttggcctcgtctgaaatgcccattaaaatgcagagttaaaactatttttttttcaatttcacacagtgttcccttcttgggaggtcagggctgggtctcaggggttggttccgcggcctccgtagtgtggggagtggatcagaatcgactcgggctccagactgcctgagcgtctcggatgtttcattacgttccaactgaggctgtttttatttgtcgggctgcagtggccggggtcttctctggccagatctgagggacctctgagctgcgggagagggccaggcccttttccctttctgtttctggcttaggctcgcctgatggaggaagggttgtaaagtgtggtgcgtgcctgttgtattaaagaaggactccacaccctccaaacttgttgattacagttcttgctccttcccctctgcaccccgtctctgtgtgtgtgtctctgcgtggcgctgcccgttaggcacccgttgtttcctctgttagctctggtctttgagaagtgcgagctggcgacctgcactccccgggaacctggagtggctggcggagacgtctgctcctccgactccttcaacgaggacatcgcggtcttcgccaagcaggtccagccttcttgatccactcaacttcgggcagtccctcactacccctcccctttcctcggagctttacttgaaaggaggaaaggccagggacaccctatctgttcctctggcccagtccgctctct

SEQ ID NO: 17100 - DNA, 1152 bp, Homo sapiens
cctcgccgcctcctcttccttctctaaacgttgctcttggttcatgctttttcatttttaaatttaataacattttttcctcacaacttttaactccgttgttttggctggtttggtttctgtgtgctcaacttgtgctcggtacttttctcctttctgactttgtttttatttttattttctctctctctctctctctctctctctctctctctctctctctctccccctctcctccttttcctcctcctcctctcttctctcttacctccctccctctctctcatctttatcccttcctctcttttctgttcgccctcttctccctgctctttttccctttccacccccctcctctgttctccctcacctcctgcgccccctcccccttcccgggttctgacagtacgatgagctgccccattacggcgggatggacggagtaggggttcccgcttccatgtacggagaccctcacgcgccgcggccgatccccccggttcaccacctgaaccacgggccgccgctccacgccacacagcactacggcgcgcacgccccgcaccccaatgtcatgccggccagtatgggatccgctgtcaacgacgccttgaagcgggacaaggacgcgatctatgggtaaactgaccccccggacccagcttactgtgtgtgagtgtgagagtgtgtgtttgtctctgtgggggtgggaaggtggacgactaagtggggagttacttctgtatggtggggggcgggcgccgcttgccttaggaagggaccgtggagggggcctgctcttctgcccctggagtcaaagccccgaagaactagcctctttcgctctcacagcccgaccactccagaccccacagcctggagtgactgagtccccagaatcttgccggggccttctccccgaggacaggattcctggccaaaggacgcaggactgctcgtttcaggctccctaacagaggccttgacgaaggagaaagtttcctgccgatgagaagcaactttgggtttttttattttttacttttttttcttctgtttcctactgagggtctgggagtcactaacagcagcttgagctgggatcagggctgcttctgtcggccaggaagtcctaatcacccacttcttaat

SEQ ID NO: 17101 - DNA, 1059 bp, Homo sapiens
ctgtgggataggtcattatttctcttctagtataagtcagtctttgtctgtttaaatatgtgaaatttcctttatgtattattattatttaaatgtacaccatgggtatttttcttttatgctttcccttaaattcgtatgctgaaaattgtataaactatgtattacagtccttcagaaatcatttatgaagggtttacaatgtgccagagacaccccaagtgtccaccagcctcatgagggatgctgataatgaggctgggccatgaggggtaatgcagatgtgtggaaatgctaaggaagatctatggtctagctggcatggttgtgtgtgtggggttgagggcagagaggtcacaaaaggtttccttgaaaaggtagtgtctgagctgagtcttgaaagactccattcagaaaggcttagacctttggatacagaagaaagaccatttaatagtgttcacattcacaaccaccatttttgtttccactaagccctcttatgatctgggcaagaggatctgaccagtcacaagggccccagagaagaacatcggtgttttaattctcccaagtatattttggaaggatggctctttcagccccttcttgccttctcttgccttctgtgttaagataatagtgcagagccaggaatgcaatccaccaaagccagtaattaactttctctttggatggggagagtgaattctaatttcctggctgatgaaattttctgtgggttgttctgcctggtgtcttctttgttggccattttgccaaatagatgccaatttcctcagctttaattagtccagatgtcagaagctcaaatcatagtatcttcaatgtgtgtgtttgtcaacatcctgcttttaaatgctccgggcttcttcctgtatatttcttttagcacagtgccttgaacctgatagatacacagtctgttgtgaatgaaggagtataggaatgaatgaattaatatccatgatgagctttatttacatgagtgaacctcaaagcctgaggatcatataagaaatagttaaatgattttct

SEQ ID NO: 17102 - DNA, 1086 bp, Homo sapiens
gaccttttgggctctatgcatatctgattcagtggtcatattatttaggggtttagaatgaccatttcacttgttatcaccactatccatgtaatgttttaaaacttatcctcacttggatagcttaaaattacagtctttaaacattacctccagatttagataaaagtaaaattgtagtgttggctataagcaagcagagaaatatattaatttccagtttccgggagggttggaagaaatacttttccagaacgagcatgattccactctgatatgagaactaaattaagtgacactagttgtataaagctttggcagtgggcctaatatcccttgttggttttatatgcatgctgctggctttgctggcaaaaatgctggttgttaatttattgatgccaagcacttatagaaccagctttgtgtaacacattaaaaactagactgaaatgtatttgttgtcactgaaatgacactctaattatattagatgtcccaatttagttttatcctttaatttttagcctcataactttcttccaaagttatctgggataaaaacttgaatgttcaaacttggcatataattaaattgagattaaaaaaggctatcaactaggacttgatttgtttaaaatatgaaataaagatatctttctgttaattaatagaacaacttcaaatcaagttactcaacaggcctgttcttggcacttcaaatatgtaattaagttttatgatgacctagttaatatctccaaagtaagaaagcacagtgtcatggtttgggttctttagaagcactgccaagatagaatttggggtacaggatgtttattaggaatcattacttgtaaaaggaagggggaggaagcagttttgggtagagagaggagctgaactgccatgcaggcctggcaagccttgtgaatgcagcaagggtttctagtcagtggcggcctgtgtaggctgaagtggacagcccttctgtcacccttgttcagggactgaatatgggccaccttggaaagtgggagagctcaggcaagcagcactctgcagctgaggctggccctaaggttg

SEQ ID NO: 17103 - DNA, 1050 bp, Homo sapiens
cattgttttattatttgtaacatatccttggtcagataacattttagaaaactctttccataatgatgaaataatctcatggttgtttcaagatgtctagctaattggatttaaaacactatcagccagttatcattactttgagatttttactttttcttaatgaaacaatgccaaggtcattgatatcttttttgattttcataaccttgtgtggtttttaattcatattggcattctattaaggcatgtcatgtttgtgtgctactgcaggaattctgttagacattttattttgttattgctttttaaaaatatttttcattgacaaaaatggtatatatctgtgttgtacaacatgtattttgaaataggtgtataatgtggagtggctaaatcaagctaattgacatgtgcattatctcgtatttttatttgtgctgagaacacttaaaatctacattttaaagcaattgtaaatatataatatattgcttactgtagtcaccatattgtacagtagacctcttgaacttatttctcctaacagaaagtttgtgtcctttgaccagtatctctccaacgcttcgtcctactggcagcccattctacactctgcttctatgattctggatgttttagattccacctgtaaatgtgatcatgtggtctttgtctttctgtgcctagcttatttcatgtaatataatctcctccaggttcatctgtgttattgcaaatgacaggatttcctccttttcttaaggctgcagtattctgttgtgtatatatgccattcgtccatttatccattcatcctttgacagacacaggttgattccacatcttggtgatcgggaataatgctgcaatggacatgggagtgtagatatctcttttagatactgatttcatttcctttggatatatacccagtagtgggattgctgaatcatgggatagttctcttgttacttttttgaggaacctccctggtgtttgtcataatggctgtattaatttacattttctgtgtggtatattgaacgt

SEQ ID NO: 17104 - DNA, 1051 bp, Homo sapiens
atttcccaatcttggtactactgaaattttaggccagaaaattctctgttggggggtagtagtcctgtaccctttaggatgttttcacagtatccctggcctctcctagataccagtaaaactccccagttgtgacaaccaaaaatgtctccatacattgccagatgtgccctgggaagcaaaatcattgttggttgagaattgctgatgtaagccagaaaaattaccgtgtggtattttctgataatgagcatacatataagaatttcttgaggcgggagagttgcttgagtccaggagttggagaccagcctgggcaacatagggagatcctgtctctacaaataatttaaaaaaattagctggacaaggtggtacatgactacggtcccagctactcaggaggccaagaaggaaggatcacctgagcctgggaggttaaggctatagtgagtcatgtatacaccactgcacttcagcctcggcaaaagtgagactctatctcaaaaaaaaaaaaaggagttgcaaatatatagaaaagcttaacaaagtaatttaagatcccttgtaatcccactaaccaaaactacaattaaaaatttggtacgttcttctagacatttttttatgtataggttgtatattttgtttaaaacaaaatgggattatatattcgttgttgttgttgttctttttgtttttttttttgagacagagtctcgctctgtcacccaggctggagtgcagtccacgatctccactcactgcaagctccacctcccgggttcacgccattctcctgcctcagcctcccgagtagctgggactacaggtgcccgccaccatgccccgctaatttttttgtatctttagtagagacggggtttcaccgtgttagccaggatgatctcgatctcctgacctcatgatccccccttctcggcctcccaaagtgctgggattacaggcgtgagccaccacgcccggccacaaaatgggattatattaaacatcctatttatggacatctttccatgtcaatgaactcagc

SEQ ID NO: 17105 - DNA, 1050 bp, Homo sapiens
ataagtttcagatggtgagttttgggtgttccttatgtttcccttctcagggcaagagtcagtatgatagtgaacactgggtaagattgatacttgggttcactgctctccggagataagttttaccagtatgtttcaagtaaaagctgccagggtgtgaatttcaatgctaataccgtcttcctttctagtttttttaagttagattttgtcttaggctgtagatatatgctacctatactatagttgaacaagaagttgcctgcaattttcccttggaaaaaaacgtaaaaaatgtgtgcaactgtctgtgggtgttgcagaagctgctataatgtgaaagagtgttttatgcttataccattttccggtacaagtgtccaatggtgctatattctttcctgatttttggctaccctaaatccattatgcagatagggctggtgttctgccagtttgcacatcttcccactaaggtatgctctgttgtatctttcaggcttattcaaacctccttagagctaacatggatgggctgaagaagagagacaaaaagaacaaaactaagaagaccaaagcagcagcagcagcagcagcagcagcacctgccgcagcagcaacagcaccaacaacagcagcaacaacagcagcaacagcagcacagtaaagggcatacatttcctgctttcaccaattaaccactgaattgctattttttccttttggccagatagctaggtttctggttcccccacagtaggtgttttcacataagattagggtccttttggaaagaatagttgcagtgtttataggatagttgtggtaagaatctagtttattttgcatttggctaattggtctgtgctgcatggttatatactcctggattatagattaaaagtctctgtagacatctctgtgaagagcaagctatcattaaacatgtctgtttatcagcactgtctctttattcctttcccaacccattttaatagttctggcaataactactaaatctagaatgatgtgattaatgaataggcttta

SEQ ID NO: 17106 - DNA, 1032 bp, Homo sapiens
gcgataatgagaaactggcagccagctgtattgggaaggtttctgatgctacatccaggcttagcccaaaagagtaccatgaccaaagagcaatgtctactgggcatgggaggaggaaacaacctcacatatttgatgtcccttatctagcacaatttcagaaagttagactgtcatatatgtgcaaagataagtagaaaacagtcagccccagaaaagaaatggtagacagaatgagagaagtaactagagacagtgatgcttgctaaacattgtatttagtcctgtatattaggtgaaccatttgacaagttccagacaatgaaatataagcagaaatgatgcagatcacctctgggctaagacagaaaatacccacgtgcccttctttactttcctctttccttgttccagtgattgaagaggccccttgttccaatagcacaactacaaaatgaaatagcctttttcatcctgtgtccttaagtgactatgtggaaccatgtccctgccaacctggaatgaacatgcagcagagagagaagtcaatgtttttttgtgtccactgaaatttgggggttgctttattactgcagcataccctggcctatcctgaataatatagtagtcaaagaggaacaattttttttctctttacattttgtgtccatattagagattactatttcaaaaactgaaagataaaaccttgaaaatcaactgtggtatatatatgactcaccagtctgaaagatgctatttgacatagagattacaattatccaaaatagtggcaatatatgtgaaagtaatttgaaagtataaacatatttaaaaatatatatatatatatacatacacatatacatacacacatatgtatatttttttgagatggggtcttgctctgtcacccaggctggagtgcagtggcgcattcttggctcactgcaacttctgcttcctgggttcaagtgattctcctgcctcagccccccaagtagctgggattacaggcgcctgctatcatgc

SEQ ID NO: 17107 - DNA, 1017 bp, Homo sapiens
tttctctagcttactttattgtaagagtataatacatatagcagacaaaatatgcgttaatcaactgtttatgttatcactaaggcttcaggtaaacagaaggctattagtagttaagctctgggggagtcaaaagttatacatggatttttagctgcagggaggctggcacccctaacctccacgttgttcaagattcaattatattctaaaatttattctggtgatgttgcagaattctgtgaatatactaaaaaatactgaattttacactttaaacaatttcatgaattatgaaaaagattgtgcaaatgtccacttttataaaccattgaaaattttcttaattggaaaatgattttataaataaagttgcattattgctttgtagacgaagtacttttattataagcctacagagcagaatgcaaaatgatgccatttatgaattcatgtcagtagttatttgctgaaattatatcagtatagtgcattgatcctgcttcaaagcaggtgtagagaggatttccaatatgatgaacaacgtgtggactggaaagcagaagaaaatatgcatagaattgggtacaaagtaaatgtattttcttcaacattgtgttctgttcatattgttctgaaataaaagaacaagttctaaacattaaaacaaatacacaacatccaagaaaaacgatacaataagcaaaacatgcagaatacacacacacacacacacacacacacacacacacacacacacacacgcacacacaatctggcagctggagccacattcagagacaatggttgttgggggaagcctcccagtttcctccaaggaaaggacattcttgatttgtcgtctccactcccctgtcaccctggacttaggtgcaaagatgggcagagcagctgtgcacaccaagttgtctcttctttcagggggtgcccatgtgtgttggggtaaaagggaaactgggggagggggcactctcacgggtgtggcccaagagtgct

SEQ ID NO: 17108 - DNA, 1027 bp, Homo sapiens
aggagaatggcgtcaacctgggaggctggagcttgcagagccgagatcgcgccatcgcactccagcctgggcgacagagccagactcccgtctcaaaaaaaaaaaaaaaaaaaaaaaaaaaagattatgcatgttgtgtgtatcaataatttgttcttcttttaaattactgacttgtctttaattgttctggatataccacaatttacttatccattctcccgtcaactgatatttgtgtccagtttttggctactgtgaataaaacagctatgaacattcatgtacagctgttctgtgaatatacattttcttttatcttgggtaaataccacaaaatggaactactgttatgtctgttagttttatttttaaaaactgccaatatgttttctaaagtggttgtcccatttaacactcccaccagcaatgaatgagagttctaattgttccatgtgttcatcaggacttggtagtatcagtctttaattttagccattctggtgggtgtgtatttcactgtggctttaatttgcatttctcagttggctattgatattgagcatattttcatttgtttattgaccctttttatatcctatttaataaactatcttttacctatttacttttataattcaaaaaatttgttcaacacaattttactgaagtagttgaggtaattatggttatttcctttttacaggtaaggaaaataaatccagagagacttatccaccttttccttttttttttttttttttgagatggagtttcgctcttgttgcccaggctagagtgcaatggcgggattttggctcaccacaacctccgcctcccaggttcaggcaattctcctgcctcagcctcctgagtagctaggattacaggcatgcgccactatgcctggctaattttgtatttttagtggagacggggtttctccatgttggtcagcctggtcttgaacttctgacctcaggtgatccacccacctcagcctcccaaagtgctgggattacaggca

SEQ ID NO: 17109 - DNA, 1065 bp, Homo sapiens
aggaatttccaaataccttttccccagattcactgacgttaccacattatgtgcatgtgcttgctctctctccctctgctttttctctctgcatataaacgcatttcctaagaataaacacataaccaaccaaagaatagagtttctattatttgtactattttcacaaataaaaagactgaggaaaggtgtgctcttttcctgtgatcctgggccacaatttcaccaggttcaggatgcaaggcccttttctgtattcttcggacctctgtcatctgaaaacaccggcaaaccaccactccagtgatgctgccatgtgttaagcttccccttaagacccctggcagagagtagcatattgtgcaccaaggttgtgtgggaaaaggggctgagatgaagccacccctgcagagcggcagcttctagtgtacgtgtgggtccacagaggtttctgtgaccctggaagcctgtccagctgagctgaccttcaccagggaagagaatctccagacaaaggcacttagctgcctactgggtccccaccgaaagactgctgaaaatatttcttcagaatgctgagcgctgaataccactcagcacgtgctggagccagaggtggttagacacgagtctgtccttggaaatcccaggctcagagccaccattatgcaaagaggactgttgaggggttttcttttacttttcttttcttctcttttttttaatagttttttgagaaatgggatctgtgctaagggctttgggcaggccagctaggaggacggaagaagtttcccattcgcttgtggacaaggcctgcacccatataatcaactccaacccacctccgtcatcaccagggtaacatccctgcccaatctctcctcaggccttctgcattaccagacctggtgtcttcccctccctggatttgagggccctggactctttgcagcctctacctcatgcccaaccaggacaagccttgagcacaggcaaaacagattccacagtctgcatcccatggcaaagaatttcatgtcattccctcctccactcctccct

SEQ ID NO: 17110 - DNA, 1025 bp, Homo sapiens
tggctggtgtctgaacgctatttccccagccctgggcagccatctcctgtagctgttccctcatcccatggctttaccaacccctccttgctgcactggagagcctgagagcaagtaggttcagagtgggaagacagggctaaaggcatcttcccggtcttctctccttccccttcctcccagcagttgcagctgtgctgcgtgatgatgtggaacagagcacagtcttaattactgctcagccctgctcattagtgcttctggaagcccaagaagccagagttaggaagcctcaatcacagtggagacccaggctgcaggcctcctgggtgatcgctagtcctgtgtctcctggtgacttgggacccctttgggggactccagcaaaagacactccctccaaccctgagactggggaagggctgaagctggagggagtcactgctggattaagggagtcgctgctggattaaccttcctcatgggcagctctgatcaaatacctatgtttctcttgctgacagcatagagtctggagtccttggcttagcagtcaagctcctccacaatttggtcccacaggactttcccaacctgatttcctccttcaatcctggcagacaaggagggaaggcaaaggctaggccccctcatgggctctcactagtgtgtgcagagcatttcagggacagcatatggtggaacgtgtgaaactccactgcaatcagagaaagatgaacgaatgattaaataaaccacatgtgctcaaatcccgcacactgatgacttccctgcttttggagagacttagcaaggagcctggtgtgttgttcagcatgcactattttttttcttttttttttttggttgtgaaaaggaataaagaaccatgaagtgcctgaagactgaacgaaaggaagctgagtggaggaggagagaaggggcgggccctgaaaactataaatctataggcccaatttcaatatgtggaaaaactccttcaaaatataaatttgtaaacaccc

SEQ ID NO: 17111 - DNA, 1034 bp, Homo sapiens
atacttgcttagtgatacaaatatttttattgtaatattcaaatatactttcctctttttttttttttttttttttgagatggagttttgcccttgttgcccaggctcgagtgcaatggcgcgatcttggctccccgcaacctctgcctcccgggttcaagcaattctcctgcttcagcctcctgagtagctgggattacaggcatgcaccaccacgcccggctaattttgtattttttttagtagatttggggtttctccatgttgaggctggtctcgaactcctgacctcaggtgatctgcccgcctcagcctcccaaagtgctgggattacacgcatgagccaccgcgcctggccgctcctcttttttccttctttattttttttttgtttttttgagacaaggtctcctcactctatcacccaagctggagtgtagtgacaatcatggctcactacagcctcaacctcccaggctcaatccatccttctgcctcagcttcccctgagtagctgggactataggcatgtgccactatgcctggctaatttttaaaaaaaatttttgtagagacagggtcgcattattttgcccaggttagtctcgaacctctgggctcaagctatccttccaccttggcctctcaaagtgctgggattacaggtgcaagtcaccatgcctggccctttcctctcttttcattgactaatggttaaccttttttttttttttttttttttttttttgagacagggtctcactctatcaccaggagggctggagggcagtggcacggtctcagctcactgcagtcttgacctcctgggctcaggtgatcctgcctcaggctcccgagtatctgggactacaggtgcataccaccatgcccagcttattttttatattttttgtagagatgggatttcgccatgttgtctggactgggttaacacctttattagtagatttagtcgctttattcctactgcattttattggcaggatacgtgtgacacagagagtggctctctg

SEQ ID NO: 17112 - DNA, 1067 bp, Homo sapiens
agtgagcgagatcacgccactgcactccagcctgggcaacagagcaagactccgtctcaaaaaaaaaaaaaaaggtaaggagctttggtctctaggtactgaagaaatcattgaagtttttaagaagacaagtcatttggttagatctattttccctccacttaccaatttatttttatttttatttatttatttatttatttattttagatggagtcttgctctgttgcccaggctggagtgcagggacgtggtatcagctcactgcaaccccacctcccagattcaagcgagtcttcctgcctcagcctcccaagtaactgggattacaggcgcctgccaccacgcccagctaattttttgtatttttagtagagacagggtttcaccatgttggccaggctggtctcgaactcctgacctcaggtgatccacctaccgtggcctcccaaagtgctgggattacaggtgtgaaccaccgcacccggccttatttttttatttttgagacagcatctcgctctgttcaagttggccttgaactcctggcctcaagtgatcctcccaccttggcctcccaaagtgttggaattacaggtgtgaaccattgcaatggccttattactactttatatttgtggagtgctttaaagttgacaaagtttttagttaatcctcacactattaccttgtggcgttgaagaacagatttcaggagcgtgaaagtgaagacaccaaaaaggaagttcttgcaatatttcaacaaagagatgaagatttggattagattccagttctacctttttggcaccagggagctgttctgtgaaagacaattttccacagggctcggggggtgggcatgaggcagaggatggtttcggaatgaaactgttgcacctcaagatcatcaattagatttccataaggagtgtgcaatctagattcctcacaggtgcagttcaaaataggttttgagttcctgtgagaatctaatgctctccttgatctgacaggaggcagagctcaggcagtaatgcttgcttgctagctgctcacctgctgtg

SEQ ID NO: 17113 - DNA, 1091 bp, Homo sapiens
gcattcttggctcactgcaagctctgcctcccgggttcactccattctcctgcttcagcctccggagtagctgggactacaggcgcccgccaccacacccagctaatttttttgtatttttttagtagagacggattcaccgtgttagccaggatgttctcgatctcctgaccttgtgatccacccgccttggcctcccaaagtgctgggattacaggcttgagccaccgcgcccggcctgtatatagatgttttattaaaatatttgcacagtactaacatctgaggcaccgtttaacaagatttccagcaagttcaagtagattatggtttcatttttaatagtgacttgacctaaactacaaagcaagagtgtcaacacaggaattatacttaaacctcctcatttctaattcaaactactatcaatctggccaaatagccattacaagattcagggaaggactcttaagaacatatttggtgtcttatactgaacacatacctagattctaccatcatggctgatgcttgataaaggagctgggtctggtggtctgtgttgaacgctcgagcatatgctacattatccaggacatcactgccagagagaccatacctatgagagaggagagaacatttttaggctgcacacagaactcaggcagatgagcaatttgtttctgacacttaaattacctgaataggtagggaagaagtggtactgacagtagtttcaggaccaaagaatgtatttccctttctattaagaagttcaggcaaactataagcagagagatgatagcacccaactactctggagctctacctggcaagtctttgggataaatcaaatccattcttttttttttttctttgagacggagtcttgctctgtcacccaggctggagtgcagcggcgtgatctcattgcaacctccacctcctgggttcacgcgattctcctgcctcagcctccaaagtagcatggagctatgcagcaccatgcatagctaatatttttatttttagtagagacagggtttcaccatattgatcaggctggtcttgacctcctgatctcataatcc

SEQ ID NO: 17114 - DNA, 1075 bp, Homo sapiens
taggagctggcctgatattgatgactgtaacatactagcttggaaattcaaacctagggtgtgggggaaggccaaggcccccattctccacagttgaggaaaaaggggcctcacccgtttctgtctggtctgcagtatggaagccggcaggactttctctggcgcctggcccgagcctacagtgacatgtgtgagctcactgaggaggtgagcgagaagaagtcatatgccctagatggtaagtgctgacagcttcctgtgggaaggtgactgactgattcaggggtggggctggcccatctgcctggggacccggggaaccaccaagatgctgtcagcagttgtggctcagttacccactagggacaaactctggctcccaaagacccttgctttctcctctggaagaagagagcagtctttgcttatctgtatatcatgctgattagtaacacacgtgcatgtgtttctaggagtagttgtatcctatcaatgttattcgtttttctcactctagccacagagggcaaaaccttttttcttaacctgaggttttttgctgctgcttagaaatctggtttcagttttctgagctggtggggcaggtgttctaagaatatagctagcttagaagactctggaatccacttggcaagtctgttggcaaaggctccaccctggaggatagggtgcatctgacctgtgccaggctcagggcttggccttatctgtcatgaggtcagagaatgcttggactttagagactgatgtgtcctgctgaactccacacactgagtcaggtaccatcaatgggtaatgggtttctaggtctgtggttcagttaatatctattttttttttttttttaaacagtctttctctgttgcccaggctggagttcagtggcctgatctcggctgactgcaacctccacctcctgggctcaagcaattctcctgcctcagcctccccagtagctgggattacaagcacatgccatcatacccgactaagtcttgtatttttagcagagatggggtttcgccatgttggctaggctggtcttgaactcctg

SEQ ID NO: 17115 - DNA, 1082 bp, Homo sapiens
tattcttcttaagggaaagactggtgtagagaacagccaagttttatgctggatcagaggaattagctataagcaggtacatggaaactagaagttaaaatcagtccaggtgtggtggtggctcatgggtaatcccagcactttgggaggccgagacaggaggattgcttgagttcaggagcttgagaccatcctggacaaggcagcaagaccacgtctctacataaaataactacctgggggaggccaaggtgggcggatcacctgagttcaggagtttgagaccagtctggccaacatgtcgaaaccctgtctctactaaaaatacaaaaattagccaggtgtggtggtgcatgcctgtaatcccagctaatcgggaggctgaggcaggagaattgctggaacccaggaggcagaggtttcagtgagccgagattgcgccactgcactccagcctgtgagacagagtgagactccatctcaaagaaaaaaaaaaaaaaaaaaaaaaacgagctgggcatggtggcatgggtcggtagtcccagctacttgggaggccgggagtttgaggatgcagtgagccataattgtgccactgcactccagcctgggtgacagagtgagaccctgcctcagaaaaataaaatacaatgtaaatactaggtgataggaatttttcagctccattataatcgtatgcacccactgatatgcgcagtccgtggttgactgaaatgtcattatcaccaacgctggatttgatgagtgctccggggtctccagaaacctgtggagtggtggtgaagagctctctgctcttccatgggggactgctgttgcctgggttgtcagatccctgttatctgcattctcaagggcaaacagaggtggcccttttctattcaatttacctaaatggctctgggccaagagatgcttccagaagttgtgttaaagagggggcaaaaatgaaattaatatttgatacatctgaattgaagagagagaccgaggaagtagttgatagtgggcactgagatgtaaagaacatctctgcaacccaaggaagcaggccacttggg

SEQ ID NO: 17116 - DNA, 1068 bp, Homo sapiens
gtggaatctggaataacggtgcagctgaggaactgaactgttaattttatttatttcaattcagtgtcatgcagtgagtggccaccagattagacagggtcaggccttctcccctttcttcctgggccttcccactttcctcttctgcctgggttggactgcctttacccaagcttgtcctgtgacctctctctgttgacagtggcttccaaagaggctggcatggggcactcatctcttctgctcagtctgtgtcctcccactccctgatctgaccccgtgccaccttctggctctgccagcctctacctggttcctgtagtgccgcacagagcctccctttcccggcacagcctccctttcccggcatagccagctttcttcagggtcctgccaggaagggccgcccccccaacatttccagattgcctctgtccctccactctggggtgcctggaaggactgtccaggacccagagagcaggcagagccctggattcctatcctggaatcctcccccaggatgaagaagctctgcctgcctgaaccctccagcgatgggcctggagtcctgtccctgtcctttccttaatccccagcctctggatcttccagtcaccccggctttgcccaccctcaccccatttagaagctgggctcgctaggaaactgctcccttagcatctgcagaacttcctcaagaagtgaaatccccaggtccactttgaaggagaggaagggatcactgaggtctggggtaggtgtcctctggaagcagggagtgtccacaaggcccttctctgagtgctggtggagggcactcgacagagagagcgccgatggcagggtggcagagtaggctgctgtgtaggcaggtgggggctccaggatgttggggcagcttgagctctctcggtagaggcgtgggggcttgggtggggccagcagggtggcccggggctgctcgtccccccacagtggcaggcgccggccatctggcctcccttgtagctcccggatgacttctcggttgctgtactcctcgtggtccccacctgctgtgctggc

SEQ ID NO: 17117 - DNA, 1074 bp, Homo sapiens
atctcaaaaaacaaacaaacaaaaacatgttgtgataccacttcacacccattaagatagctattatgaagacaaaaacaacaacaacaacaaaaaaaaaaccctggtgtgatggctcatggagaggctaatgtgggaggattgcttgagcccaggagttccaggctacagtgcgctatgattgtgccactgcactccagcctggatgacaaagcgagaccttgtctctaaaaataaaaagtaaaaagagagagagagaaataaatgttggtcaggatgcagagaaattggagccctgtgcattgttggtggtgcagataatgttaagatggtatggtgagtcctcaaaaaattaaacatggaattaccatatgacccaacaattaccatatgattcatatggtaattaaatatagaagtaatatgatccagcaacagaaacaaacacaaaacaacaaaggagaatatacaacaaagactatatgtagctccctaaaatttttactctcaaccgggggcctttacagaaaaatctgctcatccctcttcaagttagggacaagttcaactctgcctttctgtacacagaactagcctttctgcaaatgttcttccctcatatcacaacaaacctagcaggccaaaagtgagctaaacaccacctttcatggggatttaacaatcagccattctccttgttccccatccagccctagaggatacaggcagggcatggtgtggtttttttttttgtgggaaagccttaagttgaggacctgggtttcgggtggaagtgctcctagggagaggatcagtctgctagagcctgaagcagcgagcaccaaattcttttttttttttttttttttttgagatggagtctcgctctgtcgctcaggctggagtgcagtggcacgatctcggctcactgcaagctctgcctcccgggttcacaccattctcctgcctcagtctcccgagtagctgggactacaggcgcccgccaccacaccaccatggctaattttttttgtatttttagtagacacggggtttcaccgtgttagccaggat

SEQ ID NO: 17118 - DNA, 1030 bp, Homo sapiens
ctacggaggctgaggcaggagaatcacttgaaaacgggagacgaaggttgcagtgagctgagatcatgccactgcactccagcctggacgacaaagcaagactccatctcaaaaaaaaaaaaaaaaaaaaagaaaagggaagaggggcaagagaggcatttggtgggggtgcgcaagttggttaactacactttttttttgagacagagtcttactctgtcgcccaggctaaagtgcagtggcacaatcttggctcactgcaacctctgcgtcccgggttcaagtgattctcctgcctcagcctcctgagtagctgggactacaggcgtgcaccaccactccaagctaatttttgtatttttagtagaggtggggtttcgccatgtgggccaggctggtctcgaactcctggtctcaagtgatcctctcgcctcggcctttcaaagtgctgggattacaggcgtgagccaccacacccagcccaactatactttttaataggatgaaaaactcttgtgaatactggcaggctgtataattaacagaaagctatttctctgccacaaagaatgttttaaaatgtccagaacaactaacactaagcttaacattattttatttaattaattaatttttttggagatggagtcttgctctattgcccaggctcgagtgcagtggcacgatattggctcactgcaacctctgcctcctgggttcaaagtagtctcctgcctcagcctcccaagtaggactgcagacatgtgccaacacgcccggctaatttttgtgtttttagtagagatggggtttcaccatgttagccaggctgatctcgaactcctgacctcaggtagtttcccacctcagcttcccagagtgctggaattataggcttgagccatcgtgcccggccttaagcttaacattaaaaaaaaaaaaagtcctattaagtggttctctttctctctctttttgttcttttttcaagtgagaaatcaatctatttttagtttttgttttgttttgt

SEQ ID NO: 17119 - DNA, 1058 bp, Homo sapiens
tttatttaaaagtgtatttctaggtgggatgatcacttgagccctggagttcaaggctacagtgagctatgatcacaccactgtactccagcctaggcaacagggcgagaccctatctcttttaaaaaataaaaagtgtaattcataattttcaaacagtggaggattgtctagatgtcttgtttgttattaattgataccttaaattcacattggtaaaagaaactttttatgactttaatactttgaaatttgttgaaccctcatttttatgtctcagcatattgtcagtgtttatatgtcctttgtgtattggaaaattataggtattctgcccttattcattgcagtgttgcatatatgttgatttaggtcaaagtttgttaagttgttcagctctttcatgtctttactgattcgtctgcctattctgtcactgactgagagtggtatattaaaacataccatgattatggatttgtccatttctcttctgtccatttttgctttatatattttgaggctgtaagatttatactcttcctggtgaactgaaccttttattattatgaaattttccttttaaagactttttgactaaaagtctgtattttctgatatatattgtttttctttaatttttttctgaatacagaatgtgagggcgtctttgcttaatttttacatggctttttttcttccttttatttgtaatcattttacatcatttatggtgcatttctctttttgagacggagtctatctgtcgccaggctggagtgcagtggcgcaatctcagctcactgcaacctccgtctccagggttcaagcaattctgtctcagccttcctagtagctgggattacaggcgcatgccaccacgcccggctaatttttgtatttttagtacagacggggtttcaccatgttagccaggctggtctctaactcctgacctcaagtgatccgcctgcctcagcttcccaaagtgctgggattataggtgtgagccaccgtgcccgaccttaaggtgtatttcttgcctcttgttgggaata

SEQ ID NO: 17120 - DNA, 1884 bp, Homo sapiens
accttccccaatttctaatataattgttacattaaataatattagtaatatgttttatagaaatgatgtcatatgatactacgttatattatcagattatgagaaattttgttccaattatttttcttagcacagggtagatatattgttatcttgagtcttattttcatgtaatatttttcctcttttttttttttctaattttttttttttttactttccagacaaggtcatttgatgaagatgcaaaagaaagtcgagcagctgccctacgggcagcaaacaagtctggcactgggtttggggagagttatagcctggctaacccatctatccgggctggtgaggatattccacagcccacaatttttaatggcaaattgaaaggttatcaactgaaaggcatgaattggttggccaatctatatgaacaggtgaattttagaaccgtgtcattctcttctattatctcttttcctaaagtcatttgttcaatgtgattgtgaaatgagtacaagatctggctgagcgcggtggctcatgcctgcaattccagcactttgggaggccaaggcaggcggatcacctgaggttgggagttcgagaccagcctgaccaacatggtgaaaccccatctctactaaaaaaaaaaaatacaaaattagcctggcatggtggtgcatgcctgtgatcccagctacttgggaggctgaggcaggagaatcatttgaatctgggaggcggagattgcggtgagctaagatggcgccattgcactgtagcctgggcaacaagagcaaaactctatctcaaaaaaaaaaaaaaaaaaaaaaaggaaatgagtacaagatcatgttttagatttcacccttttaaaaagctgtatcctggggagggatagcagtaggagaaatacctaatgtaaatgacgagttaatgggtgcagcacaccaacatggcacatgtatacatatgtaacaaacctgcacgttgtgcacatgtaccctagaacttaaagtataattaaaaataaattaatgtagatttattaaaaaataaaaagctatatcctttgacaagaggcagaaggatgtctctgtttctctttctttttgagacaggatcttactctgtcacccaggctgaagtggagtggtgcgtttatggctcactgtagccttaaactcctgggctcaagtgaccctcctgcctcagcccccagaatagctgggactgcagacacatgccaccacgcctgactaatttttgtattttttgtagaaacgggctgtctccatgttgcccagactggtctcaaactcctgggctcatgcgatatgcctgcctcggcctcccaaagtgccgggacgggcatgagccactgcacccagctgatgtctttttgtttttttgtaacctggagatcctactggagaatatttgtgtatttcttatggtttgtcttatatggacttggtaaatctaattgcttttgtgtctgggttgtattagctaacagattggccttgccctgtctcatgtatcatggttcatagttgtagctgtagcattggcaaaagcaattactatagcagtgggtaaaagtgctgaggctgagtatctctggtcacttctctttaaacaagcctgttatcttggtcgttctttttggtaacaggttgaactttatttgatgaaatgcatgaggtgttgaccatgtattttttttccccagggtattaatggcattcttgctgatgaaatgggccttggtaaaacagtacagagcattgcccttctggcccatctggctgaggtgggtagatgcaatctttctatcttcatttctctagaatttagggtaatttctgttgaaaatcagcc

SEQ ID NO: 17121 - DNA, 1028 bp, Homo sapiens
tccatgtcaaatagacatcatggggagtcaggtttctgtactgacttttgtttttccccttagctagagtggaaaacacaaatagctgggttgtgggctgctgggtcattttgtgttaggtcttccttggagtttagttttagagaagattaggcttatgtggtggcagaaactgagtaatagtgacatcaggtttgcctaggctggaggtggggctagaatcacacttaggagactagtttatctttctcctaatgattcctgtatctggatgccctgctctctcagccttgcagattggccctggtaagcaacatgtttttaatcaggatagtgctaaggtttaggtattgtaacatttttctagtccacttcaagccttacatgtaacttaacatcttcccaaaagtatacagaagactatttaaggcatccacaatgctgacttattcttcttgaatgcttctttaatcgttttatgtatggcgttgagacaatacatctggatgacttatagaagtaatatatcttgcttggcttgacattttctaaccctctaggaattgagtaaaagactgttcattctacatagtcttagttcaaaaatgaatcctaaatgaaatattgttttttaaatattttaggcaaataagcagaaagcttcagctcgtaacctgtttctcaccaatagccgaaaggtaaaattgtagttttgtattttccatttcatgttttgctggaatatattcttcttctttggggtccatcttgctgctcttgtccgtcgtaacctgttgatcatgaatctaatagttcgtaagagagtttctgaatgttctcaagctgtttattttttatttttattttttgagacagagtctcagccacccaggctggagtgcagtggcagtgatcttggctcactgcaaccaccgtctcccaggttcaagcgattctcccatctcagcctcccgagtagctgggattataggcacctgccatcatgccctataatttttgtattttag

SEQ ID NO: 17122 - DNA, 1097 bp, Homo sapiens
aggcatgagccatggcgcccagctgagccaccatgcctggcctgcttgttttttaaattcagataaaacatacatataggaaagttatcagactttaagtgtacagctcagtgcatgctaatttaattttgatttttaacagaggacattgtaatagttccccatgttaatctttcagtcttatttcagtcctcagacaatttatttggctataatccaggaaagagatttaatagtgggctacctaattttaatttatatttatgcattagtaatatgtgaaacaaaattaatatgagatttggggagtaagtgaaatatttggaagcatttacttaccacttcctggatggaaagagttacgttattcatatgttagaattctggcaatgtaggcactatttataataatagcagactgtcttagtgggagatgaagagaggaaagacttgaaagattcaagaattgggatgactggtgactatttgaagcagacatatgactaatagaaaagcaagcatgaagggccagttgaagtggctcacacttgttaatcccagcactttgggaggctgaggtgggctgacactgagatgggctgaccacgaggtcaggagatcaagaccatcctggccaacgtggtgaaacctcgtgtctactaaaaatacaaaaatcagctgggtgtggtggcgtgtgcttgtaatcccagctacttgggaggctgagacacgagaatcgcttgaaccaaggggcggaggttgcagtgagcccagatcatgccgctgcactccagcctggcgacagagcaagactctgtctcaaaaaaaaaaaaaaaaaaaaaagaaaagcaagcatgaggaaccttagtaaatctgaggaactgttggtaatagaagtatggcttatttcttggtggtgaatttccaaggggagacatttctgcaaggaattaatttcatgtcttagtatatgtcaggtttaagtaagtatgtagaaattcagaagcatgaagagttttgctttcttaaattattttcagtgacttgttacgtgtataggagttgaactcattttgtttgaagttaagtaagtgatt

SEQ ID NO: 17123 - DNA, 1048 bp, Homo sapiens
aaaatacaaaaattagccaggtgaggtgacgggcgcctgtaatcccagctacttgggaggctgaggcatgagaattgcttgaaactgggagctggaggttgcagtgagccgagatcaggccacctgcactccaccttgggtgacagagcaagacgccgtctggatgggggaggaagcacaccttgaacatatataaactttgtcccccaatctatatcttaatattaggcaataacactagcaaatcataagcttatattctcttcagaatgcccaatttcatatctcagacatgactattcaatttatacactcttacacacaggtatatatgtgtatgtatcattaacggcaggatgtaactaacccatttgaggatggctgtctgggcacagtggctcacacctatgatcccagcactttgggaggctgaggcggggaaagactgcttgagctcacgagttcgagactagcctggcaatatactgacattctgtctctacaaaaactgaaaaaattagcaagtgcggtggcatgtgcctgtagtcccgactacccaggaggctgaagtgggagaatcgcttgagcccaggaggtgaagttgtagtgagctgaaactgtgccactacactccagcctgggcgacagtgagaccctgtctcaaacaacaacaaaactcagaatggctgaataaatagcagcttagtgtaaaagccaaaatttatgaccttcagttcctcctaagatctgcaccctgatctcttctgaccatagcttgatcatgggctctaaccacaatggactctgctctttctgaaacgttaggcatgctccttacagcctttgtagtggctgttcccacactgggaagactcttcccccaggtatctgcgtaactagtccccttgcaggtctctaaatatcatttcttcaatgaggcctaccttgggcccctatataaacctgtatcttcccctcatcctacacacagatactctcccaacactgccctttatcctgctctacttttccctttatccacagcacg

SEQ ID NO: 17124 - DNA, 1107 bp, Homo sapiens
atggaagtaagaaaaatcctttattaaaacatgaaaataatctgaatatattcaagctattggtcttagtctctattgcttcattattaacaaatgcatatataaaataactagtaaccacaacactggacattttgagtcatgcattagaatgttcgtactctaaaaccagagttaaggtcctgtcactattgcttgcactttcaatcagacccagtttgagtttaataagcatgcaaaataaattccttgattcagaggaattacgggacataacaaggatccatgcaagtttcaactcaaaagttgggttaataattgcttagaaatgcaggtagaagctccacatctatcacaatgctgcttcagaaaagggataggagtcatacacaaaaatgttaaaattaggaccactagtcagttttaaaaggcttatatgcaaatcctggtccatctgagtagagaatgatgtacaaactctgggaaaagaaagagaattgagggatgtagagtcttaaggagctgttaattttcttcgtgatttactgacaactataacaggagagcataggtggtttagggggatggttaagatgctcttaggcagaatggtttcttttctgattcatgctaatgagcattacctgcatagctccctggggaaaaaaatgataacgagcagggctaatacaatgtaaactcaagctatcaataccctgaaatttagcacagccctctgctttttaaaactgttcaccaagggatccttccaaataggatataattaatagccaagcaatgttcattaataaactaaagcaatctgcttgaaccaacagcaccatgagaatgtaaactcctggaggccaagagtcttcatctttttgcatatcacagatacaagaagagtaaacatgagaccacagtaactttgaaaagtaattaactgtatactttcaagactatgaaaaactcgtagtatattttagcatttagatgtattaacatggctgttaagggtaatctttaattgttccaagtaactgaactgctgacatcattgtactatgtagcgctgtccccagatagtgcagatgtctgaatatt

SEQ ID NO: 17125 - DNA, 1047 bp, Homo sapiens
tttttctttgagacggagtcttgctctttcgcccaggctggagctggagtgcagtggcaccatctcggctcactgcaagctccgcctcccaggttcacgccattgtcctgcctcagcctcccgagtagctgggactacaggcgcccgccaccatgtctggctaatttttttgtatttttagtagagacggggttttaccgtgttagccagcatggtcttgatctcctgccttggccacctaaagtgctgggattacaggtgtgagccactgcgccaccaatttctagattcttaagcaatttctatttagaattaactttaaagtgggaaaaaaaactgtaaatgtgtgctgttagtaatcccacatcttttttagaaatcagtacaaaagtaaatgttctagagaagcaataattgcatttttgttagggcagtaagcttttagtaacatatttttaacataaatttgaaaagcattatgggattttggttaatttcttaatctttaaaatgagttggataaaaggtcaggacattctttttgattaagtagaaactttggccttttcctcttggattcgggatggctgctgcaattacagtcattacatctattgatgatagcatcctaaacatgaaggaaaaggatatggagagtatgggaacacaagaaaattcccccttttcatcagcataaattttttttttttttttgagacagagtcttgctctgtcacccaagttggaacacagtggtgtgatctcagctcattgcaacctccgcctcccaggttcaagtgattctcctgccttgcctcccaagcagatgggaccacaggtgcgctccaccacagcctgctaatttttgtatttttattagaaatggggttttaccatgtttgccaggctggtctcaaactcctgacctcaggtgatccccccgcctcggcctcccaaagtgctgggattacacgcataagccactgcgccccgccagcataaattttcttaatcttttttttattctttttttttttttttttgaga

SEQ ID NO: 17126 - DNA, 1381 bp, Homo sapiens
cagggctgggggctgaggagccagccgccggcccgcagctgccgtcttggctgcagcctgagaggtgcgctgtgttccagtgcgcacagtgtcacgcagtgctcgccgactcggtgcacctcgcctgggacctgtcgcggtccctcggggccgtggtcttctccagtgagtgcagtgaagcgttcgggaaaggcagaggctagcccgagagggtgttcccgctttctccaccgggtggcggagaaccacctggggaagaaaacgggatgaaaagttggaagcaaataactccttggcctggggatggggcagggaatcggggagtctcctgatatttacggccaggatgagtctgtctagaggagagattttccatttcaaggcccgcagagtatgggttctgacccgtgtttgtcttcctaggagttacaaataacgtcgttttggaagcgcccttcctagttggcattgaaggttcactcaaaggcaggtacgtattgataattacattggtctctagtccctgactttatgagactgaggatcgtggaactgacatgtacgaggagaaaacagtttgggatgctgcttttacctgtttgactcttatatgaacttgatgtattaatgaaatgaaaaagttgtatttgtgtattggttttaggatcttcctgagggccacttctcccaggtggcttgtacaagtgaagtgaggctaagaaagatgtatctagtagtggacaaaagaaaaaaataaccttttggtttacagtgagaataacatactataaactacaatccttttagatattagaactttttgatacagggtcttgctctcgcccaggctggagtgcactggtgcgctcatagctcactacagcccctaccttcctggctcaagctatcctcccaacctcaccctccggagtagctgggactacaggcacacagcaccactcccggctaatttttaaattttttgtagaggccttagtatgttgcccacgcttgatattagaacttttaagtttgcgattatggttagtttgtaataagctatgccagggctaattcttcagtaaccccagaaactggagaaaaacacaactagaatgttatgtacttgaatactgcctggtaaactttgcgacctgcctgtactatgatttacaagtgacaataaagtagtcagtgaatttggtattgcaaggctcctcaattttgagttttggctttaacattgagacaattcatttcattctgaccagtttgattcaacgttacggttaaaatataggaattcttagttgctttgtccagtaaccaggaagatttctgcagcttggacaaacttcaaaaacggagttagacccacagc

SEQ ID NO: 17127 - DNA, 1061 bp, Homo sapiens
aaaaaaaaagcattggtatctgtgaaatcacatttaaattccctgttgggggcagccttgaaggacaacatcctttccattctttagggctgagccttccaagagtgccccactcttcctcctcatcctcctttatcaaactgcagatccctgggtcagggccatgacctgtgtctcatgtctccacttgctttcatacagtgaaaatcagtccctgttcttccctagggagctctacccagtgctgatgcgggccttgcaggtggtgccgcgggagctcagcacccacccacctcaacccctgtccatgcagcggatagcctcactgctcactctcctcacccagctaaccctggcagccggcagtacccctgctgaaaccatcaggtagtttatagccaggacccacaggacaggtggagggctcctccacagggctggggtggctggagtgtaaaggggcgtgaggcagccagatcctcactgtggcaccctttggcacttttgtagtgattctgctgaggccagcctctcggccaccccttccttagtcacttggacacaggtgtctgggctccagcctcttgttgagccgtgtctaaggcagaccttgaagttgctgtccagacctgagatgtggagagccgtgggcccagtgcccgttgcctgcctgttgttcctgggagcctactaccaggcctggagccagcaagtgagtgcctcctgccggctgtccaccaggcccccgcaccctgccttcagctacattccacccgttgctccctctctgtgtccatctctccactcctacttccccatttactatcttcccttttaattcctacccttcctcctctttctacctccatatccccgtggagcttcccaggagccatgttggtggggaccagagagcccacgcagcagctcagccttcctgtagcctgtgtgctccctctttatgccccctacacatcggggccttctctcccttcagaaggctcagcctgcagaagcctccaaatgtgctcttttgggctgttgggatggtggcattggcc

SEQ ID NO: 17128 - DNA, 1038 bp, Homo sapiens
aggaagtgatcggcccactcatgggctcttgctgcaatattaacagaaagcagaactactcagcttcctccttttcctcaaagaaaatgccccagagatggcagaagggagcccagctgtgttcaagaggggattaaaaccacaggctgaggagctctcccagggcctgccacaggcgaggttcaggaaatctctggccggacacatggatgaaagaacttgcatttctgctcaaagaactgtatttggtggcttttaagaaattgtgaagaatatgaaaagtattggaacactggaagcaggcagatgttctcattttcaaaaaagcagggaaatggattctgaataggaacaaaggcctgcttcattcccttgataagtttctagactcagtaattaaggaaaagggaagtgaaggcattcactaataggcagcctggttcatctatttttaaaaaaataaaatctcacacagaaaaactatgggtcctatttagtggttctcacactcatccagatactggggctcctgaaaatcaatcttctgttccaaatattataccctttacagatctctctaaaatattgagatatttaatttttacagaaaattagactatattttcaatatacaatataagatcacacctacagatgctagtgttcatttattcaaatgatcttgatttcagggttggggccagccatcacagaagagagtcaacaggccacagctctgagtgacaagggctgtaacactagaaacacagggtggctgggggcataggagggaccccctcattcaggcttgcgggttggaaaaggctgcctccctgagaatgcagcctaaaagctgagccctgaggaatgagcagagaattagctgcccaaagagggccagggagtgagggtggggaggtgtcacccatgaggcctcggtttctggggtaactggggagtacagctgttcactgagatggggatccaagaagaggaaggatggggcataatgataagtttagatttagacctgtcatg

SEQ ID NO: 17129 - DNA, 1025 bp, Homo sapiens
caagaacatactgaacaatatttgttgagtgagtgaactcttacatattctgctccgttattaggaaatgaaagatgattctgacagtgaaaagcagcaacaaattcatcacatcaagaacttgtatgccttcaacctcttctgccagaagcgttttgatgagtccatgcaggtctttgctaaacttggcacaggtaacaagtggtgaggcctttatataagggactaatggaggaggggagcctgaaaagtatggggagaaatgataacagacttctgagaatggagaaggtttaggctcagctaaattgatcctcatacctagcaagatcctgtggggtgaccacagtggttacatatctatactcctaatcctatgaatctggtcttctcaataaatgtggactcccaattttccagtatgatatgcccttgccattagagaaaggtagcagaaagtcattcagttcaacaaatgggtatttgatcagctagtgtttattgaatgctgttctgaaccaaagtccttggattaaactgcagatcatttatgagagccaacacagggcagtgccatgaagctcttccttttcttaatgtcctgaaacctctagacatgagtgtagtggcgaggagcaggtaccctggggtctgcctgaggtctggtagagttactggacctctctgtgtttctgctttctcctctgcaaaaaagagatgatcatactactgcttgctttagagtgctgctataaggattatatgaagtgctttgaacagtgtgtggcacttaacaagtgctctgtaagtgtttgatgttattagtattgaatttcattactgtatattcaaaactgtatatcccagttttgcttaatttggatcaatctatctatatatacttggattgactctatatcatactagcatctcctcttttctcctcttcattgctttgccttttttccaccattcctcaaccttggccagtaatgaactgtggtaattccctgtatcagtcaaga

SEQ ID NO: 17130 - DNA, 1094 bp, Homo sapiens
attttaagactcgacagcaagtatcaaatagaaatgccttcactgagaagtccatccagccaccttctctgtgtaccattaagccatgtcttagttcatttgtgcagctataacagaataccacagactaggtaatttataaaaaccagaaatttgtttcctcacagttttggagacttggaagtcccagatcagggtgccggcatctggtgtctggtaagggccttcttgatgctccttcacatggtggaaggagaagggtaagagaaagatgagctctgcattctcacatggcagaagagagagaacccactccacaagccctttttatagtgcattaatctattgatgaggctggagcctcaccacctaaacacctcccattaggccccacctcccaacacttttgcactgaggattaagtgtccaatgcataagttggggagggaataaaaatagccaaaccatagcagccatcaggtggagcatcacaccttttctctgtgaaaatctctagcagaaacaacattggctagaaatgtggaactcttcccttagagtaattttagggaaaacagaatttgccttccccctacctttcttttttatttcttttttttttattttttattttatttatttatttatttatttatttatttatttatttatttatttattgagatggagtcttgctctgtcgcccaggctggagtgcagtggtgcatctcggctcactgcaagctccgtcttccaggttcacgccattctcctgcctcagcctcccgagtagctgggactacaggcgcctgccaccacgcccggctaatttttttgtattttttttttttagtagagacagggtttcaccatgttagccaggatggtctcgatctcctgacctcgtgatccacctgcctcagcctcccaaagtgctaggattacaggcgtgagccactgcacccggcctttccccctcccgccacttttctaagagaatgaaagaagaggttctgttacctggttctcccactgatgcattgttatgggcagctgcaactggcctttgtctggcctggctttgtgactgatga

SEQ ID NO: 17131 - DNA, 1027 bp, Homo sapiens
cggggtttcaccatgttggccaggctagtctcaaactcctgacctccagtgattcgcccacttcggcctccgtgcccggcccctagacatttgactttttaaaatgttttgtcatgtcttagtttgggttcacaagaaaaaaaaaaagtaaattaaaaaatctattggcaagaaacatttcaataaaaatggaaaatagactcttgaatgtcatgtttaggaatttgacttcatattttggtagtgtagcttcacaggattttttaagccccagtgtgacagcatcagagatctgctctaagataactgacagcaaatgcgagagaatgcatggagtgaatgagaccagttgaaggtgtcacaggggtccccagagagactctataggaggaggctgtcatgaggtaccattacaggtagaattgatagaccctggccgacttgggaggaagctgaggctattaaaaaagataaagaaaagcaggaactggcagggatttgggggacagagtggagagagaaggatggggaagatgatgaacattatgttggccttttgttttggttgtagatttttatgtatgttatgagtggatttttaaaaaatttccacttcattttatttatatctgaaatatcagtgggtggcctaaaaatcaactttaatattgctaaattgcttgatatcatgatatctataaagttctaaatatagtatcttttacaaaacaaatattgcaaaatgaattcttttattttttcatgttctgctgcagcataaatctccagccttcattagagctgctgttatttctgatttcaacattttttttgtgtgtgacctgcctttcctttaagaccccaaatcaaagaaaatagaatcactctgtttttctggatgactaagaacatcatcctggagaaatactattgatcctttggataaggaatgtaggtgctgacctgtttttataaatataactactgccattcagacaacctttggctgacacccattttttttgac

SEQ ID NO: 17132 - DNA, 1043 bp, Homo sapiens
tgcagaggttgttttgagaaaaaagggcccttctgagttaaggagccatagttctatcaatgatcaaaagaaaaaaaaaaaaagagaaactgttacagtatgattcagatcatttaaaaaagcaaaatcaagtgcaattttgtttacaaatggtgtatattaaagatttttctatttcagatgtactttaaagagaaatattagcttaactcttttgacatctgctattgtgacacatcccattgctggcaatgtggtgcacactccgaaacttttaactactgttttgtaagcctccaagggtggcattgcagggtccttaggcaatgttttgtttgcctttatgcagagaggtgctccaagtgctgtgattgagcaccgtgctagaggaactgtaatgcttcagaagttgtagcttatacaaaggaaacaggtcctgctggcttaatttaaacagttattgcatgaagtagcgtggaggccctggactgctgctcgttctttaggatggactgttctggtatctggtattggtttagagactgttaataagggacatcacaaggtgatgggattcatttgaagcactctatttctgttttaatggttttatccaattttgccttcccaagatttttgttctacataaaaagttcatgccactttttaatataaaaaaatttaacaaaattaatgtatttttctcatttttttcaaactttttctaaagactctttctgtcaaactcatgaaaaatttctttctatggcttttattctagattgtcttattttctgttaaaaccaatgaccacatgaccacaatcttcactaactcatactgcagtgaaagtgttaacccttaggtagtttctctacaactctttgctatggtgatttttaaaaaagtttcctaggaagtatctctgaggaacagcaatctgaagaactgactatattctcatgctaagtcattagccaaaagctggtggtattgttgcatgctgctattgcatattaaaacgtagcagatgaataatagtt

SEQ ID NO: 17133 - DNA, 1050 bp, Homo sapiens
cagcactttgggaggcctaggcaggaggatcagttgaggtcaggagcttgagaccagcctgggcaacgtggtgaaaccccatctctacaaaacatacaaaaattagccggagatggtggcatacacctgtagtctcagctacttgggaggtgaagtgggaggatcacttgagccctggaggcagaggttgcagtgagctgagattacgccactccagcctgggcaaaagagtgagaccccatctcaaaaaaaaaaaaaaaagaaaagaaaaagaattgtggcctgagttcatggaaactagttctggatatgttctgaatattaggtcattttagagtttttgtttgtttgtttttgttttgttttttttcaggaagccttttggaagcattttgtctgattctgattcattgtgttgaattggctgctaaaaatgttttgttcatttcccactgacatgatctttgacacagcatgtacagtatcaaattccttagctgttctatgtgttgaaataattgagaactctaccattcagatttgaacctatctacataacactttgctttctgtggtatattctgctgttcccacatctccctcttgaggtcttcctctgctaattatttgcctttaaggcttcccttgtacttcagctctccatgagctgctataagcagagaaggctgattaattgaaacctgattgtgcccttcatgggaatgcaagtttgctatagtaatttggtggcactgagttcagccatctgttcatattttcctctgtgaaaacactgtgcaagattttccaggtatacataaggcttttttgtggtaagaaaacataacaatgagatctactctcttaactcctttagtgtacgttacagtattattacgtataagcacaatgttgtacagcagatctctagaacattttcatctcatttaaatgaaattttatacctgttgaatagcaactcttgctttccccctccctcagcgcctggcatccatcattctatttctgcctttgagttctattttagat

SEQ ID NO: 17134 - DNA, 1060 bp, Homo sapiens
actctgtatgttcagcaggttttaacccttatggagtgagtgttttcttgcctcattcaaaagctggcttggaattgtttgaagatttccacccttcagaataaataattgattcatttacaggcagagtcaaccagcagataacaaacaagcttctatttgagcaatctttttctcctgctctttaaaattaaatttatatattaggggcttggcctgatggctaaaggattcaagtttttggactttatcttattgaatttgttttggtttttatatatttggtcctattagcagttttcattattactgacctgatagattgtgactgttgaaaaactgtgaatgtaaacaaaattgttttgtgaatttgagtgggttgctgtataagagttttcagttaaagtgtccttggactaaatagccaaagcttttctagattagtatctttctaagtgttttgtgaacctctgcaagcgttgagagaagagggaggtgggaatggattgtacagtaagataacccaatgactaggtaacagctacggctctgtaagggcagagcaagtgccaaatcccttatttttgtatctgcttctcattctgaaaattgagccgggtgcagtggctcatgcctgtaaccccagcactttgggaggctgagatgggcagattgctttaagctcaggagtttgagaccagcctgggcaacatggcgaagccctatctctacaaaaaatacaaaaattcatcaggcattgtggcttgcacctgtagtcccagctgctcgggagcctgaggcaggagaattgcttgagccctggaagcggaggttgcagtgagccgagatcgcaccgctgcactccagcctgagtgacagagtgagaccctgtctcaaaaagaaaagaacattgaacgtgagagcagataccatttttagtagtcaccaattcccctcctgtttttctctggcaacttctacttgagaataatgttctgaaaatggagagtcattgcttttggaagcaaaccatatgagcttctcaaccaattgtaaggtc

SEQ ID NO: 17135 - DNA, 1045 bp, Homo sapiens
cctgggcgacagagtgaaactgtctcaacaacaaaaaattaacaaaatgatgaagctcccttctcttcattttgtgtgtgtatgtgtgtatgtgtgcacatacatgtatgtgtgcatacgtctgtgtctcagaatatccttaatatattttcaattttctttgttcatgattattctcttcttcctttccctttaatagttttcccgttttgttgtgtttccttgcctctagatgtatcctaatcatcatgccatttttcttcttcagtgttgtcttcatctatataattttagatcgtgagctgaaatagctccttctttaaaaaaaaaaaaaaaaaaagagagtctcactctgtctcccaggctggagtgcagtggcatgataatggataatggctcactgcagccttaaactccaggctgaagctaccctccacctcagcctcccaagcagctaggacaacaggcgtgtgccactatgcctggctaatttttattttattttattattttttatcttgaaacgtagtctcactctgtcacccagactggagtggaatggcacgatcttggctcaatgcaacctccagctcctgggttcaagcgattctcctgcctcagcctcctgagtagctgggactacaggtgcgcaccaccatgcctggctaatttttgtatttttagtagagacggggtttcaccatgttttggccaggctggtcttgaactcctgacctcaagtaatctgcccatctctgcctcccaaattgctggtattacaggcatgagccaccatgcctggcctaatttttattttttgtagggacagagtcttgctatgttgcctagactggccttgaactcatgacctcaagcagtcctcctgcctcggcttcccaaagcactattgcaggtgtgaattaccacgcctgaccagaaaaagctcttttactataggagagcaggctgagtgctctctatatataccatatatgtgtctgtgtgtataatagagagcaccttttatatggtatacatatgtgat

SEQ ID NO: 17136 - DNA, 1081 bp, Homo sapiens
ggttaacaaggatatccaggacttgaactcagttctgcaccgagcagacctaacagacatctacagaactttccaccccaaatcagcagattgtacattcttctcagcaccacatcacacttattccaaaattgaccacatagttggaagtaaagtactcatcaacaaatgtaaaagaagtcacaaccgtctctcagacgacattgcaatcaaattagaactcaagattaagaaactcactcaaaaccacacaaatacatggaaactgaacaaactgcttctgaatgactgctggataaataacgaaatgaaagcagaaataaagatgttctttgaaaccaatgagaacaaagacacaacataccagaatctctgggacacatttaaagcagtgtgtagagggaaatttatagcactgaatgcccacaagagaaagcaggaaagatctaaaatcgacaccctaacatcacaattaaaagagctagagaagcaagagcaaacaaattcaaaagctactagaagacaagaaataactaagatgagagcagaactgatggacatagagacacaaaaaacccttcaagagaatcaatgaatccaggaactggttttttgaaaagatcaaccaaatagacctctagcaagactaataaagaagaaaagagagaagaatcaaatagatgcaataaaaaatgataaaggggatatcactactgatcccacagaaatacaaactaccatcagagaatactataaacatctccacacaaataaactagaaaatctagaagaaatggataaattcctgtacacatagaccctcccaagactaaactaggaagaagttgaatctctgaatagatcaataacaggttctgaaattgaggcaataattaatagcctaccaactaaaataagtccaggaccagttggattcacagctgaattctaccagaggtacaaagaggagctggtaccattccttctgaaactattccaaccaatagaaaaagagggaatcctccctaactcattttatgaggccagcatcatcctgataccaaagcctggcggagacaca

SEQ ID NO: 17137 - DNA, 1069 bp, Homo sapiens
tcttggtccctgggtaattctgcttacgagatggttcgacttcgcttcaactttggaatggctattctaagctttactgtgtgactagaaagcatagagatttaagaaatgtgttttaacatgggaatggttaaaattgaagaaatagtacttaaaatttaatgtggtaaggctagtctttcatttggataattaactacatgggttgaccctttctgccccttacccattttaaaccttatttcagtaacaggtatagtcctgtgagcagacaaaaaccagatgcagggaggaaatgctgaaaagcattagccccattaaacctacgttggcctttttgtttcattctgctctgctcactgactgtaatgtccaaatcttatttgggcttttattatggtaaacgttataccttttgttcagtggtgaagattttcaggtgttcagttaggtttttacttgttactaaaatggttaatagttaagtctttttagatttgaaaataaaactctggttatttgcacacagaatagttcattagaaaaaatgattggttattctgagcagtgattggtgagtaaagggaatgaactgattaaggggtacgtcccataaagatttaagttaagttggaatttctagcagtcttagatagttatatgatgctttggtaattgaagccatctgaggctaattatctttcctttatgtttgcaggggaaaaattattttagttttggaaagatcctcttcagaaataccactatcttcctgaagtgtgagtttttgaatttcatgaagttttaatttgaattttaaaaatttataggtaatgttttaaattacctattttataagttctgaaatctaatagtctggcattatctaggtataaatatttttagtattactaaggtccttttactgaatcatcttcaaagtactcgtgtgaactttattttcttctcttgtttttctggtgtttacattgcatatatacactatgtagacattatatattagtatatataatgtatatattaatatatatgctgtatatactacatt

SEQ ID NO: 17138 - DNA, 1052 bp, Homo sapiens
ttacgaaggccatacctgccacatttataaaataatggttttatccctgcccccaaatcatcaggttcctcgggtttaagagaagtggtctaatagacaggaatagaagttgtggtggaggtgatttgggatagactaggtttccttatgcaagtggatatgagctcctcatagaaaccagacctactgtattagacagtaacctctaacctcacctccaagcccaagtatatggccctgctgggttacctggtgactacatttcccagattcactctaaattcaaggtagtgacccaaataaattgggaaaggagggggtcaaggaggaaaagctgttgaaaatctttctcctatttaagagaaatatatgccctagagctgctccagcacccttggtttctgatttttttaatattgaatatggattagaagaatgaaatcagatgacacctgactgcaaaaatgtttataagcaaatagccttcttacattttggtataaagctgtgaacttcgtaactttgtaaagcaagatataaagcaaatacaagaggaaaataaagtacttttactaattgacggtttactttcgttaccttgtctgcatattcacggccagccctttccacgttggcttagcgaggaagaaggaaactgggtggaaaacacaggatgcctatagatatgccgcaggccatggtccagagaagtttagcaaacaaacagctgcgttcagggttttgtccacggtcatgcgacaggtcagttagtgagcagaggagctaggatagctcaatctccactccattattcaggtaaccggcccctcccgttgtacatgacccatttattcttgatgtcttttacagcaacaactattcctctgccttccttttatgtcttggaaagtatctgagccattcttatgctcaagaaatagcaataggcatgattacaaaattcaagattttgtttttgtgtgtgtttttcattgttctcttgtaggtgataggtgagtatatgattggaagccattcagtcatgcatggct

SEQ ID NO: 17139 - DNA, 1615 bp, Homo sapiens
gtggtggtatgtgcctgtagtctcagctactcaggaggctgagacaggagaatcacttgaaccctggaggtagaagttgcagtgagccaagatcatactactgcactccagcctgggcgacaagagtgaaactccacctcaaaaaaaaaaaaaaaagagttaatctaggagataatgaatggcctagtactagataatatatggccccacaagctcttgacttctgtccttggggaaagccattttgttaaccacactagtgagatttacatgatgcttaatggagaacagagaagatcttgttgcaaaaggtgtattaaatatttgtgctgtttctgtatgagattgagaagcttttcccacctctcacccctatttcctataaggatatccagagaagccaaactgttctgtgggtttgggaatggtcatttcccgggaaaatgcatctggatcgatgactaaacctggcccttttctctgggctgtagtgaagccgcattttcacgctggctggcagtgtgctgagagcctcgaatgctctgcggcgtagtgcccttctgccctgcctgacgatgtatcgaaaagatgagagtgaaggagactttgtgcagcaggaaacgggtaggtgaggtgttgggcagttgtgggaacttctgagagtattacagagtggtagaatcggtaagaactctgatttggacttcgctttggtggaactgtgtgcctatacctgcctgtgtgtgtgcaagtgtgcaggttcctttgtatgtatgtgtacgtgtgggaacctgtgtttgtcatatttttcttcatttcacaaaggctttttttgaagcagtggcagtatgcctttgtttcaagaacacatgaaattcttttaacaccagattagtgtgttaccccaaatgaacggttctagccctctattaagaaataaagggaccataagcattttggctgcttatggctgtgtgttactacttacaagagtcttgaaaattatacagaactttgccttctttttttaatgtcttccacaatgttgtgactgattataaccctgtttcccctcagagaagagctatggctcagggatctgtgttgactctggcatttagtggctttgtgaaggaaagaaaccattaaatgacctgacaaaaactgactcatgtctttaaagtagttgaagccacttttagaatgttactctcggttgcttttgtctaattctaatggcttaaagccaagaaaaccatagtataaatctttttgtgtacctatgctagtgtttaaatggcagttcgttgtgataaagtatcagtcacttcaagttttctgtgaaagtttttaattaggttaaaaataattttggcatacgtctctactcagtttataaagcagttccacaccatgcaaacaaaactctaacagcaaaggttatcttgacctgatgttacttgaatctgagagaaagtcattacttactactgcactcctgcttttgtgggaaaaattttcttcttccccagaagagttaacagttgagtgttcagctcctgacttacctttaatttagaggcaatattattactgtttaagtgattatttgctt

SEQ ID NO: 17140 - DNA, 1029 bp, Homo sapiens
tcattagttgaactattttcacattggccccccacacaggccactctcttccctttcttggtgaagtaaggaaggagaaagtggttactagccaggcatacccctagcataagtctgggcagctctatgggatgataaattacacttttaagttcttgctggaggttttaaatagatttagacaaatgttaaggaaccatacttctctgggacagcatggcatatagtgatatatgctatttgcgttctccagatgtttattgaagatacagatcctaattggttacccagtttgaccctaatcatatgtatattttattgatttcagtttgcaatttttaatttatgttcttatgatggtttaaacctatagtcaggcttttaagtacaagtttgtttaagtgccagactttgaggatcagttttaatttctccatttgtaatagctgggtatttaaactggaagcaaatagttttctttcttaacaattatgtgcagtgtgtgtcactgttttcttgctttatagatagagctggctttaagtgctaaaggacacagtagatttttgacaaacagtggctgctctgctgactatcttttaggaattcaggaagcaaatcacatagtgacaagtccttacagacaccacttctagtaaatctctgtaaatgtggatagaaagctcagtgtgaggcagtgcgtagacctaacgtctacctttacatctgctgttgaacctgggcactacctgttacagatcctgtcaggctgttgaactggaggtgtacctttatcttcctttctagtgtctgaccctgcaagcctaatgttggtttgaacccttttggtttgttcagttgccagcctccatctctcccactgtatggccgtgcctagaccgatggcagccatcgaatattcctctgggctcacggggtgttttccacccccctgcagcaactaagatggtgggggagagggggttagaataaagcatctgaatacagttttcaggacctcaagcagac

SEQ ID NO: 17141 - DNA, 1246 bp, Homo sapiens
ggatcatgaggtcaggagattgagaccatcctggctaacatggtgaaaccccatctctactaaaaatacaaaaaattagccgggggtggtggcgggcacctgtagtcccagctacttgggaggctgaggcaggagaatggtgtgaacccaggaggcagagcttgcagtgagctgagatcgcgccactgcactccagcctgggggacagagcgagactctgtcaaaaaaaaaaaaaaagaaacaacaccagaaccactagacctgtgatagcacctgacgtttttgaataccatggtgcattctcacaaactgcttatcaaatgctcatcttttgtgggaaattagctgcagtttggatttgctaggtccttggtccatatgtcagaaagctttgccctaaacgttaattaaaattctggctgtcttacagtgttgccataagtattttctggtatggctcaactaacatatactttcagatacctcattgcctgtgactgtttgctaggcacttggtgaacatacatttactgagcatcttttgtgtaccaggtgctgttttagacatgaggatacagcagtgaactgaatgttttagcatctttttgttgaggaaatatattatctaatcctcctatatctcataagtaataatctggtctgtgcttaaactttagagtcggaaatgtattggtgtctttgagggtcatacctccaaagttaactgcctcctggttactcagacctccgggaagaatgctgccctttacaccgggtccagtgaccataccatccgctgctataatgttaaggtaggtgggtccagagaaatccaaagtggttcatattgagtcgcctttgtatttactgtgtggagtggagacactgtggcagacgcttcattctacccaccatctcctttttgcttctaaacaatgtttagcacattgttgtagccctaggtagatatgagacttacacataaaccatattttctgtctctctccaccagtattttttcacttcctactattaataatataccttccttggtctttgccataaatgttatgcatatcatatgtcaaaactaatcctagatagaataaagagaaaaatgtaggccgggctcagtggctcacgcctctaatcccagcactttgggaggcagaggcgggtggattcacctgaggttgggagtttgagaccagcctgaccaacatggagaaaccctgtctctactaaa

SEQ ID NO: 17142 - DNA, 1050 bp, Homo sapiens
aaaggcaatagtgggtctgaagcctgtaccagttcttttctaagattgtcttttgcttcagaaacccctttggagaaggaaccccactctccagctgaccagcctgaacaacaggcagaatccactttgacatcagctgagactaggggaagcaagaaaaagaagaaactccggaagaagaaaagtctacgggctgcccatgttcctgagaatagtgacactgaacaggatgttttgactgttaaacctgtaaggaaagtaaaagctggaaagttaattaaaggggggaaagtaacaacctccacttgggaagacagcaggactggtcgggagcaggagagtgtcagagatgagccagatagtgactcgtctctggaagtcctagaaattcctaatcctcagttagaagtagtagccattgattcttcagaatcaggagaagagaaaccagacagcccatctaaaaaggatatttggaactctacagagcaaaacccactagaaacgtctcgttctgggtgtgatgaagttagctctaccagtgaaattggcactcgctataaagatggcatccctgtaaggtaagaatattgtattggtccagtcagaacaactttcaccaactttatttttttaaatagaatttgaaattatgaatcagaatttctttaaaaaccaaactttatgtgaatgcagtagagattgtggatatggaaaaattaaagctcagcagtagagattttctgctttctcttttgactgtgttataaatattcactctgcttttatttcccttcattaagaaatttcagatggaaaatctaatctcttatatcattgctactttgcccattgtttagaaaaatcctttgagtcagaaatttttacttttactacctgccctgttcacacagatgctgagaacacttttgctattattttgtagtgtggcagaaactcagactgtgatctcctccataaaaggatcaaagaattcttcaggtatttgctgttcagttttatttaagttaaccacagaattaaaagcct

SEQ ID NO: 17143 - DNA, 1033 bp, Homo sapiens
tcccaggttcaagcgattcttctgcctcagcctcccgagtagctgggattacaggcacctgccaccatgcctggctaattttttgtatttttagtagagatggggtttcactatgttggccaggctggtctcaaatgcctgacctggtgatccccccacctcagcctcccaaagtgctgggattacaggcgtgagccactgtgcctggccaaaaaaattaattttttaattggcaataaaatatatgtatttattgtgtacaatatggtgccttgacatatatatatataacaagtcctcacttaacatcaataggatcttggaaactgtgactctaagcaaaacagcataataacaaaactaattttgccacaggttaattgatataaaaaagagttaagttcctatggcatatttctggtcacaagaacatcaccaaacttctaaatgaagaccccaaacacttctaatactaaacattgaaataaatgtgagctatacgtagatgtaaaaaagagtagcttgggcatggtggctcatacctgtaatcctagcactttgggaggccaaggtggaggacacttgaaactgggagttcaagatcagcctgggcttcaaagcgagaccctgtctctacaaaaaattttaaaaattgaccaagtatagtagcgtatacctgtaatcccagctacttgggaggctgaggtggaaggatcacttgagcccaggagttcaaagctgcagtgagctatgatcatgcccctgcactctaccccaggtgatagaacaaacccctgtctctggaagaaaaaaaaaagaagggctgggcgcggtggctcacgcctgtagtcccagcactttgggaggctgaggtgggcggatcacgaggtcaagggatctagccatcctggtcaacatagtgaaactctatctctactaaaaaatacaaaagttagctgggtgtggtggtacatgcgcctgtagtcccagctactcgggaggctgaggcaggagaatcgattgaacccgggag

SEQ ID NO: 17144 - DNA, 1027 bp, Homo sapiens
agcaagactgtctgaaaaaaaaagaaaaaaaaaatcaccatcaatttcacagggtcttgcaaagaatgattttataagataattctttttatactggtaaacaaggattttgcagctaaaatattctaccaaattagtttcctgccttattccttctctgaaaattaatcacaataaagctcctcaatgagttacactcaaagggtttattactgtacttttaagttcagcattctctttggcttgatagaagtctacgtccatggtaaccaatgcatccgcagcaagaggaaacttctgtttatagcaggatagcatagtgggtgagtgggaattccagcatataaattccagcctcacaatgtatttgttgtgtgaccccaagttaattacctaacaccactaaaactcggtttctgtatttgtaaaacaaggataacattctattttatagttttgttttttttgtgaagattaaaaagagatgatctacacaaagtacttagtacaatgccttgcacatggccggtgttcaatgttagccattatattaatatttttactgaagtggaaataaatagtaggcaaaacaaaaggaaagtaacaatgttgaatatgagtcacatttatgtaaatgtagctgaaagtaatagctactaaatattaatagttccatctgcaaggctaaatttgaatattaaagttgatgatataaagtataggctatatacaactttttttttgagacagagtctcactttttattttattttattttactttattttatttgagacggagtctcgctctgttgcccaggctggagtgcagtggtgcaatcttaggtcactgcaacctctgccccagggttcaagtgattctccttccccagtctcccgagtagctgggattacaggtgcccaccactacacctggcccttttattatattattatttttttttttgtagaggcagggtctcactatgttgcccaggctggtctcaaactcctggcctcaagtgatg

SEQ ID NO: 17145 - DNA, 1062 bp, Homo sapiens
ggttctgtcaaaggaagagccctggggctgtgcgggcgctgcttccagaggagaccccggcagccgtacgtgtgagggaggcctgcagctagcaggccaggcagttgtggggaggtgcacggagtagtctgaggctgcgggagggtgtgtgggggcggggtcagtgctcgactctggcatcctttgttgcacccagccctcccctagcccctgactctgtagttctgtttcgcaggttctgagcagtgcagagaacattgctgtggggcttgcaacagagaaagcctgtgcttggctgtcagccaacatcacaggtaaggtcctggatgggggagtggctgaatcaagtgtttaaaaagtggactggcagagagtcagaggcatcttgtgggcgatgggactgagagccagtaggaaacagcaaaaggcatgggttagcatggtgaacctgtgcagggccctcccgtgattcctttcccattctccctctgccccacagcactgatcaggagggaggtgaaagcagcagtgagtcgcacacttcgagcccagggtcctgaacctgctgcccggggggagcggaggggctgctcccgcgcctgtgagcaccatgctcccctcccctcccacctcatctccgagataaaagtacacggctaccctactccctttggcttccctgctcccacccccctgctctgttcctggtttttcctttctcacatcagctccaggatttttatgtagaagctgtctgtgctgtccagctagtccccgtttcactcattactgaatgggggttaggtagggcagagctgaattgaatggttttcctaattgtcactctgactttttaatcatccaaaaggggaaaagggcagctaggacatttttgactaaatgcttattatgcagatggtgatgagagtgcggtggtgaatggcttgatagcaaatgagtctctaggaggcagtcgccccagtatttggagacaatttcagaaatgttctatgtgggaggtgatgcttgtttagttacaggcagtaagaataaaccatcagt

SEQ ID NO: 17146 - DNA, 1557 bp, Homo sapiens
gcaacctccgcctcctggattcaagggattctcctgcctcagactcctgagtagctgggattacaggcctgcgtcaccacagctggctaatttttgtatttttattagatatggggtttcaccatgtttaccaggctggtctcgaactcctgacctcaggtgatccacctgcctcaacctcccaaagtgctgggattacaggcatgagccgctacacccgaccttattcagcttttaaaaagaaggagatcctatcatttgccacagcataggtggaactaaaagacatgcttagtgaaataagccagacagaaataaaaatgttgcatgatctcatttatatgtgaacaaaaaacatatatatatatatacacacacacacgtatatatattttaaagcactcaaatacacagagattgagaatgatacagtggttaccacagggggttcaaggagggaggaaggaaaggaaatggggagatgtaggtcaaaggatataaaatagcagatatgtgggatgaacaagtgtggagatctaatggacagcataaggaataacctttataaaattgtattttcagaagtcttggacataaataaaaataaaattgtattagagatttttgttaaataagtagattttagctgctctttgtcacaaaaaaagtaactgtgagttgataggttaatctgcttccctgtaatgaccattttactgtctatgtatatcctattacatcatgttacaaagctcaaatacaatttaaggaagtaaaatactacagcagacttaagaccaaacacatcagtcacagcaataaatatacatggggttaactcacctattaaaaggaaaacattttcagtttgggttatatagctatattcatatgctgtgtataagagacacacacctaaaaaaagtaagaaagagatggacaaagatatatcagaaagatagaaaagagaagtgatcctaataacagatgatgtagaattcaagccaaaacaaaaaacttagaaaagatggaagggcactttttaatgccaaatgccacaattcacaagtgggatacaaaatttattaatatttagtcaccagaatcatgacactcacctttgggaaacaacaactgcaggatattcaaggagacataaaaacacactcatagttggagatgttaatgtaccaccctcagtttaagacagatcaagtgaacagagaataggaagatagaagacttaaacagcgtgatcgtagtaaggtagatcatatgtatgttttctgaactctataccttgatgatagagactatacctcctgcccaggggcccctggaacattcacaaaaattgatcaggtattaggtcacaaacaaacatgtaagtagttccataaagtagaagtattacattatctgatcacactgcaagaaaactagaaattaccaacaaaattaaaatatcaaaggcccttttactggaaatttaagaacctattaaactacagtcatgtgccgtgtaatgacatcgcaatcagtgatacaccgcatata

SEQ ID NO: 17147 - DNA, 1094 bp, Homo sapiens
tatttcagaagattctgttgctctcagggagaatttggtcagggcttaatacctaataattgctaccactgaaaacataaatgcggccacacatagattaataagaatatgtattagtatatcatccttatttacaaaggacaatacatagactttactgcatgttaatggtagttaaattctacagtgttgtcagtgttgtgcagtcaaaagactaagaagtatctatagcacagtaaatgtatttgcatatagtaattattgctctgtgaaattgctgcttttgtataagatacaaacaggatataaagcaaagaggcaacatacagccttgagtccttagagaccttaaattggtgagtttgtcttctcatgcatatgccaatttgtgttgtaagcaatagggactgtctaacaaattgagaaaatacactgtgtgtgagttgttttggaatgtgttcttatatttgtcttttgtatgtattttctgaaatgtatacagttcacattacttaaagcaatgaaattatacctgtaagactagattcaagaggagctgaaaattgttccaactttcccatcttgagtgctaatagtttcttattgacaaaatttgcttaggggaatttaggacagtaaaaaactttgatcacattctcttcttaaacctatatctaaagaagactatcatatttaccagctgaagtttgaaacttaatgattattttaaactaacaaattattgttctcaagtttttcagttggacattctcctaagggcttttctatcacttaataacaaaacaaagtttggtaattttccatttttgaaagaaagagaacaggcataacattactttgtttcacagattctgtaaataatccagctctttcctgctgtgatctttcctaagcagtgagtgagaacagagggcaggtggacaggagaaggataattgaaaaaagatgttatgtaagtgatgggtgtgttctaatgactagtatcaatgtgacatcaggtttcaaaagcctgagctttgcagcttctgcctcttgtttctctactcagtcttcatcttgagaaaaataactct

SEQ ID NO: 17148 - DNA, 1867 bp, Homo sapiens
acaatgctaagtgctgacaagggacagaaatcattggttgtcagagactaggggtgggagggattgactcaaaggggcattaaggaaacttactggagtgatggaaatatttgatatcttagttgtgatggtagttatatgactttatgtcagtcaaaactcatagaactgtatacataaagtatgaattttactgtaagtaaatgatacctcaataattaaaagtaaagcaaattaaacctgacttgaaaataaattaaaaagttaacagtgaaataaatctccatttcacctctgcctattccaaatctactcatttcctatactgtctctgattcttccccctgctccctacattcacctttaggtagctgtactgttattagtttctttaatatattcttccagaatttctttattcacatacaataaatacaaatgaacattcttaattttccctttttgattcaaaaggtagcatgatatacattctatacctttctttttttcacttgtcagtgtatgtagacgatctttccatgttagtatatagaacttcctcattctttttttttttcttttagacaaagtctcactctgttacccaagctggagtggagtggcacgatctcagctcactacagccatggctcagcagtcctcctgccacatcctcctaaatagctgggggattctcccatctcagcctcccaagtagctggtagctggggctataggtgtgtgccaccatgcccagctaattctttaattcttttttttttagagacgggggtctcactatgatgttgcccaggttggtcttgaactcctggcctcaagtgagcctcctgccttacactccccaaattctggaattatagccatgaactactgtgcctggcccgacccctttttttttttgcagcttcagagtgtattccattatttgggcatactataatttatttaatcagtgtctcctattggcagacatttaggttgcacaaaatcttttgctgtcacaaacactgatggtagtgactgactttgtacatccactatttttgcacaaatgcaagtatatctgtgagatagatttccagaagtgaaattgtgagacaaagtgaatatatgcatttacaattttgataaatattgctgaagtgccatcaattgaggaagtttcaagagattatttgtttcaagacccagtaaaatgctgcctattcctaagacttgtccttcctctctcctactacatggaactaatccttacctgtcccgagtgtttatatttcattgtgcttcactaatgatattcattataatctgctttaaattggaatcatttgcatatgtgactgtttttctccagttgggtttgagttgtctttactacattaaataaggtcattgaatttccttgatctgacattatttctttttcttattagaattagatgagatatgcaaactggtattatttctttgactacttatgtcaagatttctctaaacagctgatttctgttttctctatttcagtctttctatggcagaagtaaggtcagagccaggcaggggaaactcttaagtagaaagagtctcctgggcttgacttggctagaatccatcagggagaagtctagatgcccaatcaactgtggactaggctgcagaatgtgataataagtctggagattttcattctgacagttactggaatgaaaataattgggcaaaattacacaacacaaaaaaattctatgttagctgaagggtcatgtcaggtaatgaataaaagtacaacctctgaaacgttatttaccaaaaaagattcatagtagactttcatatattctcttag

SEQ ID NO: 17149 - DNA, 1046 bp, Homo sapiens
acatgttaagtgatcaacatgtactgtgtacattgtgaattattgtgttctccattgcacccattcttgctagcttataccccctttataaacaaaaacatagagaatgagagaacagtcttgtaactggttgataacacaggtgcaaaaaaatgagtcttttttttttttttaggggaaggggtcttgctatgttgcccaggctggtctcaaactcctggcctcacgcaatcctcccaccttagcttcccaagtagctgggattataggcaaagccactgcacctggctttgctgagtcttaattgtatttatgttttaagtcagttaggaggcaaattttttttagtgtttcatcagtccaccaaatcttcatcttcaagctttggcctgttactcttccttactttcaagcaagctccttcaaaggctgtctgccctcatatttcatattctctttactctttaacccattataaactggcttctgccccttgactcactaatgacttccggtttatgttagtatttctcagcctttctatgtacttgtcaatgtccacttctgccctcataaagtgttcttctcccttggtttctgtgatacggctctctcagtttcctcctatctttcaggctattcctctatttccttgagggactcttatttttgctcatgctttgaatgttgcattttctagggcaggcattgtggctcatgcctgtaatcccagcactttgggaggctgaggtgggaggattgcttaagcccagagtttgagaccagcctgggcaagatattgagaccctgtctttaaaataataataataattaatgtttcattttccaaattatgtgcttaagtttcttttcctcttatattacattcttttacttgtcaaccttccacgtattgtccatgaactaatggttcctcagtgtacatctggagctctgccttttggtcttagcaccaggcctgaacttacaatgtctactgaattcacttgattgtcctaaaattcaacattttagtatcccttaaa

SEQ ID NO: 17150 - DNA, 1029 bp, Homo sapiens
gtctcccaaagtgttgggatcacaggtgtgagccatcacgcctggcattagatttttattaactgaagtccacagtttacattaggggattctttttcttttttcataaaaaaaatttttttttaagtagagacaaggtctcactatgttgagaacttgaactgctggcctcaaatgatctttttgtttcggcctcccaaagtgattcttttcttaataatgtgaacacagtggtattgaaaacctaacaaaattaaccgttattttacaataccatctcatatctatccagtatttaatttctcccattgtctcaaaaatatcattttacaggtggctttgttcaaattaggatttatatacaaggcaggcacattgcattatattttgttgccatgtcacagtttgttctcacctacttttttttttcccttgccttcacattttttttgttgaaggaatgaagttcttagtttgataaaatagtccgaaatctggatatggctgattgcatccttgtggtgtcttttaatgtgttcttccatccttcatatttcttgtgaactcctaattagatctagaggattaatgagattcatgctgttattattgttgggaagaatttatcacctacattcattgttttcattagggattgcaaaatggtggttttcctaattctctgattccttctaaattccttaactggaattattctacaaagtagaatgttattccatcatttgtttcccttgaaatatagttagtataggaaggacaggataaagggattgagttttcttctcttttgtttatcaattttcagaataataagttgtggtcttggctgggcatggtggctcacgcctgtaatcctagcactttgggaggctgaggtgggcagatcacaaggtcaggagatcgagaccatcctggctaacacggtgaaaccccgtctctactaatacaaaaaaattagccgggcgaggtggcgggcgcctgtagtcccagctgctcgggaggctgagg

SEQ ID NO: 17151 - DNA, 1069 bp, Homo sapiens
ttatgtattgctggattcagtttgctactactttatgaggaattttcatgtttgtgtttataagggatatgggtctcttattttttgttttctttttgagacaggtctcactctgctgcccagcctggagtgcagtgatggtatcttggcttactgcaaccttgactttcctgggctcaggtgatcttcccactttagcctcctgagtagctgaggctacaggtgtgcatcaccatgtccagctaatttttagtattttttgtagagatagggtttcaccatgttgcctaggctggtctcaaactcctgggctcaagaaatccacccgccttcgcctcccacagtactaagattacaaacatgagccacaatgcccatcctttgactagttttaatatcaagttaatgctggactcataaaatgagatgggaagtgttttttcctcttcttttttggagagattgtataaaatttgtttcattttttctttaaatgtttagtagaatttgccattggaaaaaaaatctaggcctgtattagtccattctcacactgctaataaagacttacctgagactgggtaatttgtaaagaaaaagaggtttaatggactcatagttccatatgactggggaagcctcacaatcatagtgaaaggcaaaggaggaacaaaggcacatcttacatggcagcaggcaagagagcgtgtgcaggggaactgccttttataaaaccatcagatctcatgagactcactcaccatcatgagaacagcatcatggcagtaactgccctcatgattcagttacctcccactagatccctcccatgacatgtgggggattatgggaactacaagatgagatttgggtagggacacagccaaaccatatcatgcccatatttttttagtaggactattaaggaggtccctttcaccttgggtgaattgtggtagtttgtagtttttgatggttgtctgtgttcactttctgtgtataatgttgttcattatgtttcctaattatatatttatgtctgtggagtctatagtgataacccctgttt

SEQ ID NO: 17152 - DNA, 1049 bp, Homo sapiens
taatagagctctcctgaatttgtgcatagacttcttggttcctggcttttgttttttgtatcaagagattgtgatataaaacagcagaagataaatggaaaccttccattttaacttacgttgtttctggggtaatgttagaaccttgaaagatgcattcaaagactgtatcttattttgcccttggctattagtgtctcacatatgtgtgtaaatgttttcctaccttctttttgctcagcaaaggcaagcaagtaaaatatatttgctaagtgattagtgatgcacatttggggctagatttttttggtacttttatgtaaagaaaagtggattttgcagtaagggattggcatgagcaggcgtcagaatcacaatcatgattttctacttgaataattacaattcagaaggtatctggataaatagatacatgtctagtgaacaatttgtaacaataacaggtaaggatcaggaaattcagtattcagtttgtcagatttgccagaatgatgaaagtatttgaacatgtgtgtttgtttcttatataattgtattgagtggattgtttgactgggaaatctgggctagaataggaaacagaagatactgacttctaccctaatagatgggccccaatttagcaaagataaactgactttatttttagtcctttttatattaacttaataaattctggagttaggctctcaagaggacagagggactgtctggcaatggccagccagacctttactgccaaagaacccatttcatattgcgttccactgattgagattgattcagatttttgcactgtagatgagcgtatgtctcagtgctgccccaagccccagggatttctcattatgttcaaatgtcctagtgatttaccttaatcattgcaaacaattatgcttatgaagtttacttacaaacaagcaactgagtcactttattttctttagtgtagtatgtgaaggcactggttcaacaggatggctccagaactgtgtttttctaatgtttggtaaggggctagtgagaat

SEQ ID NO: 17153 - DNA, 1050 bp, Homo sapiens
agaaaagcagagtggtgaaagtagttaatgactgagaatcttagttgttccacaagggtacaaagcagagttttaacattaatttggcagtttaaaaatccccaaccaggcggccgcggtggttcacgcctgtaatcccagcactttgggaggccgaggcgggcggatcacgaggtcaggagttcgagactagcctggccaacattgtgaaaccccgtctctactaaaaatacaaaaacaattagccaggtatcgtggcgggcacctgtaatcccagctactctggaggctgaggcaggagaattgcttgaaactggaaggcagaggttgccctgagccgtgatcgtaccacggcactccagcctgggcaaaaagagcgaaactccatctccaaaaaacaaaaacaaaaacaaaaaaaatccccaaccagctgagagacttgaatgtctcaaggaattaggatctcacagttctccgttactggcaacagccagacttaagtcattttggattagctgttatacagtgttaaaaactgtgcaactctagaattgaagtataattattttattaaattatttgctaataaccagccagttttttgtatcgtaaggacagttacaaccaaatatctctgagtagcaaaatataattttagggcctagtgttatacgtcaggcctaacctctactgtgcaaagatcataaattgaagctagataacaatatgaagccaaaaagctattcaagctaaccaccaaaaaagaatagtgctgcttcaagttataaacctcagtgaccatttaagtgaggtcccataatgccataatatacctgacctattttatgaatggtcaaggagtacatttctgctttattagctaagtagcctgtcaagttcttagtgatcaatggtgaagggaaaatatccctttttaagccctgtgctggtgagtcctcccggctccaggaacatctcaagagtgcatactaatttagacaataaagatgtggcagttactagattcaaacttacatgttgttttttctt

SEQ ID NO: 17154 - DNA, 1028 bp, Homo sapiens
tgctccctgtcagagtcaaagcacagatcctcagggtgggctcaggggccgaggcagcccagggaagctccgggtggggaccgtgtcttcctggggttggtgccctctggccgggaccctttgctggcccatggtccccgggtactgccgtggcgtggcctcccacctgtctgcctggtggagggagctgtgggggtggggatgtgactgaataaagccactgtgggtggatgtgcttgggggaaaaaaagtcacatccaaacctgttagacttaaatcatgggtataggataatacatcagtttatatttgctatgattcaatcaagtgggatataggaaaggtgaggtttatataaaatagagtctgaacaaattgataagaaatgtaaagcattcttgtggagtcatgacatgctaagtctcttcagactttcagtgaagctatttcacactttactattttggggaagataagcattaggaaatcaagaatttatatttagaccttgaacattaaaaagggggcacagtctgttataaaggagataggaaattcactgctgatagagctgaatcttttcatatgtggttctataatctagtaattggattccatttgattaatatcatattgtgttcactattgtgctttttctatcaagcaggcataatgctctactttattcttagtacataaacaactaacttatctcagtccctgtggagatggagagatatgtacagaatgcattggcataggataatagttgaggaatcaaaacaaagcgtcctttgaattactgtttatgcaaagatgaaaaaaaatgcttccacactcgtatctgctgctaaggatcagtgaaaataagagtaatttaggaataaataccatggacaacaaaacacaaatctgtgattttggtattttaattttctctttttctttctctttttttttttttttttttttttgagacagggtctcactttgttgtccaggctggagtgcagtggtgcagttatggc

SEQ ID NO: 17155 - DNA, 1044 bp, Homo sapiens
gtttttttattgttattttggcctctaaatgtttaattggaggtctcaaacatggcattaagtagaaatatcactttattagcagtaggacctctgtgaccgtctaaagaagcataagagtgattagtatcttttaaacatattcactaatttacttagaagcctatatttttaagggaagaaaatactgaacataagctaaggaaaaactattgaaatagagaactttaaaaaagaaatcatggaatgattaaaaatttttgagcaagtgactagcatttattctggtagctttttagtgtgggagtggtgccgcagatagattgcaagagtgaggagataactcaagaagattaatcaggaatcagttgcactggtcctaccatgacatggtgagaggtggtggtattaatagtaagcattgacaagtttgctctgaatgcttattgaatgactaattgtttggggaaaagaaacagccaagagattgtaaaggaaggattgcagagaatgtgtaagcattttatctatattgcctacaaatatggggaggttaggagaaaagacagatagtaaattcagtttctatttattttcacgctgtgttgttttggtacataagtagaattaaacaaaaacatagtgatagtgggagatagttttatggctggtcaagtcatcctaataaataaggacttagagaatttttaaaattaagcttgatttagtaatatgttctacagaagtttgttcctattggagaatatatttttatcaaatgcccacggattttttttttttttttttttttttttgagacagcgtcttgctgtgttgcccaggctgatcttgaactcctgacctcaagtgattctcccaccatggcttcccaaagtgtttggattataggtgtgagccactgtgcctggcctttccatggattattaataacagattggttaataaattaggccatgtaagaatctcaatagttttcaaaaagggaaattatgtacgatacttatactatccacaatacaataa

SEQ ID NO: 17156 - DNA, 1026 bp, Homo sapiens
tcatgtaaaaaaagtaataattggccgggcgtggtggctcacacctgtaatctcagcacttcgggaggccgaggcaggaggatcacctgaggtcaggagtttgagaccagcctggccaacgtggtaaaaccctgtctctactaaaaatacaaaaattagctgagtgtggtggcacatgcttttaatcccagctcctccggaggctgaggcaggagaatcgcttgaacccaggaggcagaggttccagtgagccaagattgcgccattgcactccagcttgggagacaagagcgaaacatcgtctcaaaaaaattaataaacacaacaaataaataataaaaaagtaatctttataaaaatctaatttctgtcaaaacatacagctgtgaaaagtacctttgaaatagaataggatgaataggacaagaagttctcgttctatctctggaaaatataaaatttcaaaaatgtaattcctgagaaatcttttgtgtagagtttacccatttggctttagattacaatatataatttttccatgatagccctcactacttcagttcatcattagaaactgaggaaagtagtgtccatgctgtatcaccatgctgttgaggcaagagatgagttatgattcaataaacttattttaaatttatatctgctctgatgtattttccaatttgtccccaaaataatgggcaacctgtttcttctataattacaacttgtgtgtttttgcatgtatgttctaaagatgtttattggggcaaaaattccagatttttaaaacttggattagagcaagtagagatacacatgtagagatgcatgtgtagttctgaatgggcctgtgtctttgtaattttgcaggtattttgaagctgtacagctgagctctcagcagcgcattcatgttgacctttttgacttggaaagtggagaatatctttgccctctttgcaaatctctgtgcaatactgtgatccccattattcctttgcaacctcaaaagataaacaggta

SEQ ID NO: 17157 - DNA, 1038 bp, Homo sapiens
tattcatcttagaggcaggtatcatttaatttatgctgaagtcccaacttgtagtacagtatcatatacacagttaatacccaatggtgttaagctggaattgaactgagtaaatgtatacacacacatacaacaacccctcttttttggtggagtgaggggaggacttggctatcagtattttttttcttacctccatttttgtttgaggtagcatgataagtactggaatataaattagagtatctaaattataatccaagttgagctgctgtatgattcattcatttaacaaatatttattgagcacccattatgtagcaggcatgagctaggctccaagttggggacacaatggcaaacaagttagaaaaggtccgtcatagagcttacattctaacagggagaagacagacaaaaaaaaaaaccaaaaaatataattacagatcgtgattagttcaatgaaggaaagaactgggtcatgagaaggtaactgggagaaaggctctcagaggccagaaggacaagaatgaatcagcggagggaagtgcattctaggcagaaggaacaaatgaaaagcccagaggtgggagaggtcttggcctctttaaggaagtgcatgcagagcatgagccaggtggaaattggggcagtcggcaggacccagatcactgctctgcttcaaagcatttcaagctgaaaagtaagtgagctgattgtaaagtttttaaaagagcacactggatgctctgtattaagctgagagtaaggaggcaagaatatcagggagaagacccaggcaagaaataattacaacttagattaggaaaacagaaatggagagaagtggatggattcaagatatgcattggaagcagatcaaataaggtagagcttgctggtgaaatagatacagggtatgaaggaaagggaataattgaggatacatcttggagaaatcaggtgaatggtggagtcatttattaaaactggaaaaacagagaggaacaggtttggggtggaaataatgttcctatc

SEQ ID NO: 17158 - DNA, 1073 bp, Homo sapiens
tctgggaggtattttttctctttattcaggaaggcttcatgaagcaggaagtggtcaaaggagggaaggttactggttaaattatgataggaagaactttccataactagttgcaaaattgagtgctgggtgggttgaggaatgggaaaaagggggagcaaggtgttttgtgtagatggaacaaagggcaaaggatagactgtaaggaaggccagataaagcttggagtagcatgagaacttgaggaatagtatgatatgggctgtgcagcaggcagagagaatcaccttagctgaaacatgggtgttaggagcagaccatgaggtggtagaaccatcatctatagtaaatcaggtactacgctataactattgataaggaaacagctgactgccactgaaagaataagcagttttaggggactagctcctatgggagataaaggtcagaaatcgtagtatctgatgaagatattttgatgagcaggtgagaagaaagataaacatggccagatggccaaggactgggataagtagccgtttcacattcaattagaattctgtggctggaataagatcagggagagcagtaggaagatatagtattctataattcatagcttgttgtgttagagattaattaggattctgctgttgaatcttagtacaaaaaaatctaatatttattaggaattaagggaagatggtacttctgttatgttgcctaagcagacaggaagctacaagaaacaccagtctgaagcagtgcctcaggatctcagatgatttaggaagtgtgctgtaatgtcaaaaaaaaaaaaaagtattgtctttagtatatctatgtatagtctcgtgggaaaagcattggttgtggtatcaacagatattctggttccagatgtcttgtaagttaacctgcctccatttccctttctgtaaagcaaaataatgtttacacctaatctgtctctcagggataccatattaataaaaatcatgtctataaagtgcctggtgtttcttgaagtgtttatgtgtgtgtgtgtatatatatacacaaattacgatcaa

SEQ ID NO: 17159 - DNA, 1031 bp, Homo sapiens
actgggtggagggctaaattaagatatagacaggcttaaagagggacacagtctcccttggtgaggcttatacttctggtctggtataggtaactttttcagatagtgcttgtctggagatgcttcctgggtgtaccttcacctaccctgtcataatgagtttttcctatagtttcttaatagggaagaaaggggatttttttttttcagcctgaaggtgggtttactattttgatcgtttccttctggagtttcaactgctttaagctaatggcaatggaataagacccttgttcgcgttaacctccctcacccctacaaccctggccatggctctgaaagatgatctcttttggggtattaaatactctcctctgggaatgcccctcattatgatcttgcagtgacaattaacgggggttgtttctaggtcacagtctctgtgaaggggcaggaagtgcgcttggagaagatgacacccccgaaatcatcacaagagttattaagtgttcggcaggagtcagtggaaccccagcccaggggtgtacccaagaaagagagggcaagaagcccagacctgggaccacaggagcagatgaacccaaaggagaagctcaaaccttttcaaaggagcggtgaggagtagattcatatgggaagatagactgccattccaagttgggaagtagggttgggaatagtgagtgggaaagggatttcaggagtaagtggaaattgcagaatatgtggttgttgacatgtagtttagcctctggtattcatattacctcttgataagtccacaagagaatggctccctagtttttatcggaacttggaattattttatttcctcttggtaatgatgatagtataggtcattattttctagataaaaattcttttctatacttgaaggcacatcttccttttggttgttttccatcttcaaattaaactatatttgttaccttaagctttcccccagaagatccattctttttttttttttttttttttttttttttttt

SEQ ID NO: 17160 - DNA, 1027 bp, Homo sapiens
accactgcgtcgcagcctggacaacagagcgagaccctgtctcaaaaaaaaaaaagctttctccctgattgtaaacagtcaatatttattgtagaaagtttgttaagtatataggaaattaatgaaaataaaaatcacctgtgatactacactccagatatagctacaactagtatatttggatatatttcagttttcaatgcataaagtagttttacataattggcatgttgtgtatatgactcagttttttttttttatgtaacagtgtattttcccttgtcagttatattttagatttaatgcatttgcttaatatgtatgtacatcagtgtttgtgaaactatatgtgctttttgtatttatttgtttttttgcttttctcttaacctaaagccttttttgtatgtagtgcctataacagcaggtttttaatgtgctttgtcatggcaagaaagttcaaaaggtgcaacaaaaatacttagcacagctatggtagtatattaaaggcctgtagcactggatcccaaattaggtgtagactggtaaggttgagactaagctaagcagcaaagctgggtattgaggttgcagtttgggtagctggtagcatgaatgtgaattatggggaaaaggtaaatgttgttagtagtttgtgagtggtctagaggaagcctggttggggtcaagttgtaagataggggatacaaatgatgaatcaaatacttagctagctgggctgactccaagcaagttcctgatagcctacaggtgggtagtatactatgggaaagcagtgttttgtgttttgtgtgtgtgtgttccctcctaatgtgtgtcaggattagtgtcttctctttcttagttctttgataaatcagtgctgattggcattgatagattttttttcttcatctgtatttgtacaggcatccatctctctgcagttagcaattgttaatgcaaatataatcagttcgtaaatatgaattatagatactgtatttacctaaagtggtgacaaatt

SEQ ID NO: 17161 - DNA, 1599 bp, Homo sapiens
tccccagtagctgggactacaggtgcgtgccaccacgcccggctaattttttgtatttttagtagagacagggtttcaccttgttcgccgggatggtctcgatctcctgaccttgtgatccgcctgtttcggcctcccaaagtgctgggattacaggcatgagccaccgcgcccagcctaatttttgtatttttagtagagacggggttgcaccatgttggccgtgctggttttgaactaaccttaaatgatccgcccacttcggcctcccgaagtgctgggattacagggataagcccctgcgcctggccttgtttcaaacatttttaacggtgatatatgttattaatagattgtgaaattatgtaatcatttccttaatgctgaatttataggttgtttcttgttgttgttgttgttgttgttgttgttttttgaggtggagtctcgctctgtcgcccaggctggagtgcagtggcgcgatctcggctcactgcaagctctgcctcccgggttcacgccattctactgcctcagcctcctgagtagctgggactacaggcacctgccaccacgcccagctaatttttttgtattttttagtagagatggggtttcaccatgttagccaggatggtctcgatctcctgatctcgtgatgcgccctccttggcctcccaaagtgctgggattacaggcgtgagccaccgtgcctggtcggtgttaacttattttaaaaatatatggagtttgcttgtgcccagtagttcaaggctgcagtaagctgtgatcgtgctactgcactttagcctgggagacagactctgtctctctcttttttttttttttttgagacagagtctcgctctgtcaccaggctgcagtgcagtggcgcgatctcggctcactgcaacctccgcctcctgggttcgagcaattttcctgcctcagcctcctgagtagatgggactacaggcgcatgccaccacacccagctaatttttatatttttagtagagacggggtttcaccatgttagccaggatggtctcgatctcttgacctcgtgacctgcctgcctctgcctcccaaagtgctgggattacaggtgtgagccactgtgcccggcccagactctgtctcttaaaaaaaaaataagtaaaaaataaaaagtgtgtgtgtgtgtgtgtgtgtgtgtgtgtgtatttatatacatatataagctccttacctgaattttgtttggactctgtggttctatatatgtattttaagattttttactaaaatacttctgtgaacttttaaaaagttttttgagccctttctgtgctcatccaatgcatatcttctcttgtcacttgtcagtaattctcctgaatgcaagatttttctgcctcttctcaaaaatataaaattcgagtatgttggtgccttattttttctttacttaattctgtgtaggatgttgaattgttaatcttttaggtgctttttgtagaaagaagcactataaaggtgaggtattttactttttcaagtttggctaagagatggttggtatgtgttgggggtcagagtgctctgattaaagtgtcc

SEQ ID NO: 17162 - DNA, 1008 bp, Homo sapiens
atctcttgagcccaggagtttgagagcagcctggacaacatagtgagaccctgtctctacaaaaaatacacagtaagccaggcatggtagtgtgcgcctgtgatcccagctacatgggaggctgaggtgggaggatcgcttgagcctgggaggttgagactgcagtgagccatgattgcttcactgcactctagcttgtgtaacagagtgagaccatatcttaaaaaaaaaaaacaaaaaacaagtaagtgtgtatttgctgttatctgggataagtgtaatccatgcatggagaatggcaagttcaaagaccctgaggcatgagcgtccctggaatatttgagaaatagcagggaggttagtgtggctgtagtggagtgactaagagaagtgagagaagaggtcagagaagtcagaagggaaccagattatgtaaggcattgtgaggaatttggctcttatttttagtgagataggaagacatttaagggttttgagcaggggaaggacatgatctgatttagatttttaacagagtcactctggctgcttgattaagaatagactgaaagcaggacaaggctagaggcaggaagaccaacaaggaaactattgacataatttagcaaaaggtgatagtggctggaccaggattgaagcagatgaagaatggtgagattctgagtatttgaaaaggggattcaaagacagatcagatgtggagtgtgagagacaagaaggaagtaataattattccaggtttgttttgcttcaagtagctgggactacagatgtatgccaccgtgcctggcagattccaagtttttgatttgagcaactagagtaatggaatgacagttaagatagagaagactgcaggaggggaagttcagttttaaacatatgaaacattgtgctatcttttcaacaaccagctggatgtgttgaggaggtaattggacaaggaggcctggagctcagagggaaaagtctaggccagagatttaa

SEQ ID NO: 17163 - DNA, 1048 bp, Homo sapiens
gagaaagggacagtttccatagcaactgcagagatgaggccgctaactagcacagggtctcagtataaaggtcagcagtagttaaccaaagattctgctttcatcaagtctcacaaagagactagacaatagatctgaatggtatagggaaggatcacacactgattagatggtaggggcagaaactcagccttgtgatctcaggccctgctaaaattgggttttattaattacagtgcaaatgtagattatgatagtactaaaattgcttatgtgtgctggatgagtattttgcaggctcactgccaaagtctgacaatgtcacagaaagattggctataggtgtctgttaattatcctcctctttccttggttaacagtattccagccattccactgggtgatgattccagtatgattatattgtcaaaatatacgtatatatatttagagacagagtcttgctgtgtcagcaaggctggtatatagtggcatgattgtagctcactgtaacctcaaactctgggctcaagtgatccttgcacctcagcctctggagtagctaggattatttgagacagggtctcacagagacagggtctttgtgtgttgcacaggttggtcccaaactcctggcctcaagcagtcctcttgccttggcctcccaaaggactgggattacaagcgtgagccactgttcccagcccagaaattttttttttgagacggagtcttgctctcttgcccaggttggagtgcagtggcgtgatcttggttcactgcaacctctgcctcccgggttcaagcgattcttctgccttagcctcctgagtagctgggactacaggcgtgcgccaccatgcccagctaatttttgtagttttagtagagacggggtttcaccatgttggccatactggtctcaaactcctgacctcatgatccacctacctcggcctcccaaagtgctgaaattacaggcatgggccaccgtgcccggcccagaaaatatgtttaagtgttaaattgcacatagcacttgtccaaa

SEQ ID NO: 17164 - DNA, 1053 bp, Homo sapiens
atcactcctgaattctaaagttttcattgaaaaatacacaaccaagaacagtgaagaatgagtggggtgcagtggctcacatatgtaatcccagcaactctagaggctgaggcaggaggattgttgagtccaggagttcaagactagcctgtgcaacatagtgagacccccatctctccagaaaaaaaaaaaaaaaaaaaggctatgcatggtggtgtgtgcctgtagtctcatctacttgggatgttgaaacgggaggatcacttgaacccaggagttcaaggctgcagtgagctatgatcacgccactgcgctccagcctgggtggacagagcaagatgttaccacaaaagagagagagagagagagagaaagagaagagagagagaaaaaaccctgaaaagaagagcagtgagcaaatactagccctaccacattttaaatcattctataaaatctcattttagttttgatttttgcagtcgtagcttattgcagcccagaactcctgggctcaaacgatcctcctgccttggcctctcaaagcactggcattacaggtgtgacacaaagactttttttgagacagagtctcactctgtcacccaggctggagtgcagtggcaggatctcagctgactacaacctccatctcctgggttcaagcagttctccctgcctcagcctcctgagtagctgggattacagggacaagccaccatgcctggctaatttttgtatttttagtagagatggggttttgccatgttgcccaggctggtcttgaactcctgacctcaggtgatccacccccccttgggttcccacagtgctgggattacaggtgtgagccaccacacccagccagaaagacttttcagtaaatggacggggggtaaattgaataggcatttgacaaaaattgaaattgaacccacactgtataccaggataaactccatatggatcggaaatctaaacgtaaaaattaaatcatgtgttaagtaggtagctccaagggcttgttcatccacagaaacaccaaaaagtaag

SEQ ID NO: 17165 - DNA, 1050 bp, Homo sapiens
actagtcatatcttgtaaatgtttgtgaagccataaatttcttctttaagttcaagaggagctagtcaacaaagggaaagtttggacttatcagaagtgtctgaagtagagtctaattatggtgccactgaagaggatttaataacatctgcatcaaaaacagaagagaccttgtcaaaaaagagagagtaccagtcttcctcctgtgtctcctccacatcctcttcctattcttcctcttctgaatccagattttctgaatctattggtgagccgaagaactataataatgagttttttccatttgaattcagactcctctttaagacatcttagtcttaacaggagctctcctagtatatctcctttccaattttctggtcttaattactttgtttttgcttcttaatttcccctgtacttcttcttcacttcgggtaagtgtggctgtggccctctttgctcgttgtaaaaagtggtttcttactgatgcaccctttccctccttgcttcctgttacctctttccaccccacctttccacccacaccataggatttaccagctcttacccaacttttacaaatctagacgtgcttttctgaagcattcctccctgcaggtcgtttggactgggagactcttgtgcacgaaaatctgcccgggctaatggaaatggatcaggatgaccgtgtttggcccagagactcactcttccgatattttgagttgctagaaaagcttcagtataacctagaggaacgtaagaagttacaagagtttgcaggtatggagttagggcagtcatggggaccatgggaatatatatatagcgtttatagctgtggagaaggaggagggtgtccactattctggcatctcagcttctcaatttctgcctacaactaaaataggcagaaactaaaattcttggtttggtatgtcacattctgggaatgtgtcccacttttccctaactgagagagaacctagaaactctgcttctgtagcaggggacacccaaatcctatgaggtatgagagcttatttc

SEQ ID NO: 17166 - DNA, 1024 bp, Homo sapiens
ccacctcagatcatcaggcattagattctcctaagggtcacgcacatgcagttcacaatagggctcgccctcctgtgagaatctaatgccgcagctgatctgacaggaggtggagctcaggcggtaatgctcactcacccaccactcacttcctgctgcatggccgggttcctaacagaccatggactggtaccagtccgtagcctggggcttgggacccctgccctagatctaatagacaaatcaaaatagaatagcactaactattctatttggtaaaacagttaactgaatatgaaacatggtcactgtgccagaggataagtagattgccagactagaaattacctggcaagctcctggaaattttattttattaagcttattcttgtggtagaaagggaggagggattttgcagagggaaattatttgtgattaacagatttctttgaacagactaattcatatgataaacattaagactttttttaggcttaaaaaattttttttccaatcacaaagtgatctaaactgttagggctttaaaaaaatctgcttccacaactggatattggtaattctcttttgcattttaaacaccaattggcttattttaaaaatctcatattttgtttctaaataatgagaaagaaaaaaagatttgactcatttgcaagcatttgtcagaaaataacacaatgcaagtgtagataatccttaaaattaaaaactgagtatattgggaggctgaggtggcaggatcacttgaggccaggagattgaggcagcagtgagctatgatctcaccagtgcactgcagcctgggtgacagagcaagaccctgtctcaaaaataaaataaaacctaagtataatatcattacaattttttcccaaaggtgggcatattcctgaagattacaattttttacattgacttttaaagtactagagagggtttgatgtgctatataaagtttttggtcaaatgaatggaatttatagaatcagatgaacatcatct

SEQ ID NO: 17167 - DNA, 1057 bp, Homo sapiens
cttttctatagtccatttggcccatttagtatcacagagactacctcctcccacttcagagccacccagccccaaagctaggctgaccatgcaacttggctggcaccagggcaggcctggactatatatggcctggataaaggccaatggccttgtcactttacatcctggattttctgggacggtcttgattccccttaccctctgggattgttctctgccccctctgtcccttgccctctgagaggttggagcccttatccaggcctcagggaaagagctgcaggccaaggaagcattactttttatggctctaagtgcttctgactaaatccagtcccctgataacggtggcctctcagagctgctccttccctgcagttcagcctgatgtgaagcttggggaggtgaccttctccctgcaacacgcgaggcactgccaaggggctgctatgatgtgggatctgcagaaatcctttgttcctagttggctttccatctttgcctctctgtatctctccctgcctggctggtttctctgaagagatcagctggtttccactgaagaagtatttgccttcctgggccaccatggggaagagtctgattaagattcacaccagagtccgggtccagctccggctgactaatcactgctttcggcccctaagtgtgcgcatcctgaggatggggccccggctccagggtagggtcctgactgctgtgacccccgggcaagggaatcagctggagcatttccaaggtaaaaaaggctctcctgttttgctgtgccagttagcgcagatccttcccacggcacccatcccatctatcccaaaataacaggttcgatgaaatggcaggacaggtggtggcttttacagcagtgaaaacagtttctaatataggactaacctgatgtgggagggtcaccttacaggtgagatcttctgttaagggaggagaccaactgatatttactgagcaactgtatttgtcaggcattctactagaaatgcacatctaattggatgtggtggctcatgcctgtaatccc

SEQ ID NO: 17168 - DNA, 1025 bp, Homo sapiens
atggctctggcatgtgcaaggccagctttgcaggtgacgatgcccaccccgggccatcttccccttcattgtggggcgccccagacaccagggcgtgacggtgggcatgggtcagaaggactcctatgtgggcaacgaggtccagagcaagagaggcatcctgaccctgaagtaccccatcaagcaggacattgtcaccacctgggacgacatggagaagatctggcaccacaccttctacaacgagctgtgtgtggctgccaaggagcaccccatgctgctgaccaaggtccccctgagccccaaggccaaccacaagaagatgacccagatcatgttggagatcttcgacaggccagccatgtacgtggccatccaggccgtgctgtccctgtacacctctggcctaccactgacatcgtgatggactacgatgacggggtcacccacactgtgcccatctatgaagagtatgccctcccccatgccatcctgcgtgtgtgcctggctggtcaggacctgactgactacctcatgaaggtcctcacctagcacagctacatcttcaccgccacagccaagcgggaaattgtgcatgacatcaaggagaagctgtgctatgtcaccctggacttcgagcaggagatggccatggtggcctccagctcctccctggagatagctacaagctgcccgacggccaggtcatcatcatcggcaaaagcagttctgctgccctgaggcgctcttccagccttccttcctgggcatggaatcccgcggcatccatgaaactaccttcaactccatcatgaagtgtgatgtggacatcctcaaagacccgtatgccaacacagtgctatctggcggcaccaccaggtaccctggcatcgccgataggatgcagaagatcaccaccctggcgcccagcacaatgaagatcaagatcactgctcctcccaagcgcaagtactccgtgtggatcggcagctccatcctggcctggctgtccaccgtccagcaga

SEQ ID NO: 17169 - DNA, 1091 bp, Homo sapiens
catagagtagggtaaggaaaatggggactgctagagttggatgggtggttgtaatatcaagtatacgtatcaaatacggtagtcagtgtgggccttgttgaagtgagattgaacacttgaaggaagtaaaataatcatttctggcagaggaatcatagccaagggcataaataagattatagctgtagagtgtgacaaatagcaaggaggctattgtgtttggagtaaagtaggatgatgaagggagtaataggaggtgaggccagaaagttatagggacatttttaggactctgggttttactcttgagtgaaatagggaaccatcgcagggttttaacaacctacatctgagtgttttgtgatcattggaatgttaagaggagtgattgaaagtgacttacatttttaaaagcactaccctgactgctatgttgatgacagactgattaaggggcaagggtagaggcagggagactagctgggtgcaatctaggcccaagacgatggtggtggcttggaccagggtgattgatagtggtggaggtggtaagatgtggttagattctgaatacattttgaaggtagaactgataggattttctgacagattagatagatgtgtagtatgaaagagagagtaaagactccaggatgattccagggttttttatctgagcaactagaaggatggagttgccatcaactgaaatggggtaggctgtgggtggaccccatttggaacaaaagatcaagagttcagtcttctgctgtggtatgacttgggaattctttccttgtatcctgggactgagcacataagtaaagtgaggataataggaggtaggtctctcattgttagaaaagggagttacaagtatggaaaggggggagactagaattaagggaggagaccacccctcatattgtcttatgcccagtttctgcctccagagaaagaagaagtaaaaactaaaaggcagaaatgaaatccacaggcagacagccccgcgccgcaccctgggcctggtagttaaagatcgacccctgacctaataggttatgttatctatagattccagacattgtatg

SEQ ID NO: 17170 - DNA, 1002 bp, Homo sapiens
ggatttttttttctttttgagcagcaggtctcaacaatgaactgaaaatattctgtaaaccatgctgtaaacagatgtactgtcacccatgctttgttgtttcatttatagagcacaggcacaatatatttagcataattcttaaagatcctgggatttttagaatggtaaatgagcattgggcctcagtttaaagtcaccagctgcattatcctttaatctgagtcagcctgtcctttgaagctttgaagccagacgttgactttactccatctatgaaagtcctagatggcatcttcttccagtggaaggctgtttaatctacattgaaaatctgttgtagccaccttcataagtgatctcaggtagatcttctgggtaacttgctgcagcttctgtatcagcacttactacttcatcttgcacttttatgttatggagatggtgatatggtttgaatgtgtgtccctgcccagatctcatgttgaaagataatccccagtgctggaggtagggcctggtgggaagtgattggatctggtgggggtggcttctcatgaatggtttagcatcatccccctagtgctgttcttgggataagagttatcatgagatctggttgtttaaaagtgtgtagcaccttcccctcactcttttcctcgtgctccggccatgtgagatgccttgcttcccctttgccttccaccatgattgtaagtttcctgaggcctcccaagaaatagaagccgctgtatttcctttatagcctgcagaactgagtcaattaaacctcttttctttgtaaattacccactctcagatatttcttttttcttttttttttttttttttttttgagatggagtttcactctttttgcccaggctggagtgcaatggcgtgatctcggctcactgcagcctccacctaccgggttcaagtgattctcctgcctcagcatcccgagtagctgggattacaggcacatgccaccatgcccgg

SEQ ID NO: 17171 - DNA, 1055 bp, Homo sapiens
tagggaagagtagcctctgtgctctgtctaatatactcaggttccaaaaagatgcagtagagatccacagtgtttactcctgggcagaattcttatttgaatttctgtctccattcttacttttataagctgagttggacagccaaacagggaactttaagggtaataaatattaccttttccccttaagcctgggacctggagcaagctcttagcagcctgttctctgggcctttcctcttagtacctagaagtacacagcaccccaaagcccccaggaaacctatgcctcaaaaaaactccataaaagtggatttttttttcaaacacagtctcactctgtcacttaggctagagtgcagtggcacaatcacggctcaccgcagcctcgacttcccaggctcaagcaattctcccacctcagccagctgagtagctgggactacaggtgtgtgccaccatgcctagctaattttttgtattttgtagaggcagagtctctccatgttgcccatgctggtctcacactcctgggatcaagcaatcatcctgcctcagcctcccaaagtgctgggattagaggcatgagccactgcacccagccacatgttactttaaaaatgtacagaaagacaaatgtcttttgcatctttaagatttctttttcactcctacaaaggttccccccagccatgtttagtgataactgcattgagcaagtcttattacctctctgactcattatcagtcatatgagctactgtgacccaacccttagaaagctgggcaaagaagagatagtgtgagctgaggcaataaattagtgatttgttcatccattctttattcatttccttatttttatttgttcaacatttattatttactacttggtaggaactaagataagatgatgggacagacatggttcctgtcgtcgggaagctaattttttgttattgttgttttttgtttttgagacggagtctcctctgtcacccaggctggagtgcagtggtgcaatctcggctcactgcaagctccgcctcccgggt

SEQ ID NO: 17172 - DNA, 1034 bp, Homo sapiens
aggagccattccataaaggttacaaacttgttttaggagtgaagtggggacttttttggcttggtgccaaaatggaactggcattgttttttcaattcagcctgcctggtatttctatcatagctttgctagttgatcagtttcctctcactatggcctcttattcattccttcatttggcaaatatttgttgaatacctacttatgtcaggcactgttaaagcagtggatgtagtggtaaataaaatagaaatggtttagtctatttctttgagccttcctcagagaaaatgtcacttctttgtcaatgtctttacagcctttatcctgagaccaggagagaaaaattacctaaatatccagtctagtttaaagcttaaactgatccagtaattcagacagtcccttggggtagtgtcataaatgatggccataggtgtctcctggtctcaggggcaaggtccctcatccactttagtgctgcttgttctgctgtcatttagggctgaaatatgtggctgtaggctgcttgctcagaacccagtagcactctggctacctgggcctccccctgacttctggttgcacccccctgagcctctggtgtgtctgccatccagttcatcctcttataatctctcagtatctgtgccttatgggaactatgggggctcaggaaacctgaacctcagacacttctctaccagacctgctacaacgctgagtcactgtttctgtgcaccatgttgtggtggaggctgcctgagagttgatcttctctagactcccaaacatgaagaaggagtgggcacttggcctttgattttatcctcacttatttaacaaactgatttatctccaggctgaggaaatcagtgttgctttgctgcacttccatctcgcatagtctggaagtctggaaggactttttcctacattatatccttctcttgccatagacctagcatggcagttatagttggatggaatatctcctctacactcccttttgtatgggcatgttggttgatata

SEQ ID NO: 17173 - DNA, 1050 bp, Homo sapiens
tgcttagaaaaattatagtgaccattgctattcttggaaaagtaattacaccaacattgtattttaattccagagccaaaaaaatgtgtgtcagagtcagctagcaaacaccaggaaagcggctgtgaaggaagattgaaatttaaattcatattagcctcttgagccagtatttttgtgcatggcccattgtacttttctatttgccttgagttggcactggacattgaataaaccttgaagacataaatgaaaatgtgtatgggtatggaaatgtgtaaggatatggaagtgtccttggtgcaataaagcgcataatgcattttctgtcatttgtcatcaaaattattttttcactatgtgtggcttgtctacttccattcttgctgtgaggtattagcacatttgtagctatttattaattcccctttttattttctcttgagttctgtcctacttgttccttattcagggttaaatttaaaatgttcacatctttttctttggggaatatttaagaaaggaagactacgacatcactccatcttcttcaatgaaaggagaacttcattcattcattcaggaattatttgctgagtatgtactctgtccagggtattatgctaggtgttgggtgtttctaaattaatcaaggagatgactgcagagctgatttctaaggtactgtttaaagtaacatttcagtgctgtgcataatgatagcagcaaagagactatacaactgtaggtcagaagaaacagaataattccactgaactatctgtgacagagtgacaaatgacaacagatcttgttcaagccctgatcatgagctgaaggaataactgcatttcctattagtcagatagtgctttgacctgatattaaagtcagctgttctcatatttaggatacaacagcattgtattcacttatcaaagagaatgggtgacaaatactacatttctcctttctgctcttctccttctgccccttccttacactctgaatgccctttctaaccactcctatcattttgtttctcctcct

SEQ ID NO: 17174 - DNA, 1038 bp, Homo sapiens
ctcacagttctgagtggtgtcatgctgcccttccatttggaaagccagattccatgccctggtgaaggatttcatccaagtttggaagtggtaggagaatccataagctctgggtatatagttaatttgtagtcaacagggaagatttcctcctccctcctgcaatgtccctggttgtcctcagggatgatgagacaatggtgtggagggaaactgaggaggtgtttaagggtcaatgagataatggtgtggaggagaaccaaggagaggcgtctgacacacttgccaagagagtgcccttcctagcctaggtttctgaagtcatcctttatgagcatgatgaccccttaactagtgtatttgaaggaattgcttaaattgacagtcatgttcttttttctaatgagacattttttcacactgctatggctgacactctttagactattgaaacatgtaactaaaactgtcattaggaaacttgttctcctggccatctctcttttctagaaaaaagaaaacacctggaaaggcttttcagaattataattgcttggtacctgggtttctgtgtaggttgccccacatgcagagatttcctcagtcaattcaattcttattcttctttgcagatgaactgactagcctatattgagatttctgctgctctggctatttagagtttattttcactgtatttgccctactctctttcatttaaatattacttcagattttttctatcctggtttgtttgtatgctagttttcctcctgggtatctttaatttttgggaatccccccactaccttgaattttaaatgcttgttgactacctaaatataagctggagtatttgttctaggccaagttgtcagaaagaatttggacagtggacaaagaagtaattaaagctttaagttcttcagtgaataactgcaaatgaaaatgttaaagttacttgtttggaaaggtttgaagatgagagagaatcatatgttgattaatgaataagggaggaggttatttcaatttggg

SEQ ID NO: 17175 - DNA, 1032 bp, Homo sapiens
gttacctcaaaattcattagccatactgctggtagagtaatttttctaaaatgcaaaattaaccattgcttccctattttatattttcttacaactctctatgcctataagataatgcccagacttggtttgagatacccctctttggcttctcttgccctatgtggctccttatcaagaccagtattggcatcctaaccacccacagggctgccatagtatcaggtcatttgctttctcttctgttttcttacttaatttttctactttgacctatgagtcgttgccttatcttcttgaaaacttagctatgtatttttaaaaaatgtttgctatattttattctgaagtttctttgagttttgttggcagaggctttttaggttatctggtctaccctattgacagaaataagtcttttttatatttcttgtctaatctcctgtctttccactttgcttctcaaataggagttagggctagaagtgagttcagtgtatctttatattcctaggctctagaacatagtgcttatataatatctatttaatgaatattctccaaaccacattgtttatttggaatacctgttcaccttttaaaattcacaacaaactgattgttgcaattgccaaataagaatctatataaatgacagctgctgagtgaagtttgtacgtaggggaacatttcctggtagccatattagatttccataggtaaatctcttggtgctcagatcacagtcatttgtgtgtaatgatatctggatgtggtttataccacacccccagattgcttccccagattgtatatcaaagtcacgatcttttggcagaattataattgcccatggggaatggtggcctctgagtttcatagctcagggatgtattgttggagctgctgtcagtttttcactagagatataacaattgaagtgtcttacatttctatagttctttttaaaaaacaaatttgagatacaacacataccatttaaagtgtacaatttaaatttaaagtgtacaa

SEQ ID NO: 17176 - DNA, 1056 bp, Homo sapiens
tcatcctcccacctcagcctcccaaatacctgggactacaggtgcatgccaccatgcccggccaatttttgtattttttgtagagacagggttttgccatgctatccaggctggtctccaactcttgagctcaagtgattctcccatgtggactcccaaagtgctgggattacaggcggggaccaccatacccagccctgaaaaactttttaaaggacaagcagacatgcctgtttatctcctggaaactctggtactgacaaggagtggtcagttccacattacacatatacttaaaaccatcgttaatagttttatgtggtgtttattttcttgttctatatataaaaatggactcacaaagatttaaaagcatgtctgaggttataaagtacattcatgctgtagagtgggaaaagggagggcaaacaaatgtgagaaacatggatagatctggagacacagagtcaccatctttctgtcccctcctgtgctgataaattctttctattatatcagtctgctggccaacttttattttctcttgaaacctgagtttttaatgtaagtctgtaaaatagagaataaatatgaaagtttatcagcaatattaagaatccatttatattatacattaaggagttccttgaagaataagccactttgactgggtcaggagaaaaccactactgagtgaaagagcttaacagtttaggggcttagggtcttacggctttgtagtcagactgaacagggttcagatcccatctctgacatcactggctgtgtgcctttgggcgagctagttaacctttctaaatctcagcttcctcctttgtaaaatgaagatactagtagtttttgtctcccagagttattgtgacaattaaaggagagcacatatataaagtacatcatagtgcctggcatatggtatggaatgaataactgatagcctccagtattgttttctctcctcttaacttcagtcctgagtacctctctgtacacccaaggttttgggggaaggaagaagagaaaacatgaggagggata

SEQ ID NO: 17177 - DNA, 1024 bp, Homo sapiens
atcaggctatatatgtaaaatgtaaataatatcataaacatatgccaagtgctaaataagcttgatttcataatgcttgtttcacaaacaggttaaaaaccaccagtcaggtatactgtaacacttaggtggatttaacattttcttctcctgaagaaaaatacttaagtatttcctaaagatttcattgagagagaaaattgtgtttgacaaattaaatagaataccattattaatagcttacagttgctataaattgatctcaaatgcttggtacttgaataatggaacaggttctgtgatttatagtgtaacttcattaacaggtgtttccatagttacagtgctctttgtgcagggtccccaagctggttgtgttaggttgtcttgaattgcccattttctcagattgggtatttgcaggctttagtaatggaaagaatttagttgtcatggtaaggattcatagtagtcttttaaaaaaattcaaaacatgggacatagagtgattaaaatacagcactttctttggaaataagtactataagacttaatttaaacatgcacattgtcagaagaaaattgcagttattcgcccaggcacagtggctcacgcctataatcccagcactttgggagggtgaggcgggcggatcacctgaggtcagcagtttgagaccagcctggccaatacagtaaaaccccatctctactaaaaatataaaaattagccaggcatggtggtgggcacctgtaatcccagctactcgaaaggctgaggtgggagaattactggaatccagaaggtagaggttgtagtgagccgagatcacgccattgctcttctccagcccagacaagagtgaaagtatctcaaaaaaaaaaaaaaagtagttattcatctctttggtaatttagacagggcttccataacattttatctttaattttaaaatattgagctagctattgtggctaaatcttgtatattctgaaatatagttacaaatcaattgggacatct

SEQ ID NO: 17178 - DNA, 1230 bp, Homo sapiens
ggtcaagctggtctcaatctcccgacctcaagtgatccacccacctcagcctcccaaagtattgggattataggcgtgagccgccgcacccggccagtttactcttatgtagtaagagtaggtcagccttcctggagtctgttaaggatggaagtgggctttcaaggccaggccatatccagtcaggcatgcctttgagtgcagcatacagttggaaggactagggcaagaatggggagaaggtataggagcagttcctttatcttagtgggtttccagttggccatgccaggagggaataaagtaactgaactctggaaaagctacagaatcctgctgcagggggtacatttgaggagaagccagaacattaaatgaaggtaagaaaatgcaagaaagaagaagcagcacaggtgaatcagagctccttcagcaacatctgacaggggctctcttttgggcatgaagctcagggttcatttttaaagtcatgctaaacagaaactgtgaattcaagccaggcgtgttggctcacacctgtaatcccattactttgggaggccaaggtgggaggattgctgtaacccaggagtttgagaccaccctgggtaacatagtgagactctaactctacaaaaaatttttaaaaattagccaagtgtcgtggtgcatgtctgtggtcccagctactcgggaaactgaggcaggaggctctcttgagcccaggagattgagggtgcagtgaaccacagttgtaccactgcactgcagcctgggcaacagagcaagaccctgactcaaaaaaaaaaaaaagaaagaaattgtgaatcccctggaggtgcttgttagatgaatggagtccaagtcctgtctcatagagattctgatcaggtctcagatggactcgtggaatctgtatgttttcaaatgctctagatgagtcttatgcttgggtaattttgagaaatactctgctgctagattatattaatcctgttgggtgggactctatgtcggctggctccctaggggtccagtgagtaatgcatcgtgaatcactggatcatggtcatgttatatccatggatataataattttgtcaaagctttctagagaggccatttcaatgtgtccctcaatgaattttcctaaaactatctatcagcacaattgaaatttgtggatgaacttggtctgattaaagagatgaaaaatggcttttgaactaa

SEQ ID NO: 17179 - DNA, 1030 bp, Homo sapiens
aattaggcaataaaacatgtctatgttataattgtaactgaaaaatcaggtatgcataggaataggtactgtaaggaaatatgaaaaaattggaaacagctgatgctttcttagaggaaataaagccagtggggcttgttttgttcatagtaggcttgttttgactcctagtttctgaaatttgcctttccttttctccatttgtgaaaacttagaaaaacatttaactccaggcttctggcactactcttgttttttataagttgtaaaaaattattgagggtggttgtatgaaccacacatctttacattttttcagtactctgaggtatagtttgtatagatttggggattcaaacttttttagaaatgagagttcattcctgtcctgaacttgtagcctcctagcaggtccgtctcctttcatgcttatccctcaatagtctcttttctacagtagcgagagtaacactttcaaagtatgagtcagatctttccacctatttcttgttgctctttccttgttccctccattctagccctaatcttcttgctgtttctcacataggcatcttgccaactcagggcctttgcatttgctatcgcctcagcttgcagggtctttctcccatgggttgcaccctcatttaattcaggtctgcattcaaatgccaccttctcagaaaggctatcactgactagctaaagtacacctctcggggctgggcgcgttggctcgtgcctgtaatcccagcactttgagaggccgaggagggtggatcatttgaggtcgggagtacaagaccagcctggccaacatggtgaaaccctgtctctactaaaaatacagaaattagccagacgatagtggcgcgcgcctgtaatcccagctactcgggaggttgaggcaggagaatctcttgagcctgggaggcggaggttgcagtgagctgagatcatgccactgcactccagtctgggtgacagagcgagaccctgtctcaaaagaataaaaataaaatatacctct

SEQ ID NO: 17180 - DNA, 1061 bp, Homo sapiens
aggttgtgtcaccagaagtctaataacagcacttggaaagtgatgctcacactctaactctgcagcttccgaattacaaggagaattcagttctgggtacagagtgcccttcaggagaacaagtaggacagtttaaagcctagaaattgtatcaagtaagaaagtcaaaggaatcacaatgttataatttctgtggaatgtcctgcagttttgcttttcacatttagggttcttttttcttccatcaattttattttgttatatggtagtgatctaatttgccttatgcatagctaatcctagctccttttattgagtggtctgatttccccctgatttgtagtgccaccattgtctagaaccaaatttctgtgtatgtacttgactgtttctgaattatctgtcctgtccattgatctgtttgtctacccctgggctagtatcacactcttttaattattttgtctttttctttcaaattgtcttggctatttattcttctatgtcaactttagaatgaacttgtcaacttctgtaaaatttccttgtagaatattgattttttttggcataatttgaagagaattgatgtggttatccatcaagtattcatgtttgtgaacataatatatttctccattcatgttatttttggaggtttttaatataattgtgtactttcatctgacagttttacaaattttgtaggattttttccacagttaccctgtagtgtttattgctattgtaattggttttttttaaaaaattacattttctaagttggttattacggtatgtaagagaacactgtcagtttttacaagttgatcttatatccagcaaccctgctgaatcctctttattttaattgtaaattcttttggattttttttttttttttttttttttgagacagtctcactctgtcacccaggctagagtgcaatgatgtgatcttggatcattgcagcctcgatctcctgggcccaagcgaccctcctacctcagcctcttgagtagctgggaccacaggcacgtgccactgtacccagctaaat

SEQ ID NO: 17181 - DNA, 1105 bp, Homo sapiens
caatctcggctcactgcaagctccgcctctcgggttcacgctgttctgctgcctcagcctcccgagtagctgggactataggcgcccgccaccacgcctgctaatttttttgtatttttagtagagacggggtttcactgtgttagccaggatggtctcgatctcctgatctcgtgatccgaccgtcttggcctcccaaagtgctgggattacaggcgtgagccaccgcgcccagccttgttttttttttttttttttttttgagacggagtttcgctctcgttgcccatgctggagtacagtggcccgatcttggctcaccgcaacctctgcctcccaggttcaagcaattctcctgcctcagcttcccaagtagctggtattacaggcatgcgccaccacgcctggctaattttgtatttttagtagagtcggagtttctccatgttggtcaggctggtctcaaactcctgacctcaggtgatctgcctgccttggcctcccaaagtgctgggatcacaggcgtgagtcaccgcgcccggccgacatgggagttttaagacaaagagaacattaaattttcagcctggaggcaggaaaaaacatgactttagagccaatagaaatacaaaattggcaaattataatgaaagaaagctagcaaagggaggaaatgcagtgttaggcaaagtaatgtaaatattaatataaagacaaagagttaaataagccaggtgtggtggcgtggacctgtagtcccatccactggggaaaccgatgtgggagaattgcttgagcttaggagtttgagaccagcctgggcaaaatagtgagacctgatctgtcttaaaaaaaaaaaaaaaaaaggcctggcacggtggctcacacctgtaatcccagcactttgggaggctgaggcgagtggatcacaaggtcaggagtttgagaccagcctgaccaacatggtgaaaaccccatctgtactaaaaatacaaaaattagccgagtgtggtgacacacgcctgtaatcccagcttctcaggaggctgaggcaggagaatcgcttgaacctgggaagtggaggttgcagtgagccaagattgtg

SEQ ID NO: 17182 - DNA, 1034 bp, Homo sapiens
ttttttttttgagatagggtctcactttgtcacccaggctagagtgcagtggtgtgatcttggctcactgcaacctctacctcccgggtttaaaccattctcctgcctcagcctcccgagtagctgggattacagctgctcaccaccacgcccagctaatttttgtatttttagtagagatggggtttgccacattgaccaggctgttcttgaactcctgacctcaagtgatccaccatcctcagcctcccaaattgctagggttacaggcatgagccatcgcacctggcgtacatgagaattttctaagtgtaaagataacgagagaaataaaaaagaaaaagatccaaagatataccacataaaaattaaaaatctctttatgtcagaaacatcaaagccaatagctagaaagtgagtaaaaatttaggagaaaaatttgcagccaatatgccaaagggttactatccttaataataatcaccaccaccatcatcatcatccattatataaacactaaaaagaactctagctcgatggagagaatgccacaaagtggacaattaatacaatgaggaattacaattagctaataaacatgtgaaaaatgtttatttcaacctcactagtaagcaaaaactgtaagttaaataagttccaaatgtattatgtaaattagcaggaactaaaaaataatgataagaatatactgagtacaagtttaagtcagtacagtctttattaaaagatttgcaagttaactcctaggaatctcccctaaggaaatgatttaaaatagaagaaaataatttttataccaagatgttcattagaaaattatttataatagtgaaaaaaattcttttacatattgaaacatgtatgttaattatacctcttttaatactcagaggctgagtgggaaatattaatttgatagatttattttatttttatttttttgaggcagggtctcactctgtcgcccaggctggagtacagtggcatatggctcactgcagcctcagcctccc

SEQ ID NO: 17183 - DNA, 2069 bp, Homo sapiens
tgggtggatcacgaggtcagatcgagaccatcctggctaacatgatgaaacctcgtctctactaaaaatacaaaaaattagccaagcatggtggcatgtgcctgtagtcccacctacttgggaggctgaggcaggagatttgcttgaacctgtgaggtgggggttgcagtgagccgagaccgcaccactgcactccagcctgggtgacagagcgagactccgtctcagaaaaaaaaaaaaaaaaaaaaagaaaagcaatgtagggccaggtgtggtggctcacgcctgtaatcccaggactttgggaggccaaggtgggcagatcacatgaggtcaggcattcaagaccagcctggccaacaagatgaaaccctgtctttactaaaaatataaaacttagccaggcatggtggcgcacacctgtaatcccagctactcgggaggctgaggcaggaaaattgcttgaacctgggagatggaggttgcagtgagccgagatcgcaccactagacttcagcctgggcgacagagtgagactccgtttcaaaaaaaaaaaaaagcaaatgtaaagttacctatagcttgagcaaaataggtgaaaaaatgaacccatcatgttttctatttttgagagttatgatatggtgatattatttgttttgttttgttttgagacacggtcttgccctgttgctgaggctggagtgcagtggcatgatcttggcccactttaccctcgaactcctgggctcaagcagtcctgtctcagcctccccagtatctgggactacaggtgcatgccaccaagcccagctaatttttaaaattttcttttgtagagacagagtcctgctatgttgaccaggctggtttcaaactcctggactcaagtaatcctcccacgtcaacatcccaaagtgctgggattataagtgtgagccaccgtgcccagcttatgatgactttaaaaggtggttagttagtggtgagggttgcacaactctgggaacatactaaaaaccatttaattgtatactataaaatggtgaattttatggtatgtgaattaaatttcagtgctaatgtaaatttcctggttttgataacatactatagttatgtaagattttaccactgggggaaggtgggtgaagggcacatgggacatctccttactattttttgcaattttgtgtatctataactattgcataataaaaaaatgtaaaaaggttaggatgggcacagtagctcatgcctccaacactttgggaggctgaggcgggaagattgcttgagtccaggagtttgagaccagcctgggcaacatagtgagaccgctgtctctaccaaaaataataaaaaaaaaaattaggtgtggtggcatgctgctgtagttccagctacttgggaggctaaggtggaataattgctcgagccccagagttggaggctgcagtgagttgtcatcagaccactgtactctagcctgggcaacagaccaagatctggtcttaaaaataaaaaaagtgattaaattagtttttctaaccaaatgtgtttatgattaagtttgggtttatggtttagaattgctatagaatgttttctcacttgattagagatccagttactttttaaaattttatgtcaatattttattctcaagtatcatatgtcaaaacctatctacttataaataatcctatataattatcaattataatctaataaaaagataaaagttaaggatttagaaatggtatcttggcagtatttttctttttttgagatggagtctcactctgtcatccaggctggagtgcagtagcaggatctcagctcactgcaacttctgcctcccaggttcaagcgattctcctgcctcagcctcctgagtagctgggattaaaggtgcccaccaccacgcctggctaatttttgtatttttagtggagacagggtttcaccatgttggccaggttggtctcgaactcctgacctcaagtgatccgcccatgttggcctcccaaagtgctgggaatacaggtgtgagctgccgcgcctgg

SEQ ID NO: 17184 - DNA, 1271 bp, Homo sapiens
agagtctcactctgtcgcccaagctggagttcagtggtatgatgtcggctcattgcaacctctgcctcctgggttcaagcaattcttgcgtctcagcctcctgagtagctgggattacaggcatgcaccaccacgctcagctaatttttgtatttttagtacagaaggggtttcaccatgttggctaggctggtttctaaactcctgaccttaagcaatccacccgcctcagcctcccaaagtgctaggattacaagtgtgagccaccatgcctggccttgcctctagaagactctaaaggccccaaagttattatggaattggaggtttgtaggtcagaaggactccatggattggcaatgatgcctggaatgttataaggcatattaagcctgcaatttctcagtatacacttatctgtctaacagaatagcccctcagctcttcgggaggccatttggaagttatactatcaaaagaaatttggctgttgagcagtgaaactctgataaaaacataaggaagtcccagtactggaatgcaacttcttcaaactatgcccagcttcagattctagtacatgtgaaataggttttaaaaaaaccaggagaggagtttgcttggtgtagctacagaacataaaacactgaaccaactaagcagcacagctaatctgaaaacttaatactttctttgcttacttttaaatttatcttaaataattttaaaaagtttgtttaaatgaatagccacattacagactgtacatctataaactgttttctaattttatggtaaggagatattacccatattctaatttgtaatattgggtatactggtcagtctgattatttttaaagagacagatataatgatatactatcttgctgcaaatgagatctttcagtgtgtcattataaaatattatggactatttttactaatgatttatctcacataagctactttctggctgaaagacaatgacaaaagaagtggaagaattttacttttttttcactttctgaattccacaattttatttcttgccatctttcctgaacaagatagcccttctgttcatctcttattatctcctttgctttatgctaatttatactattagcctctcatttaatagagtcttttatcaccatttctaattgccatcactgcttagttatacctttgctggtaagattctttgtgtgatggtcacaccttctcttggtagtgagaggtattaaataggtgcattcatagtgtat

SEQ ID NO: 17185 - DNA, 1024 bp, Homo sapiens
ttctaatagaaatatgtgttgaaaaaatacctattttcaagtcagaaatgttaatcagttttttgtgattactgaaaggtgagctactctagaaatgaatttgattttactgagagacatattaaaataatggattaagcagccaggttaaattgtgcagttaaataagatactaccataaatagaatgtgtgtgcaggggcatttccatagtataaccaatatttggatttgattgtggctcaaccacttagtagctgtggtagctagggtgagagagggagggagagaacaaatgtattgagccctgtgcttgccaggcactctagagtttataatagattaagagaaagctataaatcataaaccctaagaattatcacatctagttcgatgccttacatagttttaattcaataaatatttgttctaatttgtttgtgctacatgattgctatgttaacttcacttcaaattttcttattcctgaaaacaataaacagttctaacacctgtataactctttatagttttaatccattccattacaaaccgttttgctgtgtgacccctctcccgggtgagaagtacagtatgttagtgtggtatttatgaggtctttgaggtatttatgaagtcaatttctgcaattatcctttgttgaattagtggagtgccagttggtatagctcctatgactttttggtttgtctcttaggatttcaaaactttcaggtccccctgcctccatctctgcaagtttagagggcttagatcaaatgaatactgtgtgatgcagtacttcatggagtgttagagttctgccagaattaggattttggatgtagggatcaccatagctacagaagtttccttcacacttttccccttagtaccccataaaagaggagacagacctcctcacagcctcattttctcacctcttgctccaagaggaagtggaccatgcttcccatcctgtttctagttatatctattttaagttgaattcacctttgatagcc

SEQ ID NO: 17186 - DNA, 1749 bp, Homo sapiens
aaaaaaatagtaggtgagctgctgccaaaaaggagcgactagaaaggttttgtacttgcttctgtagaaggggaatttctcttttgtgctaatgatgtggaaagaaaaaacaaaaagactgtaaaatagcgatgccctaaacataatggagaaaagcgggagaaaccaagctttaggactgaaaggggtggtgccagtctcgtttcctaggttactgctttcacgaaccgaaagaatttcagaatgtggcgagctccaatttttaaacgcactgctgcttttgcctcagctgggcttccaaacagaaagtccagaagctgccctcgatgaatcgtaactaatgcactgttactgccagcgaacacattccgggttagaaataatagctctaacaaattgttttgcgcgcctagtctcatattatcttctcaacaacgcaattttacagatgaagaatccaagacacatagatgtttgggaactttctcttatctggttttaaataggcttgaatccagatcattgaactctaaacaccagtgctgtctgcatatagcagattgtttatatgttaagtgtgaatttcagtagtgcaaaaaaaaaaacaaaacctgcctcttttttttttttgcataattattttgtccgtgcatagagaaataaaaaggtactggctctaacctgtttaaggagaggatggggttgccttatttttcagacctcaggttgaagaacttccatgagtataaaacctcaagaaggaaaaaccttggtattttttattcgaatcagagtgatatgattttgaggcaggaagacttgtcatcttaattattctgtgcttcctatcctcaaaaattatttccctaagtcccgtagtagcgtagaattattgcatcttcaaagaacaatgattactctctcagatgcagtacagaaaaccaccaccaaaattattaatacttggttcacatcagaagtgagctctggcttcataagatctaacaaatcctctccactctcagatgacaagccgactttggcaaaaggaagcaaagcaaaaatgagaaatcattaactataaagagcctttccatctctgctttcctcaactcatattggccttgctctgctcaaccagcaatcgaaaattattctaggccgggcgcggtggctcacccctgtagcctcagctactcgggaggctgaggcaggagaatcacttgaatcggtgaggcagaggttgcagtgagccgagatcgtgccattgcaccccaccttgggcaacagagtgagactccgtctgaagagaaaaaaaaattattctataaagttatgttaactacttaagatttactgttcccacgagtgttttcatttttacataggcaaatctaaaagtataaatattgtacaaaacacatacacatacatttcctcaacagatgtttaatagaactattgggtaccattattccattttacaggtgcagaggtaacttgccgaaagtcatttatgtagtaaatggccgagatgaccaatcctctttccactcttccccagaggatttttttttccttttttttttttttttttttttttttttttgagacggagtctcgctctgtcgcccaggctggagtgcagtggcgcgatctcggctcactgcaagctccgcctcccgggttcacgccattctcctgcctcagcctcccgagtagctgggactacaggcgcccgctaccacg

SEQ ID NO: 17187 - DNA, 1050 bp, Homo sapiens
tgtaatcccggcactgtgggaggccaaagcgggaggatcgcttgagcccaggagttcgagaccaacctggccaacatggtgagaccccatctttacaaaaaaatatatatatccaggcatagtggtgtgcacctgtggtcctgtggtcccagctactcaggaagctgaggcagttgaggctgcagtgagccacgttctggccactacactccagcctgggcatcaaagtgacaagaccaaaaaaaaaaaaaaatgtggattggaaggaggcaagaaagaagtcaggaaaagggtggaatgtaagtccctaaggacacaatcttactcacaattgtatctccaacatttggcataatgcctaatacgtaagtattttatgaattaattaaacgagaacacaagcctaaattaaggcaatggcaatggagaagaagaaaccaacttgagaaatatttaaaggtcattgtcaatggaacttagtgactttaatggttaattttatctatcaacttggctaggcgatgctacccatgttactcagtttttggtcaaacactagtctagttgttgctatgaattgtatttgttagatgtgattaacatttaaatcagcagactttgattaaagtacattaccctctataatgagggtgggccgcatccggtcagttcaaattaaaacgagacccttaagaagaagcaattcagcctccagactgcagcgtcaaatctccctgggtctccaggctgtttgtctgccctgcagatttcagacttgccagctcccagaataatgtgagccaattccttaaaataaatctctttctgcatatacacatcctattgattctgtttctctggagaacccgtactaatatagtgtctgactagatatgaaggaggaggggaagggagaaatagatagacgatgcctttggatattgagtgacacttatctagttgcttaagtcaaaaacctgaaaactggttaggcacgcctattacgggctcacgcctgtaatcccagcacttagggaggctgaggcaggc

SEQ ID NO: 17188 - DNA, 1047 bp, Homo sapiens
aaattttataccagcaagtgattcttaaaggagactttaattacttggaagaatttaagcagcaaaggttattaaagtccagtatatttgaagagatttccaaaaagtaagtattaaaagttgactgtaaacattgctccttgcctctgctttgaggtgagacaagtgtaagaattttatggctaagtacaccatgcctttagattacctctacttaaaatggcaaagcagtatcaagaatccttagaaggaagtcttttaacagatttatgcaaagagatcaacaagaacagtttgctcatagtgctttgtactttaaaatgggaggatagctactcagtgccaaaaacctaaaacactggccaggcccagtggctcatgcctgtaatcccagcactatgggaggccgaggcgggaggatcacttgaggtcaggagtttgagaccagccttgccaacatggtgaaaccctgtctctactaaaaatacaaaaattagctgggtgtggtagctggcacctgtagtcccagctactcgggaggctgaggcaggagaatcacttgaacctggggacagaggctgcagtaagctgagatcgtgccactatactccagcctggcaacagagtgtgactcttgtctcaaaaaaagaaacgaaaaacactaaaacatcagaggtgccttttggagtactaaacttactctataaggtaagcattaacatactcatttttaaagaaatattttatcaagcacccctaatactagtctgagataacccagactccagcaccctctcctctataggtaatagtaagtggtacttcagagctgacagccctcactcaaaatacagtatcctaaggtgggcacagtggtgcacacttgtagtcctagttactcgggaggctgcaagagaagcagctgagcccaggagttcacactctgaaaaaccactgtactccagcctgggcaacacagtgagacctccatcttttatttaagagagaaaaaaaagggcagccacagtgactcacgcctgtaatccc

SEQ ID NO: 17189 - DNA, 1027 bp, Homo sapiens
cttcatcagcacacagggccttaagccagatactgtggctgaactcgtggcagaagaggtgacacgggagctgcttacttcatcacagggaacaggtgccctaccccccggggattcccaacctctctgacagcattctctagttcccagtgttaaggatttggatgttgtgcttatatacatcctgtatgtggttctctcaagtttctggattgcagtaatgtattttgtttaaataaaacaaaatacatgctttattttttacaaaatacatgtacaaaatacatgctgttgctttttattgttttatgattacactgggagtagctgtggctttctgagctaaagaactgtcctggccgggcgcggtggctcacgcctgtaatcccagcactttgggaggccaaggctggcagatcacgaggtcaggagatagagaccatcctggctaacacagtgaaacccgcctctactaaaaatacaaaaaagtagccgggcgtgttggcgggcacctgtagtcccagctactcaggaggctgaggcaggagaatcgtttgaacctgggaggctgaggttgcagtgagccaagatcaccccactgcactccagcctggatgacagagcaagactccatctcaaaaaaaaaaaaaaaaaaaaaaaagaactcctgtcctataaaatgaccaataggccaagggtttcaagctcagcaagcggagagctgcagagctccataagcattacctcctggtgcctaagcctgggcagagtgggcctctcttagataaaaccagcacctgtcttcacacctctctgtacaggacataagcagatgttcaacccaacagaggaaagccagacatttcttcagctgaccactctgtgtcaagaccgcacattggtaggcatgaagttgttggataagatttcctccgttccccatggggaactgtcttgcagtaagttattgacctttttcttacatattttggccctaaacaggtctcaaaaggtctcccagtctctc

SEQ ID NO: 17190 - DNA, 1066 bp, Homo sapiens
tcaactcaacgtaaggtttataattctataaaggagccgggtgcagtggctcatgcctgtaatcccaacactttgggaggccaaggtgggcgggtcactgagttcaagacctagccaacatagtgaaaccccatctctactaaaaatataacaattagccaggcatggtggcacgtgcctatagtcccagctactctggaggccgaggtaggagaatggcttgaacctgggaggcgaaagttgcagtaagctgagatcgcaccattgcactctagcctgggcaacagagcgagaccccgtctcaaaaaaataataactctataaaggcacaaactccctcttactctaatgcagagacttcttagggtattgactggtgctacttaaaagtgtggtcagcacttgtatactgcttgttgctggaacgtggtgagattagtatgcaccaaaatatatatctgctgtgtccctaagtacactgtttagttcagtaggggtttttttgtagcaagactttgaagaaggaagcagtattctggatttatactgacagaagtgtcttaccttgttttagaccagcactttgagtagcactggtataaatgataaagtggattatgtaaaaacatagttttactgggaaagtacaggtcacagatgcccctgtgtcttgttttttcccaggcaaaacaaacatagtttcactacgtaaagtagtttggatcagcttgaaacacaagtggtttcatgttgctctttgttctgttttcaagtggactgatttaatttttttagtggttattttaggaaaagtattccttctttaatagatcacaaaatcttccttagttttacatcaaagctactctattttgggccatccaaatcctgactttttttgttctgtttttttcctgtatttttcccacgatccgtttatagactttgctaaacatttggcctagaaaaattccaaacaaccactacttgctgctgccagatcttttctgattgacttcaccttggtccgctattttttctttgttgttcatgttgttgctcatca

SEQ ID NO: 17191 - DNA, 1067 bp, Homo sapiens
ccatgatgtttctataaactccatatacaggtatatattttctttactcctttggtatatatgatgtaacagtaactttgtaaaaagtaatatttacatgcagatttctattcttgttcagtaggtctatttaaattattctgatgtagcatgatgattttgtttggatatcttggtgaatttctcagtgcttagagcatctagcttcaagggttaaccactgttgctatactgggtaatggctcccatcaaaaaccaaaaaatggaaataacttgatttaggtttttaaaataataaagatagcttgagtctgtcgttgctacctttaaatactacagtggtgcagaaaattttattagaaatcagcaaaaaatgtgtctgagaacatatagagtaagaactggcagcattaatttgtaaatgcttatttttaagtaattgagacctaaactgtgggcatgatttggtctactctgaacatagcaactttttaacttgacatcctataaatctgtccataggaatggggtttttttggcatctgaactggaagactttgaatgcttcctcctaagactgagccgtattggaggtgtaatacaggataccctccctgttcaaaactacaagaccaaagaaggttgggatttccattctcaattcattctctattgtttggagcacagtctgcagcatcttctttatgtctaccttgactgttacaagtgagtactgagaatgcatttgtccttgagcaggtcttcacattttctctttgcatatgactcctgaatgtgacttttaggaaaatagtaagcattcacacgaggaatactgatctttttgaggtagttttctccatctcaacagttggtacatctttgagttcagtactacattcagcaaaatgcttatgtgttttttggtgaattaattctgtagtatctctgttaaccttttaaataacttgactttagaatacaatgaaagaaatgctttaaaaggtttgagaggaagattctaaagttttacttggagttttctttgatactttgattaccaagag

SEQ ID NO: 17192 - DNA, 1022 bp, Homo sapiens
ataaagatttctacatttgtatttatcatttgatcttcttaataactttcaaagtatgatgttgtgttttctgatgactcatttacttgccaaaacttagtcatgggattttacgtactttttggaaactttcttttttttttttttttttttttttttttttttttttttgagacagagtctcactctgttgcctaggctggagtgcggtgatgacagctcactgcagcctcacctcctggactcaagcagtcctcccacctcagcctactacagtagctgggactacacgtgtatgccaccacactcagctattctttgtagagaatggggtctcactgtgttgccaggctggtctcaaactcctgggctcaaacaatcctctgcctcccagagtgctgggattacaggcgtgagccaccatgcctggacaactttgtggaaatttggcagtgttatcagattctataaatgtccccatactatgtggggtatttattgctcatatcttttactgtactctgtatttttattatgcaaggaagaggcaatctttcaaattcaagacagttttatacacaacagaaaaacatttatttggaaaattgcctgcccttgcaaccatctgagatgtgtattgacagtgtggctttctgagttgtggattaggatttgttataagaatttttggtgggatgcagtggctcgccctgtaatcctaacactttaggggccaaggtgggaggatcgcttgagtctaggagtttgagaccagtctggggaacatagcaagaccccattctacaaaagaattttaaaaattagttgggcatgatgacgcatccatagtcccaactacttggaaggctgaggctgaggattgcttgagtctgggaggtctaggctgcagtgatctatgattgtgccactgcacttcagcctggttgcaaagtacgactctcaaaaaaaaaaaaaaaattcacccagacttctctgcttttttgccatattaccaacacttt

SEQ ID NO: 17193 - DNA, 1114 bp, Homo sapiens
cctgcttcctactattctgatccaacttcagaagaggcataacctgaatttatgtaagattttataattcacaaacactcttttacatggaatatctaatttggtcccaaaacaaccatatgagacagattgggttgtttatattctttttattttacagatgaagaaacttaggctttcagtgattgagtgggtgacccagagccatgttaataaagacaggagctagaatcaagggcagggtaccttctgctatactcacagtccctgaagttaataatgttatgtgccagtttctttaaatgacagctttattgagatataaatcacatacccataaaattcacccttttaaaatgtacaattcaatggcctgtggtatattcagagttgtgcagccatcaccactaattctagaacattttcatcacctcaaaaagaaagtccataaccattagtggccactccctatttcctgttgtctccaagtcttaaacaccaatctactttctgactggatttttctattctggacatttcatgtaaattgaattataaaatatgtgacctttgtgacaggcatctttgacctagcatgttttcaaagttcatccatgttgtagcatgtcactacaacttcattcctttttatggctgaatattccattgtatcaatatatactgcattttgtttatccattcatcagctgatggacatttgggttgtctccactttctagccattatgaataatcctgctgtggacatttgtgtacaagtttttgtgttgacatatgttttcatttctctggggtatatacctagctgtggaattactgggtcatttattatttttgaggaatccccaaacttccacagtgactgcaccattttacattcccatcagcaatgtatgagggttctgctagctgcacatcttagcttaacacttgttattgtttgttttttattgcagccatcctagtcagtgtgaagtcaaaatgaaatggcatctcattgtggttttcatttgtattttcctaatgactaaacatgttgaacatgttttcatatgcttattggctatttgtgtgtcgtctttggagaaatgtct

SEQ ID NO: 17194 - DNA, 1016 bp, Homo sapiens
attatttgacttcaaatttcgggtcaacacccttactatggatccacactgtaagacggtccatgctaccaaggaaatggcaccaccccagagcctgtaagcgaacagcacaataagaaaagcgaagaaaagaggcaggaactgggttccaagggagctggaggcagctggaccaagaaggcaaagagcaatgccacagagcgagaacggctgcaacggcctgctacgctaagctaggccttcaagcatgccagagcagttaagcagagtgggactggcgtcagggcagatgtggctttgctagagaggctggtactgccccccacaggaaacgaatggaatcgaccggagacagccgagaggtctccgcgggagtcacgaggccgagcgggagccgctacgtacaccgcgcatgcccacgacgcagtcaggttccggcgaaagtgaccggaagtaaccgccgggccaagatggctgcagaggaaggggtcgcgagtgctgcttccgccggcggtagctggggcaccgcggccatggggcgggttctaccgatgctgttggtgccagtccccgccgaggcgatggggcagctcggctcccgggcgcagctgcgcacacagccggaggctctggggagcctgacggctgcgggcagcctccaagtgctttctttgacgcctggcagccggggcgggggtcgctgctgcctggagggccccttctggcagtaagtgctgagggagagttgggccgttgggggagtccagagcctaggctcggctgactgagccccaagggctcacgccgaggcctccctgcagccatagaggtggcgggagaagggtgccagctgcaggaaacgccccagaggcgagcgtggtttcctcacagaacctttcccccgacctgaaacgctcgcctcgttgcattctggcagcccagctctcctgttccgggtgggcggagacggcacccagctccattgccacctgcggcgaacccggaacgggtctcag

SEQ ID NO: 17195 - DNA, 1171 bp, Homo sapiens
actgggacaactggccatttgtatgaacaaggacaaactagatcccttactcctgccttaggcaatctttcagcagatggccagcgcttagctggaaagagcacctgccctgcagttaactgtgtaatgggaacatggcctggggtagaggaattcaagaaccaggatatccttcagggagaactagaaggaattaagagctctgaggagggctttgagtgagtcagaaaagacagatgagtactgccccagcggctgaagacagcccaagagaagactattatagagaggagggtgagaagtgttgactttccaaatggtaggaaaagcacatgaccctgcattgtcagggaatgaagagctgcttcctagtcaagccctgttgaaacaagggcaggaaccatagtctggtgcccccaaagctgccttgagggactcacaagatggcacaatgttgggtgaagttcttgaggggaaaaggtaggaaaggaactgagccctcacaacaagagcagcattcttttggtggagatggcgttctcccagacctcttaattcctctctcagaccttggactacctgtcgcccatccctttctggcctacatttcccagcaccagctctccagcacagcactttggacctcggctgccctcaccagacccaactctcttctgcagcctgctgacctcgtggccccctaggttcaggtactggtttgaggttctccccagaggtctcaggaggtgctggctgaggaggggcggggaccatgcctaccagttgccacagggaaacacagaaaactagtaagagaagtctgaggtatagtctaattccgtctccctcacaaattagccccagggagattaaaaatttatttaaagccgggtgctgtggctcacacctgtaatcccagcactctgggaggccaaggtgggaggatcacttgaggccaggagttcgagaccagcctggccaacatggtgaaactgtgtctccactaaatatacaaaaattagctaggcgtggtggcgagcgcctgtaatcccagctacttgggaggctgaggcaggaaaatcacttgaacccaggagccagaggttgcagtgagctgagaccatgccactgcactccagcctggatgacagagggagactgtctcaaaaat

SEQ ID NO: 17196 - DNA, 1029 bp, Homo sapiens
ggcattgggtcaccgctggaggatgcagcaggagggaggacccgtgaggagcgccccctgtaggaccggaaccctggagggttcgcggcaagggtctccggggcataggaaacgggcatcccccaagggtagtctgagttccgcccagccccattcctggatgctcacgccgtctcccctaaactcccactgcgctcaccgggagcccatctcatcatcaccacagcccgtggctaatgggccaaaacagaagaagaaaagcaactggcggagtacaacgcgcctgcgcattatcagactcagggacaggctggaacctcgccccgtaagtaggccatttaatgacgcgcaaactgggaaggcctatgactgttgaagaggataatcagaagccaacccctacgggtccccggtagctcgccgtgatcgtatagtggttagtactctgcgttgtggccgcagcaacctcggttcgaatccgagtcacggcattgtgggaacaatggcacggcaaggggctcggtatttttttccccttttttgtaacattttatataaatcgtaattcactttcttgaaacgaaccaacgtttctctcctttgaaaactgaggcactccgaggaccgccacctacagtaactctcatgtaatgctctgatacagcttcaacccagccgttataatccctttcttaccaaatatagttgtctgaataattccacaccagcaaaacagctcccctatgaccctgtgatttttttctcttttcatgtacatttttttattgagtcatttatttttatttttacttatttatttatttttgagacagtctcccctgtcgcccaggctggagtgcaatggcgcgatcttggttcactgcagcctccgcctcccgggttcaagcgattatcctgcctcagccaactgagtagctggtactacaggcgtgcaccaccatgctcggataatttttttttgtttgtttttttaattttaaaaaaaattgtttttgagacggaggctct

SEQ ID NO: 17197 - DNA, 1079 bp, Homo sapiens
ttacagcatgagccaccatgcctggcctgtatgtgtgtgttttaaagcactagatagggatggacattaaatctgtgttgcagggaaactaaacagaggtttccaaactgaaggcaacctaattgtaaatgcctgtgttaaagaggcagcttgactgttcatgtttcattttgcaaccattggttttgagattatcttttatgcacatttggagtcccttttcaacagtgacagtttcttacacgaagaatggatatggttattgggctcctctaagaatcagagtagggtaacaatgtaccaggcaaattgtaagttgaaattctagataagcatgcagatgacttacaatataaatgaagaataggaaacattttatcttcttaccaagtaccttactataagtaaacctaagataagaaaacccagatttacctataagattgttgggagttaatggtgtcaataaaaggattgatggtccctctaatgaaacccagtagatgtttgttgaattgaactgaaaatttatgtggccagacacagtggctcatgcctgtaatctcagcatttggggaggcaaaggtggaagtatccctcgaggccaagagttcatgaccagcctggtcttttgtagagaccctgtctctacaaaaatataaaaatcagccaggcgtcgtgcacacctgtagtatcagctacttgtaaggctgtggcagaagtgctttagcccaggaggttgaggctgcagtgagccatgtccacaccattgcactgcagcctgagtaacaaaatgagaccctatctcaaaaacaaaaaggaaaagaaaatatacatgatgggattcctattgtgaagtcatttaaaataatgacttgaatttctcagaaatttcaggagcatataaactatttaaatcaaaatattcttacatatagaaaccaagtaagaataaatgagagatatttcagtggacatctggacatatttatggactttgagtatctagcaagtagaaaggaaaaaaatattcatcatactctaatcatttttttatatctattgagcttgtttcttgt

SEQ ID NO: 17198 - DNA, 1039 bp, Homo sapiens
tatagatgtactattcagcttcagagttacaggcaagaagtggacagaacttgtgcaaattgtcagagttctagtccctaattttatgtattttgggaactcctgccttatttatcctgcagtcacagacttgagagcaataaatgcaaacctaaatgagaaaatggaatccctgacagctgtgtccgtatcaagcatcagtctctcaaacagttgccccagcctgacagtgctagtctctgtttaatggtaaaaggagactttgccataattttcagatgaagatgtttcccaaacactgtttacagaatgagatgtgactctacagatacctcatagaagacaatccaagatcatacttcattaacttgacagagtacgtgtcttaaaggaagcatcaagaattcaatatttgcatttaaaaatactttttaaggccattttatattaagccagtgctggaaaactgaattttttttattatgtataataatctcgacacccagcttctggaattgctgctttctttttacagaaattactacccaacagatttcaggaagtactagtagttatcccaaaagtggaataagcatgtattcctaagtgtttcagaaatgttttatttcacacataagtcttaatgttattgttatgattatactttataaacaaccttttccagatgctacagggttttgaatctcaaagttaacatttttcattatttgtaatcttagaaccaaatctttatttattgtggtcactgttattaaatgatttaggaaatactttcaatattattctgaatggctgaagttagtcttaaactcaaattactatatgatgatttaaaacaaaataaaagagcgaggatgggggttggagtttcaggtttatgtcttcccgacatcacttttatcattcatgaaattgtcttaaaaaagcaagagactgcaaaatgtaaacagtaatcttctgtccctttaagaactgccaacaatttgtacaaaaaatgtggtacgttggttcctgcctc

SEQ ID NO: 17199 - DNA, 1052 bp, Homo sapiens
tgtgttgcccaggctggtctcaaactcctgaactcaagcgatctgccagcctcaacctcccaaagtgctgggattactggcatgagccaccatgcctgtccacttaaattattctgtattagttatttcccttgtctccctctattagattgcaaactccgaacatacgctcttattcacagagaatcataataggttctcaaccaatattcaatgaatgaagtaagtattgattctctagccccatttccagatatctataatctgtaaagtctgcgtcacacaatatgacatttgataaactgcctggcaaccttagttggttgttagcattatctcctaactagatagtaaagccatttagaatgaagccatgtcctatgggttgcctgtacctctttatgtcttagcacagtattaaccatattacatgaatttgaaaatactggttattttttattattatttaaaataaaaacaaggtctcactatttgcccaggcttgccttgaactcctgagcctgagtgatcctcctgcctcagcctcccagtgttaggattacaggtggagccaccacacctggccaaaatactggttatttaaattcagtggatgaaattaaatggtgacaccctgccaatttttaattatcttctattttgctttacagaacaattcatgttggaaatttgatgatctttttcagcattttaactttacttaatatgacaaaaactaatcagctaaatagacaaggcggactttgtaccaaacccatcttgcttttccctttctccttttccctctacccccacagatttcagctcaatgcatctgttagaggcattccaagcagagtgactctgtcttgaacagaggctgggtaaaatgaggctgagacctgctgggctgcattcccaggataggcattcttagtaacagaatgagacagaaggttggcccaagatgcaggtcacaaagaccccgctgattaaaaggatgcagtaaagaacctggccaaaaccaagatggtgacaaaagtgacctctga

SEQ ID NO: 17200 - DNA, 1019 bp, Homo sapiens
tatgtgtatatatttctgtcatatatatgtatataaaagacagatcaacacagcaatacatcttgttaatgttataagcacaaacaaccgaaatagcttactatactagttgaagaaatatcttctcttctgagttatctttcttccccataggtagccactgtcctaaatttcgtatttttacctctttttgaatcctcaggcctaaagaatttatttattaacttatatgttttgaagcattctttgatacattttttttttcttttgtaatcctttttattccttcatagtgaagaaatatgttgcaagccagaatggttttattattttaccttttcaccttttattctccagccatcctagagaatttattaaaatcacttgactttctttttattagtactgtattcccagactgaggccagcaaagtagatttgatggttacctttacacttcatcttagcctaaagatagagaagtgatgatggggtgattacctttaacataatcatttggcattgcagatgatagtctatccatgtgtttatgtggtttttgtttatttatttttgttttttagtattccacctagtgggatgagtgagaagtacatttatgtttgtgtgtgtgtgtgtgtgtgtgtgtgtgtgtgtatgtttggttttgtttaaaggtagggtgtttctcttaaaaaattaatgaacctaacaaaaaaacaatgtttaatatcatttctcacttggacatttagccctcctttatctctcctctcctccatctcagattataatcattgttgaagaaggtaagagtttagaaggtgggtaactgtattttgttcaggaataaaatttacagattacagtcggccatcctatcctctaccccagtatttgggttttataacagtctgttccagtattgaaaagctttgaattagtctgaatttggcattccattgggcatccaatagtgagaaatgaccattcctacattttggaaagaaaagttgcag

SEQ ID NO: 17201 - DNA, 1069 bp, Homo sapiens
cagtgctgatggctgctgactgatcagggtgatggttactaaagtttggggtggctgttgcaatttcttaaattaagaacaatgaagtttgctgtatcagttgagtcttcctttcataatagatttctctgaagcatgtgatgttgtttgatagcattttacctacggttgaacttccttcaaaattgaagtcagtcctctcaaacctgctgctgctttatcaattaaatttatataatattctaaatcctttgttgtcatttcaacagtgtacatagcatattcaccaggtgtagattccatctcaagaaatgactttctttgctcatacaagaagtaactcctaatttgtttaggttttatcatgagtttacagcaatttattcacatcttcaggatccacttctaattctagttttcttgctctttccatcacatcttcagttacatccaccattgaaatcttgaagccctcaaagtcatccattaggattagaatccacttattccaaactcctgttagtattgatattttgaccttatgaatcacagatgttcttaatgacatctagaatggtacattctttccagaaggtttttaatttactttgcccaggtctatcagaggaatcactgtctatgacagcaatagccttacaaattgtatttcttaaataatcaggcttgaaagttaaaattatttcttgattgatgggttacagagtggatattgtgttaatagacctgcaaacaacattagtcttcttgtatatcttctttagcactcttgggtgacaagtgcattgtcaatgagcagtaatatttcaaaaggattttttttttgagcaagaggtctcaacagtgggcttaaaatattcagcaaactatccttaaacaggtgtgctgtcatccaggctttgttatttcatttacagagcacagacagagtagatttagcctaattattaagggccctaggattttcagaatggtaaatgagcattggcttcaagtcaattaaggttaccagttgcattagcccctaataaaagagtcaatgtggcctttg

SEQ ID NO: 17202 - DNA, 1048 bp, Homo sapiens
ttcatacggatttcaggaatttttccgtttctgtgaaaaatgctgttagaattttgatagagatcacattgaatttataggtcattttgggtaggaaggacattttgacaatattaattcctctcatctgtgaacatggaatatctttcatttgtattattttcaatttcttttatcattgtttgatcgtttttcagtgtatagctctttagctttcttggttaaatttatttctaggtattttattctttctgatgctattttaaatgagattatgttcttaattttttggatagttcattattattagtgtgtagatatgcagtggatttttgaatgttgactttgtattctataactttactgaatttgttctaatagtttttttggtgttgtctttaaaattttctctgaataattttctatataagatcacatcttctgcaaacagagttaattttacttctttctctccaatttggttgccttttatgtcttttatttgcctaattgctctggctgtgaccttcagtacaatgttgaatagaagtggtgagcatgggcatcttctctttttcctgctcttagaggtaaaaccttcaaattttcactgttgagtatgacattagctatggggttgtcatatatgacctttattgtgttgaggaacattccttctatactgaatttgttgagagtgtttatcttgaaaggatgttgagttttgtcaaatgctttttctggatctattgagatgatccttgatttttaaaaaatccttcattctgttaatgtggtgtataacatttattgatttatgtatgtcatccttgcgtccctgatatagataccatttgattatggtgtatgatccttttaatgtgctgttgaatttagtttgctagtattttgttgagaattttcacatctgtgatcatcagggatattgctgtaattttcttttcttgtaggatccttgtcttgcgttgttatcagggtaatcttggccttataaaatgatttgaaagactttcctcatgttcagttt

SEQ ID NO: 17203 - DNA, 1078 bp, Homo sapiens
gccgtgaactataaaatacaagctgagtggtggagaaaagaacaatatttgcacatatttggaaactgtagcccatgtcttctaagcataccctgacattggccagaaggacaggtccttgcaaaaacacctgtggagatcaggagtgaagatgccactcccctgaaaagtgaacctgagaaagctcagcccagggtaggtatcactgctagtcatagtgggatattctgtgccaactgctagagcccaaatgggatcctctagccaaattgtctcaccccaaccctaagtccttagaactctaagtcctaagtccctatgggctcgtgatagtggcaagtttgagatcgcacatctcatgcatctaaggtctggcagacttattctggtgttactactatggcttctgcctgcctagagtatatcccttggatcactggtttctgagttcatgactctggaaatgatgcttacctgtactttgcatctgaaaccacattactttgaagtgtaggctcagtgaagactattgtaggtagttaaaaaagtgggccgggtgcgatggctcacgcctgtaatcccagcacttcgggaggccgaggcaggtggatcacgaggtcaggagatcgagaccatctttgctaacatggtgaaaccccgtttctactaaaaatacaaaaaaagtagccaggcacggtggcgggcacctgtaatcccagctactcgggaggctgaggcaggagaatggcatgaacccgggagttggagcttgcagtgagccgagatagtgccactgcagtccggcctaggcaaaagagtgagactccgtctctaaaaaaaaaaaaagaaaagaaaaagaaaaagaaagtggtatacagtgaaggattttgatcacttacgaattagaattaacaaacctttaaatattgaactttatagtttatagtgtaaataaataatatggaatggaaccgggaattcaaagccaaaagtatttttgtaattaaggatgtcagttaatgctattctgagtcttagtttatttgtttaggaagaatcagtatttaatgagaatctt

SEQ ID NO: 17204 - DNA, 1056 bp, Homo sapiens
agcgattctcttgcctcagcctccggagtggctgggattacaggcatgcgccattacgcctggctaatttttgtatttttagtagggacggggttccaccatgttggccaggctggtctcaaactcctgacctcaggtgatccgcctaccttggcctcccaaagtgttgggattacaggcatgagccactgcgcctagccggtaaatgattttacacacacaaataatatgtttagcattctcaattaggtcattatcaggtaaaaatagatgaatcctgataagctatttgattttctcttcaaataactacaaatcaactcctgtgagctgttgcaatctatgcatttaagttgcaaaagtgaattcttcttcttttttttcaagtacaacactgcaatattcgctgtatgaatggaggtagctgcagtgacgatcactgtctatgccagaaaggatacatagggactcactgtggacaacgtaagtacactgtagttataagtattctagatgttaacctgtttgtagacaagtagaataaagagataagtgctgatggattttcttcgattacctgggacacagcatgtttacaagtgtccagtgacctttacagatgaacaaatcacttactcaaaaaacttaacaccaaatttccaattggaaccttgattggttacaggttgtttgattcattttcctctcatttaccttcaccaccttgcttgcctgatctccttgatttctagtcaccaccaaaggagcagaattcttgttcattccagacacataccttccacccacttgctgaacttcaacacttggattttcaggaagcatctcaaataaagtatttcaaaactcagcctcatcattctctctaaacatgtcctttatcttgattggtggtatctgcatccctctcatttcctaatctagattctgctaccgaagtacttatcacatggtgttcagtttgaaggttcatttgcacacaccatttattgtatctactttctaccagtccctgtgctttgcagaagacgaacattc

SEQ ID NO: 17205 - DNA, 1046 bp, Homo sapiens
caccatgagtgtcccactagagatcaaagccatccaagtctaattaacttgttttgcaaactgtttctagttcttgtccccaaatatacaaacatcagaaatcagaagtcagtctaaatattcgaatacccatggcggggtgcggtggctcatgcctgtaatcccagcactttgggaggccaaagcaggtgggtcacttgaggccaggagttccagagcagcctggccaacatggtgaaaccctgtctctactaaaaatacaaaatcagccaggcgtggtggtggcgtacctgtagtcccagctactcagaagactgaggcactagaatcacttgaacccagtaggcggaggttgcagtgagctgagatcaagccactgcactccagcctgggcaacagaggaagactccctctcaaaaaaaaaaaaaaaaaaaaaaaaaattgaatatcttattgcactaaataacaaaattttaacttgctattctttggttatctgtacttttagtttgaatttatatactttgtgctttttaacattgtcttggaacaatttaataaatgttacaaaaggcactcctttccatatggaacagactcatgaactgtgaattattgtatgtgggtcatttaccattttaattcatcattggttttcctagcgtcaagaatctatcttgcttcactgcagagcaaaagttatactcctttcaattccggaggatctatacataagagaaaatcctacagaagacaatagagctgattatctctacaaatccaatgggcatattgaaatttctagccatttgggatctgcactatgttagagggagatcaggctagaacttggcaggtcacagaagagaagtgcatgatgtggctcggcctccatcatcttttcagtgcagggtggttgtattcacagagttcaggcaaaagataataaaaatggcttatgcatgtcccatattcatccaggccaaacctgctacaaagttactcagtctcagggtataagaagccctcagccttcctggaagaaa

SEQ ID NO: 17206 - DNA, 1046 bp, Homo sapiens
attggattagtatggtaatggaagagttggagaaaagaagtggtaatctacatatagtttgaagataagcttataggaatttcttatgtattcctgtgatgttagataaagagagaaatcaataatgaccaggatgcttgccctgagaatcttggagaatgaagctgtcatttactgagaagaggaaaactatggaatgagcaattcttttttttccaggggcaggggaggtagtagtgaaatcaagaatttggtgttgctcatgttaaatttgaaatgtctattgctgtccaaaaggagctttagatatgcagttctggtgagtgaacagggctggagaaatttcaactgggagttgtcagcatagaaatgaggctgaatgagatcatctggtaagcaaatataaatagaggaaggatgagagtctaagattgagctcttgataccacagtcagaaagatgaggatgaaccagccaatatttctgagaaggagtagacagtgatggaggaggaaacccagaaagtgtagcatcctgaaaactaagtgaagaaagtgtttcatgaggactgagagattgaatagaatgggttggatgattgaggactgaccattggatttgaaaacactgaaattgttgacaactttgataagagctatttatgggcatagtggcattgagagaatgagaggaggagtggagatggcaggtagagatcgctctttctaggagttttccagagaaatgggctggagaaaaatactgatagagactttaatttgctttttaaagataaaaaatgtttgcttgttaatggtatttatctagtagacagaagaaatttagccttagatacaagtatgaattgtctaccttaaaaaaattttttttggagttggggactcactctgtcatccaggctggagtgcagtgtcatgatcatagttcactgtaacctcaaactcctggcctcaaggaatcctcctacctcatcgttctgagtagccgtgattacaagcatacagcaccatgttcaggtactttaa

SEQ ID NO: 17207 - DNA, 1006 bp, Homo sapiens
gaaaataaacacctatataccctgcatttagatttaccaattgtttactttctacatttgttttatatttgtctgtaaatatacatatgtatgcatgtacatagtatgtacatgtatataaaaacatttttccttaaccatgaagattatttgcagacaccctgagtattccttcctaaatacttcagcatacattttctaagaacaaaaacattttatttcttaaatacaattgtcatatttaggacattgaatattgataaatatttatatacatatacacttaaaaaattttttttatttaggagatgggatcttgctctgtcacccaggctggagagcagttgctcaaatcactgcaactgaaccgagacttcaactgttgggttcaaatgatcctccccgctcagcctcttgaatagctgggactacaggtacacagcactgcacttggctaatttttaaatatttttgtagacacagtgtctcgctatgttgcctgggctggtctcaaactcctgggctcaagcaatcctcccaccttagccttcgaaagtgttgagattacaggcgtgagccactgtgcccagccaacatacatacattctatattcaaattgccctaattgtgacaataatgtgttataacttttttttagatctttgctgttcaccttcaagctgaggacttaccacttttcttcgattatgaaaaatgctcagccaatagctattcattaaacaaatatttatgaggtgtcaacaactgattgttaatgttctagggtgatacaatgcttatcaaaacatgagtttctaccttcatggttcacactctagtcaggggagacagtaaatacacataacttatgtagtatgttagaagttggtaagtgctatggagaaaataagggcaggtaagggtaaaaagaggagtaaagagggagtggttacaaatttaaatagaatagtgagggttggtcacgctgagatggtaacatttggg

SEQ ID NO: 17208 - DNA, 1033 bp, Homo sapiens
atggcctggcatatggcctatcctggaatgtttcacatgcacctgaaaagaatgtatattctgctctttttggatggagtattcaaaaatgtcagttcaagttggttgatagcattgttcaagtctgctatagccttgctgattttattcctatttgttcaactggttattaagagtgagatattgtaatctctggctgtaattgttaaacttttttctttcaattctgtcagttcttgcttcatgtattttgaagctttgttgttaggtatatatacctttatatctgttatgcctttcagatgaattggccctttattattttaaaatatccctctttgtatctactatatttcttgttttaaaagtccattgtgtctataattactacagccactgcagctctcttatgattactgtttgcatggcatgtctttctgtttttttccttttaacctatttgtatcttttaatttgaagtgagtctctggaagacagtatagtgctggatgttgctttttttttttttatcagagaagctttgattggagtttttaggtgcattaaaatttactacaattttgttaggtttgcattttccattttgctatttggttactgtgtatctttcgttattgaattgctcttttattgccttcttctgcattaaacagatatttatgagggtaccattttagtttttttaacctttttttttttagctatttttctaagtggtgtctctacttatcataggtatcttaacttactacggcctacttcacatgaatattgactaacttctggtacaatatagcaactttgccccagtttagcttcatttccttgcccctcctttgtgctattatgtcttatatatgtatgtgtgtatatatatatatatgtatatgtatatatgtatatattacagtgttataattattgctttatacaataaagcaatatgtcttctaaagaatttaatagaagaaatgtatatttatagttctttatatttactgacgtagtaatc

SEQ ID NO: 17209 - DNA, 1030 bp, Homo sapiens
aagaaccgagaaggaaaactttttgggcttggaaagctctgtcaccttaactcttgaccagggataaataagtctaaaaattggtcctggacttcagtgcttgaattcacatacagctatagtaaggaacaaaccatcttgtcaaagtctcacttgtattcctgaagatacaatgctccttctccaacagttaggctgtcatctctcactctagaaaaaaactctaaaacagccaagtttatgctccctatggatctggttggtgcttgatcgttttaagcccttgtttttagtaaacttagaatctaggctcgttgctcacctaccttttccacttggttcaaaatccatgtcagttatttaaactctcaacattaaggttgaaattggaagttctcttgctttctgctccttttagagtatccttaatcttttttgatactcataatctcaataggattaagttactttatgtcatacatcctatatccaattggttggagatagggtgtggtatagggtgtatgacaaggtaacctaattctattatgataaatatgaaggtatccacttattagtgtgcaaatgaagggactacacagccaaactatgactagtggtgtacattggtttgaaaggtcatggcagaacaaaagggaggcaggagccctgtagatatcatgatcacataaatctcactttgtcatgatatttagccctttttttaatgttgctggatttttattttattttatactttgttaaagattttcatgtgtatgttcttgagagatattggtctcttgttttcccatgctctctgtcttgctttggtaaaagggtaataccagtcccatagggtgagttggaaagtgtttccttgcctgtgttttctgaaagaattggtgtagcattggtattacttcttctttatatattggatggagtttactaggtgaaggcatctagcctgggctggtggtgggggtggtgcagaagtgtggattttaagtaatgtattttcttgtta

SEQ ID NO: 17210 - DNA, 1033 bp, Homo sapiens
tagactaatgaaaaatgactttttctgtttggtattgtcctttaatgaactgttctagccactaaaagtgcattaaaatacagttacacttatcagcaagtaattatgcaggtgtgtgctatattcctaagtaatagtaaaaaatccttatgagtccgcttttgctttaggtaaaagatacttaatttgttgggggcacagataaaatttgagattgtatctgtattaagaaaagtaatatgaaattttttctcacattagttttggctaattatataattatatgtgtgagtgtttatgtgtctatacatacatataaacatatttatgtatatattttgaccaattttagtgtaagtatagtttttagaataatgtcttatctaaaatcatgtttccttttaattttgattttacatttcctagcttcagaggttaaccaaaatagttaccttaatttttttgcgaaggaggagaatcataaagactttcaaaatgcatgttgttatgttctttagatatcatttgctgtttctgaagctaaagagaaatggaagagtgagcttgaaaatatgaggaaaaatatacttcctggaaaggaattggaagagaagattcattctcttcagaaggaacttgagttaaagaacgaagaagtccctgtggtcatcagggctgagttagctaaggctcggagtgaatggaacaaagaaaagcaagaagaaatccacagaatccaagaacaaaatgagcaagattaccggcaatttttagatgatcaccgaaataaaattaatgaggtgcttgcggcagctaaagaagactttatgaaacaaaaaactgaactacttcttcagaaggagacagaattacaaacttgtctagaccagagtcgtagagaatggactatgcaggaagccaagcggatccaactggaaatctatcagtatgaggaagacatcctgactgtacttggggttcttttaagtgatacccaaaaggagcacatcagtgattctgaggacaagcagct

SEQ ID NO: 17211 - DNA, 1037 bp, Homo sapiens
ttccatatttcgtcttgtatttatatttgaatgaaagaaaggtagaagacacagaattcagaaacagaaaggattttttctgcctggaggattcaggaatttctttaaggtccagcttaatttcatctcttttttttttttttttttgagacggagtctcgctctgtcgcccaggccggactgcggactgcagtggcgcaatctcggctcactgcaagctccgcttcccgggttcacgcccttctccttcctcagcctcccgagtagctgggactacaggcatctcttttaaggacataggatttaattgggctagtattttcaatatatatagtgttctgtagaatattaagtctatttgcatagtggaaaaaaatctagagacatgagattgtgtgtttttccctcaccatttcatgttacaggctttttatcatattcatatcttcatcttatgttgacatacaaaaggattcttatagatagatttattttcctcgatatgcatgtctcttcccccgtttagccctgtcacaagggtagaaaggaataggtgtggtctgagaagcagaggctggagggttttaagttgaggtatagtctgagttgatatgagtttaaagggacgggttgggtgtagggaccagagaggaagggattagaaggtagactgcaaattagaggttggccaagaaacataactcagtctttgaaaaacaaaaacttgtcatagggggatttttaccactgaagttcatatgtatgttaatctttaataccatattcatctattctagcttgcatattttcttttcacactttaatatctacaacatagactgcgtcctaaaattaatgttatgtcataatttgattggctacatctcgttcctactgctacaaatggaactgcatcatagaatcaaagacatcttagatctgatgaaatgggatattgtctgctctagagctattggcttccacaaaagtttgtgatatagttcgtatctgttaagacgagggagctaagttctcta

SEQ ID NO: 17212 - DNA, 1252 bp, Homo sapiens
catcaccagcaccaccagcactcttgtacctggcatgcttgaagaagaagaagatgaagatgaggaggaggaggaagattatactcatgaacccatatctgtagaagtgcagctcaatagtagaattgagtcttgggtctcagagacccagagaactatggaaacccttcagcttggaaaaacccttaatggttctgaggaagacaatgtagagcaaagtggagaagaggaagcagaggcgcctgaggtgctggagccagggatggacagtgaggcatggactgctgaccagcaggccagtcctgggcagcagaagtccagcaactgcagctcgctcaacaaagagcactctgattctaattacacaacgcaaactacgtaactcaggaaatgtcggctctctatctccagctgtggaagggttgcagccattaccttttatgcttcatctcaacattttgcactgtccagtatttaatatacgtatttaattcccaacaaatatttttgtagcttttacttgttatgatctgtagcttagcttttaattagtatctaagtgtctttctaagaactgtgtggaaaattcagatctgtttcagcttattttgtaatcaaaaacagtgataaaaagaagaccagatcttaaagaaaataaatttcaaatgcttacttaaaagacattttgaaagttaaagaacaaggttctaaggatagaagcagttatcagtgtttgcttcaggactccacctcctctactctaatttgaccaaaaaattgtttgggcttctttaaaaaagaactgggggtggagtcagaaaattaaatgaaaggctgagggtaactaagtccaccagtgttgtatgttaaaaaatcaatgcaacttttatgtggtccacaaatgtttagtcagaagtcactgattattgtaattaattagtgttgggatgggctaaaacagagccttcaaaacttcggctagcagtggagccaccatcttagattatagctagctagcctcatttgtggaaagtgatagatgctgtctataatagtgaacagtcacccatgataggacctccaggttctgtctcatatttgcttcttacttacctcaggaatgctcttgtacatagacttatttacaaaaagctaggcacatgttgacaggtgaataactgtaaccgattgtatgactgctgcacttacatgtaaactcttcagaaacagagtcttatactggtgtgttctc

SEQ ID NO: 17213 - DNA, 1749 bp, Homo sapiens
tggcatcttcaacaataaccaaaatccacagcaaaagatttagagagtaagttttatactcattattgaggttgaatagtttaaggatcttgattgtagttctgaatttagtattgtcattgttactcagtgagtcaagcagacaaaagaccagagatctttaactcctttcggattttgtttaacagctgggtttattatttaaagcattgccttctgtcagctgttagtattcacgtgagagtgatctgacagtaagtatattctctttatatcagatagtatttctattctagaaatctagactcttaatatcttatatattaaatgttgtactatcagttttcctcctacaaatgcttttgcttttttgtttatattattggcccttcaaaagatcactctaaccaattaataggtttctaagaccctattatatgaagtgaacctattacataaagctatttgtgcaagtatttctaagttcttaaattgagataactggggggatcacagaatatgataccccatctgtgaatagctttaacagttattgctgtgaaggattttaagattttaacatttatgttgatgaattaattttacctttaaaaatgacatatgaaagaatcccagggtgaaagtataatctatgtgagtccaaattacattggtttattctgttccttttccctataccattgtttttgagcaaatacttcctgcctagctttggaaagttaattaaatgtcaaatcacagatgtggagcaaatgaaacacttgggggataaaatgttacatatgtatgaaatgaacagcttgaaggaaaaagggaaaaaaagaatgaagaaaattgcattttgggatgttctagtctttgattgcattcttcaatttggcacactttgacagttaaatgttcctcaatctctgcatttatatatattcttctgaagtagtgtcattcttgtacttatttaactatttttgacagaaatacaaaaaattcccctgcaaacttttttgcactaaagaagaacaggcacagattttcccactacataatataaaagtagaaatttgcttgccttggttattcatagataagaaacaccaattctccctattaagtacctgcttatggtagacatgaggggtgattactagaaaagatggaaagagtatacaggagaagtatatacttagatgacttctttgtcccagaaattaggtactgtagtggcctcacgcttctgactttctgtgtctcacactatagtcatacataatctcagagagccctactcatttgctttgtctgatgtaaaggcatgtgatttttacctcatgacctctttggttttggcttcagtttaattattgagttcatcctccatagccataaattttcggagctctaggcactcttgaggccattttacctagctccttacttttatgactgagaaagccagtgcccagaaatctatccaagcccagaggaggaattgttggtaataggacattcagttagaaattgtatatatttcctactagaagcatcttcagtaactctttaccaaaatcattatgtttgtttttatctaatagcaggttgtcatttggtttatatccttaggaatttaataattagtaattctgatagtctttaccttaggttaacttatcctttacataaaatctatctgaattgagctcggcaaagctgctgtagccagactgcctc

SEQ ID NO: 17214 - DNA, 1040 bp, Homo sapiens
tgatatggattagtttctcattttttctaagagaaaattgaattcttaggctatgtctccttcagtaagtcattgaaatttatttgaagtaagtcagctcaaagggagaaataaaatattcagaggtgaacaaaaacctttttttttttttttttttttttttttttttgagattgaacatctaatctcatagttgccaagatagtctctggtgtaaaagaaaataccaagcaatagtccttaactttgaagctgtcatggttagcatatattagtatttctagactcagattttagtttaaatttatgtctgtgctatagttacaggatgatttagcaaaattgcccgcaattaggtcatgtgtaacctagtggttagggtgttacttatgatagtcgtgatagccattctaaccctgcttatactgtctgagtgattagcacttcattggtatagtttattttatggctgtataaaagtactttcagcctttttcaagttatgtcacacagaaaatttcgtttttctaggactgtaaatggatgaggcagctgttaactggctataggctctgtcattcctgagggctgagtcaatcaatatttccacccatctataaaccactgttgcacattagtgtgccagtgcacattctttgagaaattgtggatgtatggtatataaggccattcaactactcaaatattaaatgttcaagttaatattctgaggctgttaatcaagagtcttgagggttagacaaatagtagaaactaaggaatcattttcaattgaagttagcatgatattaaatatctttgcctatattggataatgtgcaaactgattcatgaaactaaatttaataatactatttttctatttgaaaaaatggccaagtatacagtatgataaacttaattgattttcttggtttaccaaataatctttgtgaatttatgagtaaacaagccaacagattatttaaaaaatatttttaagaatatggccgtgaacattttactattttgctttgtca

SEQ ID NO: 17215 - DNA, 1045 bp, Homo sapiens
tgctttacctaacatttgtatgtccccacaaaagctgtcaatttttccttgttgatgaagaatgaattttttatatgtaaacaaagcccttttggtttatcaatttttgtgatatctcagaatatcattatagctagatgttaatataaaaatcatgaattatagaaaagtttgggtttgtctagaagaaacaaaccagttcaaatataaacaacattgaaagattgtattttgagtaatctcaaattcacagtggaataacaatacatctaaaattaccatgttttattaggttggtgcaaaagtaattgcaggttttgctattgaaggtaatggaaaaaactgcagttacttttgtgccaacctaatatctgaaagtatacttggctttacatatttgaatgcttatgaagcaagaataattaaatttgcaggcaatcatatctcagaagtaatggctatttctcctcaatagaaaatcaggaaacagttgagtgagattgtgcttctgtggaaaaaacaatgaattctagcaataggttgctatctttttttttttttttttgaaagagtcttactccgtcacccaggctggagtgcagtgacacaatcttggctcactgcaacctccgcctcctggattcaagcaagtctcctgtctcagcctcccaagtagctaggattataggcatctgccatcacacccagctaatttttgtatttttagtagagatggggtttcaccatgttggtcaggctgctctcgaactcctgacctcaggtgatccacccgcctcggcctcccaaagtgctgggattacagtcgtgagccacggtgcccaaggttgctatcttaatagatgccactttcagcttcccaggaaagaggagtgtggtagagtagaaagacctaggaaacaggcgacctgcattatatggttgactaagaattgagatcttgccacttaatctctctgggcttcatttttttttcttgagcgattctttttaacctcaggtatatagaacagagaaaatcattatc

SEQ ID NO: 17216 - DNA, 1033 bp, Homo sapiens
ggtaccgtaagttttgaataatagtgacaaaggtaacaattggattcttgattattcataaaaagcacccttgggtatggttttctattagaagagatatatatgtatgtgtgatggtttttgatgaatgagcgtattaaacacatctcagaaaaagttctaaatgatttttcagaaggatttcttattatatacagccaaagaattatttaatgaatagtatttatgtatgtttttaagtatagggtatgtggtacataacatttttgaaattgtatcttacttgaaaacagtacattgtttaaagcttcacaggtgatacttgcctttgattaatcggataaatctatgccttatgggtctttcagtgaaactgatgaaaagtatctgaaatctggtttctatctagagtttgaataacacagtgaagttaaaactaacactgaactcatttaatgtaggcagctgctttttttttggcatttgttgatactgtattttatgaaacattaatccagaaactgtgcttgatgaaagtcttttgtagacacatcttatttatttctttctagcactattcatggccgaattgatcaagtcaaccaactccttgaactggatcatcagaagaggggtggtgcacgatatactgcactagataaatggaccaaccaactaaattctctcaaccaggctgtagtcagtaaactggcttaacagagaacaagcttttacagacgtccttaaggcaacagtgcagagatgtaatccttaaaagaactgggaatggcaaaactactgtcggttgatgtgtcctgaaaattattggagttatggcagaagtgcttttttgatcaactggtttgtgttttgctgctgcatttatcccaagaaaaacagctttaatctccagaagaaaaccaaaataccatgggatttatgctgtattgacatcttgccctaaacgtacaacatcatagtaatttgtcatgggcaacatgaccagagagaagatttttgtcatgattttaaa

SEQ ID NO: 17217 - DNA, 1071 bp, Homo sapiens
agaaatgttccttttgaaaattttcacagttgctggtagctttctagaatataaaaattaagaagctgcattttctgaataacctacacagaggatatgctttctcatttgaaagacgaggctacaccccttcatgtagtgtacatgaagcctggttcctttcattatgaacaattaggaattaaatgcacaatttcatttgaaaacatcaaacattaaatagttgttaaatgttttattgccaacttttaagagaagtaagatattgaggtgattttaattaactttgtataaatatagtatataaccccaaaagaagatttatttaatctttcttttaaaaaaccaaaagcatgaaaaggaaatttatgttttttttggcagaaggttatgtgtgcttgtttaactgtgatttccatgacagaaagtataatattatttagatttttgcatatgaaagttgagaagcagggtctttggattatctgatttaatacataacttcttcatgtttgacataatttacactttgtttttctattagtgcctatcagaataatgacatcactgaatttgaaaagattctaaaaacaaatcacagcaacatcatggatgatcctttcataagagaacacattgaaggtatgttctttctgccaactggattctattactttctttgccactgtcaaagaaatgccacttaatgaagctgcatggcattaagctgttttctttctgtctattgcaaagtatagatatgtttctaaatgctgtcattggatgggatattccttaaaattatgaagctcttttaaagaaattgaccaatttcatattactatagtcaagtttatatataatgtccattttgtttaaggtaactgtccctttttaaaaaaatctaatatagatgctgttgcatgtttattattgatgcttaggttcaaagttaatttttaaggtttatttttgacaaataacaaaagttatgaaaatatcctgctatagataatgctaagatatatgtactatgaaagataaggcaacactgtgaaggtttcataccag

SEQ ID NO: 17218 - DNA, 1027 bp, Homo sapiens
gcagtagcgacattccagatatagtcaaaattgaccctggctgctctgtgttgtgttattttggaatgtttatccaccttttattttaactcaccaaacactcactaagcgttttgtaatatcccaggctctcagaatacacagatgaataagaaagttcctgcttctgagaagttcacaatttggactgttttaacatacaaagctctatgttagagagatgcatgtcatatggaagcatgactgagaaaaaaaatttagtttgctaagaagagtgatgctaagatgagttgatgaacacatttcccagcagtattagggcaggggagtatcttaggagaaaatcagaaagtttgttaggagggaaagtggtttagaattctagcaaaaagagcagtttatgccaaagcagagatttaaaattgtgtggcatgtttgagaaagagtagattttggttgtgtggatggatcacaaattgcttgggggaaataacaggacatgagtaggttggaactattattgaactttagggggtttttttatttttaatcccttttacaactgttcttgtaaaacaagtgcttgattatttttcataatttgcttaacctcttcatttgtttttaaagcattctttatatactaattaaaatttcactttctcttctgttaaagaacatttacacttttacaaattatctctttttcatttgacgtaactaattcagtttagcaatacttactcaatacttctagatttcctattctgagtaatggcatcatgtgttaccaagcctttgatagtcattatggataactttattttcctttatcttgtgcccatatgggcacttttattttacatccttaacattgtttaacatcttctgtgtttattccatcatttattgtgtcccctaacttttctccttattctgcttcttggagtcaggccttcacagctcctggccagacttttaagattatccaatgggctcttcattgcttccagaaacacaaatctga

SEQ ID NO: 17219 - DNA, 1038 bp, Homo sapiens
aagattatctcaatacatgcagaataggcttttgatacaattcaacatcccttcatgataaaaaaccctcaacaaactagacattgaaggaacatacttcaaaataataagagccatctatgacaaacccacagcaaacatcatcaaaagctggaagtattcaccttggaaaccagaacaagacaaggatacccactctcaacactcctattcaacatagtattggaagtcctggccagagcaatcagacaagagaaagaagtaaaaggcattcaaataagaacagaggaagttaaactatccttgtttatagacaatatgatcctatatgtagcaaaaccaatcgtctctgcccaaaagctccttaagctgataaacaacttcagcaaagtttcaggatacaaaatcaatgtacaaaaatcaatagcattcccatataccaacaacatccaagctgagaatcaaatcaagtctgcaatcccaatgccaatagccacaaaaagaataaaatacctaggaatacagctaaccatgtaagcaaaagatctctacaacaagaattacaaaacattgctcaaagaaatcagagatgacacaaacaagtggaagaacattcaatgattgtggatataaagaatcaataccatttaaatggccatactgcccaaagcaatttacagattcaatgctattcctatcaaactaccaatgacattcttcacataattaggaaaaactatattaaaatttatgttgaaccaaaaaagagcttgaacagccaagacaatcttaagcaaaaaggacaaagctggaggaatcatgttacccaaattcagattccactacaaggctacagtaaccaaaacagcatggcactgatatgaaagcagacacaaagacgtatggaacagaagagacagctcagaaataatgctgcacacctactaccatctaacctttgacaaagttgacaaaacaagtaatagggaaaggactccctattcaataaatggtgctgggaaactggctagctatatg

SEQ ID NO: 17220 - DNA, 1088 bp, Homo sapiens
tgttcaataagataagcaaggtccctgacttagagcttaaattattggaggagggggtggataatagatattaaaaataactctgatggctatttcaggaggaaataaataggttactatggtatcatttaacacagaaaggagaaggatgtttcaaatctcattacaaaatgtctttctgtagaattgctatttaagctcagatctgatacatgagaagaaatcagaagtggaggtagagcattctagataaaggtaacaagagcaaaagttctgaggtgaaaatgagcttgttgtgttctagaaaccaaaagatagtataactggagtatactgaacaaagggaaagttgggcaacacgagaccaatgtacataaggcgttgatactaacattaaagactttggatttgatcctaagtataatagattgtaattagcaagtataatgggtataatcattctgaaaactttttggagaatgtttgggagatggcaaaagttgaaataaggagactggttaggaggccataattgaaatacaggtcagagattatatcttagactaattatggtaagggagatggaaaggagtagttagatgtatgttggagactgttattagtctgttcttatgctgctgataaagtcatacccgagactgggcaatttacaaaagaaagacgtttaatcgacccacagttccacatggttggggaggcctcacaatcatggtggaagacaaggaggagcatgtcaggtcttacacagatggtagcaggtaaagagagagaatgagagagaagcaaaagctgaaaccccttacaaaaccatcagatctcgtaagacttattcactaccatgagaacagtatggaggcaactgcccccatgattcacttatctcccaccaggtccctcccacaacatgtgggaattatgggagtacaattcaagatgagatttgggtgaggacacagagccaaaccatatcagagacaaagccttattcaatgtaagagacaaagaggagtcaaggttaaattccagatgtccaatatttgtaactggataaatggtgatgtcatttg

SEQ ID NO: 17221 - DNA, 1045 bp, Homo sapiens
cataattgtttccactacatagtgatggatttgtagttagcagtcatctggttgccacatcactggttaattgtttccacatatgtgtgaacaaacacctggagcaacctttctcaaccagggttctgcaagacaagccatttagtgttatggtgtaatgaattattttctttcctgtgcacctagaatcgttcttgttacgtactatccagacactgagttcgttaggcatcttgactgcccaattactttattcagatttaacacttccctctgtatagtccctggacctctagaattataaattctagactgaatctgtgatgctttcagaaagcctcatctgagaagtagtatctgcagggactgtgcttctcaactaattttcatttattgttatttattttatttatatcttaattacttcacaaaaggacttgtgatgtcatttgttttcgttggcttttaggaattattttcttaacatcaatcttttgtgatatgaatggcagaagagttcttttactctgtcactggattgctctatttctttatggtggtggagggttgggaagacaattagagagaaaagaggataaatgggaaatctcatgtaatgaaagctacacagatggtccccaatttatgatgctttgatttatgattgtttgactttacaatgggtttatcagggtattaattgcattttacatttatgatatttttgacttaggatgggtttatcaggacataaccccattgcaagccagagagcatctgtacttgtttgtaataaaaagatctgcttacaaatatctttgtccaaaacgtgactgatgaatgtctacaccagtatatatgtcttcaacgtgatcatttatgatgttattgaaaattagaagaaacccttgctcataacaggaattgatgagttgatagaaatgtttatgagtaccttattctggtgttactgattttttccatactactctataacaaagtttttcctggtaaagtctataaagtttatttgtgctttaatacc

SEQ ID NO: 17222 - DNA, 2032 bp, Homo sapiens
tttttttttttaatttgaaggatgcatgcttatatgtattaataatgtatttttgcaaaaattaaaaaaaaaaccctcttcttttaattaggagagagaagctcttcagaaacagctggatgaagcaaatcgagaagcacaaaaatatcgacagcagctcctaaagaaagaacaggaagcagaggcctacagacagaagttggaagctatgactcgtcttcagactaataaagaagctgtttaattgaaatgaacatgtagtttgattttacttttggtcaagaaagaatacaatcttgaactgtacacaacaaaggtacagccatgggaatacagaatgatagaagagactacagatggataattggacttaagccatgagctctgagttcttgtaacataaaactttactttagaagttgtgaaatgtatttaaaactgaattctgtaaatagtttttttttttttacagttccaaatgagttgataaagattgttgaagagatccaaaaccagaataagccactgtttttgtgaattctttttgattttagtacaaaccttaatttctcagaaacggaacagttttaagggtgatcgttgttggttaggccaaatgttgtgtaataattatggtggactgatgctggaattactcctgtaggtataaacctctgtatgaagagaagatttctcccaggaaatctttgtacagctttaagttgtgtcagattctctgaaaacattttttagaaagcaaaatttttatatttgttcaatttcagctatacccaagtagatttacatgtatatgaagcaaatatttttaaaaatttctgtttgtacatattctgcatgttttataatttcaaaatgcatcacttacataggtatttctcccacagaaatgatgaaagtgaccagaaaaaaacaaaaacaaaacccctttactctgtaggtcattgaaacgaagtaagctggcagctggttttattggaatgacagtgttctcggaaggagcagcctacaagataacttgaatttgccaattctgcaaaatctgtgcttttttgaaaatttaagagtggggacgtgaaactgtattctgtgccttccatcatgatttccacatgaaagcactttaaggcactgattttaagataatgtttttggaaaacccaatgcatatgggtttctgaaatattttatggacttatttctccccaggaaatgattcttacggaaaaaaattgcttttgtatgtagaacaggaactttttgtattacagtgatgcaatagacatgtctaatgtaacttctacttttccttttgaaagctcagtgtctgtgctatgacttgctctcatcacaatattgttgaattccacaatgtatggacattaaacactggcagactgttcactttttcttttttttttttggtaaaatattacttcaaacccctttttcttgctttatttttcagtgttttattgctttatgaactgtttaaccctgaaatccctctaggttatctatactgtataaaaaagcaattacccttaaaactgtactctggcctacttttctattttgcaattaaatatctttttcacatatgttcattgtagacttatgtttttatcacatcttattaacacattaaaaatgttatcctactgcatatttgagccaccatatgaaaatattttatactctccacaacatgactttaaaattcctgaggtaactcttgagaatttgttaactctttcactggaattaccagtatatttgttaatgtaataaaggggtctatggtctgtcagcctgatggttactattggaagcacttaaaaaagagtttagggcaaattgaagaactctgtaaggaagaggaaaaagatctttttcaattttccactaaatttgacatattttaagtgatccaaaaactagtttttaaaaatgccaggccatattttcaatagcatgaagtgactttttctgcagtcctgaaaagtcaatagag

SEQ ID NO: 17223 - DNA, 1035 bp, Homo sapiens
ttttttttctgagacggagtcttgctctattgcccaggctggagtgcaatggcggaatctcggctcgctgcaacctctgcctcctgagttcaagtgattctcctgcctcagcctcctgagtagctgggactacaggtgccagccaccatgcctggctaacagaatgcccttttaatgcagactttaaaagcgataaaagggttgccgcatcttttacttcttaagtctttctctccttatgtggtgggatgtcctcaggttatggttactgaaagaaagttatcctagaaggaagtttttcatcagctttgtgagtatgatttcactggaagtggtcttgacttttggaagatctagctctgagatcaaggttctctctgtggggagtggagaccttatggagaagcagttattcttgtacactgatagtgggagtataagttgctacaatcttttggtagataatttggcagtgtctaattacaactaaaatgtgattttaaacaagtctagcaatcctgcttctcaccataatttctagaacaatgctaactcgtgtgtattgcagcactatttgtaaaggtgaaaaattaaaacaggatcatataattagtatactgtgtgtatttgtttcctattcctatcgtgtaataatttcctatttgctataacaaattactacaaccttagtgccttaaaacaacataaatttattattttatagttctggaagtccgaagacctaaaattaggatttcggcaggactgttccttctggaagctttaggagataatctgttttctttccttttctagcttctaaagaaggcatgcatttcttgacctgtgaccccttcctccatctttaaggccaacagcatagtatcttcaaatctctctcattctctctctgatctctgcttccttctccctgactgtgaccttctgctcccaatgtcacatctcctgttctgatcctcctgtctccctcttataagaagtcttgtgattacatcatacttggataatccagga

SEQ ID NO: 17224 - DNA, 1046 bp, Homo sapiens
caggaaatgattgtttttaagtggcattatagttttgaaaaaaccaaatcgaatttttggaataaaaactgactcaggagtttgaggccagcctgggcaacatggtgaaaccttgtctgtacagaaaatacaaaaaaattagctgggtgtagtggcatgcacctgtagtcccagctactccggaggctgatgtgggaggatcacttgagtccaggaagtcaaagttatagtgagccaaggttgtaccaccatgctgcagcctgggtgacagaatgagactgtctcaaaaaaaaaaaaaaaaaaaaaaggaaaaaaagaaaaagataaagtaactgaattaaaaacttaatgatgcaatttgcagcagattggacacatcagaaaaattatcaaactggaatatagatcagataaaaccatccagaatgtagcatagatgatggctagaggcaaaaagttgggaaatatagaagacagtgtaagagatatggggatagagtgagagagtcttaattggaattccagaaggaaaggaagagagaatgggacatttgaagagatgatggctgatattttccagaaccaaggaaagataccaaaccagaattcaagaatttcaatgaatcctaattaggataatagtaagtccacacctaaacacattgtaataaagtcacagaaaaccaaaagtagctggagaaaaagaaaaccatcaaacgagcaagaattagagtaatagatgacttttcttttctttttttctttttcttttttttttttttgagatcgagtttcactcttgttgcccaggctggagtgcaatggtgcaatctgggctcactgcaacctccgccttctgggttcaagcaattctcctgcctcagcctccctaatagctgagattacaggtgcccaccaccaaatgcagctaattttttgtatttttagtagagatggggttttactatgttggccaggctggtctcgaactcctgacctcaggtgatccatatgcctcagcctcccaaagtgttggcattacaggc

SEQ ID NO: 17225 - DNA, 1068 bp, Homo sapiens
acaggcgtgagccaccatgccaagcctcaaaatcattttctaatatattaaaaaaagtgtgtgagtggactgtgcaattcaaatctgggttgttaaagggtcagctgtacatcaggaaggtcacttccaaatatatcttgtttctggataatagtggcctagattagaccagtcttcttttttttttttttttttttttgagtcggagtcttgctgtctcacccaggctggagtgcagcaccatgatctcggctcactgcaacctctgcttcttgggttcaagtgattctcctgcctcagccttctgagtagctgggattacaggcgcatgccaccacgcctggctaattttgtatttttaatagagatggggtttcaccatgttggccaggctgatcttgaactcctgacctcatgatccacccgccttggcctcccaaagtgctgggattacaggtgtgagccactgcacccggccgaccagtcttctttttgaagacaattgaaaatgttggataaaatatatagaacattaccttagtagctttgaagaactgggaagaaaagggaatctgttaagccaaattctggaagaaagcctaaagcaggaagttaacagactatctggcgaactgaagccacttttgctttcaatatgtttgccaatatcaagaaatttaggtttctgttcatcagtcttatggggtgaggtggacagaaattaagatgcagagcccacccaacatgtggacatgtaaagtcttatgagatattcttgcctaattaggcttgggctccatatatctacagctgagaggtaaggatgaaccagaactaaccgcttttcatcacctacctcccaatcaaatatcaaggaatttcaagacaagttgtgttggtactgagcagagcaggaggaaaaaagagaaaggaaacaagcaaacaaaagtctttacaaagcataggtgggaaagggaaccgtaagccatacttaatttaggttggttcctgactccaggtgcttgtcagaagcaaatgcaaatgttcttcaaaggaaggctccttcat

SEQ ID NO: 17226 - DNA, 1053 bp, Homo sapiens
agtggccaacaaacatttgataaagatgcatggtctcattaggagtttgagaaatgcatattaaaacacaataatagcatactatgcagctgtataaaaaaatgaggaagttctttctgtgaactaataggaaaagatctcatgtgttaagcaagaaaagcaagtggagagcagtgttatgtggtaatgttttttttttttttttttttttttggtgattatagaaatactggaaggatactcatgaaactagtaaaggtaataacttgttggggttgtgggtccagggtgggccaaggaggagcagtgagcagtgtaaatacttccattgaggattttcaatgtatacatttctgtgtttgggcttttgagctatatgaaagtattgcctattgaaaaaggaaaaatatgtgaagaagacttcatagaacttgaccaactgtcttagtccatttggggtactataacaaaatataaactagtgacttataaacaatagaaatttatttctcagagttctggacgctgggaagttcaagatcaaggtggtggcagattccatggctggtgagggcccatttcctgctttatagatggagccaccttgctgtgccctcatatggtgaagggacaaagcagttatctggcaataattccatccatgaaattatgaatggaatgataaggtttgccctcatgagctaatcatcactcaaagtccccatctactaataccatcaccttggggttaggatttcaacatgttaattttgtggggacacaaacattgagaccagctgtgtatagaagatgaggcagagggaagagtggaagataactcccagatttctaaattgggaagtaaagagggtgataatattatcaggtaatgcagaaggaagattaggttttgtcatgtgcctgggaagttctggacatgctaactgacaaatccttactacttcttagtttagtgtgtatgggtataatttatgtactttagatatggaactttcgagcttatcttaaacatgaatattaagtagtcatcaa

SEQ ID NO: 17227 - DNA, 1031 bp, Homo sapiens
atcagcgtgcctagcctcaagggtgcatcgtgaaaactgaaaccaaaggaatgatacaggcctgctttgtgtgtgtcttcccactttaagcttgttttcagtacaaatactcttgctttaaacctgattggactgtggcgagcggacatctgttcaaaggaggggccgagaccacagtacttctgaagggggcttgataatgtggaaacattttaagttttctctccggactgttttgctctctcaattcaggcaagttactgaagtacgttttttatctagaaaaaggtttgatgtagtctgtaaatggtccttgtaaagtacattgccatctcagaattaaaagatccactctcatttattatgcagaagttagtggtcattctttcctgtagatagtttatctcatgtaaagacccacccagcttggtttaaatttttttctcactgacgtataaccatcagctttgatacttccattttcaggctcagactttgaatttaaggaaactaaagatgactttattttcttttctcttggttttttttttccaaaaacaaaaaataaatccattacatgttaacatagatgataagagtgacatcttgcatttttgcaaatctttttaatgcctggtttaatagaagattctcagatctacgtcagactgttgtggttagcacaccatgtaacctctggaacactccactgtacactcatacttttttaaaaaaaaaaccaaaaaacagaaatgtgtcattcttaccgtgctttcaccatacaagtcaaatcaagctgttatgcaagacacattttaacaagactgaataagattgattcccatactttttttactgggctctaacttttttaaaagttggaatttaggtgactaaacaaaatcacagatgaagactgcataatctgcctatgatctcggagactcaggaacattcgaagatattcttaagtgattaaaacatttaattctattacatatttataatgatttacacaagtaacacgtgaa

SEQ ID NO: 17228 - DNA, 1770 bp, Homo sapiens
cacagaaatgttactgtgtcacttttccctcgggaggaaattgtttggtaatatagaaaggtgtatgcaagttgaatttgctgactccagcacagttaaaaggtcaatattcttttgacctgattaatcagtcagaaagtccctataggatagagctggcagctgagaaattttaaaggtaattgataattagtatttataactttttaaagggctctttgtatagcagaggatctcatttgactttgttttgatgagggtgatgctctctcttatgtggtacaataccattaaccaaaggtaggtgtccatgcagattttattggcagctgttttattgccattcaactagggaaatgaagaaatcacgcagccttttggttaaatggcagtcaaaattttcctcagtgtatttagtgtgttcagtgatgatatcactggttcccaactagatgcttgttggccacgggaagggaaatgacttgttctaattctaggttcacagaggtatgagaagcctgaactgaagaccattttcaagagggacggtatttatgaatcagggttaggctccatatttaaagatagagccagtttttttttttaaatagaacccaaattgtgtaaaaatgttaattgggttttttaaacattgttttatcaagtcactgttaagtagaagaaagccatggtaaactgatacataacctaaattataaaagcagaaacctaactcactcgtcaagggaagttaccttttgaggaaagttaaagtacttttttccctatctgtatctatagcaacaacccagaacttacaaacttctccaaagattttattgattgttatatcaaatcagaatgtaaacatgaactcttgcatatatttaaaattgtgttggaacatttgaacatgaatgctgtttgtggtacttaagaaattaattcagttggattatcattatgtgatactggcagattgcagtgcaaccttatgccaataaaatgtaatttaacagccccagatattgttgaatattcaacaataacaagaaaagcttttcatctaagttttatgctttaattttttttctttttttttctttttcttttgtttccttggtactaattttaatttttatttggaagggagcagtataaagcttatttgtatttagtagtgtatctcatagatacagacaaggcaagagatgataagctgtttaaatagtgtttaatattgattgggggtggggagaaagaaaaagtgtattacttaaagatactatatacgttttgtatatcattaaatctttaaaagaaatgaaataaatttattgtttacagatgtttagtgagtttaatcattctgaaaaattatctgacattttcagggtgtcaatttgagtatcagtttttttaaatgaaccatttgtatacctgtgcttttgatctcctgtcctgtacaatgtttaaattaatactgatttcttactgtcttcttagaaatctgttttttgttaggccaaaaaagggcaatatgggctgtctgttgatttttaattttatattgattattttcacaggattataatagtagctatacttttttttttttttttttttttgagacggagtctcgctctgttgcttgggctggagtgcagtggtgcgatctcagctcaccacaaccgccgccttccgggtttaagtgattctcctgcctcagcctcccgagtagctgggactacaggcacacgccaccatgcc

SEQ ID NO: 17229 - DNA, 1047 bp, Homo sapiens
acaccaacatggcacatgtatacatgtgtaacaaacctgcacattgtgcacatgtaccctaaaacttaaagtataataataaaaaataattttaaaaataaaaaataaaaaaataaactaagcatttaatttctttaatagagataggactgttgattatcaaattgtttttgagtgagttttggtagtttgtgtcttttaaggaattggtccatttttttttttaattgtcaaatttgggggcataaagttatttatgctgttaccttactatctttttaatatccgttaggtctgtggcaaatcccctttttccttatggcagtttggtctgtgctctttgtttcttgatcagcctggctagaggtttatcaattttattgataccttcaaagaatcagttttcgttgtcattgttttactcttgcttttctgttttcaatttatttgatttattctttttatttttccatgtttatactcgctttaggtgtagtttgttctttttctagtttattaaagtagaaacttagattattgattctcggatctttattttatttatttattttgagatggagtctcactctgtcaccaggctggagtgcagtggcgtaatctctgctcactgcaccctccacctcccaggttcaaacgattctcctgcttcagcctcttgagtaactggcactacaggtacgtgccaccacacccagctaattttgttacttttagtagagtcagggtttcaccatgttggccaggattgtcttgatctcttgacctcgtgatctacccgactcggcctcccaaagtgctgggattacaggtgtaagccactgcgcccggcctcagatgtttatttctaacaagagattgagtgctataattttccctctaagcattgttttagctccatccctcaaatttgagtatattttattttcatttttatttactttaaaataattataatttcagttgttattcctctttgatgtatggattgtcttgtttagttcttaaatagtttaaaattttacaaat

SEQ ID NO: 17230 - DNA, 1047 bp, Homo sapiens
ttctctacttctgtgaagacatatacacaaacggagacttttttccctcttttttattattttgttttgttgtgttggttttaccccaactgggatcatgagatttttttttttccactttttttttctgcctaacgatatatcataggcattttctagagttatttctttagtaagctgcgtgatagtctatagtgtagcagctatagcatgatttacatctgtgttgataaacattcactctacttttagttttttgcttctacaaacagtgcttgcagcaaaccattctcatgcactgctacttttatttccttaaagtaagttcctaaattggtgtagaaaagagattagtacaattttaattttaataacaactgccagagtactttcccaaaagcttatcagaaatcatactcagccttctacggaagttcctgcttctctacagtctttccagtatggaatattcttaatgtttgccattctgttggatggaaaatagtatcgtgttttaattctggtttttccttttgtgaaattgaaccattttattagattttgctctaatgggttaaatatttgtgattattcaaaatatcagtaggtgttaagtgtgtgtgtgtatgtgtttatatatacacacatgaatatgtaagagactggaaggatttaatcataatacttctggagagggctggaggtgaagaaagattttcacaatcttactctgtgttacatgaatgttttgcaagaaaatgtgatatgtgttaatgtgtgtggtttttttcccttaaatcccaaacacttgttttttgtttttgtttttgttttttttttgagacgaatttcactctgttgcccaggctagagtgcagtagtacgattttggctcactgcaacctccgcctcccaggttcaagcgattctcccgtctcagcctcccgaaagtagctgggactacaggcgccccccaccatgtccggctaactttttttttttttttttttttttttaggaatgaagtttcaccatgttggtcaggct

SEQ ID NO: 17231 - DNA, 1029 bp, Homo sapiens
cctctgtgccaaaatagagtttttaagcaaagaggagatgggaggaggtttacgaagagctgtcaaagtacagtgtacctggtcagaacatgatatcctcaaatcagggcatctttatattatcaaatcttttcttccagaggtggttaatacatggtcaagtatttacaaagaagatacagttctgcatctctgtctgagagtaagtgtcagtgaatatttaatagtggaacataatttaagctttatattttaacttctgaaatatcaataagccaaatataatcttagtttaaatattaaacaagggttctccccaccctcccttttataggaaattcaacaacagagagcagcacaaaagcttacgtttgcctttaatcaaatgaaacccaaatccataccatattctccaaggtaaatctttaatttttttctgggatcttttattatatggatagcagtcccttttgaccttcatttttgatgttgaatatttaattatccattttgtagatcaattagaattttattaacaaaactgctagtaatatttataactattttttataaggttccttgaagttttcctgctgtattgccattcagcaggacagtggtttgctgtggaagaatgtatgactggagaatttagaaaatacaacaataataatggagatgagattattccaactaatactctggaagagatcatgctagcctttagccactggacttacgaatatacaagaggggagttactggtacttgatttgcaaggtaaatttattaaaatattgctaaggtgaaattctgcagtaggttctcacctattcatatgttatacagaatctgctaatttatagataaataaaatcttaggccaatagaagctataaaaaagcaagttaatcacagtcatagcatatagccatcagggccttgagtaatagaatctggctatctttttttgttcccccgccccctcccccacccccagagggagtcttgctcagtcacccaggctgg

SEQ ID NO: 17232 - DNA, 1096 bp, Homo sapiens
attaaaactgttggctaacttccttttcctgcaagacagtaggtttctttttatttgtgttctagaaacttagcacatagcagatttgacttgtctttgtcttcttgcaacatttaaaggtcaattccacacacacacacaaaaagatgggggaagggcttttgatgggtatgtttcacattccagaagttcatcttctcatggtagacctgctaaaatatttacatggctacagtccccaacccccaaacatcagaatcaaagagagatttttctttctgaatgggaggtatgggaggagtgagtttatggcaggagttaggatagtgtgcagcataatgtgctcttcacttgtaggtgtctaaatgcacagctgtcactaatctggcataatgaaatagggtaatatagcacagtggacatattttatccctaatttttctgtttttgtgaggaacagttacactatggaaattcaaaatgattttatgagattatccgggttaaaatttttgctgtactagtactttttaaatggtctcgtttgtttatttgccattctaggtctcacttctccatttaagccagctatggatacaaattactattattcaggtcagtaatattaaaaacaaaatttaatagcattttggacctttacagatttaattatttctctctcatttttatgcagctgtggaaagaaataacttgatgaggttatcacagagcattccatttacacctgtgcctccaagaggtaaatccaaaaattaaagaaataaataagtgaaaattaaccctttaatgatttttagctataatatagaatgtgggtgggattacattaagaagtatcaatttcaaataaattcttgattaatctgactaccacaagggtgaggtatgtttgaatagaagaagggaagcatcagaaatattgagtttctccattactggcatattcagaagcaacaatatattctaattctaaaaagttcttgatccactatctagtaatttatataaactgacatcacagtgtccatgaaacagctctaacttctaagtttaattcagaagtgtgtagaatttt

SEQ ID NO: 17233 - DNA, 1078 bp, Homo sapiens
gaacctgcatttggtgccagtgtatgttgttataaataaatacagttaacattgggagaaatatttttcaacattagaaactaagaggcaaaatgacatctacttacttttctctcagttctttgtccatcaattctattgaaatatttctagcatcctgcaaagtcatctcaatgtattgttacagtactggaatgaatctccacgaatacagaagttatgaaatagtttattagtatagagccttcaatttggcaccaaactgctaataatatttatgcataaattggagatacaagttattaataagtagatacatatggatatatatatatagatatatatatctatatatggattgggattggcttaagggaaatggcaaatattcaaagggaatcaatttcagaatttccttaataatattttttatataataattgtataaaatcaaaaaattaaatgatagccaaaacttaaatcatagcacagcttatactatattttttggtgtttctttaggccatctgaagaaggaacattaaatggtgagtctgtgtggtagattgaacgtgaaaaaaatgagaatcttacatgatctgttacagcaaacaccacattattctaggtaagatattttagacttcaagctagaaaaagccaaggtattgaagagttcttccctcatatactttctccttactgtagatgtttcacaaacacacgaatcaccctgtgaatgatgatatctttactgtcacacttcctccctgctacttggtctctgctatacagcctgctccttttctaatattccatctgttttaacaaatgaaacttttagtcagctgagttattcttgaccaccttgactttgtactcacaaagtcctattgcatttacttcctacatgtctctaaaatccatcctccactatacatcccactgctgctttcagcttagaccattactttgtcaaccttttatcgaagtgtatagtgcatacagaatagtgcagaattcagtgaattctttcaaagtaagtatagccatgtaatcagcacctaaaaacaatttt

SEQ ID NO: 17234 - DNA, 1023 bp, Homo sapiens
tactattcaaaaagactggcaaatttgaaaaactagaaataaaaaaaaaactcggtgggggctgtgtgcagtggctcatgcctgtaatcccagcattttgggaggccgaagcgggtggatcacttgagatcaggagttcaagcagcctggccaacctgacaaaaccctgtctctactaaaaatcaaaacttatctgggtgtggtggcacatgcctgtaattcagctactcgggaggctgaagcaggagagtctcctgaaccagggaggtggaggttgcagtgagccgagattgcgccactgcactccagcctgggcttcagagtgaaactccatctcaaaaaaaccccactcagtgggagttaattaacagattaggcacatctgaagggaaaattactaaactggatcagaatgcaacagattaaagtaaaaaaaaaaagataaactacatagtcagatggaaaatatattaaaggtaaagagacatggaagacatatctaactggccttgagagagtagacaaaatttgaagagattagaaatggtttagaattttacaaaatgataaaatatgtgaagattcaaattcgggcagaatgagtctcaaactggggaagtaaaaataaacccacacctaggaacattatacaactgcagaataaaaaccatatgcacatatacacaacaaaggctgcagtgaaatatgcctaaatgtcatgagcattcacagcttacatgattttaatttttctgtttgtattttgatgtttatatgtatatgtatatatacatatatatatttattattttttttttcgagatggagtctcgctctgtcgcctaggctggagtgcaatggcacgatcttggctcactgcaacctccacctcccagattcaagtgattctcctgcctcagcctcccaagtagctgggattataggcgcccgccaccacgcccagctaatttttgtatttttagtagagacgaggtttcaccagattggccaggctggtctcga

SEQ ID NO: 17235 - DNA, 1967 bp, Homo sapiens
ttctctggtatttaaccagatttcttcatgatattcagaatataatgtattctgtcagtttcatcatattgaaaacattttgcccagagtcttctaatatatctcagtctggtctttttgtcctctacacctggaatacaaattttgttctgagattttcctttcttcattctgaggttatcctttgttgtactgtaaaattgtaagctttctctaagttgatttgtaacttaatgacctgactttttttggaagtaggcttaattctaaagttcatttcggataaataagatatgacaacaaaggtattatcataaattggggaaaaggattattcattgcggcactgtttatcataggaagagattggaaacagatcaaatttccatcagtaggagtttgtttaaatacattaatgtgtatccaatatgaaataaagagagcatcgaaagataattgggaaatcttctctgttctgtagaaaatctctaagctggctaggcgcagtggctcacacctgtaatcccagtactttgggaggttgaggcgggtggatcacctgaggtcaggagtttgagaccagcctgaacaacaaggagaaacccagtctctactgaaaacaaaattagccgggcatggtggcacatgcctgtaatgccagctactagggaggctgaggcaggagaatcgcttgaactcaggaggcagaggttgtggtgagctgagattgtgccactgctctccagcctgggcaacaagagtgaaactctgtctcaaaaaaaaaaaaacaaaactctaagcttaaagtttaaaataacaaaaccctccagacatatatgtttctctaccatttatgttaaatattggcgggggtatgtgtatacacatacaaatatcccaggaagaatatgcaagaaatgaattacctttactgtccccagtcagggtgattgggaacaggagggggagaaatttttttttacttcatactctcatttattgttgccttttcacaataaattgaatagtttactcaaaataaattgaataatttatgggcctcatgtaactcttgtgttcagcgtgttgaggaaaggttgagttatcttatgaaggttatactgtgcctagaatactttgtgtttggttagttggtattcataaaacttcagttgtgtagcttttttatattttttaattttcttttagcagaaaaaatcagtagaaggccatctaccgaagacactcatgaagtagattccaaagcagctttaataccggtttgtagatttcaactaaacagatatatattattaaatacattaaacttttttagataagatctacaaagtggtgatatttgggactatatcaaaaattcaaaaaaatttttcttaagaaaactgactttagcatagtagcagttacagaaaagtttcttacagtgaatagtcaggaattttaaagaaaaatttatgcagaataaaggcaggaatctctttttgtttgaattgaagctaattatatgaactcatttccagctaactgcgataatgattgattttgcaaattccctttaaaagcacacactgacaagacaaaaagctcaggaaaaggcagaaaaattactcctttataatcaagtattatatataagtcagtgctcataattttgctcaagaaaatattgacttacattcaaaatatatctgttctggcatagagagattatgttgttaaaatcatgttattgaaaaaagttatttcagtggggaaagaggttagttaacaaagagattcacagtaacaaatcctcctttctggagggactcttcctgaccctgagctgcacaactttgcaacaaattaaagcctaaccgaagatgacctcacaatggcaatttagaactcatgggagtcaacttacataaacggtatttgatttctgataagatagtggaattatt

SEQ ID NO: 17236 - DNA, 1028 bp, Homo sapiens
aacatttctctcttttttttttttttttttttttgagacggagtctcgctgtcacctgggctggagtacagtggtgtgatctccgcttactgcaacctccacctcccgggttcaagtgattctcctgcctcagcctcttgagtagctgggattacaggtgcgcatcaccatgcctggctaatttctgtatttttagtagagatgaggttttaccatgttgtccaggctggcctcaaattcctgacctcaagcgatccgcctgcctcggcttcccaaggtgctgggattataggcgtgagccactgtgcccggcctacatttcttttttaaaaatttcttctccccatatgttttccactgattaaatacttaatgagctcactcttcccagatccaaaagttttatttgaacatgaccctgactcttagaaacctattgtctagcagtgagaagctgtatattatgtacaagtgcaagataatttgataaatgtttgttaaataagtttcaaaatatgtagaacagctggcaaaaaaggtgtattcttgcctgcaaagttggttttatttcttaaatgttgctctcatatattacttgtggctatttagagcctttggagtggtaatgtggctacaacaagataattaaaaacacctagaaaggtgttaagcttctctagcccttaaagaacttacattatagaaatgttaagtgacatacacagtgaaaacaggacctttcctaaagctagaaccaaggaaatgataatgacgtaggagtttctatgaatgattactttttatgtgatccaggtgaattatgtaattgctgtcaggccatattacttactaccctacatataaaaagtagactcaaatgcatttttatattgtaacattttgtatttttattatcatattttgattaaagtattgtactaaatcaattaacttaatttaatatctattaactagatattgataacttggtatttaattggttattatatgcaaattgaggtgtaatg

SEQ ID NO: 17237 - DNA, 1051 bp, Homo sapiens
gccactgtgcctggccagcatttctttttttctgttggcttcactacattctggaagcatatggtgtttggtaacagttacagtaacagtaatggtagttctgtatatatgtagctgtatatacattattttgtgttactttgatgtggggtaattggaataagtagcctgtggaacaaaaacgttttttgaaatcttgcattttaatataagattagcactggatccttcttaaacataaggtaggccttgtataattaaataactgtaccttattttatatcttgtttaaatgcatgtgaaatttttctctttttatcattattatttgaggctacaaaataaaattctacattattttttcacatttgtaaaaaaagcttatttctctcctacagagtggaacagatgtgcattcagattaaagaagttggagatcgtgtcaactacataaaaagatcattacaatcattagattctcaaattggccatttgcaagatctttcagccctgacggtagatacattaaaaacactcactgcccagaaagcgtcggaagctagcaaagttcataatgaaatcacacgagaactgagcatttccaaacacttggctcaaaaccttattgatgatggtcctgtaagaccttctgtatggaaaaagcatggtgttgtaaatacacttagctcctctcttcctcaaggtgatcttgaaagtaataatccttttcattgtaatattttaatgaaagatgacaaagatccccagtgtaatatatttggtcaagacttacctgcagtaccccagagaaaagaatttaattttccagaggctggttcctcttctggtgccttattcccaagtgctgtttcccctccagaactgcgacagagactacatggggtagaactcttaaaaatatttaataaaaatcaaaaattaggcagttcatctactagcataccacatctgtcatccccaccaaccaaattttttgttagtacaccatctcagccaagttgcaaaagccacttggaaactggaaccaaag

SEQ ID NO: 17238 - DNA, 1034 bp, Homo sapiens
acatgaaccaccatgcccagccaggattttgttttttaaaatttgcacttacttgattactaataagtctgagtattttcttatgtcttacccatttacatacaatattttaaatttttttaaattatttttttctgctgaatgttagtctttgccttatacttactgcctgtatcttttctagtttctcatttgctattagttttgtttacagaaggatattttttgaattattatttagtacagaattacaatgaaatcatcagtatttaaaactttaagagatgattaacaaagtttattttatttttattcattatttctctagcaatgtgtatttacaagtgaaggcaatttccaatattgtatggaagtaccagcgttatcattttattatggcttatcatgagaaaccagttctgcctcctccacttatcattcttagccatatagtttctctgttttgctgcatatgtaagagaagaaagaaagataagacttccgatggaccaagtaagtaaactatattaaggcaaatgttttcattttatcacttctcatttttacaccaaaggctatatattgattttattcaaaaatgacttagtggattaatgttatggtagatttttgttaaatatgcctgtacataaaggaatttttaagtgcaatatgatatctataaaaatggatttagcattaaacttcgttatgagaatggcgtctctgtttctgttaaaatggtaatgtaaaccgaacttctttgttgttctacaaaccatttttacagctctgtaaacaataacaattttagtacattctgtgtacatgagactaatcatactgtgtcaaattatgcttaaaattttacagggactttcaaattagttcttaaatttctctgagtagatacgtgagggagaggtatgagagagatagcggagggatgttgtataggaaaaggaaatcagaagaggaggaggaagtacctgattgtattctgctgacatcacactggtgaagcaaaaaagaaa

SEQ ID NO: 17239 - DNA, 1965 bp, Homo sapiens
ttgttggggagattttttcattttcatcaacaagaatttgtttctttggtgattgctttttcacccacacatgtgaccattaacctgagactaacatttccttacacctctatatgaaaatgttcttgttccttcctattcagaggctggaattgcaaatatcagttatctgatctaatctccaaattctgtctccactgatgaaaatagggcagtttgcttacatttgcattcatgtgaatggctgcgttaaaatagccaacatgggtgactacaggaatttctcttttctttctttactgcagtttactccctagcctgccacagataatcaaataaaggatgtgacttattctaggactggtggagacaagacataaaagtctagaaataaataaaagacagatgagaggattcttacccataatttttcaagggtcaataagtgtgggttttcctctgaaatgaaataaatactcacatgtatttatacataaactttagcacctctctgtaacctgttttgtaaagagtatcaaaggtgggctgtttccttacctgggtcaaagccacttcacattttttccactttttggggttcaactttagtgactgggagctaagaaaataccagttgtctgtctgtcttgtcttgtctttttttcttttcttttctttctttctttcttttttttttttttttttgacagagtctcgctctgttgcccaggctagagtacaatggcatgatctcagctcactgcaacctgcacctcccaggttcaagcaattcttgtgcctcagcctcccgagtggctggaattgcaggcatgcaccaccacgtctggctaattttttttttttttttttttcagtagagatggagtttcaccctgttggccaggctagtttcgaacccctgacctcagatgatctgcctgcattggcttcccaaagttctgggattacaggcgtgagccaccgcggcgtgccccagttgtcttttttaggaatactgtttggtttggggaggaaggaggcaggaaacatgtgttccttgatgattatggtggtgaaattctgcagtaattttaatatattatgatactgtaggtatgagttaagcagaattgtgtggcatatgctgagaacataaacctgattgtaaaatcccttctgtgggacgttctaaaggttgacaagagttgtagaacaacacgtttatactctggggaccatttatacaccaataaatgcaatgtctgtgctgaagaagagatatttctaaaattgttttaataaaggaaactaggagataatttacagaggttcatttaatgtctgtttttgtgtgtgtttgaaaatgttcataattaaaagatttattttgtaaccaatgttatttatgtaacctttactttttcattagttggcatatttaggatttctgatgctttatacatttgtggttcttgtacaaatggaacagttaccttcagttcaagaatggattgttattgcttatatttttacttatgccattgagaaagtccgtgaggtatgtctttagtttttttctaccaataatttactgtatacatggaagattttctgttttgttttgttttgggtgtatacgtaggggggtgtgtgtgtgtatgatgacattgtagaagtgtagaacctgtgtaattttgctgttcccaaaataatggcaaaagaatagagattagtgagtatgctgtatactttgttgccattacagataaaatgatttgtgttagaaatgtagcctataaaaatgtaacctgtattttgtttgtttgttttatttcctgaacattcacatttttgctctctgtcactcttcaaaaagtattaaatatacttagctaaatgacttttaatttacctacctgatttagccaattaggtaggtaagttataaataggtctttaggccag

SEQ ID NO: 17240 - DNA, 2497 bp, Homo sapiens
taggtgacagcaatagaccctgtctcgaaacaaagaagaaatgccagaattcattttaatttttgcaaatagtagcaattggattagaaagttccatttgaattggtaaggaaagggtggaagtgaagttggagctgtgttataagaaaatagactgaattcaactgggaaggcacttcagaagctagaactacatacacagagtaacgacatagttcataaaagtttacaatttacttagaggggcagtgttggaatattaaactggaaaagtagtttgtagaagttttctaatatatactaagacctccggctccccaagtggggtatttagagggcagtgataattgttactgaaaataactctttaacagggatcctatggttacttagtgggacttcaagattcagatgtttttcataattaggttagtccctagtcacattgtttttcctctctaccaggtaccaactgttttctgtgtttgaaatactacataaacttttttgaacagagcattgtagcattgtgagttttgattccctttgagattatagtttgatttctaggaccgggagaatgtgctctggattcaccttctcaatcttgtacataatgcgacatattttaatattttgtgatttccacatagatgtagatgtctgaaaacagagttatggttttaatgcctcataattctgtaagtgtgtgtgagaatattaaaaagtaggaagtattaatgtatataagaatagtggtttaaaattgcagtttgttaatctgagtatattttggcttttatctttttatagtgattttggtcagttggccgttgaattattagaacagtccttcagacaagatgaaaccatggctatgaaattgctcacttatgaactgaagaactggagtaattcaacctgccttaagttagcagtttcttcaagacttagaccttttgtagctcacacctgtacacaaatgttgttatctgatatgtggatgggaaggctgaatatgaggaaaaattcctggtacaaggtatactttagaaataatttgatataaagcatgtgattagataaaaagaacagaagaattagtctaaatgtgtagtaaaatgccttgatgtgtgagtgtaatggtggggggtaaagagggagcaagatggatgattggcatttcatcccaagtggtataatgggcttcttttttcctctacttaacttttgaatccttttcaggtgtctataatgattatggcctctctttgagctagaaggggaacaaatggcaaatattggagattatggcccctagcagccttgaaaaaagttactactttatgaaaagattattcccaaattctgaaattcaagacctatctactaatttaataatctgttacttttaagttacttaaagtatattggatgagtatattgatatacccattatagataagtatatccatgtggcctgtttttatgattaaaaatttgggtaaaatggcatgtacctttggttttgtcatggtgatagatactgctttgaactttgctttttgttatcttatatcttttaaaataaggtgcagaaatgtaggagtcagaaatcaggcaaatagtttaaccataggccactgaataaccaacagaaaacctgttacacaattacaatttcttcatgctttgggattttgcaagtaataagtaaaattttagaaataaacctttttgtttatagaggcacaagctgagtaatcacattatgacatggaacacttgcaaagagatttaggataaaattaaggacatagcacctttataaggcttgaattttgtttaaacaaaatgtattttttgaacaaattgtaatctgattttatttaaaggacaagtctataataattattaaatctatcctatacccttattatcataataatcaaatgttttgttactctttaaaacagttaaacttgggcctctttaaatacaatatataagtaaaaaatcaatttgttgttttttttccctctactgctaggggcaaaatggctaatcacaagatatttaaaatcttttattgtttttattctttgttttgtttttattatattcttgaaggtcattaatttttaaatgcaaaattatgtttctaaaaatttaggtcatactaagcattttagttccacctgccatattgctgttagagtataaaactaaggctgaaatgtcccatatcccacaatctcaagatgctcatcagatgacaatggatgacagcgaaaacaactttcagaacataacagaagagatccccatggtaagcaggaaaacattttaaagtaaatataagtttgttctgaataattgtacaaaagaatttttttttttttaattttaggaagtgtttaaagaagtacggattttggatagtaatgaaggaaagaatgagatggagatacaaatgaaatcaaaaaagcttccaatt

SEQ ID NO: 17241 - DNA, 1050 bp, Homo sapiens
tacagaggaaatagagaaacaagcatttccttctgtaaagatagcttagctgctggcaacccttgctgctgcttttttttttttttttttttttttttgagaccaagtcttgctctgtctcccaggctggagtgcagtggcacgatcttggctcactgcaacttccgcctcccaagttcaagcaattctcctgcctcagcctcttgagtagctgggactacaggcatctactagcttgcctggctaatttttttgtatttttagtagagaaggggtttcatcatgttggtcaggctgatctcaaactcgacctcaggtgatgcacccgccttggcctcccaaaatgttgggattacaggcgtgagccactgcacctggcccttgcttcttataagaagtaaacatttgtcattttggagagtaggcctgttcctaggcagggcatggcaatattgagaagtgctatctgatctatttaaaacaaatgttttgtttctagggaaatcttcctccaggatataagatcactctgattgatataggacttgttattgaatatctcatgggaggaacctacagatgcacctatactaggaaacgttttcgattaatatataatagtcttggtggaaataatcgggtatgtaaaatttgtggggaaatctatatatatgctttaatattaacacatgcactttaattgttaagaattaacattagaacggagaaggttacactgtcataaagttgaacattttcaactaagagcaattagaaatattatgtcgtcaaaatcctaaatcagtcatattttgtgtgtgtacacaaacacatttgcacacatatataaattgattcttgaatttttataacatgtcagcacgtttaaatctataaaagctaataagatctcattttcagaggtctggccgaaatacctccagcagcactcctcagttgcgaaagagtcatgaatcttttggcaatagggcagataaaaaggaaaaaatgaggcataaccatttcattaagacagcacagccctaccga

SEQ ID NO: 17242 - DNA, 1050 bp, Homo sapiens
ttctttctgagtagaattctccagcatattgcatgatttctgatgtcccttgaccctacccattaaatgttagtaacagcactcaattattgaaataatccttcccacaaaaccttccctaaacactgagagcattgctttaaggtattctttcccaagatttaattgatgatggattctgttttttcccccatgtaacacttattctcctacagaagtagtgtttgtggaatattctttaagaaacgttgttctagagaggtcttttaatctattccctaaacacctaaagtcttattagctttttactgtgttgcatctttctaattttgttctaaaactgttgggaacaaattaaatgtaaatcctaaggacttaacatttaaaagtgtttgtataattagaatatgtgaaatatgtatttattaaatttgatactcctaggttggatccttggaacaagctatgcttgatgctcttgtaatggatagagttgcatttgtaaaacttcttattgaaaatggagtaagcatgcataaattccttaccattccgagactggaagaactttacaacactgtaagtctacattaaaattctttattgactacattttatcttttgggaaatgttactttacctgaatatagccattcctattgataaaacccttaatgtcttccttagttatatgaaaaaattatagccagtcttagtatggattggttgtattacagtctgaaaccctttccttgtttttagaacccattccctgtcaccataaccacatagggctattaagcctacctctctttcctgtgtatttccctttccctccccttatcaaaactagaggatcaacttcttaattatagggtgattatgtttcttttgactccgttgtctaatggaggaattatgcattgcttttttctctttttttttttctttttttacattcattgtttgacctcatggtataccccttttagcttacatactgttttcattttttttgtaaaggactcctgaaaacttactattctcgta

SEQ ID NO: 17243 - DNA, 1049 bp, Homo sapiens
gtaatcacttaaagttttgttacatgtccgaattaataagaggctgggcagattaactgttcatctgtaccttgaagtattaccagcctttacggaggacaaactagatcctttttgtccacatagtaaatataaacagcaaattgcagaaaagtatgcacagtatgatcttaattgtggcaaattctccttatgaatgtacaaacattcatgcatatctacatgtactgtgtagttaatagtacctttctaaaactgttaacatgggattcatcttggagagatgggggctgaaggaaagttttattttataccattttgtagtgtttgatttttttttttttaaccatgggaatgtatttcctatatagcaataaaaaagagtttatttagtcacttctcctcttgcaggactacagaggaaaaaaattaatgttaatcatctgtggtgatgactataaccaaccttatttttcccttgaataatttaactggattttgttctcagatgtaaaggcttggatgaagcatttatcttctgtgtatatgtggtttgtctgatgaatttcttctgcatagtgttacctatttgattttgtgcttcttgctaaacttagaatttgcaggacagttgtttttcttctttcttcttgcttgccaggagttcaatatgcattgagtgtgaggaaatgctccttacaaaacagacacttttttttaaaatggtccctttttccccctcagatatgaaaattaagattttgttctagggcagtggttataaacacagaatgttcttgttttaaaaacaatattttgttatatccccttttattctactaaagtgaaatttcataagtaattacataaattaagaatatatgtataatgccctaattgtaataagacagaaaaaatgatttataataaaaaataaatatttcagtatataaatgttcaagagtggcaatataaaacacataataagtcagatgcctgcagttataataagaatcagtgtaaatgctgcagttatacatactaataca

SEQ ID NO: 17244 - DNA, 1045 bp, Homo sapiens
cactttgggaggctggggcaggtgaatcacttgatgtcaggagtttgagaccagcctggccaacatagtgaaaacctgtttctactaaagatacaaaaagtagcttggtgtggtggcgggcatctgtaatcccagctacttgggaggctgaggcaggagaattacttggaccccggaggcagagttagcagtaagctgagatcatgccactgccctccagcctgggcaacagagcaaaactctttgtctcaaaaaacaaaaaacaaaaacaaatctattgccataagttaagagtactcataaatagtctccaaattgagaaatggggtagagagaaacaaatatgctccaaattttgtccacaggagtatactttactcaattgttaatagctgtcaatagctcaaatccttgactgcaaaacaaaataaaggatcagcgacgttttaagcaaaaaagtaaaaaagatgagtcttacattaattcagtccatgaagttaactcctgtttgatacacgtgaacattccagccctccatgacagtcctgaatgttttttcctttattctaatgttagagtctccaaagttatcagaaacctgcatttaagagcacctgtgaaagtcctatagctgattataaaccacctttcgaagaggatcaaaacatgacaacagttgtatgttgatgacaaaaagtcttaggacagccatagtcaaagacacgattgacaaagaattttggttacctttgtggcacacaataatttaacataataatcataattactgctgataaggtacattgaatcatatcagaattataggagcttttcataattttggaacacataccaataacatatttatacaaatgcaacccaaagaaagccaaacaccatttcatatttggcaatgcttcctgtatgatttttatgtcaataagccaaatttcactgttggactagtgcattattgatatgtgaaacccagttcttaataaaaccttatagacaaattgatccaattttattttattatttctta

SEQ ID NO: 17245 - DNA, 1034 bp, Homo sapiens
tctaagtgaagtaactcaggaatggaaaaccaaacatcatatgttcccactcataagtgggagctgagctatgaggacgcaaaggcataagaatgacacaatggactttggggactcagggagaaagggtgggaagggggtcagggataaaagactacaaatagggtgcagtgtgtaccggtcgggcaatgggtgcaccaaaatctcacaagtcaccactaaagaactaacttatgtaactaaacactacctgtttccaataacctatggaaataagtaaaaaacaataaaaataaaaaatagtataggtgtataaggcatttactgtgaatggagcttgtggacctggaagttgttctgggcgagtcagtgagtgagtggtgagtgaatgtgaaggcctagggcattacacttatgtagacttgataaacactgtacacctagcctacactaaatttataaaaagtatttttttattcaataataaattaacgctagcttactgtaactttttaatttaacagatttgtaaacattttaaaactttttgactcttgtaataacacttcgtataaaacacattgtacagctgcataaaaacattttctttatatacttattctataagctttttttttttttttttttttttttttgagacagagtctcactctgtcaccctggctggagtgcagtggctcactgcaacctctgcttccctggttcaagcgattctcctgcctcagcctcctgagtagctgggatgagaggcatccgccaccacacttggctaatttttatatttttagtagtgatggggtttcaccacattgatcaggctggtctcgaactcgtgacctcagatgatccgcctgcctcagcctcccaaagtgctggggttacaggcgtgagccaccgcacctggctacttttttctatttcaacattttaaaattattttactttttaaactttttgttcaaacctaaggcacaaatatacacgttagcctaggcctacacggggtcaggatc

SEQ ID NO: 17246 - DNA, 1028 bp, Homo sapiens
tacttataaaaaattcatttccctttcatacagcttttaaagtattttattattaaaaatatatgcttataggctaggtgcagtggctcacgcctgtaatcccagcagtttgggaggctgaggcgggcagatcacctggggtcaggagtttgagaccagcctggccaacatgacaaaacctcatctctactaaaaatgcaaaaattagctgggcatggtggcacatacttgtaatcccagctacttgggaggctgaggcggaagaagtgcttgaacctgggaggtggaggttgtagtgagctgagattgcgccattgcactccagcctgagtgatagagcaagactccgtctcaaaaataaataaataaaaataaaaatatgtgattatagaaaatttggaaaatattttttaaaaatacaagaggaaaattaagtccgcccataatcctactacctagagatagttaaggtttaagtgaatttccttctgtgccttctctggataaatggatagacgagtgaatgatactataaatagttctctttctttttcagtgcattttatattttattttaaattccttataaaattattttaatggctatataatatttccttatatgcatatatcatactttgttatttactttgacccagtaatttctcttaaggtattttcagaaaatgattaaaaatttgggcaaaaatgatgtgaaaagatgttcattatagtaattctagtcttctttgttctattttaatgtcttgtaggttaatattattggtagttaatttactaaaatttttacatagacctttactgattgcattttagtaatttttcttttttgtatcttaattacaaattagtgcatatttgtgtttttaaaataagcaatacaaaagtgtctaaagtaaaaatgggagtcctttttctaaccattcttcccccacccccacccttaacgggcagctactgtaaacagtttctttctttgtagcttccatatctttttgtgctaactc

SEQ ID NO: 17247 - DNA, 1052 bp, Homo sapiens
caccaccactggtgcctgaagatggctcacttggtgtccccatccccagcgaagcctcgccacagcctccactaacaagttcagcctaagtcatcaaggaactcacagacaccaatgacactgattacagtgaaagaaatcatatggagactacactactgtgcccactcagaattgaagccaaaatacccaatccaaccatcactatagatacaactacaggaaaaatctttgcctgcaaaagccaatccataaaattggaagaagtgactgttgtaccagatgcacagatgtcaatgtaagaacacaagaaccattaaaaaaaaaagcaaggaaacatgacaccttcaacagactgcaataattctccagtaacagataaaaaaaaaaaaaaatctatgaaatacttgaaaaagaattcaaaataatgatcttaaggaaactcgggatagaagataaattgaaaccctgaatagaccgatagcaagctctgaaactgaatctgttaaaaacaaacaaacaaacaaaaaaacctaccaccaaaaaaagcccaccaccaaaaaaagccctgatggattcacagtcaaactctaccagatgtataaaaaagaaatggtaccaatcatactaagagtattctaaaaaattgaggagggactcctccttaactcattctatgaaggcagtatcagcctaataccaagatctggcagagaatgacaaaaaaagaaaacttcaggccaatattcctgaaagcacagaggcaaaaatcctcacaaaatactagcaaactgaatgcggcagcacatcaaaaaggtaattcaccacaatcaagtagactttattcctgggatgcaagcttggttcaatataatgcaaatcaataaatgtgattcaccacataaacagaattaaaagtatagaccatatgatcttctcaacagatgcagaaaaaactttctataaagtccaacatctcttcataataaaaaccctcaatagactaggcatcaaaggaacatatctcaaaagtataagagtcatctaggaca

SEQ ID NO: 17248 - DNA, 1032 bp, Homo sapiens
tcaatttatccagtgtgccttgcaccttatttagtggttacaacttgttctgacaataaagtacgcttctggaaatgttgtatggaagccaacccagagtgtaataaaagtgatgagaaagaaatttatcattggaagagatggcctttgatgaatgatgaaggagaagataatagcagtacagtgagcattgtgggaagaccagttgctgttagctgttcatacacaggtcgccttgcagtggcttataagcagcctatccaccataatggttttgtttctaaagaattttccatgcatgtttgtatatttgaatgtgaatctacaggaggatcagagtgggttttagaacaaacaattcatcttgatgatttggttaaggttgggagtgtacttgattcaagggtcagcgtcgacagtaatctgtttgtgtatagcaagtcagatgcactcttgagcaaggatagatatcttattccgaatatcaaacatttagtacatttggactgggtatcaaaagaagatggctcccacattcttacagtgggagtcggtgcgaatatcttcatgtatggaaggctttcaggaattgtgactgagcaaaccaacagtaaggatggagtagctgtcatcactttaccactaggtggtagtatcaagcaaggagttaagtcaagatgggttcttcttagatctatagacttggtatcttctgttgatggtactccttcactgcctgtttctctctcttgggtaagagatgggatattggtggtaggaatggattgtgaaatgcatgtatatgcacagtggaagcatgctgtcaaatttggagacactgaagctgatagttctaatgcagaagaggcagcaatgcaagatcattcgacctttaaatctaatatgctggcaagaaaaagtgttgttgaaggaacagctatttctgatgatgttttttgttcaccaactgtaattcaagatggtggcttatttgaggctgcacatgtactttcccctactcttccacaatat

SEQ ID NO: 17249 - DNA, 1017 bp, Homo sapiens
gagcctagcagtatacatttgaaatctttctccattttcattttttggaatgttttccagcttgtttcaaggatttctgtgagacagcttgccatatactttgctgaaataaaatacagtctttctatcttctgcagtcaacgaagaaagtcaaagttacatgaggtgatttgttttaatatatgataggtgtaatgtgcacaccttgacatcacttggtgaccaaaacattgtactaggtagacattaagctccttggtctgccctgcagaagtatgttcttttcctttttgaaaatgggaatttttgcctgtttttagttttttgctattgatgtcattctccatgatttgggggattttgtgttttcttatggttctatttgttctccattatactcagtgttttgtttttggtggttcctcaaggttttataatatgcatctttaacctctcatagtctaccttcaaataataatatagtactcaaaatataatgtagccaggcacggtgactcacacctgtaatccaagcactttgggaatgagatgggaagattgcttgaccccatgagttcaagaccagcctgggcaacatagtgagacccccccatctctaaatatatacagtaaacaactttcaatagtgtccccaatctccctctcctgtggtcttcagcatgcatgtcctatgaatgttttgttaggtttatacataagtatttcatttattctactgactgtaaagggtgctgtctttttaatgttggtgtccatgtagttatggccagaatatacaaatacaattgaatatacaaatacaattgaattttgtatgtttatcttatatcctgtaacattgctgaatgcatatattaggtgtaggagtgtttttggtagatttcttggacttttccatgtagataatcatctcattataaatgggaacaattttatctcttcctttctaatctgtatggcttttatttttcttattttgttgcagtgactaaaact

SEQ ID NO: 17250 - DNA, 1050 bp, Homo sapiens
ttgaaaatgacattttttgataagaagctgagatttggtattttgagaatagaagtcttttttttgagaggaggtaaactatttgcactgaatcatataattatgtttttcaggtttctttttcttctcggattcctgttgcatttccctctggtgatgcaagctctcttagtaaaaatatcatgatgtatgcctgtataaatgcgacaaaagattctcaccacacgctgttacaccaggaggggatgtctgtaggcagtcctcacggatcacagccacactctagatcccacagtacacatatgaacatcttagctcccacagtaatgatgatctctaaacacatagatggttctttaaatcagtgggcagtcacttttgctgataagtctgcctttaccactgttctaactgtatctcacaaatttagatattgcggtcatcgatttcacctcaatgacctggcatgtcattcagttttaccactgttattgacatcctctcatcataatgctctattgactcctgaattagattgtcagtgggactcagacaataaattaagtagattaatggaccctgtaaaacatataaaaggttcctcgaaacaacctcttagaaatgcagcaactcgtacatttcatgacccaaatgcaatctacagtgaacttattctgtggcgtgtagacccaataggacctttgtcatacactggaggagtatcagaattggctcgaattaactctttacatacctcagcgttctctaatgtggcttggcttccaactctcattcccagttactgtctaggtaagtgttcattgtaattgtgaaattaacacaagcttttaaactattatttgttatatacgaaatggtttatatttgttgtcattaagatttttaataagtattcagttttcattaaggtgatttttaataaatattcagaatacaggcatgagactgatttttagaacttccagaagtttttaaccttttctctcataatccattttttaattaaactttttgttaataattttgtat

SEQ ID NO: 17251 - DNA, 1017 bp, Homo sapiens
gcatttaatgttgatgatggaaatgggggctttgtagttcattggttaaacaacaaggaatttcattttacatcatctacagaagtatttatgcatcaattacgaaaactttctgataagcaggtagatcatgaaaatgatgatgcagatagagaagatgaggaacattcacaggaggatagagaacggggtttacatatgaaattagaccatggttagtatcctgtgttcagattttacttactccaaagttaacagctttctgtggtaccacttttagttttgaattcttccttcccgctcttcctcctttttacttttctatttgttacacaagtatttactgaccatctgccttggatcaggtactctgctagcccctgcaaacatcatctaactctatatgttctttggaagccatatccttttctggggaacaggttttgctaaatggtagtaataatgatagggtgaatgaagttttaatttatctaaaagtagtaactgtagtaacattcaattcagacaaaagtttcctttgtttttttttctgactgtaaattggaaaagagatttagtttttaaagatagtatgccatttatttatagtctagtatgtaaatgaattatttaatgcttgtattgataaatatattttctggttcagatttatccctggatagagaatctgaggcaggtacaggatcatcagaacatgaagatggagaaagagaaggaagtcctagaacttactcacgacttagtgtaccaatgccactgcctacggttctgcttgatcggaagattgaaacgctgctaactgaatggaataagaatcctgatatgctttttacaatacaccctgtagatggtacctttctagtgtggcatgtgaagtatttggatgaatataatcctggaatatttagacaagttcaggtatattttattgatgaaatagttattacatttcttaaaatagtaaaaagaaataaatgctttgtagagttagcatgt

SEQ ID NO: 17252 - DNA, 1030 bp, Homo sapiens
caagtctccttattaaatactttcctggtgccctctgcttctttcttatagtgcttatcacaattgtaattaaaacaataatttatatccttacttaatgttgccttcctttctaaagaataagctctgtgggattaggaaatgtattttattatttctgtctcttcctctgcctcagctatatccccagccattcacatagtggcttctttcaataaatacttgttgtttgagtaaatcttgtaaatgttccatagttgtacaggcagttaatggcacatcatcattatctattagtacgttgaggactgattttgtttttaagcctgagaatggttggaaagcccttgagtttgcttagagtgaaatgtggctctttaataaatctgtatctggacataatcaaatgtataataattggttcttatgaaacatagtaaaatatatgtaattagattgaattaagaatagtagcttgatacaaactacaggatgcctacccttccctgaaagagacatatgaactgttaaaatttccacaaaaattttattttctagattattgagtattattttcattgtgttagtcacgtctccctaagctgcttatatccagttatcctaagagttaagtgtttcataattcttatggaaagataatgcttttctggtaaggatcctatggaggttaagcaaatgtgtcttggattgaaaaagctattttctcacatttttgagaatataccacatctgattaagattatcctgataaaaagaacagaaagtaactttggaatgttgggcagtttttttttttttggtacaatctgttctgcttctgttaataaagccaaatttgaattgataaaacagatggtcactgtggatctcccactagaaggcattttccaccgcctctgctacacatgacagggttttatttcaggtgttgtgagactcaaattcaattacttccaggatttttaatattacggtccattgagcactttggctggtaagatctattttt

SEQ ID NO: 17253 - DNA, 1043 bp, Homo sapiens
agattttctagtttatgtgtgtagaggtgtttattgtattctctgatggtagtttgtgtttctgtgggatcattggtgatatcccctttatcattttctattgtgtctatttgattcttctctttttttctttattagtctggctagtggtctatgtattttgttaatcttttcaaaaaaccagttcctggattcattgattttttgaagagtttttcatgtttccatctccttcagttctgctctgatcttagttatttcttgccttctgctagcttttgaatatgtttgctcttgcttctctagttcttttaattgtgatgttagggtgtcaattttagatctttcctgctttctcttgtgggcatttagtgctataaatttccctctacacactgctttgaatgtgtcccagagattctggtatgttgtgtctttgttctcattggtttcagagaacatcttttatttctgccttcattttgttatttacccagtagtcattcaggagcaggttgttcagtttgcacgtagttgtgaggttttgagtgaatttcttaattctgagttctaatatgattgcgctgtggtctgagagactatttgttatgatttccattcttttgcatttgctgaggagtgttttacttccaattatgtggtcaattttagaataagtgtgatgtggtgctgagaagaatgtatactctgttgatttggtgtggtgagttctgtagatgtctattatgtctgcttggtgcagagctgagttcaagccctggtatccttgttaattttctgtcttgtcgatgtgtctattattgacagtggagtgttaaagtctcccactattactgtgtgggagtctaagtctctttgtaggtctttaagaacttgctttatgaatctgggtgctcctgtattaggtgcatatatatttaggatagttagctcttctcgttgaattgatccctttaccattatgtaatggccttctttgtctcttttgatctttgttgatttaaagtctgttttatcagaga

SEQ ID NO: 17254 - DNA, 1035 bp, Homo sapiens
ttcaggccagttgctgttttggagtagttaggaagaaatttgaaatcatcttgccttttaccacttactcataaacgcttagaacgttttcttaagttttcttctgttgtttttttcttcccatagatttttgtttttacatatttgtagtcaagctttgtcttatgtttccctcgacatagcacccacagctttgcgtttttctactgctcttgcataaattttgttaattttgcattttctgatatgagttgtttctaagaggaacagtccctttgattaccacacaagcagtcgttattaggttatttccaacatttccgtactcatcattgacttaggttaaacttttttgctgtaagctttcttcatactgtctagttcctttttcatgtatttattttgcttattcagcactctcgagtggactttgggcagttagaataactgaatcatgtcagtaaagtgtgttctcaatcatgtggacaaaagaacttattcaaatgctaccccttccctgcttttcttactgtagtgtggacttacatctcaatggtaggagttttatgtatcttggagttggcggtgccttgtggtgggtgggagttaataatggtaagggtttgtttgtaggtgtgaaaaactgcagaaagacaaatggaccaataatatgaatagtcagtttacagagaaagaaatataaatggctgataaatatgtgaaaagatgcttatcttctaataaaaatacaaattagaacagggagatgtcaggttttgttggaatggaaagattaaaacatttgataatgattggggttagtgagtaagtggagaaataggtacttttatacagcttggggctataatctttttggaagacaatttgcagttgcaattaattttaatcactgatccagcatattatatcttagaatttatcctgtagggattcttggacacatacgcatatatcatctatacatacatgttcatcgaagcattgtttgaaatagtaaaagactggaaacaacca

SEQ ID NO: 17255 - DNA, 1030 bp, Homo sapiens
gtggttactttattttacttggaactggagctatgatgtcatttttcataccatcaaaaaggacctagcaacaaatctaatgatatatgtgtaaaactcctataagcaaaattaataaactttattgagagacttaaaggagataaatactatgttcatggactggaagattcactactgtaaaaatatcaaccatttccaagcttatttatgtatctttgatgcattcccaatcaaaattttaagagaattttgtggaatttgatagaatgatgctaaaattttatggagctagatagtgccaagaatagataaggcaatattgaagagcaataaagaagacttctaccagctcaagacttataaaagttgtagtcattaagatagtgagatggcagtctgaggacaaatacaccaaaatcagcaccagaaagagacccacacatttgttgatgtttgatttatatcacaattggcatggtagagtaacaggatggttgatcttttcaatcagtggtgctgggacatcttgttatctacataggaaagaaggaagacttggtccctatctcaccccatacataaaaattaactccaagtagattagagatgtgcaagacagaacaatacatattttagaagggagaattcagaggaatacatgtagaggaaaatgtattgctaaccttgaggttgcaaaagatttcttaaaacatcaaatttttttttttttttttgagatggagtcttgctttgtcacccaggctggaatgcagtggtgcaatctcggctcactgcaagctccgcctcccaggttcacgccattctcctgcctcagcctcccgagtagctgggactacaggcgcctgccaccacgcccggctaattttttgtatttttagtagagatggggtttcaccacgttagccagggtggtctcaatatcctgaccttgtgatccgcccgcctcggtctcccaaagtgctgggattacaggcataagccaccatgcctggccaaattgttttat

SEQ ID NO: 17256 - DNA, 1032 bp, Homo sapiens
tttttgtatttttagtagagacggggtttcaccatgttggtcaggctggtgtcaaactcctgaccttaagtgatccacctgccttggcctcccaaagtgctgggattacaggcatgaaccactatgcctggactgtaattttgaatctgggatagacttatggaaaatgggtgtctgtggagtgcttcagccccaactttgagcatctagactgtaggaaacatttgggctcctggggaataaaggaaagtgggagaacaaggatggtgaaaatgaaaggagaaataagtgcctcctgtgcagcttgcctttcactagatttgcccccttccctctccccacactctctggttgggtctttgagagccaggctcagcattatgtttttggtggttttctgatgctggtccagaaaccttgggaatgtgttgaagtgatcagctgtgaagaaccttagttacagatagtaacactaatgcctttttccttctgcattgaagataatagtggaaccatggatttatttggaggtgcagatgatatctcttcagggagtgatggagaagacaaaccacctactccaggacagcctgttgtaagtcagttagtaacatgaacttattcaaggccaggcataaagtttcaaaggtgaagagtctcccttattccaggaaaggaagttgataactgaattctagtatgaaaataccatgaacagatgactttcttcattatgtagggaactcttggttataagggggagtggaaataactgccaaacatgaggttggtgtcatgccttaggggactgaactgtgaggacttgtgatttgagaaccattgacttgaatgtttttcttgctcatgccaagaagtgtctgctatgttgataatcttctctggttttaattgatagagtgacttcctattgaagtgttaatttcacacttttgttgagtatttggaagacagatttatcataaaggagatagttttttgtactgaggtatccaaattgatcgtttcccattt

SEQ ID NO: 17257 - DNA, 1025 bp, Homo sapiens
gtacagctctattcatgttaacatatctatagatttgtctaaccaccaccacactcaggatgcagaatcgctgtcacactgaaaaactcccttatgctatcccttttgagtcgtatctttctgctacccctaaaccctggcacctactggtcttttctgtcactaaacttttggttttttggaaatgtcatataaatagagttatacagtaagtatgtagtctttcagattggcctctttaacttggcatatagcatttttgattcatccaattggttacatgtatcagcagttcattcctctttattgctgagtagtagtccattgtatcacaatttgtttatctccaatattgcttttaaaacacaaaattcaactaatgcgactgattatgcagaacttctaattctacccttatagaatctgcaagaggcagtgatagtgaagatgaagttttacgaatgaaacgcaagaatgcgattgcatctgattcagaagcggatagtgacactgaggtgccaaaaggtatccctattattatatatatatgtatatttccatacctctttctgtatttaactgtagtgcatttctaaccctgagtgtgtttaccccagatcgccagacccacagaataagagtgtggatacgctcagtgtactcagagaagttatatagctatgagaagctgctcatgcttaattagttgaagaagaacctgcctctttgtagtttttttttttttttttaagagacagagtcttgctctgtcacccacgctggagtgcagtggtgcaagctcagcttattgcaactgctgcctcctgggttcaagcaattctcctccctcagcctcctggtagctggaattacaggaacgtaccaccatgcctggctaaattttttgtatttttagtagaggtggggtttcactatgttggccaggttggtctcgaactcctgatctcaagtgttccacccacctcagcctcccgaagtgctgggattacaggcgtgaatcactg

SEQ ID NO: 17258 - DNA, 1072 bp, Homo sapiens
ccaggatcatgaaagagccaggcaagcaaagagctgggggaagagcacagagatgagaggttaagggacctaacaaaaggccaggtggtcactggagagttttgagttgggaggggtaggggtggctaacctgatcatgttttgcctttaaaagatcgctctgttgggaagctgaggcgggcagattgcttgagcccaggagttcgagacaaggctaggcaacatggctcaaccctgtctctaccaaaaaaaaaaaaaaaattagcagggcatggtgatgtgtggaggaggctgaagtgggaggatcgattgaacccaggagattgaggctacagtgagccgagatggtgccattgcactccagcctaggcaacagagcaagaccgtgtctcaaaaaaaaaaaaaaaaacccaaacaaacaaaaaagatcactggctgtatggagaatacattgtagggaacaagaatggaaatatgatgaccagttagaggtggttgtgtgagttcaagaaagaaatgatggtgactggaactaaggaagacatggtggagacagagaaatgtcaagaattatgaaatatctgagattttatctacctacaagttaacaagttgggctgtcatagctcatggatgctggtagaagacacaagactcctgggtcagagatgaaggacagtttattactcacagcaatggcagtagccaggctatcagcctgtttgtgcatacttgagccctagttccacagggagacatgaaaagggccaaatgacactggcagatgcaagggatgcactatagaagaaccctgagcttagggaacccacatcttttatcgagggcagcaagcagcagtccatttactaagacagggaagactggagggatagcgggaggaggtgggctttgcacatggatttaggagttcttttgggggctaattaggtttgagatgcctgttaaacattcaagatgtcaagtaagtggcaggatccatgaattagatcccaagagagaggtcaggacttgccacgtatgaaagatggtactgttgagacagtttataaag

SEQ ID NO: 17259 - DNA, 1039 bp, Homo sapiens
ctaaaaggaataccaaaacaggaggaggcacagactagtccgtttacaacaaactggcatctgtgagacatcagtggaagaatgttttattcagcactgttttatgatcctttctttgcccccttcagccatgtatagaatattcttttccctgtctgactgctttttcagttaccatatttttatttctaaaatttctcttgttccttttcacctctgtctcttaccacaatgtcctgttcttttttttttttctttttcttttttgagatgggggtctcactctgtcacccaggctggagtacagtggcacgatcttggctcactgcaacctttgcttcccaggttcaagcaattctcctgcctcagcctcctgagtagctgtggctacaggcatgcgccaccatgcccggttaatttttgtatttttaatagagatggggtttcaccatgttggccaggctggtcttgaactcctgacttcaagtgatccgcctgcctcggcctcgcaaagtgctggattacaggcgtaagccaccacgcccagccctataatgttctattcttaattttttctttttctttagtctctttgaacatgttaaacatattccattagttcactcaggctactataacaaaataccgcaggctgggtggcttaaacaagagatttgtttcctcacagttctggaggctaaacatctgagatcagggtgccagcatggtcacttcctggtgagggctctcttcctggcttgctgacagccactttctccatccctgtgtcctcacaggacctttcctgggtgcatgggtcaggaagagggagagagagggcaagctctctctggtgtctcttcttataaggacatcaatcttattattagatcacggccctatcctcatgacctcatttaacctcattacctccctaaaggccccatctccaaatacagccacactagggggttagggcttcaatgtatgatttttaggaagacacataaaatccataacacacactttaaaatatttc

SEQ ID NO: 17260 - DNA, 1022 bp, Homo sapiens
ggtggaggcgatggacatgtaaagaaatatacagatagggacaaaggattgagaaacttaccgggtgattccagacctccactaacagagcagtgcatgtccttgaattcaaaagtagcagtgggaccctttgagatggcttttcctgttcctagatgaggagacgatggctctgggcttggaccaaagacgctggctgccatttcttcacctaattcctccctcaactcagcataggatttctatacatgtacacatccttctctccctgtcgtagctgtgtgagaactgcttcctctgagcatactggtgtttcctgagactatataggttttgaggttaaaaaaaaatgttaatccagtctaatgtcgtggctagctcttttacacagctatctgttctgcaggctgaacaccaagatagttcagtttgcttctaagattttaaagttcatagataaaagtattttatattctaatatttctaattcttctctaaagatgatcccagactttaaacagcaaatttcagaattggagaaacagaagcaagatcttgaaatccgcctgaatgaacaagctgagaaaatgaaaggtaactgaaaccctcattaacctgcttttagaaaacggtttcctgtaccccggaaatgacattgaaatgtccttgtactcagggcttttaaactctggttctctagggggctgggcaggtaacaaatgtgagaagggggctagttgaaagatatgggaaggtatgtaggacatttaaaggaggtgcaggctgagtgcagtggcttacacctataatcccagcactttgggaagcggtgatgggtggatcatttaaggccaggagttcgagtttgagaccagtctgggcaatatgatgaaacctcatctctacaaaaaaaatttttttttttttttttgagactgagtttcgcccttgcccaggctagaatgcaatggtgcgatttcggctcactggagcctccgcctcccgggttcaagtgattctcc

SEQ ID NO: 17261 - DNA, 1033 bp, Homo sapiens
cagggcactggggcaggaaaggctgtgcaggtgctgacgaggagcaggccatgccctcctgttctaggtgctgcgtgccctccaccctgtctctgtagggctgatggtgtgggcacagaagccatgtgaatgtcagagatgaacaggagcatgtcagaggtccgggagtaaaccttgaacctgagttaggaaagggtttcctcatctccaccctttttattacagcacactcctcttgggtggttgttttggcttttttcccccctaacttcaaatagaatttcccacaagggcatttaaattctcaggaatataacctgaaaattatgtttctgagaccatgtcatgtttgggtgaataattttacatcctcttccaaaaagtccatgaaaactttcaatgtaatatttataaactgattatcctgtgcgcctcccccgacatggcaaacagtgttttgtgaatagcaccaacctttacctatgcttgtgacctaagacccagggatgctatcaaatgctgtttctcctttttgagattctaacttaacatggacataatcccattcctcttgagaagtaaatcacattcgagcagcttctttagcgcatctgcaaatggcctaagatggtaagcaccagaattaaagccaatgcttttggttaattgaaaattgaggttatataaaacgtgttggcttctaaattaaagcttgagcatttcccccagtatttcctggctgccttacaacgttctgaagcagtcattttgattcagaaacatttggcactatgttagacaaactattaaactgttggctaaaaaaaaaaagtaatttggagaattgctatcgacggtgcaccccgaggactccttctggggtggggctcagaggtgaggtagagctcaaggatgagatatcagcttagtgcaaatagggacatcaccatttgaggggctgcactgccattctcccattttgatggcccctgtggcatatgggtgtgttgggaatgtggggttgtcatagcca

SEQ ID NO: 17262 - DNA, 1063 bp, Homo sapiens
gtttttaaaataacaaatggtgcacatctatttttctaacctcattgacgtctaattttcttcatccatcttattctagtgattccaaacaaactccttttctgagtatttcaggcactgtagagcctccatgcctttactcatgctggtcccttatcctgaaagccttttccagccttcactgtgtacagacatcctactgcattgggggctggctcacatacccactttccccaagcagaataactgtttttttcccctctcacttacagatctagttaggtggtattttatttttcctctttcttggccatttgttagtctttctgtacatgaggttgtaaactctaaaggtaaggacattatcttcacctctagtcatttagacaggggcagcaaactttttctgtaaaggacgagatgataactatttaaggcattgggggcttgcagtctctcctgctgctgtgtcatgaaagcagccgtgggggatatgtaaatagtacgtgattgagcaagtgcagcaccagtgcacagtctcatcatcgtctctgtgggtacctgagtggaggtgaatcgactggcctgaatgaaaagagtgaaagttcccatgtggttcctcaaggacagggaactggggactggcctcaagtaggcattagaataaactgcccacagagtttaatgtggagaggtgtaaaatatttgaaccttccttataaacacatgctagccaagcttgcagctctgttatggaagttgatgctctgtgggtaacagactcactcttcatccttgttaaccaaggaaagctattactgcagtggccttaaaagaagcttgggcagccataatcattcagaagcactgccgcgggtatcttgttcgcagcctgtatcagttgattcgcatggccaccatcacaatgcaggcctacagccgaggattcctggcaaggaggaggtatcgaaaggtgaggccaacctctgtctagaggaagggagggtgtacgggccttccttactgagaacaaaacagggcccagggaaagacttcactatgg

SEQ ID NO: 17263 - DNA, 1048 bp, Homo sapiens
gtggtgaaagaaatccctctcctctaaccctgtagacagccgtgagatgtttccattaagggactcgcggatttctttcccacgtacaggctttcagcgttcaaggtttatctaggaggctttgggagttctgttgcctgtaaactgaggcagccaggcctggtgcatcacagatgcacgaaagatcacctcataagcaaaattaggtagacgtattcctcatgaaggagctgacctagtgcacagaaagaaaccttcctgtgtctaaccatgcattgatccataattttggaagtcctgaaattcagcttttctcatcctgttggtcagtacaacagggtctggattcccgatcctgaagaagtttggaagtctgctgaaatagccaaggactacagagttggtgacaaggtcctgcgactcctgctggaggatggaacggtgagggtccttgctgttcacagctacgtcgatgtgtaaagcggtagctggggtgtgtgtaaggatgggagcacgtggaccccgtgggaggcacccaggggagggcgcacgagtgggcaccagcaccattcccaaatggcctcctggtgccgggactcactgatgtgtctgtactccttccctcccgcccctgtgctgccctgcatccaccgggcctctctctgtaatgagggcccagctgcaggagccaggtctgtgccacggcactgcatttccaggcacccagcattactgggagaatgctgaaaagtgattcgccattttggcttcctgagtctcagcccagagattgggcagagatgaaaaacttggtgagaagtcgtttgagcccaaggcatacgctggtagagaaaaacatcaagatgtgaaggggaggaaaatgagaagagggagatagaaaacaggcagggagagggaggagtgggaggagactggagggagtcggtccacagatatatagaaatgtgtaagggagggagtgtggcagggacaagaagacatggacacccagctttgtgtgacattatgaggtgcctctgttggtgct

SEQ ID NO: 17264 - DNA, 1028 bp, Homo sapiens
tttgagactctgtctgctgtttggtgagttatttctctctgggcttcagttaggggctctgttaaacaaaaggattgattggcctagtgactttcacattacttctcagagcccaggcttccttggaaggcccccagggctctcagctccagctcccatcagaacacctccactttcaccagcttcgcttagccagctgttacaacttaatttttttttttttttgagacggagtttcacgcatgtcacccaggctgcagtgcaatggcaagatcttgcctcacagaaacctccgcctctcgggttcaagcgattctcctgcctcagcctcccaagtagctggggttagaggcatgcgccaccacgcccagctacttttgtatttttagtagagacggggtttctccatgttggtcaggctattctcaatctcccaatctcaggtgatccacccacctcggcctcccaaagtgctgggattacacacgtgagccaccgcgcctggccagaacttccttttgaagtaggctttctgcagctctaaaaaggagtttgacaaacaacttggagtagataatcagttctgagactctgtagtggccaattcttgataaatttggtaattcatgtacaattcttttggggggcatatattttgatatttgcctttaaagattaacattcattgttctgattatgaaagtaataggtacatattgtagaaaatacatccaactctcaggtgtctcttatgaggatcccattcctaatccattttaatgaagtaagcttcatgacgttagtaataaatattttcaatagcagacctggggtaggagctgtgtagcccgtggcaacaaggatgggtgtgggtgtgtgtgcctgagacaggcgtgtctgtgtgtttctttatgaggcctccatcgtcctatctgcacaagagtgtgtgtcactgcctgccaggtcattcttccattctcgttctctcaaaacttacacatccatgtcacgtttcggcaagcttctgc

SEQ ID NO: 17265 - DNA, 1061 bp, Homo sapiens
tctcaaaaaaaaaaaaaaaaaaaattccatatcctaaatgtcagagttctaactataacacatctagaagagaatctttatgagcttaagctaggcaaaaatttattagataacaacaccaaaagcatgatccacaaaattaaaaaatgataaattggacttcccccaaatttaaagtttttgtgctgcctaagacaccatgaagaaaatgaaaagacaatccatatagtgggagaaaatatttgcaaaccatatatcggtaaagggtttgtgatcaaaatgtttaaagatggtagattcaatacctgtatttactcaaccttcctcctgaaactccggtaagtaacaataaactcacaaaggaaaacagaatgaatgaggaatgacagcaacagcttggaagatgaaaaacagatggataaatgtcttttattttcacaagcaaagaaaactgaaacctaacccgggacaggcagaagcccagaagcaatccagtttgcactacataattccgaaaagctcaggaattaggttcagaggcagcaggtaacactgaaagtggcatgcagctgaaaacacaggaattggttgaaaatctgtttaaatagcagttcaagtggacttgaacagacatttcacaaaagagaataccaaagtggtcaatagtcatcatagaaataaatgcaacttggacccacagtgagacatcataacacactcatcagaaaggctattttttaaactgaccacatcaagtggtgaggatattaagcaactaaaagtctcacacactgctggtagaagtatacattgatataacaattttttacaaatctctttagcattatccgttaaagttgagcattacatacctgtgatccagcaattctgctctgtttatgtgcccaacaaaaatacatatatttgtgcatcaaaagacacatataaaatgttcatagcagcattattcatagtgggtgtaaactgaagcaaccgaaatatttatcaataggagaatgaataaattgtagaatatttatacaatggaatactactagaca

SEQ ID NO: 17266 - DNA, 1032 bp, Homo sapiens
tcccagtttaggtcctcagcacaggggagcccaagtcactgggtgccttccgagggctgtcactgggcaggccatatacaagtcagtgtgtgcgtgggcactgcagtgtgtgcatgccgtaggtgttgatgggtgctaggaggggtgtcgtgtgcatgcgcgttgaagaggatctgtattgccgtgacctctgttcatggatgagtgcattgtaatttgttctcaggctgtgctgtgagggccgccttaacccttgctcccttcccttctagagctgccttaagttctccagaacttttcttctgtaaaggatatcttgcctggaagggatatcttgccctgtttctcaaggttttgtgagagttttgactggatgtggccctgcatgaccctccttctcctgtacttcctctttcctttccaaatgggaattagaactgtggggcagcaacagtctcagagccagtgagaggccagcttagagaatgcttctgagttagtgggactctgtgtcacaagtaagcaaatgaatatatgaaagaaattatggagataagttagattcttggtaatacttaaatgtcttgctttctactaaccttttgttactaaaggtaaagggtataactcaaactttttgtggacattcttttcaaaattttttaagaaccctgtactataaaaggttgagtaaaaacaggaaagcgtgctataagttcaaatctgttgtattaccctaaattagataaaccaacctgaattatagtagatttctcaatagatgaggaactgaaaaatactatgtaaaatatcttccaaaatgctttttatactttttttatttgtaatttggtctatctaaaatgttcgttagcttaacttaatgggcgttattggattcatatgactaacgtttcctcagtattgtaatgcttgaaatatttgaaagaaaaaatgttgttttttagttgaaactggtatatataattcagtgcttggcaggttagtatatttttatgcatttttcagagt

SEQ ID NO: 17267 - DNA, 1066 bp, Homo sapiens
ggaggagaaaaatgtgtcttcagctggcagcatttattttaaatccttagcactgagtttgaatggtataaaaagtataacttccatagatgagctgttgttaggaaggcaccaaagaacctcctctgcactaaacaggagaatggaaagaaaagtctccattgagtacatatcatgtcagtttagtaatcaattatgttgatattgttaaactggttcaaagaaataaactggcaatatgtaaagtaattcctcatttgtgtcactatgatatagagatattaaaggaatgttggtttgctaaatagtatagatgtccatttgtactatagtttactgagcattttaaattgctgctacatactgtcttcttaaaatgtaagtgatattaggcactacaataagtttctcttgtcaattctgtttacaattcaatcagatcacagttttaactggattatatgcaaatacctacagattcacctgcacaagtagcagacactggaaagtcatgtagtaatatgacaaaatgcttgacatttaggggtaggattagacaaagtggctattgttgatgtcattatttattcaggatgtattacattgatgtgctcattaattttccctgggtggatattgcgtcagggtacagtgttctgtgaagtgacttatttttaactaccagatctgattccttcagtgcatattttcaaccttgacaggttttctctcttcttaatttattaagaattaatctcggctgggcgcggtggctcacgcctgtaatcccagcactttgggaagccaaggtgggcggatcacttcaggttaggagttggagaccagcctggccaacatggcgaaaccctgtctctactaaaaatacaaaaattagccgggcgtggtggcacttgcctgtaatcccagctactcgggaggctgaggcacgagaatcgattaaacctgggaggcggagattgcaatgagatcgaaccactgcactccagcctgggtgacagagagagacactgccttggaaaaaaaaagaatctcactcactatctag

SEQ ID NO: 17268 - DNA, 1876 bp, Homo sapiens
agaggatgaaatgaaatagatttatgtgacttgggcacttgctgagtgcagtgtacctgcttctaccccaaataaagagaatcaaggtgacacttttcatcctcgtatctgcctgttacacagaaaatacaggcaccttctaataactaaacgttgtcttatacttttctttaaatgtattgcaacacacttaaatccttttggtttaaaatagcacaactcttgcctcctcctacaagctacatttaattaaggaggctttttaaaaagccaacagacttttaaaaaaaatgctagcatatataatttttggcagaaactatatagctaaatggagagtgtttcaaaatttgatctgctttgtgctatattttcacccatcttaattttcatggaatcaagaaattaagacctgaaaggattctagaaatcaattagttatttcataagaggaaaaaactaaggcctgtaagtgacccatggttgcagcaggtgagatggcaggactagaacacataccttctaagggccactgatttctctcctttgtgtcaaattttcccacagaaatcttctacttattaggaattcatctgattgtctcaaacttgagatcaagatcttcctggtgccaaaagtaaatttttttaaaactttccaattttctttcctttttgaagacagaaaggttccctcaagtttataaagaatctagaaaatgaaactagagtcttttttcaggtcttcctagaagaatggatcattgggctcctcagtccctttgtgctgctataacaaagtacttgagactgggtgatttataaagaacagaaatttatttctcacagttctgaagggtcaagacactggcaagttcagagggtctggtttctgcttccgagatggcaggtgccttgttgctggatcctctgaaggggacgaactctgtgttcttacatggcagaaggtggaagggcaaaaggcttagctagttgcctctttatttatttatttattgagatggagtttggctttcatcactcaggctgcagtgcagtggcgtgatctcggctcactgcaacctctgcctcccaggttcaagcgattctcctgcctcagcctcccaagtagctgggattacaggcatgtaccaccatgcccggctaattttttgtatttttagtagagatggggtttctccatgttggtcagggtggtcttgaactcctgaactcaggtgatctgcctgccttggcctcccaaagtgctctgattataggtgtgagtcactgtgcccggccaacattttattttaattagtagataatattgcaaaatcaatcaaggttatgttgaactgacatctaaatttcatttgtgagctttgcaaagacttaagtccctagggagaattcagaggcagagagaaagtttttagtgagagtatggcacattctatctgacatttttatacagtaccaaaaatatcctggttagagattttgcaaaaggaaggtgaagcttccttttaaaacataaactttcttagtaaaaatatccattgtatttcacaaattctgagatgcagtgtttcccatttcaacatctctgaaattggggtgtatcttacaattgttgatgggttatagtttagttggcaatttttttagtgttacataaaatactgtatttcataaccgatagcatcatagatttgataaatcagtgggtttaaaatatgctctttgggttacatggagtccaaatatgtgcatttattgataaacctagtatgttgaacttgttttctcccagtttccccttttggaattgtacatgcggcttaaaagttactagtggcatagatggcaggggt

SEQ ID NO: 17269 - DNA, 1078 bp, Homo sapiens
cgagggatggagaagcctgaaggtgactccgtggtttctgctatcttggttaggtgtggtgataccgttttgtgatcgtgggactggagtgtggggaaatgcacagtgaagatgatcagtagatttatacatatggatttaaggagccaggaaaacatccagagaaagaaatctattaggcagttgagtatataaatctgtagacaggagagatgtgtgtactgagatagaaattttgaagtcatcagagtataataatacaatggaaaccgtgtaaataggtgaattctctagagagatatgaactctctagatgtaaagtagaagacaatgcctggaatttgggttatgtaaacataacaacaatatagcaggagtaagaacctggactccagagtcagtgctgggatccactacttaccagctgtgtaacctctatgggtatcttacttccaagcctctgcgtcttcctctgcaatgtggcaaatgacttgttgggttactggggaaactgaattagtacatgtggaaagaatgtagaacagcatctgacactgagcaaacactcaaaaaatattatttttatattctaagtggaaaataaatgattactaacattatcattactaattatacgtttttaataagatgtgatacatctctaatatagcagtttttccaggcatacaattaatttttgacacaaaaaagcttttaaaaatcatgtcataaaagctgagaaccttggacatgttctgatttatgttactgctataagaatttttaaaactggttttttaatgtgggaaattaggttttattaagctaaaaacgttcctacctagaggacttaaaaattcatcttgaaaaatattatgaagtttgccacacaaagacagtagctgaagtttttgttctatatgtgtcataacctctaatacaatatgtgatgtattagatcactttgctagctgaataaaacatcaaaaacagaacctctttctcaccttccagtcatttcttattttgcaggtaaagtagctctacatccttgattattttgctttaatttctatcc

SEQ ID NO: 17270 - DNA, 1030 bp, Homo sapiens
cacaagaaattttagtaaaaatcaagagaaaggaaaagaaaaatgaagcaaaggacataaaaacagtccagctaacagagcacatagttctgctatcacacattctcccttgcccggctcacgtaccccatgtgacagctgctctcctgaccctaatgggctgacccggtccaactgaggtacctaagttcctcagctcccagcctaaacatggtagcactcgtgtcccatcctaggagaaatgcccttgacactaattaagatcttccagactccccagggctgtttgtctcactcagtttctagtctgagagacacatcatgtcaccactccattgcagggcagtggtgagcaacaccctgtgagctagggaatgatccagcccaggcaggtcttgtgtattggctccacctctagagtattctgggaatcttcccttggacaaacgacttctgtgagagacataactttaactccacagacctacgataagaatttcacccacaaataacaggagggtcattctctcacatactcaaagatattttataaccagaaaaatcaaaacaattttaaaagaatttcaagcatttgttcctggaaatagaagttgtcaacatataaatatatattagtctctgttttatgacagttccaggaatgttaatgtatatatagagttaattttagagaaacaactcatggctgtttttaaattagcttttatctgttataataggaactcattgatgaaatttatttatggaactaagggtttattgttttctctgttttttgtgcttgctgacttgtgattctcaggatgacaaggtaattatacctttttttttttttagtaaatacttctatttaatcctaactttagtttacaagtatcccccaataaaggcaattgatgctttctgaccaagtctattttgatattttgaatttgtaagtgaatttccgatttgactccttctgatttgggaagtcagtagggaaacagtggttatagtaggctccagt

SEQ ID NO: 17271 - DNA, 1048 bp, Homo sapiens
agttagagctgcctgtgtgaactccttcatctttcttttaaaccatttatgcctagttaccatgcagtaaaatgattgtgcatgccatttcaatatattttatgaggtttttgtaagttttatttgattatggcactaaaagtcagtgcttggaagcttcacccagtgcttcactgagcactgcttcacccagtgtgactgaccgctcaaagctttcaacacccaaaggggactcgactaataatcagaagtggttttcatttgggcatttggttttgcaactgttcttgtcctgtcatgccagtgtacctttttctttgaagcggtgacctttttgtaattatttggtcaaaacaatatggaacaaatcacttgggcaccaatacaagtcaggaagtagggataagaaccaagtcaaggtggatgctgtcttaactatgcctagactaattatgttgcattaattatacctgggttatttgccttgcagcatgtgcctaagcctggacacaagagaacagactccacccacagcagcaacgagtctgaatatatctttagctctgaaattgcagaaatggaagacattccatcaaggacagaggtacagtttagacatctgtcactgaaagtaggatatgagcatgctgttgttaacaaggaacatttccattgcaaagcagactccaattggccataaacatagtatttgtttgaatcatttattcttcataagtgacttgtagatacaaacttatttacatttttgtatacttaagtgctgtgtacatacatacctattgcatttttttgtcaatacaaattttaattttaatttttaatgcaattttgatggtgagattttatttttataattctctttacccctaacatgatatgtttacaggaatttatttcagactgaggtaaattattttatttttacttattatttatttactttatatctgtggaccaccgctgtagacagaggtaaattatttttaaagtaagccctttgtccttgaatattataaacaccagtgcc

SEQ ID NO: 17272 - DNA, 1053 bp, Homo sapiens
tgaccttgagcagtagaatataaataactcccacatgcttagtgttctaataatggaacattagacataatatttagtacctgatggtagggatccttgttgaagcctgcattaaggctgtattaagaagtccaagcaggagaagtctaaatgtctgcacagtgattgcaaccaacagctttacgcagatggaaccctccccacaaaatgctttcagattgaccagtacttgcacgcttcaaatttgtattaacatatcaaaactttattaagtatagaagacattaagattgtcaagtagtaatgagatgtactgctgaaacatttgtaaaagtacctcaacattaggcttcctggaaaaaagtaatcgattttcagagattccgctggtattaccatctttaaatgaaaacagagttgcctgtgtcagctgtaactgctggcaagaatcctgatatggtttgtctgtactgacttctaaatgttaatatcagcacatgcagtgagaactacagcaggaacttagatgcaggtcggttaggatagggtggctggtaaaattgcagtccttccatggcattacaggttccagtaaagtaattcctcctatatctctagatctgtactctatatatagaaacagcagtgccaaaaggtgagattcttttctgttttatataatgttgttttgatacagcaagcttgttctctcagaattaagacgtgcactcaaaaagatactcttgaatgtttaagatctcttttcttccctttaagtctccccaaaccacggaagctttccagcttcggattcctcagaatctgtacagtagttaagtgtggtgggaagattctcctttccttttcaaagccaagttcttgcctttctagtctgatagaataaacacacaagcagattcagattttttctttcatttcatttcattttctcccacttctcacagagatagctgtaggcactaactttagttcagacggtgtttcctatgttgtgtaggctggtcttgaactcctggcctcaagctgttttcc

SEQ ID NO: 17273 - DNA, 1032 bp, Homo sapiens
gattacaggaattatttgttgaagttataaatcccttgaaaacaaatatcaaatgtacaggatatgggtagggttttaaacttttttttctgtaacccgaattatcttccaaaaattattattcataacttttaaaaccttctaatattgtagaatttgtttatgaccctttcctgctgagattttcggtgatgtttttcagttagtgctcagcacttaagttagtaggtagacaaataaagcaggtgagtagacacttgataaataacttgcaaacttggactagtgtttttctccacctgatgctaaaacagtttgtggaactgaggtaataagactttcaattactgtttttctcgtaaaataattatagttcaagcccattaatatgtttagatttgtcacttcctgtggattaggttttcaagtccgggtgcagtagttttgactttgctttcccccagacatggttgtagaattattgcatttttccgtgttatttttgtatagcacttacctcaccttcctctcatattcttggctcttagcacagatactgactctttctggagtgtgactctgacagtgattacttaaggaagggaatctctgtaatatttcttttgtgaaggtttgcgttcaagtttggtttagaatgtaatttctttatattgtttctgacttagtttaagatgctaccagaactatttcaagatgatgagaaggccatcagtccaacttcagccacctcctcagggcgcacacccctcacacgaactcctgcaaagcccaccaaaggcagaccaggccaaatggccaaagagcacaagaaaacagtggggcatcaggtgagttcagggagctgccgctgccacgctccttcctttctggctcatctgaaacctcagatcttccctcttcagcctcccaggtgggatcctcaggtgaggagagcctagagctttcactgtgagatcatacgacaccatccactaaaactcttctccacccagttttagacctgtgactctg

SEQ ID NO: 17274 - DNA, 1052 bp, Homo sapiens
ctaattttttctaattttagtagagacagggtttctccattctggtcaggctaatctcgaactcctgacctcaggtgatccacctgccttggcttcccaaagtgctgagattacaggcatgagccaccacgcccggccagcttttgttttttaaaaaacagcaacaacaacaacaaatttatttgatgatttttcatataggcagattgaactgcccaaagattgggctgggttgcccatgagaaggtctcagtcatactattcattagtaattggttgttggcctctaacaatgaaatgtggaaggaatgaactcctaaattgaattgtaaaagttattagttaaagccaaaaaaaaaaaataaaagatcttttgacagctgatgctttagaggaatcacagtatttaccttgttttctttcttccttttttccatgaatatagatgcctaaaggcacagatgacacctgggcccaaaaattgtacaacacacatttgaacaaatgtgcactctttgaaaagcctcgtctatcaaacaaagctttcatcatccaacattttgctgacaaagtaaggaagctttatatcagtttttctttttgaatacttaaatgtggaaaaaacccaatagtcaggaggtatctttttttttcttttgctgatgtttgcattctttagggctcaagggacagcagtcttcagtgttgacatgttggttttctcttcctttaacctaaattgagttatttgtgaaataagtatggttctataattctgaaatccaggaatctctgtaaactgttttttttttaataactcgtttagctaaacctgatctctgatctgaattaacatgagattatttatagtctgtctttatcccagttaggctggaaatattcatatttcactatagaaatatgaatatgttttgttgtagatcattgccttccattctgctggaaatatgaaaaaatggtgtatgtacatactacatctctaaatgcctcaaaaattctgagtcctaaagcatagctgatctcaagggttt

SEQ ID NO: 17275 - DNA, 1036 bp, Homo sapiens
ttttaaaaaatctgttatttttattctcctcttctccctactgtgatggctcctgaaggatgtctgagaaatcactaaggctttgcagagcacaggatgcaaaccaccataaaaaaatccaaattgtgggccgggcacggtggctcatgactgtaatcccagcactttgggaggctgaggcaggtgggtcacgaggtcaggggttcgagaccagcctggccaacatggtgaaaccccgtctctactaaaaatacaaaaattagctgggcacagtggcacatgcctgtagtcccagctactcgtgaggctgaggcaggagaatcacttgaacccgggaggcagaggtggcagtgagccgaaatcgtgccactgcactccagcctgggcaacagagcgagactgtatctcaaaaaaaaaaaaaaaaaagaaaaagaaagaacaaaaaaatccaaattgtaaacccagccataaaaagatggcagtgctgttgaaactggcagaaccacaacaccatagcttcaaaaatagatcttatgtgtacattttaacctaaaattatactttcaggtggcatttactgtgtaaagcaaagtcaagctttgatcataactgttttttcagagcacactttttatataatttgggaatggtggtgctatgagagctaaaatattttttgtttactaatttaaaaagtaaatttcagctggacgtggtggctcacacctgtaatcccagcactttgggaggctgaggcgggtggatcacctgaggtcaggagtttggagaccagcttggccaatatggcgaaactccatctttattaaaaacaaaaaaattagctgagtgtggtggcaggcgcctgtaattccagctactcaggaggctgaggcaggagaattgcttgaacccaggaggcagaggttgctgtgagctgagatcatgccactgtactccagcctgggcaacaagagcttaactctgtctcaaaaaaaaaaaaaaaaaaaaaaaagtgaatttcatgttggccaagatt

SEQ ID NO: 17276 - DNA, 1058 bp, Homo sapiens
gcagagctctgaggctgtgcagggtagtggggccctaggcctggccctctacaccataatgtcctcctaggcctctgggcctgtggtgggaggggctgctgggaaggtctccgaaatgccttccaggccttttccccattgacttggctgttagcacttgtctctcttttagttatgcaaatttctctagcaaatggttgctgctccacagcctgcttggatttctctcttgcaaaagctatctctgccacatggccagcctgcaaattttccaaacttttatgctctgcttcctgcttaaatatatattccaactttaagtcgcttctttgctcctgtacctgagtgtaggctgttcgaagcagtcgggccacatcttgaatgcttttctgccttgaaatttcttctgccagataccttaaatcatcactctgaagttcagttccacagatcccctagggcgggggccacattgtagccaagttctttggtgaggcgtaacacacgtgacctttgctccagttccactaagttccacatttccgtctgagaccttctcagcctggccttcactgtctggatcactatcagcattttggtcacaaccatttaaccagtctctaagaattccaaactttctttcttcttcctgtcttcttctgagccttccatatgcttccaacctctgctgttacctagttccaaagttgcttctacattttcagttatctgtatgtgaggcaatccctcactcctagtaccaattttttgtgttagttcattcttgcattgctataaagaaagacctgagactgggtaagttataagaaaaggggtttaattggcttacggttctgcaggctgtacatgaagcatggcggcatctgcttctagggaggcctcagggagctttcacggtggaaagcaaggcaggagcagacacatcacatggcaaaaagcaggagcaagagacagagaaggtgggcggaggttgcaacacattttaaaatgcccagatctcacgagaactcactatcacaaaggcagtagcaagccat

SEQ ID NO: 17277 - DNA, 1045 bp, Homo sapiens
atataatggaggtacaggcattgagtaaatactccctttccaaatgggagaaatcagccaaaagaaggggcctacaaacctcatgcaagtacaaaacccagcaggacagtcattaaatcccagcaggacagtcattaaatcttaaagttccaaaagaatctcctttggctctctgtctcacatccaaggcacactgatgcaaggagtgggcccacaaggccttgggcagctccacctctgtggctttgcagggctctgccccaccccacagctgctctcaggggctgggattgagtgcctttggcttttccaggcacatggtgtaagctgtcactgtctaccattctggggtctggaggacagtagccatcttctcacagctccactaggcagtgccccaaccccacatttccctcctacattgccctactagaggttctccatgaaggctctgcctctgcagcaggcttctgtgtggacttccaggcttttccgtacatcttcttaaatctagccagattgattctcttgaacactttgctgcttagaaatttcttccaccagatactctaaatcatctctctcaagttcaaagttccacagatccctagagcaagggcacaatgccatcagtctctttcctaaagcatagcatgagtgacctttaccccagttcccaataagttcctcatttccatctgagaccctctcagccttgccttcactgtgcatatccctatcagcattttggtcataaccattcaataggtctctaggaagttccaaactttccctcatcttcctgtcttcttctgagccctccaaactgtttgaacctctgcccattacccaggtctaaagccacttccacattttcaggtatctttatagcaatgccccacacctcattaccagttttctgtattagtttgttcttgcattgctataaagaaatacctgggactgggaatttataaggaaaagaggtttaattggctcatggttctgcaggatgtacagaaaccatggctggggaggcctcagg

SEQ ID NO: 17278 - DNA, 1093 bp, Homo sapiens
tgggcaagctagcctgtttttaagtttgggtgactaggtttctgtttttcactcatgcttatggttgatagcaaattacagtatttttgtttttaatgttaagatgatttattgtttattaataattgcaaaaacatcaggcaatgtttgctgtaaaaaattgcaaaaacaaaaattaaccactgctaagattttaagtatgccctttaaatgtcatatcattttcctttttacaaaacatacctattggcccgacacagtggctcatacctataatcccagcactttgggaggctgaagtaggaggatcgcttgagcccaggagttggagatcatcctgggcaacatgttgacacctagtctccgcaaaaaatacaaaaattaaacaggcatggtggcacgtgcctgtagtcacaattactcaggaggctgaggcgggaggatcgtctgagcctgggaaggttgaggctgcagtgagccatgattgtgcccctgcactccagcctgggcaacagcaagactctgtctcaaaaaacaaacaaaaatacatattgttttcacttaaaaatatattgtgagcactttcctttgaccacatgtattctactcacatatattttatgatcatatatattttatgatattattttatttaaaattgcactgaatttccttagtcgattttttttattgttggtcctttcagttgttttctttttgtcttctttgttttggggtggggggagaaactatgtcattaaagtctttatatagcttagataacttctttaagctataacgctacaaaaaatttctggagcctcgccctcgccctcgccctcgcacggtcctcgtctcccctttgcacagtctccctctgatgccgagccgaggctggactgtactgccgccatctgggctcactgcagcctccctgcctgattctcctgcctcagcctgccgagtgcctgggattgcaggcgcgcgccgccacacctgactggttttcgtattttttggtggagacggggtttggccgtgttggccgggctggtctccagctcctgacggcgagtggtctgccagcctcggc

SEQ ID NO: 17279 - DNA, 1666 bp, Homo sapiens
tttgtttaactttttaaatggtgcttctgttcgctacctgtttttttcttttgcctatttgctactaggttgtttatctttttcttattaattcgctgatatgtgaggttttgttttatgaagcttaatcttgctggacataaaattattggctgctaggtttttcttttttctttcatcactttgaaaatgccatcccattctcttctggcctgtgagagttctgctgagaagtgtgccattagtctgatggggtttcctttataggcaactaagtgtgcttttctcttgccgatttaaaatttttttccttcactttgactttagacagtctgatgataatatgctgtggtgaagttttttttgcagtttattttcctggggattgctgggcctcctgtagctggatgtctaaatctctttcttgacttgggaaattttcatcaattatttccttaaataggttttcagaactttttgcattttcttcctccttgagaataccaataattcgtaagcttggttgccttatgtagaccctaatatcttgatgtctttattcattcttttttcctcacttttgtctgattatgttatttcaaaagacttgtcttcaagttttgagattctttttttctgcttagtctagtctatttttgaagcatttcaaatgtattttgtaattccttcaataatttttcagacccagaatttctgtttgtttttgaaatctgtctcctgtaaattcctcatgtgcatcctaaattgattttctgattttctttatattagtttgcagatttctcttgcatctcattgagcttctttaaaatcaatactttgaattatttatcgacatttcaaggatttttgttctgcttaggatctattgccaaataattattttgttcctttgagggcgccataataccttgctttttcatacttcctatatgttgatttctgtgtatctgaagatgtgactatgatgctgattgggtagggccatttgtctgcatgaagtgacaaagactttgtatgatttccttggatatacatagccttaatgcggtagctttcttgaatgctggttgtagtggcgtaccaggcagtgagcagacacacaacctcctgtgcagctgtgatgtcatgggtgataggggcagtagttgtgagaagctcttctctttctcaagtgctgtgctcttgtgttaattgttgcagtgggctcttcaggctgtcccagaaggtggattgggccatggaacccccaggggcctggatcctgcaccctatcttggagtggggggcaaagctggaatggagctaagttagctaggcctgcactcagaccacctaccctgatgggagtggctacctaccctgatttaggcctctggtaaaatacctgggttagggctgaccactgttatgctgatgtctcagcctgggaagggagggtggttctagcttcacagccttggctggcagacatgggacctgcttccctcttacaccccagtcttggcaaggttcatgcccccatctcaactatgttagccagtctggctgttcacttagtcactacagtttgcttctcgtctgcagtgcagtcttgggctataggagtcactgtgcagctcaatactacacctctctggcactt

SEQ ID NO: 17280 - DNA, 1047 bp, Homo sapiens
caaatcaaaaccacaatgagataccatctcacaccagttagaatggcgatcattaaaaagtcaggaaacaacaggtgccggagagaatgtggagaaataggaacacttttacactgctggtgggactataaactagttcaaccattgtggaagacagtgtggcaattcctcaaggatctagaactagaaataccatttgacccagccatcccattactgggtatatacccaaaggattataagtcatgctgctataaagacacatgtacacgtatgtttattgaggtactattcacaatagcaaagacttggaaccaacccaaatgtccaacaatgatagactggattaagaaaatgtggcacatgtataccatggaatactacgtagccataaaaaaggatgagttcatgtccttcgtaaggtcatcagtgaagctggaaaccatcattctgagcaaactatcgcaaggacagaaaaccaaacactgcatgttctcactcataggtgggaactgaacaatgagaacacagggacacaggatggggtacatcacaccggggcctgttgtgcggtggggggatgggggagggatagcattaggagatatacctaatgtaaatgacaagttaatgggtgcagcacaccaacatggcacatgtatacatatgtaacaaacctgcacgttgtgcacatgtaccctagaacttaaagtataataaaaaaaaatgaaaaaaatgtctggatagggccagtcgcgatggctcaagcctgtaatcccagcactttaggagaccgaggtgggccgatcacgaggtcaggcgatcgagaccatcctggctaacacggtgaaaccctgtctctactaaaagtacaaaaaaattagccgggcgtggtggctggtccctgtagtcccagctacttgggcggctgaggcagaagaatggtgtgaacctgggaggcggagcttgcagtgagccgagatcctgccactgcactccagcctgggcaacaagagcgagactccatctcaaaaaaaaaaaaaaatg

SEQ ID NO: 17281 - DNA, 1069 bp, Homo sapiens
caatgctccatagattatttaagatcatttgctagccacttaatctgtggctataattaaattactctcaaacttccggctctgagatttagtttttcttggacaaaaggctaccttttctatctctatcttccaaaacatgttcactaactcttgagagtcccaatcaaaagcctttttcacatatggcctgcacctcaggcctttcttccctcaggccttggtgatagactaagggttctataaattctgattctcatccccaccagcctataggctctgttgactcatagcctaagcactatctctgagttttctcctatgtttaaaaactaccaaaactttttattatgggaaaatctcacatatatactaaagtagaaagaacagtacaataaattcccatgtgcccgggccccaacttcaacagtatcaactcctggccaatcttatgtcagctatatcctcactcattttgcctttccatgttattttgaagcaagtcccagacatactgttaattcatcccagatattccactgtgtatctgtgcagaaaagagcatagcaggcctgattgctgtcctttggaaggcctgtttacaaggttggcccttggcgagcatctgggaacttggattttgggagggttctcaaccaccctaactagtagtagtgtactgtacctaagctttgtgtgcaaactacatggtttgtggtgaatacttgctttccttctgggagtctggaatcttagtaagtgctatacagagtttgcctatgtaacctgtcctcagtaaaaactgagcaatgtgtccctaatgagcctctctggtagacagcattattgtaactagccgctgggggaattaagcccatcctgtgtgacttcactgggagagggctcttcgaaacctgtatttggtttcctctaaacattatgtcatgcaccttttacttttgctgattttgctccgtgtctttttgctgtaataaatcttggccacgagtacagttatatgctgagtcttgtgaaccctcctaccaaatcaccaaacctgggtgtggtc

SEQ ID NO: 17282 - DNA, 1041 bp, Homo sapiens
ggaagcttactttctgtagttacacctgtaaacttgaagctcaggagctatgcagtgggcatcttttaccagtcatgtggcctagaaagcacagggggcagatatacacaaatgagcagagatgagaaaccaagagggatgatgagccatctaagccctgcttccagtcctgtctgaagcactgttcctgttcttggacttcatgaagggacctatatccttataatcttctttgcctgccttagcttaactcaggccagtttatgctacttaggacaacattaattttctttttttttttcatttctcttttttttaaaaattatactttaagttctagggtacatgtgcacaatgtgcaggtttgttacacatgtgccatgttggtttgctgcacccattaactcatcatttacattaggtttttctcctaatgctatccctccccctgcctcccaccccacgccaggccctggggtgtgatgttccccaccctgaggacaacatgaattttctaacttaaactcagatgaacttggaaactgtataacagataaaattataaaataagactagaggtagagtttttgaatgaaaacaagggattctctctcaagaaaagctttaatgcatgcaaggactttatgccttctcttttgaccactcagagtccatttttgcttcttaaacttctatttatctatctatttacttattttaattgacaagtaaatactgtatatatttgtggcttacaatatgatgttttggtatatgtatacactatggaatacctaaatcaagctgtttaacatatgcattacctcactttcttttgtgatgagaacacaaaatctactgtcaacaatattcagatatacaatatattgttattaaccattgattatcatgaagtacaatagatctctggaacttactcttcctgtctaactgaaattttgtgttttttgaccagtagttcctcaatgttcctggccctcagcctctggtaatctccatttcactctctgcttctatgac

SEQ ID NO: 17283 - DNA, 1578 bp, Homo sapiens
aaataaaaggaactttataatgaaacggttcggaatactggctcaagaacctatgtcaagatgagctgaattttggtaaattattttaggaattatgacaagctaattgaattaggcttgtgacaattagagtaatttacatgacaggtaaaactcctattaaaaatgtttagatgtttgcttctgtagatgtcactttagtaaaataccaatttagttttacttgtggcttatctagttagaacttagcagactttactgggacaagtttactgctcttgtaggagctcctctcacaagtagttgtaatgctgtagcatgatactcaggatcagtagcttgagatgctactatttttctcttcatctttgacttgcagagagcctcccgtttttggatccaggcatcttttctgaatcctggttccatcagtatacctgctctcctatgaccccaaatcatagtcaatggtgcctcaaacatagcaccttaagttaaaggctgcctagtgctctgaggaaagcttgctgattatcttcctgatctactcaccccaaaaggcagaaaagcaacacagtcactgctgtggtcatttgtaatgtaaagatcagttatatatatatatttgtaatgagagcaagtatatactcattatagaatcaatttaagaagtttaaaataacccagagtagaatttctatatctagtcttggtttttttcatgaatatttgcaagtaattaccattaaattcacacatgaaagattaatctgaaagatcagagaccatgttattcctgaccacgatagaactgctcctgtggtttgggacaagtaataaaacaactgcttgagttttgtttgtaaaatacataattaatatttgacctacctcaaaatgtattgaggatctgtgaaatgctaagtgcccaaaataaaatattgctgattgtctttttattaaaagtaaatttcctcattaagccaacctgccttctgtaagtcacagtgcttaaatctcaggatttttcattaggagagacctgtcgttaaggatttgtaggtataattgcttagcctccattattggtgcttgggatagagaggttttagatttttgttttttttttgttctgcctcaaagctcagtttattgaagacatttgtaagctattggatcatcacttgaatcaagattttgactagtgagcttaattgtccatttcttacaatttcaaagttacagtctcagaaatggttaattttaataactgtcctatcataaattaatgttggaataaattgaagttgttgataaatacttcatgaaaactaaagtctgaaataaattacttgttttatgtccaatagctactacatttgatagaacagttttgaggaacatttcattcttgaacgcagcatctgacatggttctcagcaagttggaatagtaaggattattggcttgtttcgatgagtggaagcggcatgtttgtagcatacaagttattcaataatcttgtgctgatgacctaaaaatatgtcttaactattcatcaaggaaagcctggtgaag

SEQ ID NO: 17284 - DNA, 1040 bp, Homo sapiens
ttaatatattacagtgcatcacaattctgaggtttttctgtctgctcattttaaaacatacagaagtgaagctgcagaaagctttagatgggcctgttccagggttccttgttactgttccgtatggtacatatacagtaatacattaaagcagtttctgtctttaggcctttgggccatagaccaggtctggcttatcaaaaagtggtggaggaaagcagccaatgagactttttcctcaggccactcaatagtcttatactaagctgtgagttcctagctattttgttttatcacatgaagtatccctgaagatattagcttaagattccataaatattatctgttttcttccccttcaccctttgtccaagcccttgtttcatacctggattatttcctttgccaacccaagactgagattagagcccccttctttgagcaccatatagcactgtgtgtgcttaaggcagtattgtaattgttgatttacttgactattgtcccatctttgtatctgactccagctctcacatagtgcctcacatatagcaggcactcagtaaagatgggctcagcatgataggtgtaagttagaacccaggcaaatttatgtttttgctctggaagtcaagtaggttagttgtattaaggttgatgtttagctctcatcacaatttgcatgttagtggtaaagggcagctaaaaaaaaagcagtagtcatacttcatgtctctctgtgaaaaatggaggaggtgtggagtagggatatgcattttaagtaataatttctagtgagtttatttctttcattactctaatatttatatttttaccttaatttttggtaaactgctctagttcaaataagtatgatttaaattcttgcagaaacacttgttctaaataacagaataccaggaactgtaaataatagttttaataactataattatgggggggttggtttttttgtttttgagacagagtcttgctctgtcgcccaggctggagtgcagtggcacaatctcagctctctg

SEQ ID NO: 17285 - DNA, 1033 bp, Homo sapiens
ttatatatctgttctctcacagcactcaacattgtgcttgacattatttacaaaatggttgaatggattttcctcagaacttttctgttaaaacctttgccaaagtactatttcaaaacaaatgacaatgctagtaccacagagaagaatagaccatggtaagatgaaaaccttagcttagacccacttaagaactcttgaacgaaactacagtgatgtgtgtatatattttttcgtttgtgttgtggccttaattttttttttaagatctcaatagcaagttttctagaggttataagactcaccaaactaatatgtcttggaaaggatacccacaggaaagctgtcaatgaaattatttgtcaggtaagagatacaggttggtgcctttatgagtggtagaagaggaaaagaacctttatctgcattattttaatatatcaaccataaagagatataaattgttttcccatgcttccagtattttaaaaataggagttcatattggtattttcaggagctcttttgacaactacttttggttacctaaaggctgaagaatgtttttgttatgtttgagacagggtcttactctgtcgcccaggctggggtgcaatggcacaatgatagcatattgccgccttgaactcctgggttcacctagcctcccacctcagcctccaagtagctgggactgcaggtgtgagcaaccgcctcatccatgttttctatttctattcagagtgaacacaacatgctcccttggtctctgcaaccatcgattcctaacagcctagaggtaaacctcagaaaagtttttaaatgtttctcttagccgtcttagcagtttgcgatacaacagtttgttagggttgcttcttttgtttgtgcaagacttgaatacttaacttctaatccagaagctgtgtttactataacataaaatattaaagatgagctgatggtgaaatcctcaagtgtgaagaaagtttcttagctttatagctttatggaaacaagtacattgtatttt

SEQ ID NO: 17286 - DNA, 1024 bp, Homo sapiens
taaatttgttcaggaatcagagattctagacaaagggaacttcatgtgcaaacgtaaaagagcatggcaatgttggaaaggatcaactggagctagagcatgggactctgtatatgttgggagagatgaaatgagaggcatggtggagcttaagtgctgtgctatgaatgttgacctcatcctatagacagcaggaaacaaagtttttaagtggtaggtgatactataaggcttttttcaaaaaaagaaaaagaactctggcagtagtacagaggatacactacagatggaaagactaattagaagatgtagcatttattcagaggagaggttatgaggatcacctaggtcactaggatagtggtagtagtggggatggaaatgaggccctgagactgagaggtaaaatcaacaggatatggattggattgattagagggcaaaaaggagatatagaaggttgattgtgacccaggtcttttggctttatctttttgatcaggagattagaattgctgatatgtcactgtttcacatttagactacacaaacttttagaatcatgaggctttgtagcatttcttttcaaagaattaatcaaaggaatgctactcacatttcatgatgtatacatatatgtgttgatatatttatataaaataaagcttgtgaaaagttttaaatgtttctcataagtgggaaaataaccactaaattttaaaagtagttatctcagtgagtgaccttgggggagggatggataaggagcttctgtactatttctgtacttctaaactttttataaatgcacatttttatgttttaaactaaaacatatcacatactacagtatttataagagaagcaattatttctcggttagaattataagtgcttgacttcatcttttgatggaacttccatatataacctgttaggttttcaggtgtttctctgtgtctagcaccatgaataggcactgtgagggataaatacctgctctgatagagcatatttttaaatt

SEQ ID NO: 17287 - DNA, 1030 bp, Homo sapiens
tcccctctccccaacaggaatataagcttcatgagggcagggaagggatttagtggcatttgttcactgctgcatttccccatacacagacaggtacctggcatttagtggctcttcaataaatgtttagtgttgaatgaacacttggcatgcattttaatatctttgtggtgtagcataaaacttattacttgacaacgttatgcattctcttttctgagatttgttagtttagtaaccctaagatctaattctccagtgtcaagttttttgcttctaaatggaaatgtttatgcccacttcacaaggttattgggggatcaaatgagatgttatacatgaactccctatatacaagatagagtgctatgtaaatataagtagttgttcattctctaagcatttatgtttacttatcaggtattgtgcgaggttctggaaacatacagatgaataagtcagcagggtactgtgtgtgagtctggggggcaactagaaaaattcttgactcctttggaaatgtctcttgctaatgtagtgtttgtagtttgaggaatcatggcctcagatatattggttccctaaactaagacattaacatccttcaaagtcttatgaaatagtagggaatttttcttctatcctcttaaaaattacactagtaatatgagtctgtcaaagaagtacaaaatttagataagctaaaagaaaaggagaaaatacccaatagtaatgctcctattctgtgattagacagttcatgttttgggtgccagggcggggtgtgtgtttttccttctagtctgtaaatgtacgtacatattaatagtatattttttaattaaaccatatatactgtttaggaaactttttttacctaatgtaatttgtatattttcatgtcattaaatattcttcccttatggtatatttaatggtcgtatagctaacttttgcatgcctgtgtcatttggccaatttatacttcttaatgttttaatttttaactgtggtaaaatgtggataacat

SEQ ID NO: 17288 - DNA, 1059 bp, Homo sapiens
aaaatgaactatataagtcaccagggaccaattctggaaaagcagcggtatgtaacctttcagacagataattcaaaatagctgttttgaggaaactcaaataaatttaagataacacagagaaggaagttggaattctatcagatacatttaacaaagaggttgaaatatttaaaaagaatcaagcagaaattccggagttgaaaaatgcaattgatgtactgaagaatgcatcagagtcttttagtagcagaaataatccagcaaaagaaagaattagtgaccataacagattatttgataatacacagaggagacaaaagaaaaaagactgaaaaacaatgcaacacacctatgagatctagaaaatagactcagtagggcaaaataagagttattgaacttaaaaagagggtagagggagagaggggggtagaaagtttattaaaagtgcaaataacagagaactttctagaaaaagatattcatatctaagtacaagaaggttatagaataccaagcatatttaactaaagaagaaagcttcaaggtatttaataatcaaacttccaaaggtcaaggataaagaaaggatcctaaaaccagcaagagagaaacaacaacaacaaataacatgcaatagagctctaatatgtctagcagcatactgtttagtggaaacctggtaggccaggagagagtggcatgatatatataaagtgttgaaagataaaaacgtttaaccttgaacagtgttttgagcaaaaatatccttcaaacatgaagagtaaatactttcctagacatctgagggattttatcagcaccagacctgttctataagaaatgctaaagggagtacttcaatcagaaagacaaggatgtaaatgagcaataagaaatcatctgaaggtacagaactcactggtgttagtaagaacatagaaaaccacagaatcttataactctgtaactgtggtgtgtaaactactcttattttaaatgaaagactaaaagataaaccaatcaaagatactaactacaacaacttttcaggac

SEQ ID NO: 17289 - DNA, 1031 bp, Homo sapiens
gtgtccagcaaaactaagctttgtaagtccaaggaaagatagtcttttttcagacaaacaagtgctgagagaatttgcaactaccaagccagcactacaagactgctaaaggagctctaaatctttaaacaaatccttaaactcacaaaaatagaaccttcttcaagcataaatctcacaggacctataaaacacacacacacacacacacacacacacacacacacacaccccgcccccaaggtatttaggcaacaaatagcatgattaatagaatagtaccttacatctcaatactaatgttgaatataaatggcctaaatgctccacttaaaagatacagaataacggaatggataagaattcaccaaccaattatctgctgtcttcaagggactcacctgatacataaaactcgcataaacttaaggtaaaggggtggaaaagatacaccatacaaatgggcaccaaaagtgagcaggagtagtgattcctatatcagacaatatgaactataaagcaacagcacttaaagacaaagagggacattatgaactgataaaaggactagccaaacagcaaaataacataatcctaaatatatatgcacctaacaccggagctcccaaatttataaaatagttgctactaaacctaagaaatgagatagcaacacaataatagtgggagacttccgtgcttcactgaaagcactacacaggacatcaagacagaaggtcaacagagaaaaatggatttaaactctaccctagaacaaatggacttaacagatatttatacaactttctacccaacaactgcagaacgtacattctattcatcagcacatggaacattctccaagatagaccatattacaggccacaaaacagtctcagtaaatttaagaaagttgaaattatgtcaagtactctctccgaccacagtggactaaaattggaaatcaacttcaaaaggaagactcaaaaccatgcaagtacatggaaattaaataacctgctcctgagtga

SEQ ID NO: 17290 - DNA, 1062 bp, Homo sapiens
tgcatgttgagtgacagtattttggaaatttgggttaaataaaatgtatcattaaatttcctcctgttcgtttttactttaaaaaatacggctactagaaaatttaaaatttcatatgtggtttgtctttcattggatagtactgatagaaattttagagcatagttggactcagcccccttttagccaacactcctgtaggcattttctaaaacagttggatttttgtggttgagaacttagtagtattgattgtttggttcattctgctaatatcatgtgctgaccatatcccaggcacttttaagtgttcataaccagaaagatgctgtctttattcatggaaattacaagttaagaatgggattagttgtcagtagtccaagttctctttatagtaaaatttgaaaagcattggattggtttaaagtggaaggaaaatttaacagcagtagagacttttgtcagataaaaattagagaaatgatacttgtgaaagagaatgttgagagtcatgatggccaggagtatacaccttcttcagctttttgagtagggattgtttttgtaatgatttttttcatgtaaattcatttctaaatcagaataataaagaagtgtttgttaatgcagttgttgatcataccgcttgaatgtgcatacatttgctaactcatgaatttttttgtagttgatgcgatgaagagagttgaagaaatcaaacagaagcgccaagctaaatttataatgaacaggtatgaatatttgtatggagtaacttttggaaaataattactagtagatatttagaggcattagtattttttaaaaaaattttttattttgacataacttcagacttaccaaaaacttcaaggaataatatgaagaactcttgtatattctgctagcattttacatttactttatccttgtctcaatgtattgaagacataatgctttttccttctaagtatacttaagtgtgtgtaacctaaaaataagaacattctcttaaataaacacagtatggttatctatcagtcaggaaattaacattga

SEQ ID NO: 17291 - DNA, 1071 bp, Homo sapiens
cactgcactccaggctgggcaacagagtgagactgtctcaaaaaaaaaaaaaaaaagatttgttgctcttgagcaacttgatgctgtaaaattcagaatgtcttcaagtgtatggtccagaaatatagtctggagttggtaagtggcaaagcctttgataaacatggccagtgacctctgaatactccccaaagccagcgttttcttcttgtacagtgcataagatttatttattttgaaaatcctcatactagtttggaaccagtagaacctatggttaaactggctgcattggaattagctgtggacccaaatcctaactctgctactttctagcattgtgaattgggcaagttcctttcatctttctcagccttagtttaatcatttgtgaaatgggaatattgtgtacctgaatacagtagtggttatatttagtgaatcatgtatgtaagacacatagtattgggtagctcaagaaataattttagttattttttccttcaatcttaaatgactcatatatatcagctagtttcaattcaggcaaaccagaacactctgaagagcatatacaagaaatccctgaagcaaaaaagggggaaaagctaaaaaaaaaaaaaaaaaaaaggttatagtccaggaaactcatttaataaaatagcatgttgcaaaatttgaatttacccagtttttttcttctagttagtagttttggaaatcagtattctttgaactaaacactgagaagacatttcctattttgttttacaagacatagtatagtatatgaggacctgtataagaaaacaggaagagcctacttgcttctctgtcatttattagctgaataacattgatcagaccgcttaacttttctgggccttcttgccacaggcctgctttaagagtttttttctaacctaaagattacaccaaaaaacatttagaactgatcaacgaattcagtaaagttttaggatacaaaatcaacatacaaaaatcattagcatttatatacaccaacagggaacaatctgaaaaagaaatcaagaaagcaatctcatttac

SEQ ID NO: 17292 - DNA, 1047 bp, Homo sapiens
atttttcttttttgatttatgaaagggattattctgtggggcaaaacaaaacaaaaaaccaaaggaaaaaaccaagtagaatgaatagacgggtataaaaggataagtaaaagtctctctcccctctgatagtccttttcttcagcaacagccactattaatggacatattaggatctactgagaatacaaagaacaggcctttccactggaaaagattaagcttattagtaagcatgacattttgttcataatttacatacactctttttatagaactagataatagttctttttgaacttgggtattcttcatccaaaccttggtttgcccaaaatgttagtacaatactgaatgggaccaaggcagtgttttttattttgttcctcctatgaatatgttaatatcatccacagttcatacctcatgagttggaatatcacatgtccatgtcacctagtattttttaatctacttgaaatagttctgattaaagaataatctgaaaagtggtgtggtgaaaaatgtagcaagattaagaaaactaagcctatcacttaaatctacatttataagatgtttgaaatggtaaaatgaggaacctactaaaaggaatgataattagaactagctttatttgaaataaaatagctgagatgagaggattgcttgaggccaggagttcaagaccagcctgggcaacatagtgagactccatttaaaataaaaaaaaattagccaggcgtgatagtgcgcacctgtagatccagctactgggaaggctgaggcaggaggttcacctgtgctcatgagtttgaggggacagtgagctatgaccacgccactgcactccagcctgggtgacaccctgtctctacgaaaataaaaatgaataaaatagggccaggtgcggtagctcacacctgtaatcccagtactttgggaggacaaggcaggcggatcacttgaggtcaggagttcaagaccagcctggccaacagaggtgaaaccccatctctactaaaatataaaaattagccgggcgtg

SEQ ID NO: 17293 - DNA, 1047 bp, Homo sapiens; identical to SEQ ID NO: 17292

SEQ ID NO: 17294 - DNA, 1047 bp, Homo sapiens; identical to SEQ ID NO: 17292

SEQ ID NO: 17295 - DNA, 1023 bp, Homo sapiens
aacaaactaagagaacagattagaatattggaagataaagggacaagtactgaattagttaaagaaaatcagaaacttaagcagcatttggaagaggaaaagcagaaaaaacacagctttcttagtcaaagggagactctgttgacagaagcaaagatgctaaagagagaactggagagagaacgactagtaactacggctttaaggggggaactccagcagttaagtggtagtcagttacatggcaagtcagattctcccaatgtatatactgaaaaaaaggaaatagcaatcttacgggaaagactcactgagctggaacggaagctaaccttcgaacagcagcgttctgatttgtgggaaagattgtatgttgaggcaaaagatcaaaatggaaaacaaggaacagatggaaaaaagaaagggggcagaggaagccacagggctaaaaataagtcaaaggaaacatttttgggttcagttaaggaaacatttgatgccatgaagaattctaccaaggagtttgtaaggcatcataaagagaaaattaagcaggctaaagaagctgtgaaggaaaatctgaaaaaattctcagattcagttaaatccactttcagacactttaaagataccaccaagaatatctttgatgaaaagggtaataaaagatttggtgctacaaaagaagcagctgaaaaaccaagaacagtttttagtgactatttacatccacagtataaggcacctacagaaaaccatcataatagaggccctactatgcaaaatgatggaaggaaagaaaagccagttcactttaaagaattcagaaaaaatacaaattcaaagaaatgcagtcctgggcatgattgtagagaaaattctcattctttcagaaaggcttgttctggtgtatttgattgtgctcaacaagagtccatgagcctttttaacacagtggtgaatcctataaggatggatgaatttagacagataattcaaaggtacatgttaaaagaactggat

SEQ ID NO: 17296 - DNA, 1053 bp, Homo sapiens
tgggaggctgaggtgggaggattgcttgagcctgggaggttgaggctgtagtgagctgagattgcgccactgcacccagattgccaacctgggtgacagagcaggatcctgtctcaaaaaaaaaaaaaaaaagtagagattcttggctatctcatttaatgagaagttattttcagttagtatatcagtggtttgcctataaacatgaacgtgaaaacactttttccagctatttgaatattcatgtgacattcttgatgttcagaggaaaacttcaggctttgttagaatagcattcatagtatctttatttatggaggggtattgtaattgattttagaatccttgttagtcatcaaattttattattatttttttaaactccaggatttgtgttgtattcaggtagtttccccacccccgcttcctttcctgcctctggtttaattagagaatattcatggcccagaaaagtcaaattgaagccagagtattatagaatggtcagatatataagaaactgacatagacgtaaaaggaactacatactgttgctgggcgtggtggctcacgcctgtaatcccagcaccatctcaaaaaaagaaagaaattacatattaacttttttcaggaagttgtatagttctaagaccattcttctaatatttatcttctttctgaattctgacttcttgagatttttgtggactaagaggaatatttgattaactgtatttttacccattgttattcctcctaaagatattgtttcaataaaccaaatgtttaaagacgaaattttggactatactgaaaacactgcatataaaccagttgccaaaagtttttgttttggggccgggcactttggctcatgcctgtaatccctgcactttgggagactgaggcaggcagattacctgaggtaaggagtttgagaccagcctgaccaacacggcaaaaacccttctctactgaaaatacaaaatttagccaggtgcctgtaatcccagctacttgggattagctgcctgtggtagcgcaggcctgtaa

SEQ ID NO: 17297 - DNA, 1053 bp, Homo sapiens; identical to SEQ ID NO: 17296

SEQ ID NO: 17298 - DNA, 1053 bp, Homo sapiens; identical to SEQ ID NO: 17296

SEQ ID NO: 17299 - DNA, 1043 bp, Homo sapiens
attggaagaagatgccatctaggactttcctaactacagagaagtcaatatctgcttctaggcttcaaagaacaagctcactttcttgttagaggcaaatgtagctggtgactttaagttgaagccagtgtttacttaccatgccttgagaaatcctaggacccttaaaaaatatgctacatctactctgcctgtgctctgtaaatggaacaacaaagcctaggtgacagccatgtgtttacaacatggtttactgaatattttaagctcagtgttgagacctgctgctcagaacaaaaagattcctttcaaaatactagacattgtatagcaatacctggtcaatcaccgaagggctctgatggagatgtacaaggagattcatgttactttgtttcctgctaacacaacatccagtctgtagtccatggatcaaagagtagttttgactttcaggttgtattatttaataaatacattttgtaaggctgtagctgctatagatagtgattgttctgatggatctgggcaatgtgtgtgaattgaaaatcttcaggaaaggattcaccattctagatgcctttaagaacaattgtgatttgtgggaaaaggtcaaaatatcaacattaacaggagtttggaagaagttgatttcaaccttcatgactttgagtggttcaagactttaatggaggaaggaactgcagatgtggtagaagtagcaagagaattagaattagaagtggatcctggtcgggtgtggtggctcatgcctataatcccagcactttgggaggctgaggtgggcggatcatgaggtcaggagatcgagaccatcctggctcacacggtgaaatcccatctctactaaaaatacaaacaattagctgggcgtggtggcaggcgcctgtagtcccagctactcgggaggctgaggcaggagaatggcgtgaacctgggaggcggagcttgcagtgagccaagatcgcgccactgcactctagcctgggcaacagagcgagactctgtctcaaaaaaaaaaa

SEQ ID NO: 17300 - DNA, 1043 bp, Homo sapiens; identical to SEQ ID NO: 17299

SEQ ID NO: 17301 - DNA, 1043 bp, Homo sapiens; identical to SEQ ID NO: 17299

SEQ ID NO: 17302 - DNA, 1118 bp, Homo sapiens
ttatagaaataaccaaatttagacccttattctctggaattcaaatttattgcttgagctcataaaatagagcattccacttttgggctgacctgacttagaatttaaacctgagactccattgtgccattttcctgccataggcctttgtggactaaattgaacaaaagcttgtctaattagatactgttcctttggagtatggcagcatctgagacttttaataatggaagaagcatttacatgtagtcaaatctagctttgaggagctaataggcaaataactgaaagattatcacttttccttaggggtcagatatagaaatgttgaattctgtgacccccactgacagctgtgagcccgccccagaatgttcatctttagagcaagaggagcttcaagcattgcagatagagcaaggaggtaagttgttcacaaattctaattttttttttaatatgatatatgagtgatattatgagtcttgccttctttccaggtgggtggcctttctggctaatctaaggggtcgttggaggattagaacttcagtgtaggttgggcacagtagctcacacctgtaatcccagcattctgggaggctgaggtgggcggatcatttgaggtcaggagttcaagagcagtctggccaacatggtgaaaccctgtctctactaaaaatacaaaaaattagccgggtgtattggcaggtgcctgtaatcccagctactcagaaggctgaggcaggagaatcgcttgaacctgggaggcggagtttgcagtgagccgagattgtgccattgcactccagcctgggcaacagagtgagactccatttaaaacaaacaaacaaagaaaaacttcagtgtggatttggtgaaggcccacagaacccagagtcatcagcctgccccaggggtttatttgcagctgtagtatatttttgggttttcagatacactttgttgctacagaggtaaccagtgacaaaaaaagtgtttcatggtttaatctgaatttgtttggtagtttctatttccttgtcatttgtttggtagtttgtatttacttgtcattattaaagttaagaaaaaaattattcattgatcacaagaga

SEQ ID NO: 17303 - DNA, 1018 bp, Homo sapiens
aaagacagggtttcaccatgttggccaggttggtcttgaactcctgacatcaggtgatctgcccacctcagcctcccaaagtgctgggattacaggcatgagccaccacgctcagccagtgtgcatgtatttttatagcagaatgatttatatacctttgggtctatatccaggaaagggattgctgggtccaatggtatttctgcctctagatctttgaggaatcaccacactttcttccacagtggttgaactaatttattctcccaccaacagtgtaaaagtgttcctttttctccgcaaccttgccagcatctgttgtttcttgacttttatcatcgccattctgactgatgtgagatggtatctcgttgtggttttgatttgcatttctctaatgatcagtgatgttgagctttttttcatgtttgttggctgcataaatgtctttttttgagaagtgtctgttcatgtcctttgcccactttttaatggggttggttggttgtttcttgtaaatttaagttccttgtagactctggatattagacctttgtcagaaggcaaacattttctcttattctgtaggttgtctgttcactctgatgatagtttcttttgctgtgcagaagctctttagtttagatcccatttgtcaatttttgcatttgttgcaattgcttttggagttttcaccgtgaaatctttccccatgcctaaatcctgaatggtattgcctagatattcttttagtgtttttatcattttaggttttacatttaagtcttaatccatcctgagttaatttttgtgcaaggtgtaaggaaggtgatatggtttagctttgtgtccctgtgcaaatctcatcttgaattgtaaaccccaggtattaagggaggaatctggtgggaagcgattggcttatgggggtggtttcccccatgctattcttgtgatacgagtgagttctcaggagatttgatggttttataagtgtttggcaagttcctcctttgct

SEQ ID NO: 17304 - DNA, 1114 bp, Homo sapiens
aacattctatgctcatgaattgaaggaatcaatctcattaaaatagccacactgctcaaagcagtctacacattgaacactatttctatcaaactacaatggaatttttcacagaattggaaaaaactgtgttaaaattcatacggaaccaaaaaagagcccaaatagccaaatcaatcctaagcaaaaagaacaaagttggaggcatcacattactttacttcaaatataaggcagcagtatcaaaaacagcatggtactggtacgaaaacaatttagaccaatagaatggagaacctagaaataaagccacatacttgtagccatctgatatttgacaaaattgagaaaaacaagcaatggtgaaaggcccagtaaatggcgctgggatagctggctatccatatgtagaagaatgaaaatggacccatacctatcaccatgtacaaaaattaagatggattatagatttaaatctaaggcctcaaactataagaatccaagaatacccaggaaacaccattctggacaacagtcttgcaaaagaatatatgactaagtcttgaaagcaattgcaacaaaaacaaaaattgacaagtaggatctaattaaactagagagtttctgcatagcaaaagaaacaacagagtaaacagacaacctacagaagggagaatatattcacaaactgtgcatctgacaaaggtctaatatccagaatttataaggaatttaaaccattgaacaagccaaaaacaaacaaccccattaaaaatgggcaaaaggagtttgagaccagcttgggcaacaaagggagaccctgtctctacaaaaaataaagaaattagccaggtatggtggcacatgcttgtggtcccagacacgtgggcagctgaggtaggagaatctcttgagcccaggagtttgaggctgcagttagctgtcttcacaccactgcacccagcctgagtgatagagccagaccctgtctcaaaaaaaaaaaaaaaaaaaaaaaaaaaaaggtgggcaaaagacaggaacagatatttctcaaaagaagccgtgcaagtggccaagaaacatgaagcaatgtttatcatcactaatcagagaa

SEQ ID NO: 17305 - DNA, 1049 bp, Homo sapiens
cagaaaaatgttggtgaggatgtggattgtaaccctcataccttgcagatgaaaatataaaatgatgtagccactgtggaaaacagtttggcagtttctcagagttaaacataaaattgctatgtgacccagtgattccacctctagatagatactcaagaggattgaaaacatgcttatacaaaaacttgtacaaaaaaaaaacttgtacaagaatatttatagaagtattattcataatagccccaaaagtggaaataaccgaaatgtccatcagctagtgaatgaataaacaaaatgtggtatatttatatattggaatgttaatcagccataaaatggagtgaaatactgatacatactacaacatggatgaaccttgaaaatgttatgctaaacgaaagaagctatgtacaaaaagctacatattgtatgattccatttatgtgaaatgtctggaataggcatattataaatagaaggtagattaaggttgaagcaggtagatcacttgaggtcaggtgttcgagaccagcctggccaacatggtgaaaccaggtctctactacaaataaaaaaattcaccaagcatggtggcagccacctgtaatcccagctgctcgggaggctgaggcagggaaattgcttgaacctcaacctgggaggcagaggaggttgcagtgagccaagattgtgccactgcactcctgcctgggtgatagagcgagactctgtctcaaaaaaaaaaaaaaaaaagtagattagtaattgtcagggggtgggggaatgaggagtgactgttgatgggatagggtttcttttggggatgatgataatgttcaggaattagatggtaatgatggttatataaccaggtgaataaaaatcaccgactatacacttaaaacaaaaacctagttttaaaaacaaaaacctagttttagatttcattgcttcttttgaccaatggtgtgactgctttacatttatttttcttaactttttaaaaattgggaatgacttgctttgtgaactcaaaagtatctgag

SEQ ID NO: 17306 - DNA, 1074 bp, Homo sapiens
gagaccaaggcgggcggatcacgaggtcaggagatcgagaccatcctagctaacatggtgaaaccccgtctctactaaaaatttaaaaaaaaaaaaaattagccggtcatggtagtaggcgcctgtagtcccagctacttgggagactgaggcagaagaatggtgtgaacccgggaggcagagcttgcagtgagctgagattgcaccactacaatccaacctgggtgacagagcgagactgtctcaaaaaaaaaaaaaaaaaaattagctgggtgtgatgatgcatgcctgtaatcccagctactcgggaggctgaggcaggagagttgcttgaacccaggtggcagaggttgcaatgagccgagatcgcgccatattctccagcctgggcaacaagaacgagactctgtctcaaaaaaaaaaaaaaaaaaacaagtactaatatgtaactgtgattgtattattactagtttggaagtagatatgagagaggttaggagagaagcagagtggggaggatgatgtagggaaaaaaagaaactaaagtgaaaggagcagagaggtagaggcctgaagtgaaggagagagacacatttggagagtatctctcttaattcccttgggttagccctagagttgatactccatctaatgtcattttgttgatcatatgtgggttcattatggtttgtttatcctcatctgctttttaaaattttcaaacatacagaaaagttgagagaataatgtactgaatatacaaattaataattgttaatatcatagttttgtatctttatatactttttgcttgctataccatttgaaaataagttttggaatatatagcacatatatatgtatcttaatgtgttttggaatatatattttatgtataagcttaaaaataaacctattatattgttttgaccactaacaaataccttgactatgttgtactacctgttttgtgtttgtttgttttgttttgtcttgttttgtttttttgagacagagtcttgctatgttacccaggctggagtgcagtggcgcgatctcggccccgggttcaca

SEQ ID NO: 17307 - DNA, 1034 bp, Homo sapiens
ctttctttgtgtgctcaccaccacacgtggctaatttttgtatttttagtagagatggagtttcaccatgttagctaggctggtctctaactcatggcctcaactgatccacccgccttggccccccaaagtgctaggattacaggtgtgagccaccgtgccccactactattgatatttttattagtatattactattgttgttgttgttgtactcaagccctcttttaaagcacttcatggaattaaattattttccctccccaacatctcatgagatggatgctgttatcattgtcatacccattttacaggtgattgtaaccaaggtacagagagaaaaaataacttctccaagtttcatagtaatgaccaagctagtgttggaattccagtcagcctgggtttaatatcccagctcttaaccactatgctaggctgtctcttagcttcttagtagcactgagtcattaggaatgttgtcttctatttggctcagcatccactcactgtagaggacatggaagcaaaactgatacagaggggttttttttgtttttgttttttttctttttttttttgagacggagtcttgctcagtctggagtgcagtggcgtgatctcgggtctctgcaacctccgcctcctgggttcaagtgattcttctgcgttggcctcccgtgtagctgggactgtaggcacgtatcaccacgcccggctaatttttgtatttttagtagagacggggtttcaccatattggccaggctggtctcaaactcctgacgtcataatccgcccgccttggcctcccaaagtgctgggattacaggtgtgagccaccgtgcccggccaatacagaggtttttgaagtttatatgaaatatttataggtatggcaaatacttatccaagatagcccttctttttactgctatttcatcaggactttcatttggtgaaacttaagcaattgccatagttcatgcataactgttttgatttgttcattcatcagatactcagatactagaa

SEQ ID NO: 17308 - DNA, 1029 bp, Homo sapiens
aagtttgaatttgatgtccatcggttttactatcttagttcatcttcaatcaggcagtacttactcttcatggtattggggggaaggtatggtatagaagcttcctactcagcgagctttttagcttttgccttgggtcttgaagtgtaagagtaaagcaatgatcaaaaggcagcaggattggaattcttgaatgtgttctccttaaagtaaaattaatttactacctaatgtttatatatctgattattctgcttttgttctactggacatttgcgtaggttgaatgtatgtattcatatctcccatttattcagggcctgtttcagagataacttaaccaagaagttgtgggggcggggggaaaggtttcaagccactttgtaggagtggatgccattctttggaaggtactcttttacacatactcttactatttgctatctgatttctcaaacattagtgatatagggcccctgttttacaaaataggcccaaaagcacagacttggaactgaaggacaaccctctgccaagcatgtcctcttccatttctgttggttgacctgagctggaaactttgacatgttcttttcctttcttttttttgagactgagtctcactctgtcacccaggctggagtgcagtggtgggatcacagctcactacaacctctgcctcctgggctcaagcaatcctcctacctaagcataccaagtagctgggactataggaatgcactatcatgcctagctaatttctgtatttttttgtagggacgggggctttgctgtgttgcccgggttggtcttgaactcctgagctcaagccatctgccacccttggcctcccaaagtgctgggattacaagcatgagccaccaagctcagccacttggtactttcttactccttagtctcttctctcaacagttccgtttagtcatctgccttccatgtatatttaataaaatccacaatggctctcaaagctctgtgtgatctgtccccagcctcacttttctgtgt

SEQ ID NO: 17309 - DNA, 1104 bp, Homo sapiens
ttttccttcctgctgccctataaaggacatgtttgcttctccctctcccgtgattgtaagtttcctgaggcctccccagccgtccttaactgtgattcaattcaacctctttctcttacaaattacccagtcttgggtatgtccttatagtagtgtgagaaaggagtaatacagggagagatcctgatgtagctgatgtgtaagctaaattttgaaggaaaactagattttaattagatgaaggaaatgaatagtcgaaagcatagtagtaagaaacaacacggtacgtatggaatagtaaactatttgatgttgttggagaataaatttcaaagaaatggcaccccaacatggaattggagatgtagacaggatccactcaaggaaagactcattatacactatgtaccatgttaacgaacctggaatttaacttgcaagtgattaactgcaagggattggcttcatcagatttgtgtttcagattgatcccattagtgtctgtgaggagagcagaagtcaggtgaacagggctgtaggcagagtggaggctgggacagcacagtgagaactcataagggcttggactggagcactggcaaggggatgaatggaagacacattttaggttattacgattttacaatggcagtacttgttagatgtggggaatcagggagagggaaaagttcaggatgatgccagtatttcgtttgggtgacttggtaaatggtggtgccaccaactgaaatagaaaattcaggaggagaagcaaatgtagggaacaaggtaatgaatttggctgggaaaaacgtagttttcggtgactgtgggatgtctaggtggaccatccagcaggtgatccaagaaagcagttgggagtcaggagaggcatgacctaaagcaagcttgtccaacccgcatgcagcccaggacagccttgaatgcagcccaacacaaattcataaatgttcttaaaacattatgagattttttctttttagctcatcacctatcattagtgttagcgtgttttatgtgtgacccatggcaattatttttcaagtgtggcccagggaagccaaaagaaggacactgctgaac

SEQ ID NO: 17310 - DNA, 1020 bp, Homo sapiens
atgtataaaactggaagtgtgttttgtttaaaagtgccatttctgatgtagattacagcaacttttctcatattgattcatattctgtttattggaatgatatttacttgcttttaaggaaaccaagaatccaagaataaatcttttacaaaggatgtacctaaagtaggaggcctactcagaacaatgagtaagattaggattgacctggggactacaagtcgggactgctgcctaggaaattgctaagctgaattttttgtgcaaatagaagctgaccatatgatgggatagctaaacctttcttctccatggcaaatctggtcagcttgccaagcctcattaatatgagtttgcagaactgatcaagcagctgctacctctctacctagagtaaccactcaaagtggttagctttgccagtaaccaattcagtcattctttgcctaattggacttgatagcctctttctttttcatggtttcacctgactccccttcctccatcttctctactttaacaagttagtagcgaaaaatgaaggcagggcaaacaaatgcccctttccgtctctggcctctcttctctcttctatgtaacccagccccatagccatccactgatttcatgcactgtttgaaatttggggcaaatatcccacacatagagccagagttgtttgtgttagaatacaaagtcaaattcttagaatacaaagtcaaattcttatgtatttataggaagaagttatttcaaaatgttaaaattacaatattagatagccaataaaaagtatgttaaggcggctgggtgcggtagctcatgcctgtaatctcaacattttgggagactgaggcaggcagatcacctgaggtcaggggtttgagaccagcctggccaacatggtgaaaccccatgtctagtaaaaatacaaaaattagctgggtgtggtggcacactcctggaatctcagcttcttgggagggctgaggcatgagaatcatttgaacccaggagcca

SEQ ID NO: 17311 - DNA, 1052 bp, Homo sapiens
gtgttcattaaactcttattaattgaatacttttctcccggtgttaaagttttatgaatatttattttcttttctacagtcacaaatcaagagttaaaggttatctgagactaaaaatgacttatttacctaaaaccagtggctcagaagatgataatgcagaacaggctgaggaattagaggtgagattttataaatatttggttaaactaaaaaaattttaatttcttattttactgtactctgaagaacaataactattgaatgaagttaacatgtgcaatgaagattatttacttggatgtttatttcacccaagcattaatagttttccctctaaggatatttccgtagaaggaatggccattattgatggccttcttaaaggttaaggagtagagaatagaatataaatctagtttttcaaagttttctaaaactgtatattctccattaaagtaagaacacaatttagtattttgaagttaaatatatggacattttgaggagactccactgattaggaactcttttatgaaatttaagtcctgttaatattcttattatggtgggagggctcataggaaaggaggggaattagggagcaaggaaaatttaagtgatctaataaagagccttctgtatgtggggcaagtagaatttaacaattttcatggatgacaggatgagaggaaagtccaagtcaagatttgtgtagagttacatgcatctggagtaagcaagtaggaggcagaaagtatgtatttggaatagaattggatagggtttggagactggaatcctagttgcacactctgtctagccagacctgtgtgagtcattgaacttttccgaacctcaggatcttgtttgcagagtgacaggatggcatcagatgacctcgagggtttcttccagcaaaaaaatttatgatttggaaaggggtcaaaaaaacacctgctcgttgaggttccctttgaaagcacattatcatcaaaaagaagtatcatttattcagtagctgtgttagtccattttcatactgctgtgaa

SEQ ID NO: 17312 - DNA, 1031 bp, Homo sapiens
atctggttactgctgctgattattcaggacctaaggctcttcagtcagcaagtgtcctagcctactatggctgagctggtatccaggttgtaagacaaagtcctctttactcttcttaagcaaaaggaaggagtttctttcagagctgcatgctgcactgcctggggttggtgtaggggtggcacacgcactcccttgaccactccaactggtgtctcactagatcacctgccccccaagtccactggttccaatccaagcccagtacgaactaggacttaactaggaattgcagtccttgtggcctaaactgcctttcaagtttatttagaaccccagagtgctttagcccacagtggtgaggcttgccagaactcaagctccaaccactaggatggacaattctccaccggctctggctgatctaaatgccaccttcatggaccatggctgagttctgcctggtgttgctttccactgtgacaatgcagcactgagttccaatgcaaagtcccactgtcactgagctctcccaaccctaagtgcacggattctccatgccatacagccactgccaggggatggagggggtgggtgtcagcaactgaagactgtctttcctaccctcttcagtgcctctttcagtgatgtgaagttaaaactagatactgtgattgctcacctgatttttggttcttatgaaggtgctttttgtgtgatttttaaattttgtgtttctgcaggtaggatgatcagtggaggcttctatttggttttcttgctccacttcctgcctaaaagctgttacttttaaaaaccaaaattaggaagagacttctgcacgtttgttggaacatttggtcttataccttctgtagcagtggttcttaatgaggaatgatcttgccacccaggggatatttgacaaagccagaaaatgtttttggttgttataactggagggcgggtactactgacacaagtgggtagaggccaggaatgttggtaaatatccttcaatgcacaagaca

SEQ ID NO: 17313 - DNA, 1029 bp, Homo sapiens
gtgatgatacttttttgggtggaaacttaccttctgacagcacctccaatagaagtgtgccaaacaggaatactactccttgtgaaattttttcaagaagtacaagtacagatccttttgtccaggatgacttggaacatggattagagattatgaaattgccagtgagcaggaacacaaaaattccactaaaacgttactcctccttagtcatttttcctaggagtccttcaactacccgaccgacttctccaacaagtctgtgtactcttctgagcaaaggatcctatcaaacttcacaccagtttattatttctcctagtgaaattgcacataatgaggatggcactagtgctaaaggatttctttcaacagctgtcaatggacttcggttatctaaaacaatttgtacccccggagaagtaagagacatacggccgcttcacaggaagggctcgttacagaagaaaattgttctttcgaataatactcccagacagactgtctgtgaaaagtcatctgaaggatattcttgtgtttcagtgcatttcacccaacgaaaagcagctacattagactgtgaaacaacaaatggtgattgtaaaccagaaatgtcagaaattaagcttaattctgattcagagtatattaagctcatgcataggacatctgcatgtttgccatcctcccaaaatgtagattgtcaaataaatatcaatggagaattggaaagaccacattcacagatgaacaaaaaccatggtattttacgaagaagtatttcattgggaggagcttatccaaatatttcctgtctatccagccttaagcacaattgttctaaagggggaccatctcagttactcataaagtttgcatctggaaatgaaggtaaagtggataatttatcaagagacagcaacagagattgcacaaatgaactgtctaattcttgcaaggtaagtttcctttggtcttggtaaatgttaatttatatgagaataacttaatgaaatatttggagaacat

SEQ ID NO: 17314 - DNA, 1120 bp, Homo sapiens
atatgttacaattttagttaccatttatattttatatattaaaactgatgcttacaggaacagaaaaccaaccaccacatgttctcacttataagtggaagttaaacgtgagtacacatggatacaaagacaggaacaatagacaccgcggcctgcttgagggtagaggagaggaggagggtgaggatagaaaagctgcctgttgggtactatgcttattacctgggatgaaataatatgtaccaaaaaaacccataccacacagtttatctatagaaccaacttgtacatgtactcccaaaactaaaataaatttttttaaaaaaggaaaaaaatctgatgcttatattttcattaaatctcctcctgaaatcagacataaagagaaaatctctaataagagggtgtgtgtgcgtgcgtgctcgtgcatgtgtgtacatgtaccatctggaggctaaggtggtatttgagacattctgtcattagggcagttgcccctgttgctttgacactctgttctttcggtggttttcagcttcctctgccctccatcatcacttccatccctgcttcatctgtctgctaggtaactgttgaaattactcagctgctgatggccctctcatcttctttgctgtaatggttttatatcttttacaaactattacctatgatttaaatagactctcccaagagagaagatagctgtttatgttcatgttttaattagtatttttaatttttaattagtattctcactacacattttaaactatatttttgcatttattatatgcttctgaaatacaaaaagcaacatgaataagtcatttgtgatgtttataactcagtagggagatatcacacatatgccaaattaactttaataaaaggaaaaaatgtagtaaatctgatcaactactttgaaaatagaggagtggtagtgaatggggaggtcaggctctagggagaggttggcatttgagctgggcttgaatgatgagcacagtgtagacatgtagagtggagaaggtgttgcaagtggatagaccttaacatgctcagaagtacaaatcagaaaatgcaagaagcaattagtagtgagtttccagtgtgatta

SEQ ID NO: 17315 - DNA, 1043 bp, Homo sapiens
aggccgaagtagccagaaatgtcagctcctgcaaagtaatgaaaccagggtcttgaatggagtttcctcactcttgaaactgagaagcaacaacaaccagtgccagggactatatattgtagacagatcttctcaaacagcctactcctctgtttacatagatctttgtagatctgtgatagttccactatcaccatagatctggagccctcagtttgaacaggtggtagaagcaattacaaaaggaaaggagtggagattaggaagggagaggtaaagagcaggaaggctcccatgaaagctgagcctgcagatcaaaattcaaaagtacttgaagaaaaactaatcccaagaaaggcaatcagtcactcaagagaaaatgaaagtaatgaactacctagataatactataaaattagtatgttaggatcctcagtgctcaatgacatggaagggtaaaatgtcagagcaggcaaacataagaaccagtgcatagagtcaaccagtaagaaattctgggggtgaaaatactgtgtaacacctgaggtgattttggtttcaagtaattgaaaacccaacactggcttaaaccataaggacacttacttttagcttaataatagtggagataggaggttcaagggttcattcaatggttcattgtttacaggcaccagatcctgtttgtgtttctgttccatcatcttcagctttgctttgctgtgtctattacctcatagtcacaagatggctgccacagctcagatgttataccctcataacatcccaagcaggatagtaagagcagttcttagccttttatcagagagaaaaaaaaatctcagaatcttccattaagcactccatacacacacactgttagtctcattgtattaaacaaaggctcatcctaaggccaattacttagcttagatccttaattaatgctttataggtaggagggggggcccatttcctggagcatgtggtcattcatcttaaatgagttccatcacctagggaagatattagggacttgctct

SEQ ID NO: 17316 - DNA, 1083 bp, Homo sapiens
tgttatcagtgattcagctttggaacagcaaacaaccccatcatcatctccagatataaaagtaaaacttgaaggaagtgtctttctcttggacagtgattcaaagtcagttggcagctttaatccaaatggatggcaacaaatcactaaagattctgagtttatatctgccagttgtgaacaacagcaagatatcagtgttatgacaattcctgagcactctgatatcaatgacttagagaaatctgtttgggaattagaaggaatgccacaggacacatatagccagcagctacatagccagatacaggaatcttctttaaatcaaatacaagcacattcttcagatcagttacctctgcaatctgaactgaaggagtttgagccttctgtttcccagacaaatgaaagctactttccttttgatgatgaacttacacaagatagtattgtggaagagctggtgcttatggagcagcaaatgtcaatgaacaattctcattcttacggcaactgtttgggaatgacccttcagagtcagtcagtaactccaggagctccaatgtcatctcacacttccagcacccacttctatcatccaatccacagcaatggcactccaatccacacacccacacccacacccacacccactcctactccaaccccaaccccaaccccgacatctgaaatgattgctggatctcagagtctgtcacgggagagcccttgctccaggctagcccagactacacctgtggatagtgctttaggaagtagccgacatacacccattggtactccacattctaactgcagcagtagtgtcccccccagccctgttgaatgcaggaatccgtttgcattcactccaataagctccagtatggcatatcatgacgccagcattgtctcaagtagtcctgtgaaaccgatgcaaagacccatggccacacaccctgacaaaaccaagcttgaatggatgaataatgggtatagtggggttggtaattcatcagtttctggccatggtattctcccaagctatcaggaactagtggaagaccgtttcaggaaacctca

SEQ ID NO: 17317 - DNA, 1045 bp, Homo sapiens
agccttactaaaaaataacaagagtgatattttttactgtgtattcatgactatttttattcaaagatgagtttttggaatcgacaattttgggaattgacagtcttgttagaatgactccctcctaaattaatagttgtgtaaaataacagttctgatgaatttttaaaaatatcttatttcagttataccttataaacctagagtggataaattattctagaaaatcaggatgtctgttaaaaatgtagtgatatagtgatcagagacttatttttccaaggactgtccttctaagtgttaattctgaatatttaaaaatctacaatagatttatcttggccagaattatagtctcttaattaacttcacttctttttttagtatcttttacacattaataatgagtccgttttcttctaattttacatttagtatgtgggatgtatgtgtgtgtaacctctccttttgtggtcaattgaagacccatttcagaaaaagagtgtcacagagtttttcctgtctgcatgtaaactgtatgacctaagtctgtttattcattgtactgaccagcaggagaatgcttgaccagccttatcgagctaaatagctcacttatgttacctcatttaattcccccagcagtcctgtgagataggtgatatttattcccaatttatagacttggggaggtcaattaacttgtccatgggcacataagtaatggagccaggatttgaattctgatttgtctgtctccaaagcccagcttcactcaattatatcataatgtcatatagtaaaataagctttaaaaggaatgaacccttcagtttgctctgctgtctttctcctgcccctgccaacacctaaaagagtacatcaacagatgaaggatttaggaggtatcatggggaaaagaaacatctctttcctatttctgtcattcacaaagtctaactgtgggaaatgttgaatgaattgaatgaatgaatttttaaggtctaagtgcaaataaaggtgtgagtttaacaaaagtattaaa

SEQ ID NO: 17318 - DNA, 1022 bp, Homo sapiens
ttggctgaatatgaaattctgggttgaaaattcttttctttaagaatgttgaatattggctcccactctcttctggcttgtagggtttctgccgagagagctgctgttagtctgatgggcttccctttgtgggtaacctgacctttctgtctggctgcccttaccattttttatttcatttcaaccttggtgaatctgacgattatgtgtcttggggttgctcttctcgaggagtatctttgtggtggtctctgtatttcctaaatttgaatgttggcctgtcttgctcggttggagaagttctggataatatcctgaagagtgttttccaacttagttccattctccctgtcactttcaggtataccaatcaaatgtagatttggtcttttcacgtagtcccatatttcttggaggcttgactcgtaccttttttttttccctctaatcttgtcttctcgctttatttcattaagttgatcttcagctgatatcctttcttctggttgatcgatttggctattaatacttgtgtatgctacacgaagttctcgtgctgtgtttttcagctccatcaggtcatttatgttcttctctaccttggttattctagttagcaattcaactaaccttttttcaaggttattagcttccttgcattgggttagaacctggtgctttagctcaaagttgttcgttattacccaccttctgaagcctacttttgtcagttcttcaaactcattctgcatccaattttgttcccttgctggcgaggggttgtgatcctttggaggaggaaaggcgttctggtttttggaattgttagccgttttgcgttggttttccctcatctttgtggatttatctaccttttgtctttgatgttggtgaccttccagtggggtctttgagtggatgtgttaactcccgaccctgtttgtctgggtatcaccagcggaggctgcagagcagcaatgattgctgcctgttgtttcctctggaagctgcgacccagcgga

SEQ ID NO: 17319 - DNA, 2000 bp, Homo sapiens
gtaagtgatactgggacaatttttagttaggtccctactttatatcttacagaaaaataaattccagaggaattaaaggcccacacatgaaaaacaaaatttttaaactttaaaaagaaaatataggatactatctttatgacactgaaataggggaaaatttcaaaaacaaaagaccaaaagctcagattatgaatgaaaagattgatagatttgactgcctggaaatgacaaacttcgatatcacaagacttcaaaaacaaagtgaatagacaggctacaactaggagaagatattagcagcactttcaaccactagaggattagtatccagactgcctgataaatatccgcatatttagatgagtaaaagaaatgaacgggcagttccttgaacattgtggttctccaagtgtaatcctctgaccagcattagcagcatctcctaggtgcttgttagaagtccagattttcaggtccccacttgagacctactgaatcagaaactctggaagtggggtcatgcactctttgttttaacaagctcactaagtgaatctggtgcatattaaaattttagagctactctgttaaactcaaatgataaataatatgaaaagattcagtctcatcatcaatcagagaagtataaaacaattagatactttttcatacccataagattagctaaactttaaaacttaagttttaacaagaatctggagaaataaactgtagtattgctattaggaacataaattggtataagttttagagagcaatttgaaaatatccaataaggttgactatatacattctttgttaccagacacttgtacttttaagttacataccttaggaaaaaactctcacacaaggccacaagagtcacaaataaaggatttccattacagcaccatctgaaatagtgaaactttgttataacatattgtctatcagtagagacatgaacaaactgtggttttgtttcatagaatactatttctatatgctgttaaatagattaagtccaagatcagaagcaaacatgccaaaaggttagcatcttgtaaatgtggacattgatgcatgcatgtgcacattctctactgtgtttgaaatactttgtagttttaatttttaaaaattaaatgagatattaaaatattgaaagagtttccatttggctgtgtcttatctttcaggattctgcctcaaaggtggatttagtttggacaaaccaggatcattatagttgagggtcgtaaccagacactggaaaacattttttaaaacaatcagtaaatgcagattaattgaagataagctgcatactttcctgagtaaatgctacgtacggcccaaagtagaggaacagattggcatattgcaggttcatgtgtagtaaacttattagagctgactttttaaccagtttttggatttttttaaaagtaaaagttaactggaagagagcatgaaggctgtatattctaaactggtgcttataaaccattttttgcccataccccattctgataaatgtaattatattcttggttaatatcatttgaaattcaaaataagttaaatactaatctaaaaaatgaatgaatgaaagccttttttattatggggaggagactttttcttgtttccacatttttttaaatatactttttaagttctgggttacatgtgcagaacgtgcagttttgttacataggtattcatgtgccctagtgctttgctgtacctatcaacccgtcacctacattaggtgtttctcctaatgttatccctcccctagccccacacccgccgacgggccccagtgtgtgatgttcccctccctgtgtccatgtgttctcattgttcaactcccacttatgagcgagaacacgcagtatttggttttctgatcttgtgatagtttgctgagaatgacggtttccagcttcatccatgtccctgcaaaggacatgaactcatcctttttt

SEQ ID NO: 17320 - DNA, 1032 bp, Homo sapiens
ctttttcttcatctgggggactgaaattttttttttcatttattcattcaacagattttattgaactccttacatataccagatgatacagcaatgagcaaaacagacaaagcctgctatcatgaagcttaaattctagtcaaggaagatagctggtaaacaaattaataaaattataacatcactggtgataagtgcaatgatgaaaaataaagcaggatgagagctatagcgagtgactgggagtattttatatggggaagtcagggaagaactgtctgttgaagataacatggagcaagtaacaaagaaagtaaagggataagttatatgggagaaaagtcctagaagctgacagagcaagccagtgcagggcccactcctgccgcggagctatcacggaggctgcctggctagagctgaatgaatgaagaatagactagtatgagattagatcagaaagatggcagaggattgggtcatactgggtttttatggccatggtaaagactttggagcaaaggactaatgtcatcttcaaaaagaatcactctggccactttgttgggagtagcccacagggtgtggtggttggtgatagggcaaagatagaaacagagaaaccagttaaaaggttattgtaacaccttagacaagaaataattactctttattttgttttattttttttggagacggagtcttgctctgttgcccaggctggagtacagtggcacaatctcacctcactgcaacctctgcctcccgggttcaagcaattctcctgcctcagcctcccaagtagctgggactacaggtgcaagccaccatgctcggcttttttttttttttttttttgtattttagtagatatggggttttaccgtgttgcccaagctggtctcgaactcctgagccaaggcaatccacctgcctctgcctcccaaagtgctgggattacaggcatgagccaccacgcctggccagtaatgactgtttagaccaaggtgatgagagatggttggatcctgg

SEQ ID NO: 17321 - DNA, 1557 bp, Homo sapiens
tcaagactgttttggaaatgaacaaggggggtcatgcaatcaaataaatagacctaaattttataacagtaataaatttgaagtgtggtgttaacttagggataggtgagtagattaataataaaacagaaaaggcccagaaaaagattcaagcgtgtacagaaatttagtataataaaatagtgaatgggctcccagatggaagtagtatatactgtatattacactataccatatacaagaataaattccgattaaagatcaaaatgagaaaagctaacttcaaaacttttagaataaaatatagactgcttttaaccttagctagataggatttcttaaataagacataaaaataactcataaaggaaaaaaattgactagatcaaaaatgttaactttaataaaagttattaacaaagttaaatatgtataatagaattagtatccagaatatataaagcttctataatgtaataagaaatagctccgcttaaaaatatgcaaaggataggaacaaacaattcataggggagaaaatccctatgtctaacaggcaggtaaaaaggcacacaacattgctagtaattgaggaaaagacaattttttaaaaaaatacaatttcatgcccattggaatagtaactttttagtatatatgtattacctatatcatgtataaatggcatatatatgcaaggtaataagaaaataggaactatcatatactgctaatggaagtataaatggatacaagtgtttgagagaaatttgttaatataaaataaaatagaaaaaaatcatttataagccctagaaaattgacttctagatttaaagctgagaaattcttacaggtatatgccaagagacatatacaaagacacttatggcagtatcgtttgtagaaaaactggaagctacataattacctttcagtagaggaatagatgaataaattttattattcattcaatgggataatttttagtagttaaaatgaatgaatttcatttaagtgtatcaacatggatggatctcaaaaacaatgttgaattaaaaaattgtagaaaagtacagtgtgatggaatttacataaacatttaaaagcttcacagaacagtgtatgttgcttatagatttttgtttaatacaagtaacaacttgaagtaacaactggaaagtttacatattggattaatgatagttgcctttgagaaggtagggaggggtataaggctaggcagaagaaaaggggaacttaaaattcatctatatttttctattatgtttaagtataaagtaaaaataatcaaggggctaagttaagtgattccagggccctcatctaccagaagggctttcaattttctttataactctgtcctttaaaacagcagtccccaaccattttggcaccagggaccaaattcatggaagataaaaaattttcccacagatggaggggtgggggagatggtttggggatgattcaagctcattacatttatagtacagtttatttatgttattattacattgtaatatataatgaaat

SEQ ID NO: 17322 - DNA, 1033 bp, Homo sapiens
tatgacagaggaagttccaaaatggtaagactggggcacaaaatattcttcttgattaaaatcccagtgtaaagtggaggcattattatcagacataatcatagcatttttaactggataatggagccaaataaaaatcagtgtgtgaccttgtacaagtcattttttatcctaatttgtaaatgaaagggttagactagatttagttttaatgtagcatttattaagaacctattacatgcttgttattacaatatggctttttatgtaaatgttgaatctttattttaaaaactcgagatgtagtatgcctcgggaaaaatgattcttctaagtcaagggcatatagctagtagttgcagaattggaattcttcctgtcaagaccatgtttttggttcctgctatatttaccatggtgtttcttactaaataaatttatttgaagatcttcttaactttaaggagtatattatatgtgcaaatgctttcctgttatttgacatatttgaatcctgttgactctttgagcttttaatattaatatcaacctgaaaatgcttgcattaaagaaaacagggaaggcatatagattgaggctaaagagagcagcacaatttgttcagtactctgcctccccaaaatacatatttttacaatcctgttagagcaaattagctatttttaaatattacaatggtaaaattcagcatttggagcaaccagcaatcacgtaaggaaagatacctatacgtggaaggacagcaaaaaaggaaaataactcattagaaagcaaaaatgagtcattatatcctacactttcaaataatattctttcagtatcactcagtggtaacttaagtaaatactgattaacagtcactcagtagactggttatagtggttgaatctttgatttacagccttctcttgtaaattttaagtttttcacagtttaaatcaacatcagaaggtttttaggtgtcagactgcagtctcttagctgtaggtcctacatggtttatttgcttttc

SEQ ID NO: 17323 - DNA, 1050 bp, Homo sapiens
gagttactataattacagtatttatggcggtttggtatttgcacatggttaaataactggagatgagggaaaagaattgagcctagaaaaaaactcatgcatgatggatacttgatataagacagaggtgagctttcagataatggcagcaatgggctatataatggtgctaagatcacgggctatcaatatagaaaaaaagtgaaatggatccaagtttaccccttgatccacaatcaattgtaggtgacaaagattgtaaaagaaaatcttaaaaaatactagaataaaatatatacttgtttttacaggacaaaagatagttttagagtagggagggatacaaatgcacatatcaggaaggaaatgattacatatgtatgtttaattttttctaattgaactttttattttgggataattgttggttcacatctagtcataagaaataatataaagagagatcatgtgtaccctttattacccagtcccccagtggtgtcatcttgcaaatctgtagcgtcatacactgtcacaaccaaaacattgatacggtcaagacaaaacgtttttgtcactgcaaatatccctcatggtatccttctatatccctacccacttcttacctttcaccctcaactattggcagtcactaatctgttcccccatttctaaagcttttgtcacttcaagaatgttatgtagataggatcataagtcatcttttgggatgggcttttttcactcagcataattcactgggtgttcatccagattgttctagctatcaataatttattcctctttattatggaatagtacttcatgatatggatatatcacagtttaaccattctcccattgtaggatatatggattgattccagttttgggcccttatgagtaaagctgctgtagacatttatgtacaggtttttatgtgaacataatctgcatttctctgggataaatggagaaatgtacaaatgtactgtaccaaggagtacaattgcttggtcatatggtagttgcaagtttaatttcctaaag

SEQ ID NO: 17324 - DNA, 1025 bp, Homo sapiens
ctaccatatgacccagcaatcccattattgggtatatacccaaagaaatagaaatcattctaccctaaagacacatgtacacacatattttcactgcagcactattcacaataacaaagacatggaatcaacctaaatgacaatccatggtagactggatgaagaaaatgtggtaaacatacactatggaatactacacagccataataaagaatgagattatgtcctttgcagcgacgtggatgtagctggaagtcattatcctaagcacactaatgcaggaagagaaaattaaatactgcatgttctcactcataagtgggagctaaacattgagaacacatggacgcaaagaagagaacaacagacactaggtcctacttgagggtagagggtaagggttaaaaaagctacctatcaggtactatgcttattgcctaggtaacaaaataatctgtacaccaaatccctgtgacatagcaatttacctatataacagacctgcacgtgtacccctgaatctaaaataaaagttaaaaaaatatttacaataaatataaaaggatggaaaaaacatgtactaagcaaacactaaccattagaaagctggagtggctctattaataccagacaaaatagtcttcaggataaagattattgccagtgataaagtggatatatcttgatgataaaagtaccagtcatcagaaaaacataaaatcctaaatatttatttatatctaatattggagtgtcaatgtatatgaagtaagaactgatttaactaaagggagaagtaaaagttaattttgtagtcttgtcaattaattaagaaattattacactttaactttttataataaaccccagaaggtattaatgtttgtatgttttcactctttttctcccagtgtcatcctgctcactacttttttatctaatttgattccttcactcatttccatttgtttattcactgttgtaatatacatttattctctaattgtgcaattcgatctctctgt

SEQ ID NO: 17325 - DNA, 1659 bp, Homo sapiens
aaacatactttaaaagaattccaaatgttccacaacatagtacccacaatgaccagctgtataaaaaattactaaacaaatgaagaagcagggaactatagggaaaaaaatagaaatagacccagagatgacagagacatggaattagcagccaactattttatgttgtctctggtaaataggctcaaagatttaaaggaaaagatgaacagtatccatgcacagatagagaatatcagccaaagtagagctctaaataagaatcaaatggaaaacctagaacaaaaaatgtaatatctgaaatgaaaaattcactgaatatgctaaatgacagattggaaactacgaagaaaacttcactgaagttaactacagagagaaaaaaggagaggaaaaagaaatgaacaagtctctgtgactcgtgggccaatatatgtgtaattggagtcccagaagaatagatactggagcagaaaaataatttgaagatatgattattgaaagatttatgaatttgaagaaaacccacatatcattggaggtcagcaaacaccaatcccagtaatcacaaaagaaatcatagtagcacaacgagtacaattacttaaaactaaaaataaagagagcatcttaaagacagctagaggggcaggaatggggaagatacgtgatatacatagggaaacaacagcaacgaagaccaacttctcatcagaaataatggaggctagaagacaatggaaccttttaagtgctgaaagaaaaagttgtcaatctggaaatttaaatcaaacaaaaatatatttctgaaatgtaaacaaaatagacattttgagatgagcaaaagctaaaagaattcatcaccatcagactttcactgtaaataatgctaaaataagtccttcagtctcaaggaaactgatgccagtcagaaactcagatcaaatgaaggggtgaagagaaccagaattgatctctctgtaggagaatataaatgacttttttaaagtacatattttctgtgaaagacagttttttgtttaatgcaaaaatgttaacaatgtttatatcatgtagaagtaaaagatcgtgaaacagcacagagaacagtagtaagacagattgaattgcactgttgtaagatgatgaacttacaatattaagtgaaggtagactgtgatagattaaggatatatattgtaatccctagagcaattgtcaaagtggtacaggtaaaaagccaatagaggtgataaaatggaatactaaaaaatatcagatgaataataaagaagacaggaaatgaggaacagtggaacagaatgaataaaaaacaagaccattaacttaatcattaataattactttaaatgggttaaacattatggttataaggcagagattttcagactagataaaagagcaagctccaactatatactgtctacaagagatatactttaaagtgtatattatatttaaatataaagatttggaataaatataacctaagaatacagcttactagggaagtgaaagatctgtacaacaagaattacaaaacactgctgaacgaaatcataggtgacacaaatggaaaaacacattccatgctcatgtataggaagaattaatgttttttaaaaggccatactgccc

SEQ ID NO: 17326 - DNA, 1029 bp, Homo sapiens
agaaagacattttggagttcctaacttctaaagtgagatgtgattgggattcctgacttctaaagtgagatgtgaaatgttgtgaattacctacattttcagcctatttggagagaagtacgatttatgtcttgctttaaataatagaataaaatctctataattgtttaaaatcagtttttaagtaagttggagtgcatattccagcactggcagtgcagtataaacaatggagaggtagctcagacagggctttccataatgaagacaatgacccatgagggactgtaactgaaacccagcaagagaaatccggttttataagaaattgttttgggatgtcagttgtacagtgtttgttacttgtttatatagctgaggttacatgtgttaatctttgctatgacttaaaagagataaatgggctctggagttattgtggcagattaaaaaacaaaacaattatattttagacctgcatattttggctgttttggactacagttgttcatcccttgagttccaaatgtaaaaatgttacattcagtaatatctaattgtgaaatcttgtttgttactgctgttcttgttctttttttattcagaatcttaagtagtatttttgttataatactaatacaaatcagtgataaaggaggcatcaacaaatcagcaggaggattatttaagaaatggtattagtgcagttggttagctgtttaaacaggcagagagagagaataaattagcctcaacccctaacagttatcaacagaattccagatgaatacatagttaaatgcaaacaacagtgggatgattttcaaaaagtaggacaaaatagaaatgaacttctgatagaatgaaaagttttctctattaagtagaagacatctcagaacaaacaagtgaaaatagaagttactacttataatgaaaacccccaaaaaaacttaggtgtttttttcacttatactgaatccctattaaaagacaggacagaggaaaatgggaaaatgtgaatggcta

SEQ ID NO: 17327 - DNA, 1029 bp, Homo sapiens
tagtgtcttaatcatagtttttttaagttcccagtctgataattccaaaatctgtcatatctgagtctggttctgatgcttggtttgctgcttcagttgaatgaaaaagatggaacatagttccatagttcatttacatagttcaattacataattccatagttcaattccatagtttaattacaaaaggtgtaacataagcataatgggaatatcagaagtggaagaaagaaaggaacagaagaaatatttgaagtaataataacttgaggatttcccagaattaatgacaaacaccaaatccaggaagctcagaggacaccaagcatggtaaataccaaaaaaaaatatgcctaggcatattttactcaacctgtagaaaattagagaaaatcttgaaaagccagagagaaaaaaaccactgtacctacagaggaataaagataagaattatatcatatttgaactgagaaagcatgcaagcaagaagaaagtgcagtgaaatatcggtgttgaagaaaaagaaagtaaaaccgccaacctagaattttgtatccagcaaaattattcttcaaaagtgaaagagaaataatgactttctcagagaaacaaaacttggaatttgtcaactggtagaactgccttgcacaaaatgtgaagaggtcttcagagagaaggaaaatgataaaggtcagcaattcagttctatataaaggaagagtgagaagaaataaatgaaaataaaataacaccttttatttttcttatatttacttgatctaatagataacagttcaaaataataacactgtattcattgagtacagctcatggataagcgaaatgaataacaacagtgtcattcactgctgggatgaaggaattgagaatactctaaggtacttgcgctaatcgtgaagcagtatagtgttatttgaaagtggacttggattagtcataaatgtatattgcaaactctagagcaaccaataaaaaaaatttgttaataaaggaagtgtaattggttgc

SEQ ID NO: 17328 - DNA, 1029 bp, Homo sapiens
gtgacatcttgcttagagtaaagttggtgcttctgggaacctgagaaacgtattccaacaagatgctttagttaatgtaagtgaatcacttccgtaatttgattgcagtcattacatctattaataagatatatcaaagcaatctatgatcaaaatttaactgtcatattattaaatgcatgtccttttttctgaagcaggagccactagcaagcagcattttaggcagattctacatgtacaggtttttaagaagtcagaaggtcaacgataaattctgaatttatagaatcatgtagtcagggaaaactgaattcagtacacatttgttttaatgactgccacatacaaggcataaaaaggttaaaaaagtataagacattcttaccactttaaaacattcaccctcttttgtgggagactcatcaattgagtttatcaaaagtaagttttgttaaatgcaataatggcgtataagcagtggtataaacaaatacagaattaggtgagggagagattcagtgaggacataatatttttactgacaaaattcaggatagtggccttaatgaaaaatcaagggatgggctataaatccaaacacacttaacagtatacttacttggtcattgttaatctcactagcagaaattagattcagagttatgatgacagtgagctttgccaataatgtgaataaatagaggaaaatggcttgggagaaaatttgcttgactaaggaataggatttccactaactaatcacaatcctctcatgttaagtttcgatgtacaagtagaagaaagaatataaagtaatagtagagaagaaaaggatgtgagctgggtgggaactggagcagagtaccagagtacaggttgccacaaccaatgtcaccttaaacttggcctttcacaaccacgatttttctatgccttagtaccttgccacctcaaattgctttcatttactctcatttcatttactttcatttcattactcatttcagttactctaattcttttgat

SEQ ID NO: 17329 - DNA, 1029 bp, Homo sapiens
cggcgactgcgacgcggttaccgaggcaacgacgcatcttcccgcgagagtttccacatcccggttgcctcccgcccgggcgcctacgccttcccactctcaggttctgtgctgcgagcggcgcgagcctctggcagcgggctcggcctttgctcgcagcactcggcgctgtcccaggaacccaggaaggcttcctaactgcaaattcgacttagttagtgcaaattctcaacttgtgggggttgaaagagtttcagccaaaacaggcaggtcctttgccgctactctatagaaagcaagctggtgaggcaatccctccctgttgtgcttttcaaaccgttagtggctaatccgaccttcaccccgtttgcttaaagtgagctcttcagtggaattcagaagttttgatttctaatttttgtttacagcatgcatggctaagactcaggctctcaagttagtcaacctaaattattatcctggcactgccacttaccagttatatggccttgggcaaatcactctgtatatcggccacttcatttgtcaaatggaagtgagaatagtgcccacttcacagttattatgagaagcaaatgaattcgtgcttaggatcatgcctgaaacacgtaagcggttaacaatttcaattgttttggaataaaattgacatccaaaaataaaccgtgatatgatgtatggtcatctgatctttagaaagggtgcaagaccattcaatgggaaaataattgtcttcaacagatggggagacaactggatatccaaatgcaattagacccttaacttcacaccatatacaaaaattaaaatgtatcaaagacctaaacttaggagctaaaactctaaagctcttcaaagaaactgttggtgtaaatctttatgaccttgaattacaattctgagaatccttgatggattcttagatatgacaccaaaagcagtagcaaaaaaaaaaaaaaagaaaagaaaaaagaggctgggcacagaggctcatgcctgtaatccaag

SEQ ID NO: 17330 - DNA, 1050 bp, Homo sapiens
ggcatcaagataaatgcagttgagacactttgcacacaaattaaagatgattatcaaatattaaaagatataatatcaaatgacaaaatacattatgctgaaattgaaagcatattggtatgaatagattacaaagtgttatgcagattatctgtatggatattttgagccaagtggaagaagctaaagctttacagtcagtaaacatgactaatataaagctacacacttaataaaaggcctatccctttgcttacaacaattgaaggtaattttgaaagtgtatttgatgaacataaaacttgagcaagagatatgcatattcttctcaaattttaaaataaatgaaaaaagtaaacaaatgagaaatgcatgagtcactgggtgaagagtattgataattatgagggcagtgcttattaaatagaaattaagattataaatgccctaatttcatattttgtatagagatataaaaaattcagtgaaatgttttcagattttgaatttctaaactggagaaaaattgttttgtataaatacatctgatttacaaagacgagccactaagtttgcacttaaatattctgacgatttaaattctatagaaattctatatgaaatagtttaaagcagcatttgatatcaataacatacaatcaagtttgtgtttgggtcttctaaaccttcttaacatattttgcttagtgcagtcttaaacagatttggaaatggtattcaaaaattttaaacaattccagccacagtggaatcctgcaaatgaagcttactgtaaactgaagttaatataacatttttttatgattgtcacttgttcaagagaaattgtacatgacagtttgctcatttgaaaacaaaataagaaaagaattagatttgaaaatgtactgttgatgcatttgcttccattagccaggagaataaaataatactgtttttggcataaataaaatctttaagtttaagctaatgtgagtttaattctcctacttttaaatttttcaatatttttctgactaacattctaga

SEQ ID NO: 17331 - DNA, 1059 bp, Homo sapiens
tttgtttaaaattagaattaatgtattataagtgactttcttgcagattacacatgacttctctgttacttgctggtcattatcaactactgctttcaaggattcttctaccttttttggtggcttcagcacttctctcggttttcccatgtcttcatggttggcctgacctcatggtatcttgcttctttagtgccagcatttcacatcaacttttaagttcatatattgtctttttttttcttgaaactacagtactatttaaatctcttcctataaactgttcattccttttggatttccattaccccatgatgttcagagctttgactcctttttccagcctagtagcacccatcttaattttgtagtcaaccttactctcaggatcatctgttttgattgtggctttttgtcctagaatcctttacatctttagtcatgctcactggcataaaggccaaggtaagatttgaacctcttctcttttgaacttcctctgtgctcacttctagactatcaaatggtccttgatttagtcaactctgatttcaaaaactttaattctgattaggtcttatttttttaaaaaagatctctttatttttacctgcaacatttgtttaatccttcttcagtaccctaaagattttattttagtttctcagttgttaacttggcctattaattagtcaattgtaggtcatcctttttatttttcctaaaattaactcttttcaaccccacgtatttttcctgttaccttcaatcagacattaatcttaaaaatctaacatgtctcacttccccattaactgtcctttctcccccagttcaccatgaccatattcagttaacttggatcttcatctctttctctctatatggttccttctgcttacaaacattttcaggtatttaaaaaattttttggaagaggacagtttgtcccaactgcctgttttccttatttcttgtcttcctttttaccattaacatttgtaaaaagtgtttgctaccagctttattgtgattcatttctttaccttttgagtattg

SEQ ID NO: 17332 - DNA, 1034 bp, Homo sapiens
tcatgccttttcccaatctctgtgtagatctgcattgtccaagcttatcatatttcattgtcacctgttgctcagattttcatttcatgtttttcaccttttgaaggtatttctacctgaaatgggcaacatcatctgaatggaattaactatagatgctccttgaattacgataggttacatccttgataaacccgtcattagttgaaagtatcatgagttgaaaatgcatttaatacacctaacatactgaacatcgtagcttggcttagcctacctcaaatatgcacagaacatttatattagtctacagttgggcaacatcatctaactcaaagcttattttttaataataaagtgttgagtatctcatgtaatttattgagtactgtactgaaagtgaaaaacagaatggttgtatgagtactggaagtaatgaatgcactttcacaccattataaagttgaaaattgttgtaagttgaaccatcttaagttggagactgtctgtacttagcaactttcatacaagaccctggaactatttgtcttataaatactgattctaaatttcaaatgcttccctgataggttcttgcttgtcattccttctgggttgtctttttgcatgtacatcatcaaaatgcaatactggaagaatttttgaaacctttgatggttcataattttgttgaagacaggacggccatcttctttgctccacaattgcaagatttttcaatttcagatttatgagcaactaactagaatgatcaatccaatgaattttttaaaatgtctatattttctatttccttccagtcacctttgcatacccctgcattcaatacttgggcacttaagcgttgtatcaaggccgggtgtggtggcttatgcctgtaatcccagcactttgggaggccaaggcaggattgcttgagcctaggagtttgagactagcctgggcaacataagaagaccttgtctctacaaaaaataaaaaattagccgggtgtagtggcatgtgcctgtggt

SEQ ID NO: 17333 - DNA, 1043 bp, Homo sapiens
taggaagaagaagaagtggagacaattctggaggaaatactaacccatctactttagggaacttggaatgcttctatgtgttggcatcagagcctagggagactaggagagaggaggcagaaagtagatgtcagaaagctttgccttctttgaaagtttgcttaggaccattttagccatagtaagctatggtaaatagaaaagttctgaagtagtttgatgttggaggattgcaagtgcttcaactggaacatctgtccagttaggctactaatccagtcctttttcattccagtgttctattaatcagcattggctcactgaaatagcagttttcacaaatgaaaagtcaactgtagttttaggtgacaggaaattggatatttctattgacaacatactttgttattccaaaagcaagttttggaagatgaggaatacttacgacatattcactaattaaatatataaatcctgaatagtttttttcttgctttagaaaggaattaaaaactttgaattttcagattgctttaaatagtgatttaaataatgacttgatttaatcagtgccttatatcaaaaattgtatgtttagaattttgatttatttctccagagcaattttaaggattctcttaaccctcagtatacgaggaaaagtgtacaattatcactatcatctgggtcaaaagggactggttttttttgcattttacgttattatgtataatttataggagtaaaaataaagcataatgtaaaacaacttattggagcttttaataagaatttcaatacagcagatatctttgtatgtacttagaaaaataaaaaataaaaaatctatttcatgcatttaattacataacactcctacaacaaatatacatcacatttgaacgctttgcataaacattctcattgtaacacacatttttttctttttgagtttctgtatctgtacaaagaacatctttctttcttcccattttcagatctgtgcagaaatcattgtggttagagggtaagacaacattccc

SEQ ID NO: 17334 - DNA, 1049 bp, Homo sapiens
gcttctctctctgaattggaaatttctcccaccactcttcattctgtttcgctcaaggcccacagctggatgttattgcacaattatgcaatactagtttgattcacaagagtcttgatgttgtttcctttacaacactatccattatttcctgccatggtacccaatggagccattgtctctgaccataaatcctaagctttgacccttttacgatggcagtgcctaattatgatgataaataataatcattactatgacctatggaacacttttttacctgttacattatcgctaatgttatagcagccctaaagaaaagtattgttttctccattttgagtatttttaacctgtattcaaatcctcttctctcacgtctacaacctctttgtgatgaaggaaggatcaacgcttggttttcatttacttagggagaaatggaagttaatttgtattgccttagatttttctctgtagcaagtgttgattttactgattttatgtaagcagaaaaaaatgtccatgttttaagctgaattctgatattaaaatggacttacgatatgttagcatatagaaaaggttaaaaactacccaggtcatatataactttccatttcaccctcttccagtttaacctgttaaagaataggatacaaatacacaaagatagtgattcagatcctaagattttgccttgaatcagcttgatctggtttactgtcattaacaaatgcatagggtgaaatctgaagtattcttgttccatcagaataagagtgaggggtgatttgctctgcccacctaacaacaaccagggcttgcttgttagtgggacctgaattgattgtgacaggaggtcatgaagtcagcttcacaaggaacctttttaagaggttgaagctgaaaagggcctcagggatccctaaggctgatctcctgattttacagagaaggtccagagaagtaaactaacttttgttacgatcatgtagtggaatagtcgtagagctaagctatcttcatgacagactcaggaacataat

SEQ ID NO: 17335 - DNA, 1050 bp, Homo sapiens
agttgtacaactcggcatgtgatttgtctataatatttaagttttataaaataatatttcagtagcctaaataaaagaactctttggtcatcttctctgaatatcaaaccttcaaagcttttgtggctgaatatcactttgctctacaggaaaaaaatttaatttttctttctttatagaagagccgtaataaccaacataaaatcgatcctcatctaatctcttgctctgcttttatttcatttttttaagttgccattgctttaaaagatttactatctttcttggatttactgtttttcaaattttttcaaatgtatttatgtaattcagttttgatactcatctctgtttgtttttcactttcatttccatttaaatattttgacattggaagctcatacttgcctgtctgttactataaaaaataggtttgactgtatagggattaaacaatttgtcttttatttttcttctagcaatgtgcaggttctatctgtgagaaatatggcttagaggagtgtacgtgtgccagttctgatggcaaagatgataaagaattatgccatgtatgctgtatgaagaaaagtaaggcttttaaaaacacaagagtataaaatttgcctcaaactattattttctcctaaattttaagtgtaaaactttgacctacagtttggccagataatttccagctaaatctgtcctcttgaggagattataaatgtaacgtagcattgtgtctctattattatggtctctacaatgttttaaaaatgataaactagacaaaacgttgccagctttacagcagtaatttacataaacactgttagactttaagtcatcgtggacactgagtcaagacttgctggttgcttgtttacattgtaacatttaatatgaattactgatggcgttacccagcctaactagagaaggtctgtataacatgttatggtaatgatttcagttttttttccctctttgtatttgcacaactggaaatctgatcttcaacttatatttgaatctgaccttcagcttata

SEQ ID NO: 17336 - DNA, 1024 bp, Homo sapiens
attttttgagacggagtctcacttttttccccaggctggagtgcagtggtgcaatctcggctcactgcaagctccgtctcctggattcacgccattctcctgcctcagcctccggaatagctgggactacaggtacctgccaccacgcctggctaatttttttgtgtttttagtagagacggggtttcaccgtgttagccaggatggtctcaatctcttgaccttgtgatctgtccgcctcggcctcccaaagtgctgggattatagacataagccaccgtgcctggcctgattctttgtatttttttagtctcaattttgtttatttctgctctgatcttcattatttcttttcttctactaatttggggtttggttcgttcttgctttttcctgattcgttgaggtgcattgttaggttgtttatctttctactttttctatgtagacatttattgctataaacttccgtcttaatattgctttagctgtatcccatagtatttggtatgttgtgtttttctattttcagttgtttcagagagcttttaaacttcatttttaatttcttcattgactcattggttgttcagaagcaagttgtttaatttttatgtgtttgtacagtttctaaagttccccttgtgattgatctctagtttcattctgttgtgttcagaagagatacttgatatgatctctgtttttgaacatctgttgataattgttttatagcctaatatgtggtctatcctggagaatgtttcatgtgctaatgaaaagaatgtgtattctgccacagctgttggatgaaatgttctgtaaatgtctgttagatctatttggtctaaagtatagttctaatccagtgtttcttgattttctgtctagattatctgtccagtgctgagaatgggctgttgaagtctccaaccgttactttattggagttgatctctctctttagatctaatagtatttgctttatgtatctgggtgctctggtgttcggtgcatatagatt

SEQ ID NO: 17337 - DNA, 1050 bp, Homo sapiens
ccctatttgcctatttttgcttttgttgtctgcagtattgaggtcttactcaaaaatcttggctcagatcaatgtcctgatatcttttcccaatgttttcttttagtagtttcatcgtttcaggtcttaaatttccatcacattttgatttggtttatgtatgtggtgagacataggggtctagtttcatttttctgcatataggtatccagttttcccatcaccacttattgaagagactgtcctttccccactgaatgttcaaaaatcacctcgaaaatcaattggctgtaaatatatagatttatttctgaattctctattctgtttcattggttaatgtgtctgtttttatgtcagtatcatgctgttttagttgctatagctttgtagtatattttgaaattaggtggtgtgatgcctccagctttattcttttggctattggcttctgtggtttcatatgacttataggattgttttctctttatctgtgaagaatgtcattggtatttggataggcattacattgaatctgtagattgcttttggtagtatggccgttttcacagtattaattcttccagtccatgaacatgaaatgtgtttttttttttttttgacttgttcagtttctttcatcagtgtttcatagttttccttctagaaatttaataaactcacctccttgcgtttattaaacttactcttttttttgcagctattataaatgagattgattttctgctattttcttgtatatagaaacacaactggttttttaatgttaattttgtatcctgcaactattctgaattcatttatcaattctaagagttttcagtggagctttaagggttgtctatatatataagattatgctgtctacaaacaggaacagtttggcttcctcctttccaatttggatgtcctttattttcttctcttgcctaattgctctggctcagacttccattactatattgataacagtggtgagagtggacattcttgtcttgttctagttctttttttcttacttattttacc

SEQ ID NO: 17338 - DNA, 1106 bp, Homo sapiens
tacttttctaacttggcaagttataactatttcacttgtcaaatttactttggtagcagtgtaagcaattgtttgcacaatactttttttttttttgagatggagtctcagaaaaacctgtcacccaggctggagtgcagtggcatgatttcagctcactgcaacctctgcctcccaggttcaagcaattatcctgcctcagcctcctgaatagctgggactacaggtgtgtgcctccatgcctggctagttttttgtatttttagtagagttggggtttcactatgttggccaagttggtcttggactcctgatctcaagtgatctgcccaccttcgcctcccgaagtgctaggattacaggcatgagccaccgcacccggccagttcaatatgttttaaacggctggtctgtatatcctagtttgattttagtatgaaaatgggagagaaagcgataaattaactaatgtgtgatgtaactgaaaaaatactgataaattgcctaatattaaatccattttccattgtagccttttcctaaaggtgaacagggcaagaatgtggaatgtagtatgctttgactattaaaaaaaaaagtcgcacacttttcttgactgtttggcttagtagcttcctattcctttttttaaatttttttttttgagatggagtcttgcactgtcgcccaggctggggtgcagtggcgcgatctctgctcactacaagctccgcctcccgggttcacgccattctcttgcctcagcctcccaagtagctgggactacaggcgcccgccaccacgcctggctaattttttgtatttttagtagagatgggctttcaccttgttagccaaggtggtctcgatctcctgacctcctgatcctcccgccttggcctcccaaactgctgggattacaggtgtgagccactgcacccggcccctattccatttttaattgatacataatgattgtacatatttatgaggtatatgtgatattttgatacatgcatacaatatctaatgatcaaatcaaggtaataaggatatttatctcctcagatatttatcatttctttgtcttgggaacattttaaatc

SEQ ID NO: 17339 - DNA, 1050 bp, Homo sapiens
agtggtgtgatcatacctcactacagcctcaacctcctgggctcaagtgaacctcctacctcagctctgtgagtagctgggactccaggtataagccactgctcccagctagcatggctgtttttaataaaacttcatagacacttaaatattaatttcatatatatttcatatgacataaaatatcattcttttgattttttctttaaccatttaaaaatgtggaagctacccttagttttcatgtcaaacaaaaacagatgggagggctcactaaatttaataattactttaattggttctttaaattctctgtgtagaatatgacaggttctagaagtagtagtagtagcagcagtagtaagaataattattatggcttaatatatacctgacagtgtataaaaatctttacttgcattattgaattgaattctcaaaataacgttatgagatactggcacacctattattcccactttataggtgaaggcttaaactgaggcttagaaaacttatgtcacttgattgtggacctcctgttctttaccctgtgctcttctgcttcactcatggaagaaagctgtaaattctcactgcctttacttcaaggatttctggggcttttctgaaatctgtaagcctctctaaaatcatacatttgcatctattgctgttttaagccaaactctctccttaatatatttagcagtgtttattttataactaaatggcaaaggatgccctttaatgtgtattattatttttatataattggtttaagtactaataatttattttcagaagtaaagtactgcattattgtatcactgtgaatgttcttaattggatttggtatcgttgtatatgttatccttaccaaaaagaagcaaatggtaggggaggcatactaaccttggatataccttttgatgagaatttggctaccctcttcttaatactgtttttgcaactgaaggcataaatgtatagaaccatcatgaaaaatgatactgctattctccagaaccttggggaatggcttctgag

SEQ ID NO: 17340 - DNA, 1023 bp, Homo sapiens
tctgtcacccaggctggagtgcagtggcacgatcttggctcactgcaacctccgtctgccaggttcaagcgattcttctgcctcagcctccagagtagctaggactacaggtgcgcaccaccacgcctggctaatttttgtatttttactagagacggggtttcaccatattggccagactggtctcgaactcctgacttcaggtgatctgcccgccttggcctcccaaagtgctgggattacatgcatgagccactgcgccccgctgggaatacaattgtaaattttttgtgtttttgttgttgttgttgttggtcttggttagagatgaggtctcactaggttgcccaagctggtcttgaactcttggctttaagcaattctccaaccctggcctcccaaagtgctgggattacaggtgtaagccactgtgcctggccagttttgggtgtttttgatggaagtttttctaaaatgtggaaaatttactgtagacacatttactatctccttaaaatggactgaatttaaccttacatgattgaagtttaatatggagaacagttgttattctgggttctattgtagtttctgtttttaatttttccagaaatgactgaaatggcctggtagtttattatttttctaaatttattctagatgattgtggattttattcttggatctagttgtagcaatatttccaactttttggttaggtttctttgctttcttgtaaactttgaagatgttaccttctaattggttgtttctagtatgttttatgtaggaaaactaaataattatatttgagaaacatgcttgcatgtgaaatgaaataaataaattctaaatcttctgtggaatgaagtacatgggctttaggtagttttttctttctccctgccccccacccctacccctcacctttcaatatgtatagcttggctttgtagagtttagcattgaggttgcctggatcgtaactttctaaacagttggaatgatgtggtactaatgtgt

SEQ ID NO: 17341 - DNA, 1840 bp, Homo sapiens
ggagtcccaccctcagtttctttctctgtggtctgagatgggggtgagaatttgcatttctaacaggcacccagctggtgctgctgctgctggtttggggtccacacttaagagatctgctgctgtagtccacgtgcagatccacaactggcttctgaagtaatggggcttcaaagtgagattgcccaagttcaaatctctgcttcaccattttattagctctgtgaccttggaagagttcctcaacctccagatctgtttcttcagtaaagtggggttagcaatggttcagacctcacgggactgttgaaaagagtaaatgatttattttggataaagtaccaagaacagtgcctggtatttgcagtgatgatttgttctttgttctctgatgtttttttcttttaaacctttttcagtaacgcatccccaattaatagaattgtacaaatcagtggcaattccatgccaagaggaagtggctccggatttaagccatttaagggtggacctccgcgacgattctgaaaatgagctctctgccaaggttttaagataatttattgaaatctcctgtaaactttacttgactacttatgaagaggacctctgacttgcttgagagttctgtcagacttttctttttaaaaatttaacatgattgcttttctcaattttggagaagatgtttaaatagttctgttgtaacttttaatagttttgtgtatcattcaactttttttcttgcagcaccgaggcacatttgaaaagatggaattgaagtcgttttgtttaacgctgtgtgaatataaagagtagtttgcagctgtgtggtagtggtttaatttgcagccttagctctgtggtgtctggctctagagttacttctttttaccaagcattttcagcctccattttgaaggctgtctacacttaagaagtcttagctgtctaatttttagagaataagattgttcattgcatttctgagtattatgtaacctatttttgcagaaggtactgttacattaagtgcatctgtgtatcctggtttaaaaaaatgtaatcttttttgaaataaaccttcatattctgtatagttgctaaagtgttgagaacctttttaattgtaaaatgagaaccgattttcagtttagtgtagcagcacacttgttcaggtttgcatggtatgaaaccaaatagattcatgaaaccttggccatgaggtttgtttcacaaggttcttagaccgagttgtgcaggtaagtgcacttttaggtaatctgcactgtttgtttgatggataaattccatctctgggaattgtgtgggtattaatgtttccatgttcccaactatgttgagaagtggaaaaaaacccaggttctagatgggtgaatcagttgggttttgtaaatacttgtatgtggggaagacattgttgtctttttgtgaaaataaaaatccacacctggaagtgtatgtgtctttgttttcagcgttttaggtgttagtcgtccagttctttctgtagttcagcccaaggtgactgactagatatagagctataaaggcattcttttggtctttgttcttcagaaataaatctagcttagactcttcacctcagtagctgggcagcacatgctgttcacatgttagagacttaaccactaatcctatggcttttttaaaggcatctcttttaggaaagcccttcaaggtaaatgctgctctttcaaaaaagcttcccacatccctttatataaatcagtgaagaaaaatccaaatggtctagattttggtaaattcagcactctctatgctcaatacggtcatg

SEQ ID NO: 17342 - DNA, 1046 bp, Homo sapiens
tgagctgcatggacagctgatttctgttgaaaaagtaagcttccctaactgtttatcaaagcaagtctaatttgatggctagttctcaactcatagctgttaacagtagcagggagtagaatttgcagtgatttttaatttttatgtatttgtagtttttactctccttatatttttcctatcgtttccaaattttctgccattagcacacttcttataatcacaaaaatgtaaccatatgtacaaattgtttttctggttcgaacctttcaggtaaaaggtgatccctctaagaaagaaatgaagaaagaaaatgatgaaaagagtagttcaagaagttctggagataaaaaaaatacgagtgatagaagtagcaagtaaggatttatttttatttatttattttgataagcagatagacttttttggtacattatgaagtactcattctgtttttttgtctggggcggtatggtcaggacacaagcctctgtcaaaaaagaagagaaaagatcgtctgagaaatctgaaaaaaaagaaagcaaggatactaagaaaatagaaggtaaagatgagaagaatgataatggagcaagtggccaaacatcagaatcgattaaaaaaagtgaagaaaagaagcgaataagtatgctatacatcttttcaatccctttctaatgcattctactacttaatttttacagtggaagggaaaacctgaaattctaatccagatataagctttgttgttaggtgtcattgtggtaggaaaggaggtctagtaggagtaattgtcttcttttctactctggggaaacaaacaaatgtattcttccagctaagctcctttgctattctgggctgacttaaaatggtcattgattagtactattgaattaggatcttttggtatcactgaaagtatttatgttagcagactgaactgtttaaaaaactctttgcattgaagttcttgtagaataagtagtttttttatttcatgtattggtgtgtgactatcagaatttagcatttttacatacata

SEQ ID NO: 17343 - DNA, 1026 bp, Homo sapiens
taagatatggcctctatacatatgaagccataatttatgtgtgacatagtacagaaatgattcatataatcatttacctattataaaggattttgagacctctgatcttaatcttgtagttgttttgttttagaagattgtttcttatcgaatctagagttatccagctgcatataattcccattttgtcttacttattctctaatatggaatgaaggtgtaccagttggttcgtctttgttattaatcatataaattcttgaaaaatgtataccttgctctgacttttttcttcttccatttcaatttctaaggatctaaagcccacagcagatgtggcaactaaacagtctgttcattcctaaatgactgcttcctagttgtctctattcagtgcagtggtagactataaattattaaaactgaacagcaaaagtctgagacatgtaattgatttttttaccctcttcaacttagaactcatacaataggaaatgtacatacgttcagattttttcccctcactagtcatgttgtctgtttgatttcaataatagtaaactcacaggattttgatatagtaacgtcatactatcaaaattatagttttgaaagaatgtggcccttatagttttgtataaagattctgattgagatacttaaacatctgatattaaatctattctaggaagtacaagtagtactagtggtagcagtggaagctcaactaaaaatatctgggttagtggactttcatctaataccaaagctgctgatttgaagaacctctttggcaaatatggaaaggtacattctttttacctttttatctgtctttctggtgtctgcatttgaaatgaggattgtattctaaatagtattacatgaatatcttctaatttattgtatctcttaggactgttaatagacataattattgagttctgtggtaatggtagatgagagttaggggataaatagcatttcatcatttaatctctctctgagccttgggaatctttgtat

SEQ ID NO: 17344 - DNA, 1032 bp, Homo sapiens
atatgccattaacttataaccagaaatgaagagctggtatcttcaggatggaaccattttctcactattgttgtttggtgtttgtatgtagagatcattttttccatgaagaataagtgatcctgggtaaaggatggtttatgttagttaatacccttgtgttttttttttttttccctaacttccatcagtgctaataactggctttatattttctaggtcctattctagcttatgaatatgaaattgtttaaacttcttgttttgccatatttattcctgttaaatcctcttagatatagcaggttctggtgatggtacacaagaagtatctaaacctcttccttcagaagggagcctagctgaggctgatcacacagctcatgaagagatggaagctcatacgactgtgaaagaagctgaggatgacaacatctcggtcacaatccaggctgaagatgccatcactctggattttgatggtgatgacctcctagaaacaggtaaaaatgtgaaaattacagattctgaagcaagtaagccaaaagatgggcaggacgccattgcacagagcccggagaaggaaagcaaggattatgagatgaatgcgaaccataaagatggtaagaaggaagactgcgtgaagggtgaccctgtcgagaaggaagccagagaaagttctaagaaagcagaatctggagacaaagaaaaggatactttgaagaaagggccctcgtctactggggcctctggtcaagcaaagaggtttgtttttctatgtcagttctttacgatactgaattccagcattcaataagatcactctacattaagggggtggcttcaagaacatgtacagtaattagtgtcttatgatcctgcctataatatttttgaccgtcataagttacttttaaaaattttcaagatcttcataataatgcagtgtgttctactgattgcattgtcgaatgtcagcatatatttggtttttttgttgttttttgttttttgtttttttttttcaaattg

SEQ ID NO: 17345 - DNA, 1089 bp, Homo sapiens
cctgattactgaagcttgaactaggtagtagcactgtctgtgccagttgtaggcaaagggaaaaaagttcattcgttggtcttaggaaagaacatccattcatgtttcaaaagaaatgaaaaaaaaaattttttttaataaacttccagcagatgtcttttttttatggcatttctagtacattaaggatttttaagtaggattttgtggactagcctgaaaacataataatgttttagcattgcctctgtggaaaacttttttttttttttaatgtggaaaattattttaaagttccaactaccagctgggcgcaatggctcagtgcctgtaatcctagcactttgggaggctaaggcgggcagatcacttgaggtcaggagttcgaaaccagcctggccaacgtggtgaaactccatctgtctctactaaaaatacaaaaattagccaggcatggtgcctcgtgcctgtaattccagctacttgggaggctgaggtaggagaatctcttgaacccaggagggggaagttacagtgagccgagattgcgccactgcattccagcctgggcgacagagtgcgactctgtctcaagaataaataaataaatattcttaaaaaaaatttctaactaccaggttgcaaagttttgaagatgggcaaagaaggtctgtagtttgtcggaaagctattaacagttttcactctgcagtaatttctgcatgccttaaatcagttattatgttaagtggccagcactctttatatttaggcttttggagaaataaataattagcataaaagtagtcactgtatttaaagaatttcttctctatgaagaggcaaggtgtactagagacagagtacaaggcaatatgtaatcaaccacctgatggattgtaagatgaagattaaagtgtgaggatttttatttcagagaatgcttgttgaagagaagaacataggaaaggctttgtgggaggtacagatcttgtacttagctatcaggtgtctatatatatagttagtagaatgccattgaaaggtatcacagcttctcagataactgaggatagaaaattcaactgg

SEQ ID NO: 17346 - DNA, 1237 bp, Homo sapiens
tacatacacctgaagttaagaactaactaatctaaactaaagcttgaaatttagcatcatttttattcatctctctgctggtcagtttctagattattttatatacttttcagttttcggaaaacttctacattgctttatttgattctcacaacggtgctgagagttaagcaggactattttctttttactggtagaatagaaaggtaattcattaagaacccagttaaattacctttgacagtcttgtgtttgtaggcacacctgcctgaaggagtgtgccggaattgtttattctgttcatctttagataattaatgtaagatatttgaaaaatatacctttggcatattctaggtttattataatgaatgtgaattatctttgtagtaatttttcaaagtgacctattgggccaggtgggatggctcactcttgtaaacccagcactttgggaggtggaggcgggtggatcacttgaggtcaggagttcgagaccagcatggccaacatggtgaaaccccatctctactaaaaatacaaaaactagctgggcatggtgttgggcacgtgtaaccttagctactcaggaggctgaggcaggagagtcacttgaacccaggatgcagaggttgcactgagctgagattgtgccactgcactccagcctgggcaatagagtaagaccctgccacaaaaacagaaacaaaaaactcagagtgacctattgtatgactgttgtgtttaagacaatgtgcaaggcctttcagaaaaatgattttgttagtaaaatgtcagtttaatagaagagaagctaaaacacttgcaaacaatacaaggcatggcctgtgattaagatactccatgcaattgggaagaggttgttgctggaaacatttcagtttggcatatcttcttaatcttcccctcccttgcaacagaaattttataactaagctttttttttttttttttttaacattttatcgtagctcttgtgaatgtttaaggggaaaagttactcagccataaagtattttggcaaaatgattttaaaatttccttaggctgggagcagtggctcacgcctgtaatcccagcactttgggaggccaaggcaggaagattgcttggacccaggtggttgaggctgcagtgaaccatgactgcccctgcactccaccctgggcgatagagcaagaccttgtctcaaagaaaagaaactaattattaagtg

SEQ ID NO: 17347 - DNA, 1031 bp, Homo sapiens
tttctccctcctataaggacagtggcagagggtggacatgatatatctggattctggtctttacctacaattttcatgcagagtttgtcatgaacagctgctgcattttttgtaatctaattttctttactgctttaagtgatccaagtgttactcccaaccactgaatgattgcaactaaaataaaatgaatggattaatattgaaaagggaatattaaattttgatcttaagcacacctgggtatcagagatgaggacaactcactattttaagtcttcctaggttaggagagtcccctgtttgtgccaaaggaaattgaaaagggctaataagcattccctgggagaggtggggatgtagtttagagaagtaaaaaagttatcttaaaggtagcttttaagataactctgactcagtgtatcactttgagagatacattttctgtatttaaagaagcttgtcatgagaagactgccaacaaaccagaggctatttcaaaatggaaaacgatagaaattcagaaataagtatatcaggaattaaccatgtgtcttgcagtagttttgattcatatcttttacctagcatgctgtgctagtttgacaggtactgtgtattaatcatagtcccaggttgtttgagttgactattattttagcattgaaaataaacatgatttattcctttctcacctacttttaatttctctgtatatccctttttcagttttgactaggaacatcatttatctcttattattagaaataatttcagcaatataaaattttaagggttttttcaatacattttatgacaggtatatatatctatatatatgatatatagattatatataggtgtatatatatcatatatgatatatatatatattttttaatagggtattgctctgttgcccaggctagagtgcagtggtgcctagctctttgcagcctcaaactcctgggcttaagtgatccctcccaccttagcctccctggtagctgggactacaggcatgtgccacc

SEQ ID NO: 17348 - DNA, 1029 bp, Homo sapiens
acatttatattgatttaatacatttttatattcttctatattagatattttcatttactcatctttaaatatttcggtaacttttgaccctaagattaataatacttacaaatatttctgtaactcccagaagcaacatcagaaaatcacatgtgattcccagccactgtagcagtcctacacaattgtgtatagtagtatatatatactcaatctgcattaaagatactgtgacaaacatattcatttattttattacatacctcaaaattgcccctgaaaggacctctgaatgatgttccatccaatcctgatgaaatgtaacggatgtgaggatagcctgccatatcaggaacctatttcaacagaagagataggctaaatcaattttaagaatagacttgtgatttactgttaacattgaataattcaagaccctcaatgttttcaattcaactgctcataaaatttgacttcaataagaatacataactccaactaagcattctgtaacaggtttaggtttctgttaaaatataacctaactctccaaaatgcccaaacttaagcctgaggctcttagtagctcaaacttgaaaagagtaaaattgtcttaagatcctgtccatttcagagagctttattaaaacaacaacaaaaaatgcacacaattttccaacaaaattcgacttcaagataagttttttacttcacttctgttaagcttcctaacagccaaagtaccctatgccttttttgcttgattctattagggaaacttttaacactgttttctaattttttgttagttacagtcaatcttcattatttatggattacatatgtgtgaactgacccacaggctaaaatttacttgtaaccccataatcaacacttgtgctttcagagtcattcgtggatatgaccggtggcaaaaaattgcagttgcccaacatgcaactctgttcccagctgaggtagaacagggctctgccgtatttgagctcctactataaaccagtgtcttgt

SEQ ID NO: 17349 - DNA, 1087 bp, Homo sapiens
aaaaatataaaaattagctgggtgtggtggcaggcacctgtaatcccagctacttggaaagctgaggcaggagaatcacttgaacccaggaggcagaggttgcagtgagccaagatggcaccactgcactccagcctggatgacagagcaagactctatctcaaaaaataaaaaaagattaaaaatttaaaaaatttaaaaaaagaatgataatgagcacctgaaggcttggtaggtacctgtgagcccagtaaatgagccacccatatctgcttagctcattaatctgttctccaaaatccagaatttggatttgtgcattaaaaccacatatgtgatacctttggatgtcaagagacatctctgcaaatctgtttaacaaaaaggtcatgatgtggtaaaggaagaactggcaagctttgttcatgatctctaccatctctccatcaccagacaagatcttgacaatgtggccagaggcatttctgaagcccttgccaactgacccatggagaatcatcgggccttggagaacatttatgtggcagttttattgctgccatcaaaagtgaattcttatcacttttggcctaaatcagctcttgcaccttaggctgtttaaaaaatatgatgtcaattggaaagcatcccatttggtgctgtttctactttttttatttgaagtatcctgacgcagttgttttctggtgagtagaccatctgtcctaaatatatccaataccagtttgcaaagtctttgtcaggtgcatcctgcatagaagctaaataaatacttttttaaataataaatagaggcgagagatattttgaaggtacatcagtgggatttgctgactgattgagtaagagagttttcatagaggaaaaggagatagtagtcatcactggagctaagatttctgacccgtgtgcttcaacatatattttagatttgaaatatgtaatttttgcagtagtaaagataaaagggaaaaattcccagtgccgctcatatttggctcgtgggtctctcgtgctctttgctgtggcaccatcaggtgtctccggattctcaagctatcttcct

SEQ ID NO: 17350 - DNA, 1027 bp, Homo sapiens
cttaatcagttccctccatttttacatctgtaaaacggaaatattcataataataaaacacctccataagaatcaaatgaaataaagtagaagtgctttgtaaaagataaacaattcaataactgtacaattcagtaactgcaaggaggtattatataagcatagatttttttttttaaaactaggagttgtcaacccaaatgtccatcaatgatagacaggataaagaaaacgtggcacatatatactgtggaatactatgcagccataaaaaaggatgagttcatgtcctttgcagggacatggatgaagctggaaaccgtcattctcagcaaaccagcctaggagcagaaaaccaaacaccgcatgttctcactgacaagtgggagctgaacaatgagaacacgtggaccagggaggggaacatcacacactggggcctgtcagggggtggggggctaggggaggggtaggagaattatctgatgtagatgatgggttgatggatgcagcaaaccatcatggcacgtgtatacctatgtaacaaacccgcacgttctgcaaatgtatcccagaacttaaagtataattaaaaaacaaaacaaaacaaaaaaagaccaggggtgtactatgtgaattactggaggtatcagagaattctcagatgatccaacacatgtccaaaattcaagtactattaaaaacacataattttaaaaataaaagttacttatgaaagcctgactgctagttttaaagggacataaataaaccttatttaccttatttatgtatgtccctttgaatctagggttttttcttttcttttttttgagacagcgtttcactcccatcaccgagactggagtgcagtggcatgatctcggctcactgcaacctccatctcctgggctcaagcaattctcctgcctcagcctctgagtagctgggactacagggccacgccatcgcacccagctaatttttgtattttttttagacatggcgttttggcatgttgtccagg

SEQ ID NO: 17351 - DNA, 1072 bp, Homo sapiens
gaaagagagagagagaaaaaaaagaaagagacagggctgggccctgtggttcacgcctgtaatcccagcactttggggggccgaggtgggcagatcacctgaggtcaggagtttgagaccagcttggccaacctggtgaaaccccgtctctactaaaaatacaaaagtagccaggtgtggtggtgcatgcctgtaatcgcagctacttgggaggctgaggcagagagaatcacttgaacttgggaggcggaggttgcagtgagcctagatcacgccattgcactccagcctgggcaacaagagtgaaactctgtctcaaaagagagaaagaagggaagaagagggaaggagggagggccttattttttattttttaactccttagtgcccagtgtgatcattcctattactcaccagactttgtattacatccctctcaggtgtttccagaagttacattgtgcctcaaaggcggaacaattagccccactaaagatatgcagtatccagcaggtccctttttcctggaataagtataagaactgctctgaaggaggcacactctcttgggtcttttgagctctgataatgtttgttacaaattcatttatagcactttatggtcatacgttacattatagaaagtaaaacataggctacattgtagaaagcccagaagagagcttaaaaattctatcctaaatccatttgttaacttcacagagagatctagagaggttaaattacttccaaagtctcatagctagtttttagctgagctggtgccagaatccaagttagatctgatccagtgcagatctaaccttattagatcccagtctaataaggtttttcttaccaaacagtggtgggaataattctttaagagtctggacgtgaccagatagttttctttctgggacttttcaagaaagtctgcttgtaggtggaaggttactgtactaacttcattataagaaatttagaagaattcagccgggcgcggtggctaacgcccgtaatcccagcactttggaaggctgaggtggagggatcacctgaggtcagaagt

SEQ ID NO: 17352 - DNA, 1338 bp, Homo sapiens
agaagaagaagaagaaaaagaaggcccttggctgggctatagggagaacacctataccgtggacttcttctgtgtgagtgtgtgtgtgtgcgtgtgtcttttaggaagtctggtagcatagtaggagggctctccatctgtacctgaggccctactaagactcattcagttgtgactcataaggaaaatagccattttcattttctgactcatgaacacagtgtacagcttgtagttcaccttctatcttcctcctgaaaactcactttgggacacttttctatcttgagaaaactaggaacactaccaggcaatagttacttgtgtctttttcctaaggagacttgaagaagttaaaaaaaaccctgcacatctttataatttagtggaggttgtttagcagagtacaaaaaaatctctgttgactttaaccgtaatacccatctaaggcttccttcgtagaatctgggcttatcatcatctgcaaaggaagttctgcttttgtggccatgaccagtttggactctctgatagactgaaacccatggctgtaggtccgctatgtgctttggatccagaaattgtgattgatttttatgcaaggtttctgtgcattaaatatacagaaatatttgagcaaatctgaattgaccatcacctcaaaacatgttcaagagctgttcccttttccttacttgcatatacttgtgaggaaattatagatatgacacataagaatacccaggaatagatttacaacctagaaatctgatggatagctgatgataaggtaggtaagttcctttaggtgatggcatggcatgtatttagaaagtctggaatacatttcaaatgtttcctgggaaggtaacctacttgatttccacagattagtttatcagattgctagtagtctcctagtcaaaacaacacaatacaacaaaacaaaaccagaaaggaatgggatcaagcacaaaaaaagttttgatggaggcaaagcgttggggaaatacctagagtccgggacattatctagggacaagtgtgagtgggccatcctagtgggaaatatttgacagcccaggcatctccttggagagaaaatgggtggagcagtggatggagagggatggagaagtataagaagcagacatttactgaagttgaaagtcacctccaccacacttttgctgaggactacagtcttgtcagtggttgcaaactttttttttttgagttggagtctctcactgtcgcccgggctggagtgcactggcgcgatctcaactcactgcaacctccgcctcccggtttcaaacgattctcctgcctcagcct

SEQ ID NO: 17353 - DNA, 1052 bp, Homo sapiens
actttacctgatgaaagcatcagcaggggcaaaaccaaactctggatggaattttttaagaaaatcccttgctttttaaaatacaaaaccaaagttaatcattggtataaaaaaacccaagtacaacttgattaggaaaagttagacaatcatagcaaaaacaaaaccaaaaaactttccttcttagaccaggtaacatgaggaagggggaaaaaaacccaaacaaaatagtccccccacatgacaggtgtcttcagcttgccatattgatccaaagttcatacattttatcatgtacaagatacattagacttacaataaagtctaattattagacttttatgtcagtggattgtgcttgcagaaatacagaagtaacatactgaccctaggtgaggagtttcttacatggttaactggattgacccaattggagtaaaagatttttgctgttacctcgatgctcctgcagttgttacctcagcatgccactgtagtccttgactctcacattaaaactaactttggctaggtactggtggctcacacctgtaagtaatcccagtactttaggaggctgagactggaggattacttgagtccaggagttggagaccagcctggccaatatagactgtccctacaaagaaaataaaattgtttcatcttccaattcattctatgcatgtatttccatgttcccttcctaacctccactactacctattacatagtcaaatgcataccaggcaaatgcagaggtatgtatggtgtatttatggtggctaagctaaatatgaaaactggttttaatggatgaaatgtaaaaactctaggtgtattccatactggttacctaaatgagtactctagcatctattataactgactcaacttcagtcagcctgaaatacctgtcccatcacagaaatggtctcccactaaataatgctgagcaaagctctaggtacatgaaaaaacaatcaaggacagaatataaacctttttgagaacagaggcagtaatacatgtttcctcccaaaagagggcag

SEQ ID NO: 17354 - DNA, 1027 bp, Homo sapiens
atcccagcactttgggaggccacggcgggcagatcatctgaggtcaggagtttgagaccagcctggctaacgtggtgaaaccctgtctctactaaaaatacaaaagttagctaggcgtggtggcatacacctgcaatcccagctactcaggaggctgaggcaggagaatagcttgaacttgggtggcggaggttgcagtgatccaagatctcaccactgcactgcagcctgggcaacagagtgagactctgtctcaaaaaaaaaaaaaaaaaaaaaaaaattatataggccaggcgcggtggttcacactggtaatcccagcactttgggaggctgaggtgggtggatcacctgaggtcagagttcgagaccatcctggccaacatggtgaaacaccatctctgctaaaaataaaaaaactagctgggcgtggtggcaggcacctgtagtcccagctacttgggaggctgaggtaggagaatctcttgaacctgggaggtggaggttgcagtgagccaagatcgcaccactgcactccagcgtggcaacagagcaagactccatctcaaaaaaataaaatgaaaacgtataaaaaattataagttgcacaagacaatgaatgttgtagtcttagtgaccgatgcagtaatgcatctgagccaagtcacaggattaaaatttagtgtttctaagaaatccctgcttttgtacatttggagaattaacatacacaataaaatatgtaacttttaacaaatatttccataatttgaatgaactttcataacttagccacatgagggcaatagaaatacaaacgcaagtttttattttttcttcatatttcaggtaagtaatttgcaatgcagactaaaaatacagtctgccaactaaaatatttttgaaatcttcccttagcaaatttgtctggtggttgtttttttaatagctaggattaaagttaaggaaaatcttaagctaagcattaaacttattatgttcttggtagctaagatctcttaaattg

SEQ ID NO: 17355 - DNA, 1044 bp, Homo sapiens
gtcatctattttagtagatggagacagaataagcatatatatgttagcttcagttattggtatgaatgaaaataaagcagtgtgaggaagaaggaaggtaattctttcttataggttgattatagaaggcctttctgatggagtaatgcttgacccagagatctgaatcaaatgagagagtgaactatgcaggtatttggaaagaatactgtcagcaaaaagaagagccaccacaaaggccctcaagcaggatcatgcttcccctgtcaaagaacagcaggggaccagtatgaccagagcagagtgagagggtgagtgggcgaagatagggaagtaggcactggggggcccaaatcacataggccttccaagccatggactctgtggttttcactgagatgggatgctgccattggtggttttgaatagaccagtgatgtgatttgccttatgttttaaagtcttagtgtggctactatgagggtggggttgggataggcaagactggaaataaggagaccatgagttatcacattaactttagtgacagatgatggtgacttagggtaatagcattgaagatggtagaagctgtcagattctggctatagttagaaggacgagctgaaaggttggctgatggattggatgccaggtaagaaaaagagaagttactcttgactcaggtttttgagctgttacaggaagactatgtttactgttaccgaggtgggtaagactgaggacagagcatatttgcaagagtagcatcagaaacatggtttttgacaaattgaatttgagctacctacttgatatttttatccagtgtcaagcaggcagttttatatatgggtacaaagggagaattgagggctggagatacaaatttgagagtcatcaccagatagtagatggtatttaaagccgtaagtctggatgaggtaactaagagagtaaagtatgtggaaaatagaggacccaagaaaacttagggcagttcaacagttacaagtcagggagctgaggaggaaccagcaaaag

SEQ ID NO: 17356 - DNA, 1056 bp, Homo sapiens
aaccccctctcccctcccacacgcatattatacttactgatatttgccttcgtttactgaacagatttttttttggctcctattgtgtgccaggtactgttctagacgcctattttacttaagtgaacaaaataaaaagctttgccctcatggagcttacattctattagaggatgcagaaaataaaatatataatggtgttagaaagtgatggtgccatcaaaaaaaaaaagagaaatataaaggagtacgggaaagttccagagtggaggtgggaactggtattttaaagatgacggtggtcagtttgagcctcatttagtaggtgttatttgagcaaagacttgaaggaattaagaaaatttgctaagtaaatatcaggaagagcattcaggcagataggaaagccaatacaaatgcttttaggcctgtcatgtttgaggaatagcaaggaagccagtgtatctggagagggatgagcaagagttttgggggtggagggacaagaagataaagtcaaagagatcatggtagccggatcattgtaaaggctgatagaagccatgggagattttgaatagaggagaggtatgttgtaactgaagttttagaagatcaccctggctgtgagttgtgattagagtgtaggggtgagtgtagaagcagggaaatcatttaggagatttttgcagtaatccagatgacgagagtggcccaggtcagggtgataaccgtagggatggtgagaagtggttggattctgaatgcattttgaaggtaggccttacagtatttgctaggaattggatatggagagtgagatagagggagtggaggatgaaatcaaaggttttgcccaagctcgtagaagtatggagttctttaagccacgatgcaaaagataacaaatagagatgttgagtaggcagctagattcaggagtgagaagttctatgctatatgaatttggggatcatcagcagtggtacttaaaccatgagaataaatgttatccgtaaggaatgggtgtagacggaaagcagcagaggcctaagg

SEQ ID NO: 17357 - DNA, 1031 bp, Homo sapiens
ttaggacatatcagatagaacaggccagtttcctgatgagattggtagagatgttacggtaggttcatccttcctttttccatgttatatgtggagaagtgttaaacttgctcaagcaaatgggagtaggagataggctgaaaatagagattgctacaccattctattttgttttcatgcctgttttttctccaatcctatatggacatttgagaaatggaccacaaatctgagagggatagagtaaaaagaggcattaatgtatgtactcacaagttagacctattttgctgttaaaataggtctggtcttgttataggtcataggaattgtgtagtttgagttgctgcgagaaagagtcaagaacttagacttgaatgggaaggccaactggtgagggaagtggggtattatctactcaaatgttctaagctaatacaaaagaattacctggcaagcatccccctctgcccttcttgaaattctgaatgaacttagaatcagatcaatggtgagacccagttatgtaactttcctttgaagttctaaaggataattgaaaataaagtagtctggcatgtttaacagtaaggagtgacactaaaatttgaatataacagtatgttgcaactatttataatagacctatttatgttttgagaactaagtaaaatgctatgaaaaattcacataaagcacgtaagcaccaaatgaaaatcatttcgtgctttcaaattaatgatactaggcttgtaggatgtcttagaatcatgtttaacaagaagttaaaatatttgcattttgaaatttttatgcagtttggctaaggaggaacttggaaaataacattcatcagcttctacactgcactttttgtatgtggactttgtaaagtttaatgtccgtttaacagttgcttgtttatttgtgtaaacctagctagtaaatattgatgatgttcagggccactgacttgcacagcccttggagcactattcacacagaacacaattcagagtttgttaagacat

SEQ ID NO: 17358 - DNA, 1050 bp, Homo sapiens
ctggaaaatgctttcctgaacctgggtaagtgaatgtggcccccattcctggtagacatcagctaccagagcagaagtgacagatggccatcctgttaatccaaatgtgtttgggaggtgtggcttctatgcatgctttggatagttttacagtcttaattgtatagatttcagaatataaaactgaagaaaggcctaacttggtaacagattgttgccagggaggagtaagagaacaggaggagagaggggtgtgttgtggaaactcacgtatgcacttgggttctgcaggcctcagagacccctggtttaaaaccgtggtggaacttagtattgcagaggatttctagatttcccttagcctgtcctattttgcagcccttttccattgcattaggtcacttctggtttgtggcccagggccagggcatcctctctcattggtagaggagagaccagagcagctgcagcgctgactccctttcttctctccacagttcagtgcattcagaacaagcccctgtattttgctgatcggctgtatgactccatgaaggtaagggcagctggctgagagagctgtgtttccacactcagcttttcttcttttgggtcccaaattgagtctccttgattcatggatggaggaaggggaccccactgtgtggatgcaggaacacactagtcagctgtggttgtatgtgacagctgagagaaccacaaatctgtcttctttctctcagctgcttgaacatgtatttgcgtacagacaaaaagtaaagtgccatgggagagagaaaatgcgacatggtagtcgtgtctgatccctgcttaggtttctccgtgatttcttcctgttactgccagagtcaagacaagcgaggaagggagcgattattaagcacccactatacagtggacaagtgctactattttaccttaaatcattgcataacaacctctgaggcttatgattatcttctttataaatgcagagatggagctcagaatacctcagcctgcttgaagttacacagacagatttgaacc

SEQ ID NO: 17359 - DNA, 1104 bp, Homo sapiens
acctcaggtgatctgcccgcctcggcctcccaaagtgcggggatttcaggcgtgagccaccacacccagtctaattaaaaaatattaagccagattttcataatctaatttttaccttaagagccaagtgtgtcttagcccctgtacatttgattttatctgcttattttgataatacataattatcaacataattcaaattatgttaatatgtattaacataaaaatacatattatgataatacataaatatcataattatgataattctcctcataaacgccatgcaaatgtaactttcttttttttttttttttttttgagacagagtctggctctgtcaccacccaggctggagtacagtggtgcagtctcagctcactgctgcaagctctgcctcccgggttaacgccattctcctgcctcagccttccgagtagatgggactacaggcgcccgccactacgcctggctaattaaatgtaactttaataggaattagaaacaccagtattttaatagttgttgttcataaattgtaggctttgaaatgatttcgtatgtgtggacatgtgtaaacatatattcagcaaatattttagaatgaatataaatgttttataatctgaattatgttattttaaaatatagctttacttaagacttaataaaatgtgtatttctccttttaaaatgtaaaatttcttcacagttattaaaatttgtaatctttaaggagacaggataacttggttttttttttttctaaatactgcaattgcttcttctttctaagtttgatattttattttagggcatatcgatgcatttacttcaaaactttttctactggaagaaattacctcagaagaattaaaagaaaagctttcagcactcaagtaagaaagtttactttgtggtgagaattgaaaaatttgttaatgtgatcattaatttttctttaaatattgtttaagcttaaattattttcaagacttttagtctttttatgtatagaggtctcattggactcagttttgttttgtctttttttttgttctttgtgtgtttgagacagtctcgttctgtcacccaggctggagt

SEQ ID NO: 17360 - DNA, 1050 bp, Homo sapiens
ccactgcactccagcctgggcaacagagtgagactctatctcaaaaaaaatttttaaaaagtgccaacttttccacattgctaataacagcggcatgagggtttgactactatgataaactaaggccaacccatccagatccaggatgtacactttgtccacccaaatccagtggacttggtggaacttgtgcttgataatgtttttatcttttgttaaatagaacgaagattataaagtcctaaattcttaaacttctaattcacataatttagtttttatcattgattcaaacttgaaattttagaaaccaaatggctttaattgaaaactgtttggttttagtgctctttacaagagaaactcaaggaatgacaaaattctgtaggtttgatagtctcctcctagataaatgctataacatcctgtgaattaaaagatttgactttatttgctaatttttcctgcctcatctgtgttaactaataaacttaataaccataagcttgaacatcatgaatacatatagtatcagtcctatagattgtattttcaaggttttatttctttgattcttgctatctctctgatttattttgaggctaacctcatttctttaacttcctactctgtgaacccataccactttgtatttctttttcagcttacagcacttagaaattgttgatggccggtatctcttaagtaagaatagcctagggaaattttggataccagtttaattcttgaacaagacagcttggtaaggacattgtaattcacttgactaaggtgaaatttgtaaatttcaagacataaccttatagaagaaaattcattcttcatcaaaatatgtcaaaatagtcacaccctaaagactgtctaaatagaaggcttatatttctgattgtgtcaaactcagaataaaattttaaaattttcagtgaatgcttacattgcccccgttattatatgtagtagtttatggtttaaatctcttagtaaaatgtatgccccttggaattatgtcctattcatctctgtttgtcc

SEQ ID NO: 17361 - DNA, 1102 bp, Homo sapiens
tacaaatatgtgaagggagaggggatgtagatatataggataaagataatacataaagaagatgtcaagagcttttgtgacctaaaatattttctaagacatttcagataaggttcgttgacagaagaagaaaaaatatgtatcttagaagataatgtgtgtgtgtgttttaatcaaacaactcttccccacccccaacagctgtgcatctctgaattgtttctatattatcagaagtggcacatattattctcacagaaagctgtgaattttattaacttacagattatgtttcctgataagtcattaatattttgaaaacagtttggaggaaagaaaatactaagtactccatcatttggattagttataacatttctcattgattttttttagattatagattagagtgacctgtaagataactacttcattaattcattgtgcttgggaatgttcttagagtatactacttaatttctaattattcatataactgctttgattgcagaaaagtgtgttgaaattttcatgtgcctttaacagtttcttaaatgacatggaaaatatgtgtcttctctaattttaaattttaatgagactgctaattttagtattaaacatcaatattgtaagtaactgggttaaaaatatgaaaataaagaatatacaatgtgtgtattagtagcttgattaatgaaatcgggctaatttttgcaatgaataattacatagtcacatgtaactaaaaattttctttttgcattattagagaaatacaaatgaatttttcttaatttctgtttctcagaaaattttaagagcttgcattgaacaagtgaaaaagtattcagaattctatactctccacgaggtcaccagcttaatgggattcttcccattcagagtagagatgggattaaagttagaaaaaactcttctcgcattggtaaggtttattatcagacgatataagcttttttttgtctgaaatagtgtgtgtgtgtgtgtgtgtgtgtgtatatatatatatatatatttatttatttatttatttttttttttggagacagagtctctctctcgtcgcctggcgtgtaat

SEQ ID NO: 17362 - DNA, 1050 bp, Homo sapiens
cacctgagatcaggagttcaagaccagcttggccaacatggcgaaaccccatctctactaaaaatacaaaaaattagccaggtgaggtggcaggcacctatatagccagccccagctactcaggaggcggaggttgcagtgagccgaaatcgtgccactgcactccagcctgggcaacaaagcgagattctgtctcaaaaaaataaattaaaaaaaaaaattttttttgacagcattttataaaatcaacttctcagttcctgagcatgtattgtatagtcttagtcatttgcttttctattttgtggagtttttaataacagtttatcattactgcataataatttttactgacttctttgatttctgctttggatttgatactttaattattctttaagtccaaattattatagcaatgattaagaatgtgattctttttaatgaaactttttatcccaagacatgtctacttttttaaaaatcaggatatgaaaaaacatgtgaacgaagaagttactgagttcctaaagtttttgcagaattctgcaaagaaatgtgcgcaggattataatatgctttctgatgatgcccgtctcttcacagaggtaaaaaaacaactcacatttgtgtaaattgcgaagtgataggcaatagcagcattctgaaatatgtgatgattccaccaaaagcattcggaactgtcagtgttaccaatttaaaaaccacaggtcttttcttcatcatgcattaaaatagtagaaaaactaacatctcaaaattgtgtactatagtatatttttatgtatatttatattctttaacaatccagctactgtattgtatcattacattttattcacataatagtttgaactgacccactgacttcccttgtgagagaatagcatttaaagcgttatcctggtccctaaaagtctgaatggccttttaaaactcggtcaagtgaacttgtgctcattatgtttgtggtaaccagccacaaaatgataaatttcaactctgagttcatttttggatacttcactc

SEQ ID NO: 17363 - DNA, 1049 bp, Homo sapiens
tactaccaattaaagaattgccattgtttatttggatcaaaaaatgcctataaattctgttgtcctgggatttagagaacatatgtctatctttaaaaaaagaatcatctcaggtcaggcgtaggtggctcacacctgtaataccagccctttaggaggccagagcagctggatcacttgagcccaggagttcaagacaagcctgagcaacatggtgagaccctgtctctacaaaaatacaaaaaatagccaggtgtggtggttgtgtgcctgcagtctcagctactggggaggctgaggtgtgaggatcacctgagtccagggaggttgaggctgcagtgagcgaggatgacgccactgcactccagcctgggcaacagagtgagaccctctctgtctctgtctctgtgtgtgtgtctctctctctcactcactcactcacacacacacacaaataatcttggctgggcacagcagctcatgcctataataacaatactttgggaggctaggggcaagaggatcacttgaggccaggagttcaagaccagcccgggcaacatatcaagaccttgtctctacacataatttaaaaattagctggtgtggtggcatgcacatgtggtcccagctgcttgggaaactgaggtaggaggatcacttgaccctgggacgtcaaggctacagtgagccatgatcacaccactgcacttctggacaacagagcaagaccccatctcaaaatttgagaccttatctcaaattaaaaaaaaacaaaaaaacaacttatttgaacttttctctcagcctttctcttttcacactaaaaatttcaggtattaatcttcatcttgccactgcttctcattttatttttaattttagagttggtgtcttgccatgttgcccaggctagactcaaattcctgggctcaggtgatcctcctacctcagccacctgaatagacgggattataggtgcacgccagtgtgccaagtttatttttacggttcttttcaagtccacttctgttcagcatatcccaggt

SEQ ID NO: 17364 - DNA, 1021 bp, Homo sapiens
cagtgttgtcaggctctcagaataatttttaaaagaatccagaagcctgacttcacaccaagtagccatcctagatgggcgggggggatctccatgttcaaccaaaccctcagaacttagagcaataaatacattcagtcatttatttataaatgaatgacagaatattcaatccaaatagaaacaaccttttgtcagtgatgcaacataacatggagtcttatattgagaaagtgaatatgaatattttaaatagatgcctaggaaatctgtgtttgctgtttacatttaatgtactttgccacattagcagtaccacacttcttttactttcatccttctaagaactaatgaaagatagcttgctattagctttgacatgttgcacatgccattatgttgttctctaagaacaactaaattctctccagtgttcatgtgtgattcctttttcatcattattactttaatgtggatgaatactatttctaggaacttgattatcactgaacagattgcatatgtaaatgcagataattcttgagcaatatagtgaaaatgatttcacaaaaaaaatccatatgtactgtatacatcttcctgaatccaaaattctcctgttatccacacagtttgaaatctcatattaaacagtggtaaatttttaaacattaggacattagctggctgcttctataaatgtacctgtattgtctgcctgctccttttgtggagatgtgtttttgtattggatgtttgggccaatgggaggcttcaagctacaacatattttcccactttaaataatatttaacatatgacaaaccccagacaaggcttttaatatgtataaagaactgcagtgttaggtggtttatttgcaaactgttttcagtgttgtccatttttatggcacctttaacaatattcttgtttccaaagtacaaaaaaaataggttaaataatctagccataactgaatgtcaagcaataaaacaaatgacttttgtgcatagactta

SEQ ID NO: 17365 - DNA, 1076 bp, Homo sapiens
tgtctttggaaaactttttatttcattgaatgtgccatagtagaaatgtgtgtttttagttttagactaaggaatagctagttgttgtgttccgacattccaaaatgcaaaacaacctagtagtatctttcatgaaaaggtttaagtagtatgtaagcttctctcattgttgcttttttgcacatgttcttcattcctctctagtgcaatatgtacatagagcacttgcgggtgtaccttgatccctcagggaaaaatacatatttgtacagttttttggggtttttttgttttttggttttttttgttttgccttttgtttttggctaaggaatgtcgatcgaatcacttgttattgttgaggggcagccagataataatcctaaagccactgtttccaacattgattgtttaaatcatatgtccttccaatgctattattttaagataataataaaaagttattttctgacagttctttgtgctgactggtgaaaaacaagggtaaataagcaccttataattgacttactgtgaatgacaatccatcttggtatcaacgatagaagccctatcattttggagttggggttaagagtcagaaacaatgtgctcagggatctcctaaaactcttaaaacagggtggccagtactactgggacaaattgtgttttttattattaataataatgataataatactatccctccaaggcacaagtgaactatatagaactgcgtgtgtgtaaactctttactctcgtctcattttgttgagtttagaacttgatgtgctcgtcagtcttgtgtttcaaaacactgaataacttccaaagcaaagttatgccagtgtgttcaaaagataaattaataatgtaccagcaaagagcatcattcaaagtatagtccttgcatattccagttaccatttctctaataattaaaatattcatgataaatatatatatagcatcatatgttaaaaactatttcaaattctacatattaaggatgaaaattttaaaatccagtaataagaggagagacctgcctatcagtacagtgatataggtaa

SEQ ID NO: 17366 - DNA, 1037 bp, Homo sapiens
aatatattacagggtaaatgggcatgaagactatatatagctaaaagagatattgtttatatattgttttaagtaatataaaatgtagttactggtgtagcttttcctgttgaattgataaggcactttcattttgcacctttttctttaaattaaatgctagcgtgttcactgtcgtgtcgcatgtgcaccagaaacacaagtttaactgagaaggcttggaaggtacgttgggaggtatttatgctgctgtttacaaaattatttttaagagactggctggtcatatctagaaatcaccacgttggattttttttttaacatgtgaatttggaattagaaacggaactctccctaaattatactttgctttttggtaagtttaatgatagatgtgtttatgcttcatacaaagttgaatgattgattggcgtggtggacatataccatcatgctcattttttttttttaaagctttttaaaatgccacctcatggaggcgagggggaggagaagctcattttacacaattcagtagttaaatatggactcggtctcaacttggaattcttatgctttgagaacaaatcaacaaccagaatatttattggaatctagcttttattataagaaggacccaaagattatatcctgagcaaatgcacactccccatgtgaggacatgaagtatttactttgtgaatgtttatgttcttggtataatctaggaaccctatgagtttatctcagagtgaactaattctagatttgttgtcaatagatgctataattcaagaatgttgctctccatatttgaaaaacgatggataggagggtgagggaagcatacaatgttgaaccagtttctcttatttaaatattaaatactttaagcctttaaagtgaagttgatgctagctgcaaacatttactcttgtatttatcttcactaggaaactgtggactgtaatttattttattaaatatttagaagattatttggcttgtgtgttcaggtgagaaatactgagttgttt

SEQ ID NO: 17367 - DNA, 1050 bp, Homo sapiens
ctaaggaagtaatttataaatcaaccctcacttcagttaaacagggcttagcttcagcacaacagtcttttaattacatagaaaactctgcccttttggatagacagctgatgtgactgagaacccgctagctaaactgcacacgacacccaccatgctgttgcagaaggagtctctacatgagcagcttagaaacaaactcactaacatcagatgacccaaatgacccaaaccatttctgcctctgcttaggttctctagaggtggtgtttatcagaatgtgccgtgcctttgactctcagaacaacaccgtgtactttgatgggaagtatgccagccccgacgtcttcaaatccttaggtaaggggatatcaaggtgccttttcttcaaatcagggctataggaaaagatgcgggttgagtgaaagctctgcttggacaaaatgaaaactttatttagaaacaaaaattaaggggttttatacctattttactttctagttagtcactgtagaaaagtcatatagctcaaaagttttttgtctacattacttgtaaagatgtagagtttcattttatctagttggtaatcaaagggatttatatgacgtgtccttccagttcccttccagattttaagaaaccagatttgctggtgatatattattcggatgacctttaggatgtgagctgatacataaaattaagcaaagggcaaaagctttgcccttccatccccctcaaacagtaaccattaatgagactgaaatgcagatatcaaagaaataaaagttacagttaagtgaaaccatgatatataatttataataaataatttggggccaggtgcggtgactcatgcctgtaatagcagcactttgggaggccaaggcaggcggatcacctgaggtcaggagtttgagaccagtctggccaacatggcaaagcccatctctactaaaaatacaaaaattagctgggcatggtggcacacgcctgtagtcccagctactcaggaggctgaggcaggagaatcacttgaaaccggga

SEQ ID NO: 17368 - DNA, 1057 bp, Homo sapiens
acattcaatggtatatttttatcaccttttatatcaataattatatttctgaaataccatttgtagtggttgaatcccattgtatgagtatacaatatgactcttttaattcagtaatgttggacagttaggatctttctacattctctatattatagatagtactgtgaagaacacccttgtaggaaaatctttgtagcattctaaatatttctttaacgtgtattccttaaaagcctagctcagtgggtaggctttttaaaaatttttgatacaactgccaaattgacctccagaaaaatcgttcagtgggagagcacccttatcagtttgcctaccactctgttaattctttaggattttacctctccccactagtgtcgccctcattggggtcatctatcttcacaactaaagctttgaaggtaataattctcttttgtacccttcatggctttgcttcatggaaatgactctacttaccttattttttttctgcatacatccctagcttgcaaagccactgaaagataaatgagcaataaaaagataaaaaggtggatcatgcctgtaatcccaacactttgggactccaaggtgggagaatcacttaaggccaggagttcaagacaggcctggacaacacagcgagacccccatctcgaccaaaaaaaatatataaatatatatatataaatatatatatataaatatatatataaatatatatatataaatatatatataaatatatatataaatatatatataaatatatatataaatatatatatataaatatatataaatatatttaatataatatatataatataatatataaatatatataaatatatataaataaatatatataaatatatataaatatatataaatatataaatatatataaatatataaatatatataaatatatataaatatatataaatatatataaatatataaatatatataaatataaatatataaatatatataaatatatatataaatatatatataaatacaatatatataaatatatatatgt

SEQ ID NO: 17369 - DNA, 1058 bp, Homo sapiens
gttctcaatatgccctgcccagggccttcatattcttgtaaaggactaaatagacatgcttgatctccctcattgttaagatggaatgaagataactcttgaaaggcccaagtttagcgtcaggtagttttgatgctgacttaaatgctaggacctaaagaggtttttgttcatccctaatttctgtcattacaccttgaggtgagacatggacagaagcagctccaagtaggtcttcttcatttcatgtataaattctgtttaacaggtggttcaaggacttcatggtgcctaattattacattcctaggaatcagggtaaggaggctggttctcattctagcctactcaattcatgtagggaaaagcaggcaataactctcagctgatagcacctttcaggatttctctacttccacttggcttttccacgtctctgaaaaatgttaggcgtaactcgctttctctagagttgcagatctgtggcacaaacctttgccttgactatattaaacataatggaaggactgtgcagtatgagacattattagataccatatttcataaagaatttttcttgaagaagtcaagccaagtgttaacatgaggcagacttgcaaatgacaacttttgttgaatgcaaccttaaacatattaacttgcttaagttgcttaactcaaactatacctattagtgtccaaagtcaccattattggggtattagaaagcctccagagtatagaaaatacactggatgtgagatctggaacaatctctaaatttggacagcaaagaaactcagtatgcaagcactaaaaaaatgatggatagcttttagaatagcttgcactccctaaaagtcaccacagtacttgtattaggccctgagaaagggagttaccagtacacatggtttataatgaggttaaatccaatagtttcatgtgtgctctaagtatcgaatgcaacatcaccttaaatccaaagtaagtggttgtgaaatcatcccaggatatgggattacattagaagaaagagtgggctgtgtgtctctgtg

SEQ ID NO: 17370 - DNA, 1050 bp, Homo sapiens
ctttcctgctgatatgaaatgacatttaacccaccccgagagattctagagaaagaggacttttgttaaatgttactgatcccagggtcctagaaaatcttcaaggactttatattttaaaatgtagttaattctagaatcttagagggaccttacgccaactgagaaccattggttaaatagccaattacctttatcttagcccttgatatcacataaccccataaatccttaacaacaaatacgttctgttgtttacaaaggcaaaagagaggaaaaacaaaaagaaaaaaaaaaggattgtattgctgatcctggtggtatcatttattgggtgagaacttacttatttagtatctgacccactggatgagtaggatgaagtattaggaagcttattctcttgctgttcaggtctttcactcaaggtttaaactggttaccaggtagataccaaaaaaggtatagagtcaactgccttaaacagtttgtgcactactatgtgataggagaattctagagagaactggatctaaaaaagccacccactgttcttctagatgaaaaatctgtttcctctctgatttgacagaatttccctgtctagggataaaagtgctcatttggatttggcttttagcagagatacatatgcatcagggaatgtgagtcagtttctctagaaagcttaatctagtagggatggaaatatattacaaaggattaatattcagttcccattgtcagaaccacctgcatattcacagaaagccacatgagaagatgtgcctggcttccttattcttcagagatttcctgcacacacagctcagctttctcttaattcagatgggacattctggcgcagtattttaactcttacacaactaagtctttaaaagactgaagaaaaatcgtcaaagttccaaaacttcaattttgtcttattttaaatttagttcacaaatgtttgatctcttgatggtttgaggagtgtgtgtgtgtgtgtgtgtgtgtgtgcatttggcaggtatactcaacactttttat

SEQ ID NO: 17371 - DNA, 1070 bp, Homo sapiens
tccaggctggtcttgaactcctgagctcaagtgatcctctcaccttggcttcccaaagtgctgggattacagacaagtcatggcagctggctgagtacagttattcagcataagcataacaaaaacagaatggcagcccagttcctttgttaatgaaatagtaagggtgtaactagggcaagctggccctgtttatgtcacatgagtttgttttagaaagcattcttgagaacacaaacaaaacaaaagaaaaaattttagaaatacactcacattttaatataaaatggactgcgttttgtggctatgtgagaattttcaacataaatctccttaagaagggagtcaaatgttctggagagatctaaatttaatacaatctcatagggagcaaaataaggagttgctgtgataaactttttgctttgccaggtatgggctacaatgattggttgaaatcatccaaaaatgaactaaaatcacaaattcattttcacagatttattgttagaacttatgttgcttccttaagaaaacgcaactatattaactcttggctatggcagtcaagaataaaacagtcaaggggaaaaaaaacagtggctaaatttataaagttatgtgtatttggctttgaaatatttttggaacatgaaactggcctcgcttaggtaaagaatcaatttgccatgtcttgtaacatatctatttgaaggcattgagaagagatcgagaaactctcaaactgaatgtacttgtgataattatcaagccgtaatgcaaataacagaaaggtcattgtcctattccttgcacgacatctttctcttggtaatttgaagaacagggtctttcaattaccttttttgccttcctactacagcaatacctcacctgtgatgaatctgtcctctggcaaccttctctgtcacaaaccatctgagaagttaggaagtaagcaaataggcctttaggttgccaaaacagagacccaaagttcaagcactacagtgaatgcacttgatttcagaggaaatctctttagacccagtacatcctatttataattg

SEQ ID NO: 17372 - DNA, 1084 bp, Homo sapiens
ctaatagctatatggccttaattatgggtagaaggggaggcagcattatgtcaacatctgagggttatgcagatgttaagtgaaatcaggtgtgtaaatcatttagcctggtacctagttgatgtggtgattcaaaaaatgttgtgtgccccccaaaccaccaccactaccattcaccccttgcctttcttgcctttaccttgtgaccagaatttctacaattctgaccagaattctgcctgaagactgctctatatggcctcccttccacttcactcgtatgactgacccagtggaggacatttaattagatttatttgagggacatagtctttgatgaaatttcatggcctttactgaagcaccatggaaccagttctcaagtgactagatcccgaaaggcacaagtcacaatgatctcttgtcaagaaatttccatgggagggggtacaaaaaagaacaaaaagaataaaacagtatttcacagcacagcagggtgactaaggtcaaaataatttaattgtatattttaaaagaactaagattataattggattgtttgtaacacaaaggatacgtgcttgagggggtggacaccccattttccataatgtgattattacttattgcatgcctgtatcaaagcatctcatctaccccctaaatataaacacctactatgtactcataaaaattaaaaattaaaaaaatttttccatgggcgatagaaacatgggtgccatgaactaacaaagcaggaattaaataacaattgagcaccatgatgcatatcactaagttacacatgattaataagcaagtaaatagtccaggtaataagagcgcagaaaatatagagaaagacccatgtgagagtgggaaagagaggggtgctggcattgtgctaagctgaatcgggggaaaagaagacattgaaatgcctaaactcgtaagataattaaaagtgtccattccaattctgaatgtggcacttctgaatatggtaaactagattgaaattaagtcaattttataatcgctaatcagaaagacctttttccttgtaaaatgtgctttctgcttt

SEQ ID NO: 17373 - DNA, 1051 bp, Homo sapiens
ctggttggctggctgtgtagaatagagagacctgataatgtttatggatttgaggaaaagaagaaagtagaaaaggaaagactgatgatgcaagggagagaaaagatgatcaacagtgctgagaaggacggttgttttagagaaggtgcaaagatggtaagggcaagggcagatataaagagtctagaacagcgttccccagccatttctaaacttatgcactcatttcatagtaatatatattatttgaacatttttttaaacatctaatggttttgcatgtaatgcaaaatgaaatgagttaaagttttaaaatgtatgcgtcattttagataagtgtatattaaagattttattacaaaattaattgaatatagtatttactaatattcatggattataataataaattctgaatgagttccatctaaaaagtgattcccatggtttaatttactttaattatgtaagaaatgaccatttatgaaacatacattaaaatgacatctattagtgtgcttagtttggcaactaaataaatattgaactgtaggttgaaatttaactgtgtctcatagtatcaaaagtagtcaaaaacagacaaaatctgcctttacaactaatgctagaaaagcttacattttgggtaaaaacatgtgatttatttttattctttgtttatttctagtgaaataaaagaggatttctggctgctattagtaaacacatctatacaaaaaattaaaagccaaactggatataagcaacaccaaactttccattattaacattgatttttgaacttaacggagagatcttaatgggttatgtgacaggtaaatgcaattctgaaatccagtgaagaatactttgacatatatttataaagttatcatcagatgcacagtctttataaacttttcaaattttacttcagaattcttctactatttgtcattaccaaaaacccgctgtgggtaagaatcagacaacttaatcaattaaacaattaaccaaaaataaacattttaaattgcctcgtcattcagtt

SEQ ID NO: 17374 - DNA, 1034 bp, Homo sapiens
ttaaaaaatttaaaatactgagttgaatgactgacaagttcaaaatactctcagactaatctttgtaccaaagaaattaaatctaacaaagtactttttatctcctcaatgggggaaaataggatagcaaatcatatttccccctcctatctttgtatcaaagatggttaaatatttctttccattccatcatatcttcccaactggcaagataatacttgggaaaagagtaggtagaagggaaaatgaaactggcagctcctgagatccacagggcatcatttggcacgcacttctttgaggcccacccaaaagtggttaatcagagagtagggacgatgtcagattacattagaggcagatttctctatgtgtatgggcaaatctgagacggccagtctttcaggtctggagctgtggttgcacgcaaaatgtgatcctaaaaatgaaatgccagtatttaatccttccaactactcagcttcctcattattctcttgtgggaattgtggttgctactgactcaaagttgccccccgtttgatgatgtattcattgctagagttggcccccatgtccccctcaacctggattccagttgaggatcctatagtgagaattcaattaatctcaagataaaatccagcaacaagaacttttaagccttgaaatgcacaaagctatgtatgtatttatgtgtgttgtgttgtccaccctcaaacatagtccaggctggcctctgtaaggcaggactcttcagtgtgttctctcaggctctccttggggaatatttcttagcagagtgcatttttgttacatgaggccatagatgcatgtggctactgaatcaaccattttgacgtcagttagttctttccagttgtcctaatgactattcattcagcatttgattggattagaataggttgatgcagttcaactgaatcaaggtgtagcaaggagaaaacccactggattgtaaatctgaagaacggtttgagcctcagctcaggtgctaacttgctatgtggcat

SEQ ID NO: 17375 - DNA, 1050 bp, Homo sapiens
ctgaaactcaaaggaaacctcacagtccgtcccactccctcaccctgaaggaagataaaatgtaatcagattaatgcaaattccctgaaaatggttaccctttaaccagtagacactgtgctcttataaggctctccagggatcctgactcaaaagggaaagagaaaaacagtaactatcttccatgcaaagaagcaggaagcagttctttgaactgggaaggggtaagggtgggagaattctgtttttcgctaaagggagctgtcagttctcaaaacacttagttcctgaccccctaccttcaaggccccgagaaagccaaacagagaatctgacagccagaaaaatttgtacataaggcattaaagaatactcaatatactttaatttctagccctgctaatccatcctgttgtcaacagcaaaacaatcaaatacagccagttgtctgcaccgaggtaactgggctgtagtatggggttaggtttgccacataacctaaggtaatgcatggcagagggcactttaaggggcaacggctctttggaactcagtggggggtgccctttcgttagaacagggaaagaaaggcaggtccttttgcatgggaaaaaaaaaatcacaataacctaatccctttagagagccatcagacccgtaaagattaaaaaacaaacaaacaaacaaacaaacaaaaacaaaaacctgagcccagctgttcagtaagccacatcagaaattatgaagcacattgatccctcagcactgagcattggataattgtttcttgctgaagaaacagctacctgtgatatgtatcaataccaagcctgcgcagttgtgttacatttttcttgccggaggctatagcttgagttttaagtcaattgagtctatacactagaagctcatattgactattggattaaacagcacgtcaatttatttttctgggttcgatattcaaggatgcaagagagcaaagagatcctccagatgtgcttttgtgaggcaaccgtaacccacttacattgctgtgatgctttttaa

SEQ ID NO: 17376 - DNA, 1004 bp, Homo sapiens
acattttactctttatttgcatgtatggagactttggattgggtaatagacaaaacaaatgattgttgcagagaccctagattctgtttgtttctctgaaaataatttttgctttagcaaccactcgacttgcctggactcaaattccagctctgttgttcctgcggtcgacagcagataaagtcacttttctgttcttttagcttccagctgcttcttcgtattgggtcccttggagtctccctcatgcacatatatttttgcagccagccgaggattgggcagattttgtacatagattttgcagcttgctgcctctgcagttcccacctttccagaatttctccccttatgttcttgttccttttctgacttatttctctgacagttcaagctatccagagctgaaagctaacttgggagtgctcccagacaaaaccccacaaattcataaattttacttggtgaaggttcatgtttcaggggacagactcccttccagttcctgttggacttttgactgcattccattgccttgaaaatggtttttaaaaattattgtgtgtagataacttaactgttatctgtaaggggttagtagattatgaccaaaagccaatagcccttacatttatatttagatatttcaaaacactttgtctccgttaacacagctctgggaggcagaactaatattatcaagtctatatcacagatgagatgacctagggaagttaagtgacttgcccaagtagtaactgaatcaggcctgaactcagagcccatgacatcagcctgggctcgttctacaatcagttttatgtacgtttgattctaaaagagccagactttttgataccaaagcatctattgcattttcttcccaataaacaccaccaaacaagcaaaagacaatgaaacaatagacagtcctggattttgaagctttttgggggggcaatgggggggcgtttctagggcctctgaaggtcatagacatttct

SEQ ID NO: 17377 - DNA, 1060 bp, Homo sapiens
acagaacccagaatgaaacctccaggaaactgtacatactttcttaggtcttctctcagtgtcttatcttttgaggctaagcagtaaatgaaaaccttaattgatttcttgccttattgaatctgggcaaagattttcatctctgtagacatagaaatatttgaaaaagacaacaacaggtgaatattatttcaaaagtaaagaggagtaaaagacataagccaccaggctcgtgacatgcacatacacacatacaccccacgtatacacatacacacacatgccacatacacgcacataaacacacacacacacattatgccttaaaaggcaaggttcttccttcggaacatggaagccagatacttgagctatttgtccttggcaaagcttctgcaggggaagagagagatgggcctcatgaagtatttaggagaattcccacccagacagagtcacaatgaacaaatgaaatgagcctctttacaggaccaatagccctctgtaaagctagaaataatgacaaaatactaatggctaccacttctttggttcctacctgtgctgtaatggagcccaaacactcggtctgcatattaacccatgagttgggaattgctattcacatacgcagatgaggaaattgaccagaaggttgtaacggttgacccatgatcatgtagcctgtccttgtcagggcccaggtgcagaattgggtctgtaaggatccagcacttgtgttctctcaaatcttccctacttaacagtggtgcctgtttttacccaacttcccactcccaccaagcattgtacagtagctctgggctctggtgccagaccattcattgcctagcaattagatctggagccagccacaaccctctctcagccatcattttccacatctataacatcagtaattcatttcctacctagctaacgtggttgcaatgtcaaataaaacaagatgaaatatatgtgaaaacagcttcttacactgagatacaccaccatcatcatcattatcattttatattaacaaattttataccatacagtt

SEQ ID NO: 17378 - DNA, 1024 bp, Homo sapiens
atgactctggaaggagtcactggtggaggcctccagatgtgtgaagtttcttcctagtcaatgtggggatcctgtgggactagaactcaagctagagatgtggccagacaactattttttggcagaatcgggcccatgtggaggtggaagttaaaacctctaagacgtgacctcaaaggtcctgaaaaggccctctgtcaccctcactgccccctgctcactgatacagggactgaggagggaatcgtccatcccggtgagatgtagagttgaacaggccggtgctccgggcagcagtgacctgctgaattccattagccctaaggtataaataaatgccagtggggatgaagccttcctgctgcaaaactcctggaggcatctcctgtctccaggctggcagcagtccaggtaagcgaaggtgaggcttgaaccagagtgggccagaagaaaggcatctcctccctgataggttcttactgaatgctctgtctgactggttctctcactggctccaaggcatcactccccccgacccatggggtgtgcaaaacttcttctgaaagttttagggggagagggacacctgatgtcttctttgcaggatttctggaaacccttaaatgatctaagtaaatgagcaactctttggatattgcaagatgaaagtaaatgagttgccctgagaccataatgaatgcaaatgaattctgcacctttacagaggtttgagagagcctagagaactactggtggagagccgttgtctgatcatgagagagaatcaaaatcaatgggaatcaggaagaagagagagaaggaaaatgtaaagaggtggtccttagagaagctattaacgaagacttgacttttattactttcttccgaaggttataaagaaatatcccgtatggtttctgccccagtgcctcccaggagctttctctttgagggtcacagaggccccatgcgcctgaaccaggcagagtggtgcactctcccctgtgtgggggctttcagaggg

SEQ ID NO: 17379 - DNA, 1032 bp, Homo sapiens
taggaggtagtatccactctcaagctgggatgtcaggagagaatgagccagaggacacaggtgtgaccactgagtcgtgagggtgacccctgcgaggcataccatcccatctttgtcctggctgttctggagtgagctctccatgtaacctcccctcattagaagtttcaatagaccctgtcaaatgctccagcttcaaggcaaagaagactggattggaaaaggatgagacccagggagtgaaagagaatacagtaacatttggaaactagttgttcattagaagagagcggaagacacagcttatttaatgttccccaaactgtaaaggcccttcatctgcttctctttcactatcgcctctccaggtattctcagtctcctcgctgactatacaagtgcatagctgtgtgtctatgttgaattggggtttctctttttgatggatccacacacatacacacacacacgtgcatgcacacacatatatttttagcaacaacactttactgtagagaactaaaatatttctgttccattaaattgaggtgtggtccctcatgcccaagaaaatcttgagtgttttgtgaatcaactagacacttgccatgtgtttctcatcacattctgtgcctgttttcttgtgtaccctagagcctccaattttaagagaataaacattccaaagccattagtatgcttgtatgaattagtagctttgaggaggaaaaagctggagatgagatccagccatacttgaaacagcttttcttgcctggaagtacttgtcatattgtaaaagttttcaatctgcatcagccactaagacagttacagaagccagggaacaatttcagttgtgtagtgatttagggatttattaaggacaataaatctgccttagttaagaatcgaagagctataatataatattatgcagcgattaagtgtaacattttcaaagaatatttaatgatgtggtaaaatgctcacgatataatgttaagtggaaaaatcaatatctaaaactgc

SEQ ID NO: 17380 - DNA, 1045 bp, Homo sapiens
gagagaagagccagaggaggctatgaaaaggagcaggcatttaaactccatcctcaaagtcaagtgcaggtttgccagttaaagaggggaagatattcctggtggagagaataaccaaaaaaaaagtaaatgaagatgtgaaagtgtgggctatgtttcctgtgccctgagcagagtaggtatattagggtgaggctgtagaaagatgggccagcccagctgaggaaggacttagtgcattatcctgagatgtttagcattcagggtatgctttaagattcaatccaacaagtgcaccagagacccaggaaaagcaaaaagagacattcacggaccttgccaaaatggagaactttgccttccccagcaagacagggctgtgccagccgttctgtccctggttctgactcagcctttggctttcttttcatcagtcatttaaccctccgagaacctggcttgccacggtcagagtgtgaatcttgaaagcgtccttgacccctcctgacaactgtaaagtcatgggaagaattgctcttgtaactcatcttgcccttgggcagctagtggacatttgaccatgacacgtgtaacaagaacagttggtttgtgtggctgcagcagccacatcacagggagagggaaagagctctccgcctgggagaaaaggccttgggaactgtgtgggctctaccactctgatactgaatgaccttggacaagttatttctctccaggctccgatgtcctcacctgtaaaatgaggtacctggactttatggctactaagaggccttttctcccttctaccgtgtctgattctgccttgactctttaatttttaggaagttagagtgcaggagactgaccagggagcgtctctgcttaacatggggactctgagatttgtgcatgtttgtgctttgagcaaggaaaaaacaaatcaccaagtggcccagcgaggttgttccttcttccatttccttgcagcagaacagcagggggagggagagcggcagaacccagcttcttggctgagtagatc

SEQ ID NO: 17381 - DNA, 1113 bp, Homo sapiens
acagggctccctgctcagagcaagttgatgggcaggtgactatggatgggaaaggggcttgctggaaaccagctctgctctgtctggcaaggccttaagagggggaaaacatgatcatcaccatcaatgtgcacatgaattgggcacttaccatgcaccaggcacaggagagggtgtctcttaggcatcatataatctgctccaaaccctctcaggaggatatcattattatccccattttagagatgaggaacccaaagtctagagaggtcaagtaacctccccaggagtcatgtggagtcaggatttgaatcgggtaccatctgaccccccgcttaaacatcacaccagcatcttaaacactaccttaatatcctcagaatcaaacctcccatgcctgcaaattagaggggttgagtcatggatgaggaggggaatttcagggaggtatactttgagaactgttccaaagagggttgttctaagttcccttgctggctcatctttgggctggaggagctgcatgttatttcgaccctaaacatgtgagaggcagaatgagtgagggcatcagcctggattcaggtctggatttcttgggaccagctccatgaacacggactgttgattctcctccctgggatttggcagcctgtgcgttagctataccgccatgcttgttaaaatgaccacagggctggaaaattatctatgtcttccctgctcctgcatctttccagggagtcctcttcatgatgacgtctcattagttgctcatttctgtttctctcaatgacaggaaacccactggagccacaggggcctttgagacgcacctcactagccctgaagagattcttccctttgtgtgcaagatgcctcctcctctattctcaggccatccacatcccaccaaccctgatgggcccaactgaaatcccacctcctcaacaaaaccatccttgtgtacatgtttcttcccagctccacattcagagacatcgcaatggtagcttgaaatcaatcactgtaggaatatttacaccacagaaattggcaaacattgcaaatcagacccttatcttcgctgttgttttgcaggctggtttatca

SEQ ID NO: 17382 - DNA, 1047 bp, Homo sapiens
caacagaaccatcaggtttggaagtgtacttaagctaataaaacagctttcaatgcacaagtcctcattaataataaaggctacttttttcaaatgtgcgtccctgtgctaagagcttgagagcttgacatgtaccaacttatactattcacagtgacctccaagggagatgctattactgccattttccagttaaagaaaccaaggcttaactaagtgagccaaagtgcttatctagtttattcacagatacctccagtgacagggaccatgcagttcttctccagccagctctgactctcagaaactgcttctctataaggtgtaatgtgtctccctataaatcaagcagtagttattaactgctaaaattctggcaccatgctaggcattttagatttaaacaaattatgggtgttatttgtatatttatatatatttcaccttattttaagagctatttggggaaaatagaaggaaacttctgatatataacaatggcaaaatataaataagattagagaagcaggatcagggaacgtgtaagtaaaattgaaaactatcatgaccagattaaaaatatactatacatattatatagaacaagaaagagtgcatcaatttatttcgtatttcacctggacttcctggcaaccaaaataaaatgggagacattgtcaattcacagttcttattaatcaaatgatcattaaaacggggtagccattttcttgaaatgaaattgtgagaaaactctctcataggatctcatatagagaatatcaagagatcctggtagctgtagcctcaacaaaatttctatagagtacatattaattatttagcacattgatacacttaggctctaatgcatcttttgttagaacccaagagcagaacattaaaataaacttggcaaaaagggcgatgtaggtcaaatatatagcctatgaactcccatctgtataccctaagaggaaagattctctgctactgctctcagtacttcacatatgacacctgatgtgtgcgtttcttttcctataa

SEQ ID NO: 17383 - DNA, 1049 bp, Homo sapiens
cttcccttttctcctaatgatgtgactaaatcatttccttttgaaacatcccatctggcagacaataaatgacctttcccatcttggactttgtagtttgtacttaaccaagtcaaaaagcgccaaatgatgccagttgtattatggttgtgaggatgtgtgatagtgaagcttaacccacagcaattaaagcaactcagaaaaggagctgtctattcagactaatgaggaaaggctatcttgttctttttaggaacaactaaaataattctgcagaaaatttgctttactggcctttgcataaggaaaaacaggctctggaatagaagctagcatgaccctgcttctcccactctgctatattggctgtattagggaaggccttaacagcatctcaacaaagagtttgactttgtggtctgacatttgtataatggatattctgtacacacattccctggaatttgttgatttagagattactcaaactccatcctgataaagctctatttaatctgggtttacttagtcgttggtttagtttgaagtgcggggagttgttttggaaagtaggttgctacttgtggtgaaaaggctttttgctgacgtccttacctggtggaatggtaagaggtggtttcagtagatggccaagcattggatcagatatctgtcaacctaacttgaagagaaagccatgaaagaagtgtggctaaaaactgctgggttatgcttgctcaggaaactccctgtctgggtcacttaccttttattactaacttttcactcagtcactatactggatttcccctttttcctctcagaaaattagtaagcatgtcatttcctatccacatctatgcatttcaatcagataagagctgtgaaggtaccacgtccatgttggaccatatactaaacattggcttattgcatgatgtgcttttgacatgcccaggtagctgaatgcagagttccatgctcttcatattgagggtgtttgaaactggtatatgcagttacttctatgagatcttccctgggagata

SEQ ID NO: 17384 - DNA, 1028 bp, Homo sapiens
ggtcccctttgacccattactcacttttttttttttttttttttttttggagatggagtctggctctgtcacccatgttggagtgcagtggcatgatctcgggtcactgcaacctctgcctcccaggttcaagcaattctcctgcctcagcctcccgagtagctgggattacaggcacacgctaccacgcctggctaattttttgtattttagtagtgatggggtttcaccgtgttgcccaggctggtcttgaactcctgagctcaggcaatccccccacctcagcctcccaaagtgctgggattacaggcatgagccaccatgcccagccgacccattactcacttttgcgaaatagctggctgaggttaaagatgtcatccttggagaatagaactgaatgcgggtccacattgggccaagaccttctgtcttatgctcattagtacagtcctctaaaacagtggctgaaccttcacattgaaaatgtaatcctctcaaaaccctgatcaagaaataacatctctttttaagtatgaccttgatacagcaaagaacaagagtgcctcagaagagtgactacaagagccagaacaagattgaatagaatcagaattgacgttcctaagctaactttaaaagtgaaaaaaaaaaaaaattaagaaagacatgtgagaggttaaaccccaaacctgacagtgtacttttaaaatgtcctgcagaacctggcagtcttcctcagcaccctggtttttgccccagcatcctagcaaagtcacctttctttctaaaccactagttgaagggccaagtctcaaaataagaagatgctactatgcatagctacttggacttgatttagaacatgatgccagcaaagatggatacaggtaccctgactccagctttcttgatttgggtgaagcaattacaaaggagagttcatgctaaaaataggaagttgttattcaaccattctatgaaggcagaaaagaaaatctaataaatttgaccttcagtgagctgca

SEQ ID NO: 17385 - DNA, 1145 bp, Homo sapiens
ctttcctctccacctctaggcaaggcagttaaggcataaataatattttagacagtcatatgttttggtaagggggcagtggaccacattagcctgctaaatccctaatgactctccagggcagcttcttatcaagatgaaatggaatttgatgctccatgcacgcaaaggctcaggtaatttgaatctggtgtttaatccaatatgaacatcctttgtataaaatctctgccatcaccactttaggaaaattaatatttatatcaaacatcttctgtaatgagatatgaacttttgcccaccaaaattctagctcagattttagatttgtgtgctcccatagtcaggtttctgaataatttatttatccaattgaagaaataaagtagacgaacaatttcaaaggagacattgaatcaaagcagttggctaattattctcatttcaaggtatcctggattagggaaaaaaaaaaagactctgaaatcaagcatgcctcataggtcattttgagtattagttatgtttacaaagctccttataggataaatcatggaaagtacgggacataatatgattatatttggggaccaagtatttatatttgagaagaaaatgtagcagttcactaggataattaactcttttagaacagtctctatcttctttatgttcttctcttttctgtcatactgtcccccctttctctagctaactagctcttaccctttaagattaggtgtgacctcctccaggaagccttcctgacctccagtcaggctatttcaaaataattagtatatgtgcatctctgcctcactgaactatagccccctcagggactgagcaaagtgttctttccaacattatttaccaggcacagtgattgtcacatattaggtgttccataagcatcgacttaatgaaaataaatcctgggacattaggcctcactgttgcattgtgtttgaggaggtacgtgttgtcacagaactgttggaacaacagctacaatcatagcccttgcagttactagttcttccatgctgaaggatgacaggcacaatggagtcctcacctgcctttcttggcaaagttcctgaatgtggttgctgagaggattttagtcttttctctgcagtgag

SEQ ID NO: 17386 - DNA, 1048 bp, Homo sapiens
attcactcttcatcctctgactcctcacacatacgcatgattaccttcacttcctggagagaagtggagggccccagaaatccagcttagcctccgagggagaggggctttcagtgaaggtgacccagattccatacactcaaggcaaacatgttctgaataggaccccacatgttcatttcagtgttctccagagtgagttctaggatccaattttcttactgtttttttaagtctggcaaactgaaaatggacttcttccagaaggtctgtcagagctcaagccttacttgacaaatccaggaagatgccttgacagtgacaggactcagcctgggaaggaacttggcagaccgggacaccttcctagaatcaggcacccagtactcggtttgcctgctttctcttttcggatctcacttctaaagctttgcatatcttcacaatgtatgttatgacggattgaaattgtttaggcccccattactccctgcccaggcgacttgctccccaagccctgctaggtgcagcagcttccaagggcatctgtgctcaccctgcccaggccccttccgcccttgactctctccacagttatctttttaagacgtgtgcctcatcatgcttcttcccttgttgaaatcccagtagcctctcagctcccctcccattcaggaaagattccgggctctctgcagtctggccttggcccacctgcccagatcccacctcttcaggtccacacttgttcaccatgtccagccgaacagtgttgcttgcccttccccagatgtgccagcctttccccatcctcttttcaacgcctaggaaagccacctccctttcttcactggctgaatctttgtttgcaaaggttctgtaagctgtgagggcccctccttcaggaaaagttacctgatacggtggtccccttgccccacgctggggtggaggctgttctaggatgaggccaggccctggcatttaagttgtatgatgctgccactcatctgtggctttggggggccttgtttgggatttctctata

SEQ ID NO: 17387 - DNA, 1059 bp, Homo sapiens
aaaaaaatactgtaaaccaagaattttgtatcttgcaaaattatccttcaaaagtgaatgagaagttaagaaacctccaaataaataaaaattgagatagtttgtcactatgacacctgacctacataaaaaaaatctgaactcaataacctaaactccaccttaagttactagaaaaagagaagcaaactaagcctaaagcaaacagaagaaaagaataataaagattagagttgtgatcaatggaatagataatagaaaaaaaatcatcaaaaccaaaagttggttatttgaaaagattaacaaaattgacaaacctttagctagtctgatgaagagaaataaaagaaagtagtaaagttattaaaaaatgagagaagggcattaccaccaattttacagaaatacaaaaggattttaagagaatataatgagcaactatataccagcaaactggataacctacataaaatggacaaagtcctagaaatataaaaactaccaaaactgacactcaagataaaatagaatacatgaatagacttataaaagtaaatattgagttagcaagaaaaaacttctaacaaagaaaagctcaggaccagatgactccatcaatggattctaccaaacatttaaagaaaagttagcaccaatccttctcaaaatctttccaaaaaaatagcagagggaacactttctaactcattctgtgaggtcagtattaccctgatacttaaaccagaaaaaggtatcccaagaaaggaaagctacaggctaatatctcttatgaatataaatgcaaaaattatcaacaaaatactagcaaacagaatccaacagcatattagaagggctggacattatagctaatgggaatttatcccaggaatgcaaagtttgttcaacatatgaaagtcaatcaatgcaatataccatattaatacaatgaagaggggaaaacccatgtgatcatctcaatagatatagaaaaaggatttaaccaaatctcacatcctttcgtgataaaaactttcaacaaactagaaatagaaggga

SEQ ID NO: 17388 - DNA, 1041 bp, Homo sapiens
cttctgttctctttgttttgaaatctgtaatgcaaaaataaataaatgccacacagcttagataaccactcttagtgacctctgtttatctgaggtagctttcagagataaacctgtttgtccagttcaaacttggacaaaacattgaatttttaatatgcccagactcatttcatgatgaacccaaagttttaccaagttacttagtgcatttataccagatgagggtaacacatgttttttgccccttttataggtcttagaatttttagatagagattatattttattttcctttgaaaattatgtatctaggtaaatattatagggaaaatgttttatcaatttacctttggtgtacagggatccaccccctaaattgtctttatccaagctactagtagcactgtttgtgggtgtctaagaataccaaatgattttgctgatggtttaaaagattgcagttaggttccttagaaaaaggagttggactggttgaatgagaattaaatgcggtactgatcataacaatgtatctacaacatttaaggtagatcccaggtcttttttttttttttttttttttgagatggagagtcttgctctgtcacccaggttggagtgcagtggcgtgatcttagctcactgcaacctccgccccctgggttcaagcaattctcctgcctcagcctccagagtagccaggattacaggcatctgccaccatgcatgcctggctaatttttgtattcttagtagagatggggtttcaccatgttggccaggctggtcttgaactcctgacctcaggtaatccaccgaccttggcctctcaaagtgctgggattacaggagtgagccgctgtgcccagccgatcccaggtcgttaacttgctttgtaagtttcttagccagtctataaaagggggacagtaataccttccccacaataatgttatgaaggtcagtgagatcccatatgtgaagtgcctgaggaagaatacttgggacatgacacatgctagaagaatgcacagattt

SEQ ID NO: 17389 - DNA, 1035 bp, Homo sapiens
ctgatgatatcacagtgggatgtggtttttgccttcctaccttgcttccatgttactcagaggtagctttattggttcatatgctgcagcttcaacacactgacgctgcatcccttgggaggtgaaagctgacaggtaagcttggcacatgaaccagaagggaactgaaacctctcagggtggccagatgggagggccagccttcctgggactaagtcctccttcctagatgcaggtactaatgtcatgtggacatggtttctatttccctcccattcattctattgaaagacagacatgaaaccagtcagcccgcctcaacagcctggcagagaaaggagctcatttggtggccaccagctccccagctgccctgcctgttcatggctgcccccgtgggccacgctctgtttgaagttggctgtctccactctaggactgtcttctttcctcctgcccacctcagccgactcttgcctggatctttgtatgactgtgcctttcttgtcgttctgttcttggtttaaatgccccttcctcagagagttcttttttccttggccacatagaagtaacccctcagtcactctctgtcctattccttgatttaatttttgtcatatttcacactatcaaatatttctttcctattaactggtgcttttacagctgttcactcctcccactagaaagtgaactctgccagcacagttaccatgttggcttcccctactgtatccctagtgtctaggacagagccggcactcaggagatacttgttgaaagagtgactccacaatctacccatgtggccttgggcagccgtcttgacttctctgaattttgattgcttgcttatagtggtagatataataaatgcccatctcccagcggcactgtaaagcttaaatctatttcaaggaaactagcccagcacatcacgttagttttcttcctctgactcttaacatttcagcttcaaaggctttgtgctcctcttggagcccttaccttactcagccaggaagcagatta

SEQ ID NO: 17390 - DNA, 1090 bp, Homo sapiens
tgcaccattgaaaatactggcatgaaaacaaagatggcactctgaactttgagctctgttcttaaaagcattgggaaaaagatggtgcctataaggtcaagcccagcagccacacacacaatccaaacttatcttcctgcggtaccttagcatgtgacacaattgccgtgccccgttctactcatatacattttttcccacaaattaatgaacatgtttgtattaattaatagctgcctaaatttgaagtctttctttgtcaagcattttacatgcaattagctcactcagtggtcccaaacaccctgtagggaaatttattttgttatcatgattttatagacaggagaactcagtcaacatagtcgtgaagtaaaatgtcccaaatcatagagcctgcaaatggttgacctagcatttgaattcaggcaaaatctgatttagagccttcacctttcccactctttacagatgccaccctgtagtcccttgtgtaagtacatcctgtcagcctttcaaggctcccttgggtcagcacatagctatttgaccaagggcacttattctgagcagagcaccatatgaagcccatccaggtgatataccattcatgtatagtgcccgccctcaaaatcccagtgcaccagtaagaagaaattggatgtgtacacaagcactctcctggaggctagaaccgcaggtaggatgttcatacatccctgtttgcataggacagtgtgttttcctgttgtaattattgatagtgcttccgtgcatctcagacatgccctactttggattatatcattgccctcaccataggagaagtacatcagaggattttaaggaagagaattgtgcatctggtccggggattgcaggcaagatcctcttcatggagaagatttatgcttaagctgttccttgagaggcagtgttgttctgtggctaggagtgtgggatccagggtcaggttccctgtgtttgaaccttgatcagcctcaatgtcctcacttgtacgattgctagaataatcctcttgcctcagagttattgtaaatattaagaactaatactcataaagcatttg

SEQ ID NO: 17391 - DNA, 1612 bp, Homo sapiens
tcactctgtcctctaattatggtttataaaatgtactgtgttgacttttgccatcacagctgccctcgaggttgactctggaatgttgtggctggtatgggcttgatacattatccagcactaactccattcacactttattctgaagcgagaaagagccccggcaaggtgatctgacgtgcccacaccagacggaaggcagttcagcaccaggacaagaacttggctttcctagcattttcccagtttcagtagctaggccaaacgtgctctctattctgcaatgctggctcatgttttaccattttcacaggaaacctgatttgggaattttaaatggaaaaactgtcatttagtgttctttttcttttctaataacaatagttaatattgaccacacacatgtgccaggaagcactctaaatactttatacccatgaaccatctaatctcctcagcaggcagatatctccatttcaaagatgaagagactgagcctttagaaactttcaagggtgtttccaaggatatacagtttaggaggacaaagatttcacccaggctaatctgattctaagatattattttacattttattgcactgttggttgatcatactaatgtacaaaaattcattttgtacagttgcaaggtcaagtgatcttaagttaattccttttcacatttagataatgaaagataaaatgctttatacatttactgtataccaggttctaggtaactgtttcttttatcaagttacatttttatattccagcacgttctcactgggcagtggcttctgtctgccttttttctctatatcttttatatattcttgctttttataaaataagataatctaaaataaagagaagccatgttttctgtggagcctgaatttgtagttaggaacatcagcagctccacgccgtgaagggttcagatattattgagtctccaagggaaggctatgttgctggtggtgccattaagtggcgtgtcctgatttgtgggcttcacagggccagcctggcaactgcagttgtgttctccaggtcagggagcacactggtgaatacgccgggtctgtgagttcccactcttcatgccttatattgtgatcttttctttatgtggtgggatctcaggaaatatactccaactgtgtaaattctgtcattttcagattatcataacttagaaaaaaaaacaaatatagaaaacaagagttcatgtgaagtgggatgccttattctaccacgtgcttcatcacagactatttctggggagcatgtccctgaaccttggtagtgagcatggaaataccctcactcggggatggagactgctttttcaattggataaggcactcctgttgcatgcctgtgcagttgggagaggagggagcgtaatcactctcatcactccagataggaatgctgagcatacattgaatacataaattaatatacatatgatatgcaaatgctcccagagagtcctgaaggccgcccatctgagaagcaggggtcacagacatgctatgcttttacccaagctgtttcctctgcctgaatcactcgccctgctcttctctacttggctcgct

SEQ ID NO: 17392 - DNA, 1032 bp, Homo sapiens
tgatgctctatctctgtcctttttttccatccctatcacaagagtttagaaaaaaattcaacaatgccaatggagttatgcattttttacctaattcctctgaaactgagtaggtaaatcagtaggagatgaactagtcgacgtagctactattaagagacccttgaaatccttgcacgatacttggtgatgggagtgggactgtgactggttaagagtgagagagcatatcatgccatcaggggaataaagtcaggcttatgtcatggagaaagctttataaactcaatgaatagtatagtactgtgtctacgatctggcaatgaaataagtgatttaaatctccttaattgatctattaatagtatcactgttatacatttccattttttaaatagtaagtaccttttatatgagaatttgaaggcactgtctaaatgaattggtggcatcatttctgatgctcacaaagataagatatgcaagaggatggtcttgtaatagtcgtagattagagctagtacttttttttttcttttgggaaattaggaggaggatggtaataagtctgtaattggttagtaagggagttttgggcacgtgaagctaagaaggcagagtgggaggcatgtggacttagtcatttaatcacttgtacctaccacttgtggaaaggtaggtaagttattcattcatatggactctgggttttcttatttcttaaatgaggattaaagagtggaccttgtagagctgttataaagtttagaaatagtatattagaacaatcagatcattgtccaatatgtggcagacatttaagcccctgattccatgagataggtaggcaggtaggtaggtaggtgggtgggtgggtggatggatagatagatagatagatagccataccctccttcaaattgtccctgtgtaggctgtgccctggttgtggtacagtttctggccattaatagagtataagagcttttacaccaaagtcagagaaatgtggattcaaagcatgactttacc

SEQ ID NO: 17393 - DNA, 1046 bp, Homo sapiens
taataatggatgggtataaaatacttagcagcccaacgcactactaggcactcagcaaaggtatgtcgagtctacctttcctgaattaattcttgttatgtgaagttgcttgtggataaataaagagcatcatgcgaatgcttcctgtagtcaatctattaaggctggctgactgaggaagtcgggtggaataatttatctagtcccaggaccttcatcccagaggtttcatggcatcttctgccggagccccacagctgaggattgcccctgggaagtgggagtgtgtgtgccaagccctggggtgcactgggcttccttcgttacacaagtgcttccatcaggcccaggcagtggcggagggagtacagcagcgcttacggacgcccattttgatggcaatttggcagggagtcaaactttggccctaaagcagaggtggtgcaattagacagctgagatgcattctctaaacacacacttttaattgatttcagcttgttcagttcacaaagatagagctctgacacatagcagccttcttagaggggcttatttttacttttcctttattcagcagcgtaattcaacggcaacagaagcaacaataatgcagagctctaaagagtgcgtatttggcatggctcggatacaaaaagtattattaagaactaatgagtgagatagttagatgttaaccggaaaagcattaatgagcagaagagaattctggcataaacatctgtttccgaagcagatgttaccttgtaaatctgctgaagaaaagcctgtgtaaatggaacagtggactgttttaggtattagcagggacagagtgagatcatgaggttttcagacactgttttcagctcttctgagactcataaatgactgcgtgtgtcgaggtggtgaattttggggggcgttttgggggtgacaaaagctatcaggcaggggtgaataacagtggcagatcacaatgagtgtggctgtgtgacatggtagctggagaccactgattcctgtttcaccgggagagatttggg

SEQ ID NO: 17394 - DNA, 1073 bp, Homo sapiens
gacttcaacacccagctcatgctgtcatctcatgttcatcttccaaaaactccgaccctcacgcattccttttttattttctttttgtttcctttttgcgcttgatgtcagtattataggtcgcccagtacatggtagtcagggccatctttgtttcacatgacaagaggaactcagccttaacacctgctctgtctgccttggaaaagaaatgaagaaaatactcgtttcaaaaaacagttgggagttttaaatgtggattttatttcctttctgacttgtttttatgaaggaaaaaaaaaatcattcctcctccctatttggcaggggtagcgtcacccttgaggagagtgtcacagaaggaaaacgcgatcccccaccattgccgtccggctccaggttcctgagctgctctctctcacctctggctgagacttttttttctctttcccctagccatctttcttaactctcggggccccgtgcctaaatgacctgatctgtgaaatggagatatatagtcctttcattttaagtcctctatacatacaaataagagtgagaaaatctgctgaaactgaattttttaaaaccctcttccaaatcatgtttggttgttttccttaataaccagagatgcaaaagaactcactcattatgctgtagcttttctatttctcaccatggaaaataatcccagtacagctcttttgtgctttagttcacagggcctttaccgggctttatcttacgagagcctcacaagcgccctgtcaagccgagagacagggcaggcctgaaggctcagttgaggaatcaccttccttaagaaaacttgaaaccctgacattcccccacccctaccctctttcctttccaatactctctgtatatctgtattaatgttcccaccacactgtaggaatatctgtttgcatggctgtttcttcccctacactatgggctctttgaggatagagaccatatctagcatttctctgtaactaatgcccagcacagtaccttggtgtcaaaccgaatacgcctttgttgaataaatgtatgagtcaatg

SEQ ID NO: 17395 - DNA, 1516 bp, Homo sapiens
ctccaatagatttctaaaatttttttaaaaatgcattattctggtttcttttttcctttctcatgctggtcagtgggattaaaatggatcattttgccacttttctagattttcttttgctctctgggtgtctctcgctagtcctaagcaattgtgttggattttataacagggcagaagattacataacatgtgtattggctttaaatcattccagtcacaaattgttctgataaatacttcattccaaattctacatcgattacaagcttaactgatcatgaaaaatttattctcagtaacataggttgaagaacctaatgtataagataaatctatgggatattgcattaaccccagaagtcaatattgcacctctttgtatggtctataaatatatctctgaaatatgcatacagtgttttgaaatgtagacagaactccttgatcagtttttggctttaaaaataaagaggatttttttgggtccaatttacacttttccgttgtgatactaacagataagggtactgcaaatagaatggaagttggtaggatttagggttctgaaaggaggtttcttgtgtgaaaaaacagcttttcttgacaagctgcttgtcaaggttttcaacagcctctcttttcatttatttatttggtttgagggagttaggaaggtgtttggtgtattttgtgctggcagctcacacgtcaacacaagactaaaaatattctccaaatatgaaggtacaatagtttcttcttttccccctgaccccccgccactgcccagagtaccagcgttaaaccctaggcaaagggctgacccctgataaaactgctgtaaggtcagctctgcgcctctgctatgaggtttttttttctcccatccatatctccacattgctattccttgctaaagttttggggtccccttgtagatctctagttcaccagtggctcccatagggatcagatcattcctcgtcacttctgtctgccattggaacgtatcttccctggttccattgctctggatcggggcattgttttggagttcaagcagataacaattaaaaagtgaggaagaagtcacatccgggtggcaacatcacagaatatatgttgaaggagatggcatttaaactgagtctttaaggatgagtagaattttggcgggggttattaatcaagcacacctacaggtgctggtatgttaagtatccctaccaggcaacataattccttaacctactttaaaagcacctgtatccagagctcttaatggaatcatggtattgctgaaaattttaggtaccgtgttgggccttctgcgtatacataaggcgagtgaagacagaacgaacttttcttcctctgtctttgcatttttggaagtgagcagacactggtaaaatgagaccattgacatgttgaagagaaatttttctctctcgaaaaataagttcaacattgtacattcagtgtactgtgaatgtatatgcacaccagtggt

SEQ ID NO: 17396 - DNA, 1035 bp, Homo sapiens
ctcaacagcattaagaatatcagtattaacaactctgttgccaaccatgttatctttgcttatctgataagagagatgatacttgttttgatttacattttgttatgaatggagtgagcatctttttgtatatggactagccattatttgcttttctgtttctatggactgcctcctactaacagtcatggcagctgtgctgagcttcccagatccctctgtaggacccaagttctcagtcctcagttgctgtgcatgtgggtagcagaaggaactcagccttcgctgaacacactcccctggccaagtcacgcccctttcctcggaataccctacatccaaaaactaaaaggctcagctccttttttaccagtttgggacaactctgaatggccatcgcagctcgagctgcccgtggaatcagctgaggtctctgttgtgatttcatcactgcctaacgtctctgaacagtcctggctcctttccttcctctgtgggtgttgatcctgagaatactccccaataaacctgcacatgactctccacctcctaaatctgcttcccagggagcccagtagaggacaataaccctacccatttttacacaaggttcttgttctttccttagagacttgaagggattctgtttaggagaaattagccttttatctaacatattagttgcagatacttttgcctctttgtcatttgcttttcactttgttgtggttttctttgcctttcagaaatttcgaatgcaatgtaaatttatcatttttttctttctcttttgattgatagcatttggtttttgttccttgcctaatagagcctcccttatgctaagattattgtttttctaatgttcctttgtttccgctaagatctttattttttacatttaaatatttgagccacctgagatttatttttatgtaagaagtgagagtggaaccagcattattttctccctactaactggccagttgtaccaacatatttattagacaatccaccattttcccacatctgaaa

SEQ ID NO: 17397 - DNA, 1056 bp, Homo sapiens
tatatagcctggagtttagtgtttaaaaggaaaatgatggtgctgggatactgcccccttctcttggctgaacatatttcccctgatcgtttttctgatggcaattcaaagaggaagactgaggcagagattccacctcagtcttttgaattctcttttaggaaaagggttatgagtggattgaagtgtattcaaaaggagataacagaaagatgaagacaggcattttaggactatgtgaaattgtagctttctgagctagagaaagacatttctctgttactctttctcagtcttttcttctttataatggaaatcataccacttatttgaggttaccagtggttgcttacaaaatgttttggaagccaaaaggaaaataccctgggaggtaggagcatgttatcgaaggaagtacacatctagatgtagcctggactcccccacattcagttgtatgacagagcactggatacttaacctgtgtgcattctgtgtccatatctgtaaattgggaatgataagacgtaacttgcaggattgttgggattacattagataatgtattaaagtgcctattagtatagtaggcacacagtagtatatcagtagctcagttccctttccaaaagtgttaacaactgccaggatttgagttgaattggtgtagtttgctatgcataagataaatacatctagatttttaaaatctttgtacagatatcctgtatagagaagtaagtttatgacattgagtgtaagataatctagaagatattttagatatagtagtatggaaacaaaaaaaggcttcttttagatagaggcgtataccatcaagatatctttatagataggtatctcaaattcctgttcagatttcctttttgaccattaatatttttaaaaataacacatacagaataaaaaattcaatatactgtaaaaggatatacagcgaaacttatagtttcctatccttctttcacttccagacatactcccccaaagtagccaatgttaataactttagtgcatactttggatatacatgtg

SEQ ID NO: 17398 - DNA, 1027 bp, Homo sapiens
tttgtgttcactctgcattgtgacttttatgtcttcgtttgtgaagacagctctcttcataaccccctaatatttcccagagaattctccatcttttctgtgatcaattatgatagctctaaaatagcatgcagttctgaaattctccacttgccactatgtttcttatcacctctatagtttattcactcatccatttcttcatcaagcaggcactgagcaccagctatgggcaagcatcaggttctcatggcattctcagcaaagtccccttcttcgccgttgtttcatgcttaacatttgcagaattctgtttttcgagagatttttatatttgtttgaaattctaataagaataaacatatttactgaatattaaagctcaataagatagctatagtgtgaaatgtggttcaacattaaaacagcaatgctgtgaaaatgtgtaatgtaacatgaacttgtaaattataaaaaagttatccttctcacctcgtagttactttacgtatactactgtaggctatagacctaataagctagtatctataaacagggaaccgctttatgagcatcagtaatggaagcaggtttatgcaactttgctgttattttttgtttgtttgaagtaggtcctgtcagttcttggattagtgcttcgtgccaggaacatgagagcttatgtggagtgttgatttaagtttgtataacattgtcacatcatttcttttattcttctcaacaaccttttgatgtaggtgtttatttgcattcctgttttataggtaaggaaactgaggtcacacacctggtgatcgcagagaaggaactggaatgagtcatcttctatcccagggtccactacccaatcgtttgattttcagaactatgtgggaattttcttttatcatctgagtgtacccatcttcagatcctcacaaaatgaaaattctcagtacacatacatatttctagttgagcaaacaaatgcttttcattcacaataggaaactgaacctcacaaaat

SEQ ID NO: 17399 - DNA, 1015 bp, Homo sapiens
gtttggtggagttttgtctgagcaagtttccagatgttttataggtgcctgaaaaggtaggtgaacatcaggggatatccccaagagcaaatatacagaagcaagaaatgttagaaccatctttgcatctgtgtgaatgtgcaggaaacatgcattgaagtgtggctgtaatacagggactgtgtaggagagtggtgggtggggtgggaccaccttggagggtcctgaatgccacattaaaagatttcggttctacagattatgaaggacctaacccagaggtggtggttgagatgctgtattaaaagtaacaccttaaatgtggcaggggattaagtgagatctaaatttgaaaggttggttttcaacataagtgtggggaaagctccctgatgccaaccttgctggtcctgaattgtggcacactgtcaccacctggtggtcacatagccaaattgtagggctaatggatttagccagagtcctggttgtagagaaatttcttcataaaaaaaaaaaaaaaaaaaaaaaaaaaaaaaaaaaaaaaatcctggtcaaattatttgcatcctttaaagagttctaaaggcttataaatatctggataaggatctcaatgtttattattaacctgagtgtctgtaataatgtggacacattctttaagtaactcaaaattgttcaaacctagcagacaaagaacattgtcattttctggactatatgaatatcaggatccatctggaagttgaaaagactcaatagctttgagatttgtaatgaaggaaaaaaaaatcttttaaagtaattcctagcaggttgacatttaagagacttaactgctgagtaccgagtgaagagtgatttttacagaagctctcgtttcagctgattccagggcctgattagatgtcattacaagaagaactggattttgaacagagaagcattaggggtgcagccgattctgtgattttgtgtatgtgtgtcactgcagtttgagacatctggcaac

SEQ ID NO: 17400 - DNA, 1034 bp, Homo sapiens
tgtaggcagaggataccaggcagagaggtatcatcgggaccccaaagagccaagctccagattgaaagtattttttagcatcaacgtcaagccagggccttaaaagacgccagactttttttttttttttccaagctgtgtacagggctgtaagagtgcaaggcccagaatggcaagggttaaggcgaagggaggctggattccccattcagttccacagatgcctggcgtctgcaggggacttggcatatgctaggggatccctggggccagtcagaggagtcaggccagccctgccttcaggagtgttcttatgctctggcagggggaatacagcaagttcccaagctcctttaaggtgagatccagcaggatggaggcacaggaaggtacaaagagtggtgtggcttggagggagaaagaaatcacatcaactgagtggatagaaatgagtaataattgagaggtcactccaaggcaggttccaagctagaaatgatcagatgagtgatctcatttaggctgtcagagactttgggaggtaagcattacacccatgcagcttgggctcagagaggttaaacaacttgcccaaacacagctagcacctgctagaactaggactgaatctcggtgttttgatttcaagcccagcatactgtccaccagactgagcagactcctggtgaggggaaccataaaacgcttcatgtatcatttaatgacaaggaaagatgttcaagagaaatagctaagtagataaggcaggttatgtgatctagcgctcattaagacacacgtttttatttatcctaaaaatatcaagattaatatataatacaagggccaggcacagtggctcacacctgtaatcccagcactttgggaggccgaggtgggcagataacttgagctcaggagttcgggaacagcctggctaacatggcgaaaccctgtctctactaattacaaaattactattttgtaattttgtaaaaatacaaaaattagttgggcatggtggtgcatacctg

SEQ ID NO: 17401 - DNA, 1069 bp, Homo sapiens
aattcaaatcctgcctttgctagtgaccagctgaacaatctgaccaaattgtgtaacctaagtcttactgtcgtcacctgtaaagtaaggcggtaacatctaccagaaacgactattgtgaggaatggaaagtatggtatctagagggtgcccagtaaacatttgtttttaaaacgaagagtgaggatatgaaactgtaaaaggatgtgtctgtgcactatccagccccaattacgcttccatttgctttcattcaaggttgatccaaatggctctgctttacctaactaagcattaacaaccacttctcttttgactgctagtgctggtattggtatattgatataatcatggctgtatatttggagcacttacaatgtgccaggattgtgctgaaaaatacacatatatgctctttttatattttcataatggttttatgagagaagtatggcaggcaaaatagcgaagtccataccccaatccctagagcctggcaatctgttaccttgcatggaaagcgaccttgcacatgcgattcagttaggaccttgagttgggagatgatcctggattaactaggcgagctcagtgtaattacaggtccttataagaggcgggcaggagagtcagagtgaaagaaggagatttaatgacaaaagcacaggacacacaaacaggaagagaaagatttgaagacgctacactgctggctttgaaagtggaagaaagggcaaagagaatgcaggtggcctgcagaaagtagaaaacgcaagaaaacagatttctccctacagctttcagaagaaatacaagcctgccaactccttgatttgaagacttctgactttcagaacagttagtagatttgtgttgatttaagccactgcatttatggtaattgatcactgcagccacaggaaaccaatacaggaagtcttatgactcaacccacttgacaaatgaggaaactggggatcagcaaggcacagcagctcaccttgggtcacacagctaggaggcagtgcagaagtaaacacacccacatccaattctagtacacacgctt

SEQ ID NO: 17402 - DNA, 1031 bp, Homo sapiens
agcccaggagttcaagatcaatctgggcagcatagcaagatcccatctctgaaacatgaaagtaaaaagaaatattttctttttgcagattggcatgcttaaagggctgaccatctgatgtacaggaaatggaaactactctctgaaaagcaagtgatctcccagccgcacccatttaggagaccaggattttattttgatccacaggagactaaatgagttagaggccactcctgtatcaacagagtttgttacttaaatgacagtagggcggttcgcagaaggaacaccaaatagtctgactatctaccaagaagagagtgtttgaacacatgtgcaacctcttgactgtggtgtgtggggcagcatttaataagaaagagctaaatctgcttgatgtgggaatatattcaacacatgttaagtgctaaaatattcaaagtaaataaatgtctatgtactccatattgttaaagaaagaatgtgtgtgtgtgtgtttgtagatatagagatgaatttaggaacctttatgatggtgtattaccaaactattgacattggtgatctttgcagggcagaagcctgtggttggcgtgagataggagaggtttttttcattgtgtatgccctcattgtttcactgctacaataacttgtgacattttcttatgagattaagaaataaaacttaaggaaagaagacaagcccaactcagagcaagaaatatgggtctgagacttagctttgtggctcattagctctgtggcctgggcaaacacataactttggtgagcctcagtttcaacatcttcctttctattttattcgagactgggttttgctctgtgtcccgggttggagtgcagtgacacaattatggctcattgcagcctcaacctcccgggctcaagcaatcccccacgcccccacatcagcccttccaagtagctgggaccacaggcacatgccaccatgcttggcaagttttttttttttttttttagaaacaggatctcactatgttgctcag

SEQ ID NO: 17403 - DNA, 1005 bp, Homo sapiens
aaccaagtggtgtgaaaacttctgaagaacaatagaaaaaaaattactaagcactttagttaattcagaaatatttcctggaaaaatttgagttaatgtgcaatgtttgaaaaaccttgtgcagttaagtgcccacgagactgaatctgactcgaggcaaatcacccaattactgtcagggaatgaaatcatgtttacagagaaaccttcagactctcctcctgtttcatatcttcacctgtttttgcttagagcatgattgtgttgcttttgggacctggttccaggtttatgtcttagtggtttgtttgacctgactcccctaacccaggcctctccaacaaatggctaccttgggatacaagaaactgcgtgtaattctttccctttattttgagtgaggagcaggttcatgggtgtgccagcaaatgcacagagactttgacattcacagcatttgataagattggtcagcctggcctgactttgcttgggtacctgggactgtgaacagctagctacccattctttgggtttgtgtgtggagcttccaagaaatgccttaactttccaaataaaaacctgaatataattcaaaggatggcatgaaagataataattgttgtgcagcctaatttaggaaaagtcatttatttgccactctgttgctgtggaaaaatatgtagtcttctgcatttgttaaaacaagtcggcttccgctttctggtctcaaaacacactttgcatttttttttccctgggaccgtcaatttaattcaggaatgatctaattatgagaaagtgaatccagtcctctggatgataagtgttgactaccctgggagaagccctggcagatggttagttcagagtgaatctaccttgggattggggcattagactgacagcttttttcactcaattaagtgcaacaactgccaaaaggacagcattgaacttgatgcaaatcacggccgtctccgatgttgataaagtttaagcctg

SEQ ID NO: 17404 - DNA, 1029 bp, Homo sapiens
taaggagatcaagaccacagtttatgtttttactccatgcacgataccttgcataaaataggtgcccattaagcatgcagatactctcttccacattgtcctgcagaggtgtttgccttctcagtacaccagctaggcacttcccaactctgcaggcacatctcctgctgtcttatatttccaatggggccttcggtttggactcagctgcacttgtttgtgtgacttctgcctctcttgaatccactgatcccctcaattgcacgatcaggcctactctagtcttgagcaactcagaccaaagctggacgtgttgggagacaatatgtgtatgtggtttttacaagcctgctgggaggagtgagacagacctgggccaagacccaggtgtgtgctgtgctagccgtgtgaccttaggtaaattcattaatccctcagttcagctaccatgggctggatccaattaaaagaggacaaatcactgaaattcagccccatcagccacttgttgagctttcctgacgttacctcccatacctgtctggcttcttccttcccttttccctgtctccctgctcccactattcttgtactgccctctggctgccccatccaggcactgaggctggggttgctaccttattcccaccttgccctggtgctctcagagacttcacttttcaccaacccatcattccttgccctcccttccctttactcactttctcctttctgccaaaaaaaaaaatcacatcggagaagcttgtctgcaagggttccattcaacttgctgtacattaatgctccactatggtgacccactgctgagtctttcacttgtaatgtaatctaataatttacatgcactttgcaagcaatactctaaaagactcgcaacctgtttgaaattgctctgctgttacagtatttgagctgatgagagaacagcgtgagaaagagtagtttttggtaccacagtggtattaggtaaacccaggaaaataatgtcagcacaaggtgagggtgtgc

SEQ ID NO: 17405 - DNA, 1031 bp, Homo sapiens
cacagccaggaggcccacagcaaagatgtgtgtctccgcagcaagcttgttttctcaaagtagaggatttaaggctgtaccttgtctagagatgctcaggatcaagtctgtgaatggaatattatgtagccattaaaaatcatgttgcactagaaaagtatttcttatcaagaaaaagtgtctatcagccattgctaagtgaaaagtaacagctttcatagcagtgtgcatggaatgccatcttttttgtagaaggaaattgtgtgtgtgtgtgtgtgtgtgtgtgtgtgtgtgtgagttatattagtaaattaacttggacccacgaataccaaaatgatgaaatgataaagtggtcatctgtggatgctgggattacctgtgagtttctttttctttgtgcttttctgtattttttgaagttcttacattatgtatatgttacttttgtaattagaaaaaataaatcattttttcttccacaaaagactgtgtgttgtgaaacttgggatcctttgaaggaactgattctgaacttagtatgttacacagaacatctcagtgtttcaggatgggtcaagtttaccgggccaaagagaaataccacttgacaggcacatttagccggtaaaacaagggtcattcagcttgaatattacaggtcctaacactggaaccgcttgcctctcagggcgatatctttgagacattaataccgtgatccacaatgagaaaaacatattaattacattgtgaactagtacacacacacacacacacacacacacacacacaaacatttcatgtaaaatatttacccttcacttgtgatgcgtgattgtgtttgctctattatttaaaatacagattacgagccaccacattggtttcatgatctatttatgagccactcctcactatttgaaaaccttgtcctgggcatgaagtagaagcagcctttctgggggaccatggcccagcagtgggggaggaaggaagtgtttccacagtaactgatgttaagctccagg

SEQ ID NO: 17406 - DNA, 1113 bp, Homo sapiens
actgtgtacctttattgcctgagcttacaaaatcaggtgtgtgactttataatctgaaagacgaccttcccctgtccataaaactgctgggaatgttagcagttttaatgaaactcttccattttctaggtgatattaatgatagctggtgtcactcagttccatcttaacaacacaatgaaagagaaaaaagaaaggcaggaagcgacaagggaagtaggaatgaagcggaaaaaaaaccacagcgaatctttaatttaacaaggctttcagggacttcagggagccatgagcctcgtgacataactgttgttaaaaaccctttttcagaatctcgttattatatgtgcttgccagaagcttacatattttagttcagtgaagtcatccacacagggctgtgtaccaccacacagttggtttggaacaccagtgctgaaggttgaaggcttttagggccggcagacctaagggaaaaatcgaaaccaaaagatgggattaacagtgaaaagctcagttgggttgagatcgaaccccctggaagctcagcttagattgacttaaaatcagttaacagggcctgtagtttatgtgtagccctgaggacttctagaaccacatacgtctttgactttgaaagtgcgtggcctctcttgcccccttcagttttggctgattcactttctagtaggtgctcttacctagcaatttagcgccctttctagagattgattctcagatcaactttcctcacatggacccggctcgccacagtgaacaaatgatgccccatagtttgaaagagctgctgactgggagaaaagcctttgccagagggataaaataattattttttaaactaaaggactttaattttccggtaaattgctcataaaaacatttataataataccctttaaaaatgtaatataataattatagaaaaggcatttgatgatagttatgataaccttttctgttgcttcccccttatttcttaaaaaaaattgaattattaatctagaattcaagtcctgagtggttcaaaacatctataggagactcttctaatgttagtcacctgctggaattttccaatacctactggcatgg

SEQ ID NO: 17407 - DNA, 1035 bp, Homo sapiens
atgggagcactacctagcagaattgaaggctggcctcatgtcctaccatttatccagcaagcaagtaagtttcattttcaagttctcatcttattctacctaaaccatccctaatgagacaaaacttcaagtcatcccataatcctggtggcactccttaaacaaacaagttcatccatgttccttttaggatatggtgcactgatctgcaggaatgttccaggaatcaactaaggcagattaatgctttgacaattccatattttctactgcttttctaacagtagtaagtgtcccaacctattaaagcaattacttatgtaaagtaacatttccccattattgtaatttattaatcttgtaacttttacttatttaagaatatggttgagttattcttttcaccacttttgctaacagtaagggtaaatttgtatggtactgtagatttaaaaatccctttacttctcttggcctcagtttcttcatttgaaagtaagacctttggaccagatctgcctttttcacaaaaggagttgaagactggcctcatgtcctaaggatccctttagattttacaaatattgataaaatgaccagatgtagaattgttattttgaaaaggtgagatgtattgcttgcagaagttttttcctctttctcataatattcctaaagatgttaaatgtgtattcttaatcattagtgagtttcttttttaaaaccacagaacatttaacagcaccaccaccaacaaaatcaaaagagaaagtgtgggagattgttactagtccttgcatggagaaaagtctagatgtggagactgtaggtaactgagtcccaaaagagagcccctgaaagaactgtgggcaggaatggctgagtcgggagctaggtcattgctgtgaaaatgggatcctgctcttccttctcagatgcacaccctcagcagcaccttttagttgtctaaggaccagtgctgtgtgaggtggtcatggatcacaccatgcgcaacctgggctctccataagccat

SEQ ID NO: 17408 - DNA, 1030 bp, Homo sapiens
ccttagttaaaacatttttttcctggagaattcttacatatggtctaatattactatgacagttgactagcatatgtagcttttgaggtatacaaatgaggaaataaaaactttggatatgggacataaaacttgcctctatttccacagcacaatcaaaactaaaaatcaaatgcatggggttctaccataaacccttatagagttctactgatatcaggagtagaaaaaccatgcccaagatacatactttattataactggctagggacttgccaaagtagaaatgatatttttgagcatggcacatgacattatagagtagtaatgtaacaaatgagcaggtgttcaaagattgcaatttgaatggaaactataaaattttagcttcaccagaggatgctgctgcaaattagttaagcaagcacttattgatggtttaaattaagcagccactctggaacagggcacatttcctttccctgtggagtactgttagagaggcttaacctactttgacacttctgatcaaatcttcccacttcattcaattcacagtgattcatgctctcaaaaatagtaaaaacgaaaaaaaaaaatagggcatgaactagaagattaacagcgttcttaactttttcaataaagatttcttggactatgcagtcagttgaataatctatcactgttactgaagtaggtagtagatttttttttttctttacgccaagataagggaatcatactcctgaagaattctggaatagttgtaaggtctatgggacatttgaatatatctggaattattggcagcaggaaacaagtgctttcttgtgaaaaagattcccatggttaaaactgagagacctggaaagcactcctttcgagttggcctcaaatgaacagaacagaaatcttgcatgactattattacaatccagatggtaaatggacaccattgaaaacactgtttagtaaaggccataaagactgagtacccatgacttagactggtgaataagaatatatt

SEQ ID NO: 17409 - DNA, 1046 bp, Homo sapiens
aattctaggagacacagaactcctctgacagccgactttggcttgaagactcttcagtggccttgcagaacctttcttagactgcatggcagtctgggatgttctaccataccgctgtctttctcttctcctccctcttccacatggggctcagactaccagtttggaaggctcacccagtgctggattatctggtaggaagaataagttcatgctgagggctgtagcaaagcaggggcattaaaaaaggaaaaaaaaaaaaaaggaagaagactgtacccaagcttcgtaagaaaaatgccatccagggtggacttacttccatgtgttttatgatttagtattgtttttattttgaattatgcatgaaggaggacactatcatctttttggtgctttgagtttctaagtatgttgatctggtgctgcctggatatctgtttttaacgaagttctgtgtgtgtttctaatgtacagccaggactaaaaattaatgctctggacttaaaatgatcaaattcttaaagggctctacagatctcaatgttagttaatattaagttgcaattattgccagagctggaagaatcatctttttattggggagaaaaaccaaagattcttagaggatagaagattgctcataacagggtcatttgtcctctggggacaagcccttgtggttgagaatcactgccagaatgaccatgagtactgatgaaagtgggttctgtgccatgtgtgtcagctctaagaagaaatcgagactcactggagcggagggagcacatttctcttggtaactgtgccgctagtgggaaaattgaggcttattcttgaattcatgctggaaagtatcttcagttataagtgtgtatcattcaaacagtcaactgtgggtctctttgaggtgaaaaagtcttcagaaagagttttctgttttgtttttacaaaccgcagacacatagttccttattcaaaattcaaaaattcagaaggctctgaaaaccaaaagattttgcaaaactttgaaacaaagacatttg

SEQ ID NO: 17410 - DNA, 1044 bp, Homo sapiens
ccacttccaagctcatttgctgttgttggcagaattctaagatccctgtttctttgacctctgtcagccagcgagctgctcttagctcctagaagctacccttattccaacccaacaagggtgctttgaatctctgacttcttggtctcttacgcagatttatagtccatgaacttaggtcaggcccacctacataaactatttttgctcagagtcacctgtgccttataataacctaatcttggaagtaaaatccattatattcaaagtccagggcactatacagagatatataccagggttggggaatcttggagacttgtcttagaattctgtctaccatagagactgtggcagctatcatggtaggaagtggggagggcctaaagaatgaggatttgacttatgagacaaggcttggtgactgagtggatgtagaggagaaaggaatacatgatagggagggagggagatagatagacagatagatagatagatagatagatagatagatagatagatagatagttggagtttggataaaaatctcgagttgagatctgagagaccattctgagggagtgtgtgagtagaagaccaagatttgaaccctggtaaacatggtgcaagaggaagaaaatgaaggagacattctaggtggaaggagaacggtagtattattgggatggtaaagagaagagtttaaagatatttggaatagtgaattgtgtttggcacgaggatttgtgacagccatccttagctctgtcagctgattatcgactggggccgggagtgtgggcagtggagactgtttggaaatgtatggtggtgttggagattgccacagtgattgtaggacactactgccacttactaggctggggctagggatgttgaactttgtccagtgcacaagaccatcccatacaagtccaaaatttaatagcacctctgctgagaaatataatgccagggatctatttcagttctccacactccattggtcaccatgttcattcatgtctgccttctaaacatctc

SEQ ID NO: 17411 - DNA, 1068 bp, Homo sapiens
aaaagtggtttgtttctttccttgttgtccttaatgtgtgcgtgtgtgtgtgtgtgtgtttaatgagttacaaaaatactgagaaaaggaaaggatgtacaaagaaggatgtacatgcacagtggaagtacagaggtacaagtgactagtttgttttgtgcagtagaggttagagaaactgtcatgagttagggggaaaccaacagaaacaaattggaaaaaaggttcagagaggaggctgtatttgatatgagtacataatctttaatgggtggccatttagaattttctaatagttatgggaccagttattttctccagttctatttatacctgtataagaaaaatattagagtatgtagttgattttaaaaatcacacttaatttggtaaaagacttattcttttttagaggctgatgggtggaatggttgacatgatacaaaatataaccaggataggatctatcaagaagcacacgtttggggaaagaaaagcaaattaaggagaaaagtaaatagatagtctatgtaatgaactttgcacaacacctgagaaactaatggttataaatggtatcatacataccattaatataatgttaatatatttatatgtagatagacaatgcattctttgttatatatttgagtattatatgatatttttaaactaaacatggaaatcatttttagttatataggtccagttttcccttttgttcttctataaaactttttactttaatattgtatatgctgtcctggtttgtcaggtttacctttatttataagaacattaaaaaatttatctaaaataacttcattaccttttttatgacatggtacacattcagtgaaatctagattttcaaaggaaaaacaccagttacataattttaaaaatcactttttttgagcagccttatgtctagagaaaaactgtaaaataaagagttttcacgtacccgcactcttgtttcccctattactaacatcttgcagtagtgtggtacatttgttactattgatgagctaatattgatactacattattgtctaactccat

SEQ ID NO: 17412 - DNA, 1084 bp, Homo sapiens
gttttcacttgtgttgattgtgcttttgaggtgttatccaaagtctttgcctagaccagtgtcctaaagcatttccccaatgttttctttaaatagttctaaggtatcaggtcctagatttaagtctttaatctatttcggtttcatttttgcatatggcaagaggtaggggtctagtttaattctcctgcatcatatggttatccagttttcccagcaccatttgttgaagacactgtctttttccagtatattctcttgccgcctttgttgaagatgagttggctgtaaatgcatggatttatttccgggttctctattttgttccattggtctgtttttatgctactgccacgatgttttggttactataactttggtatgttttgaagtcagtcagtgtgatgtgttcagctttattctttttgctcaggattactttggctattcaggttccatatgaattttaggttttctctgtttatgtgaataatatcattggtattttgatagggattgcattggtcttgtagatcgctttgggtagtagagacattttaacaatattaaattcttataaaccatgaataagggatatcgttctattttttggtgtcctatttcatttttttcattagtgtttcatagctttatacattttggtcaaatctttttcctaggtattttatatattttttgtagcttttgtaaatggtattgctttcttgatttcttttttagtttgtttgttgttggcataaagctatgcagttgatttttttttttggagacagggtctcgctctgtcacctgggctggagtgcagtggtgtgatcatggttcactccagcctcaacctcccaggctcaagtaattctcccttcagtctctcgaatatcagggactacagttgtgtaccaccaagcccagcgtttttgtttttgtttttgttttttttctgtagagacggagtttcgccatgttgcccaggctggtctcaaattcctgaggtcaagcgattcacctgccttggcctctgaaagtgctaggattgcaggcatgagccactgtgcccagccatttg

SEQ ID NO: 17413 - DNA, 1049 bp, Homo sapiens
tcttgtatcataatttttcgtatgtatttcctaatctctctgtctagttggaagctcatcgaagacaggaactgtgtcctgctgtcttccattctgcctgtcacaatgtctttaatgtagtgtctgctgaacaatgttgaagacataaattctctttatgctaagactttaaaaatttgttagctctatgtcataagtctatcactggaaaacatcgttttgcattataattctttttaaaaacaatacataatctcattggtatctagatttactatactcattgcataggtgaatgagaaagtcagaactttctcattcaaactttctcaggaagtttttgttttgttgttccctagagttttttgtggttctgttacctgtttgcaatatggctttgattatatatttctgtgtcccacggtactaaagaaatttctagtagtccagcaactttctctcaaataaaattattatagtgttttagatttcttatatgacgatatgtgctctctggtataggtacaattaaaaatttcaaccagtgcctggtccagtagtttctcattggatacagtgggaagttatgggtgtgtgaagtgtcctgccaacaatatggagtacctggtaagattctgcttccttatttacctttgattccgttcacctttgctacagttcaacaaacaagttggaataaacatatgtgtgcatgtgtctttatagcagcatgatttatagtcctttgggtatatacccagtaatgggatggctgggtcaaatggtatttctagttctagatccctgaggaatcgccacactgacttccacaatggttgaactagtttacagtcccaccaacagtgtaaaagtgttcctatttctccacatcctctccagcacctgttgtttcctgactttttaatgatcgccattctaactggtgtgagatggtatctcattgtggttttgatttgcatttctctgatggccggtgatggtgagcattttttcatgtgtactatcgcaaggacaaaaaaccaaacacc

SEQ ID NO: 17414 - DNA, 1030 bp, Homo sapiens
gtcattctgactctgtcttggtacaaattgatgcaactgaagggaataaagtaattacccttcgctctcctctacaggtaatacttcaaagttaattgtatccctttcagtgtaccaagaaatggttaaatcatttagctgaatataggaatacagtaaaacttcatcaggtcaattctgattattcagaaataaatagtaattattcagaaataaatagtaacagaaatggcttctatttactgtccagcttgctctgataatatttattttaaatgtctgtagttttgtttacttaaagctcatttttgttttctgtcttttaagacaaatgcaaaattaataaagctcttttggtatattcctttaaatattcagaaccgaggattattgtaattgtagttaggaaacattccattctctttgtatgtcacttggattatatttttcaagatatgtatgaaggcatattggaatgatctatccctctgaaaaacattttagcatcttaatctgtgtaaatattttttctacttttaaggttttatccaacatttttctttttctgtgtattactacaggtttcagcatatggtcaacaaaagaacattttttttcctacctgtaacatcagatacaaatgaaaaggtttcaaattttggacattgttatcttatagtttgttatttgctccaatgcgtaacagactgatgtcaagaaaagaattgtactatttttctcatgattttttgctatccatttctgtttagttgttatacatgatacattgagaaaagattgtcatggagaaaaaatggcttaaatcttcagagaataatacatatttgaaagataatatagactaatactaaacataagcttataatatatggagcatttgaatatctcagttttcaactgacacttaaacattaaatttaatatatatagcacttaaataccctaaaatttttcaattgccaataaaaatatcttccaatactgagtttgaaattttttagatctaaaa

SEQ ID NO: 17415 - DNA, 1027 bp, Homo sapiens
attttgtggttataggtttgttgaaagcataagtaaaacctgaatgtctgttggtagcagaacatggataaaattttggtatcttcatataatggatgttgtaaagcagataaagtgaataaaatagaactatatcaaacaaaattgatatatcttgaacataaaaatgaaaaaagtgagttgcaaaatgatagtacagttctatcagttttatattatttcagattttcaacaggcaatataatactattatatattgtttataagagatgcagtgtgataactttaagaaaagtattcatggaaataatctctaaattaggctggtgtctttctctaagggcgaaaggagaagggaatagggtctcagagaagtacacacggggcttctgctatatctgtaatgggaaacgagatctgaaggaaatattgcagcttgttaagatttgacaaagccaggtggtagattcacaggggaagattatagtattctctgtccttttcctttatgctttttaaggtattttagaagaaacaagaaaaaaaagtaacatctgatactttagcatcaaagtattataattactttaaccaaaagcatccttattaactcaggaatgcagcaacagtggatgaggccaccactgcctaatttgtcgctgatccaggtctctctaaacacccccctttggtcatagtctgtatagttttcctgggcctgggatgcagccaagaaagggtatcaggcaggtgacactggcaagttgtttccctggtctgggctgcagctaaaaaagggtatcaggcaggtgatacctacaggttgttttgggtggatcattttgatggtttttaaagaactgtggggctgcctttcaaaattgtccttcatacttgttccccccccaccccacagcaaagtgaaagaggggtgaacttagttgcccttcagaaagctgtggtaatcttggttggtatgagaagtgggttgggatatacaaggaaattctaaggtgttaaaattaca

SEQ ID NO: 17416 - DNA, 1033 bp, Homo sapiens
agtcttccagttttgctatattgttggtctttgtggtttgattatgttacatcaaatattaaagaaaaaaacaacctgtcgtactggtgattaaggacagatactttccgtgcttttgcaatttcaatcagaaggctctatttccttccagcaagacagatttttaggaaaatggatcctaaatttatcagtcaggatctggactaaagtggatttagggcgctagtttgattgtgattcttatgcacacatacacctgcgtgcatatacattataaatttttttttggtattttttaagttggccctttatgttcatttctcaaagaatttattttaggattcttgatggagcaacagggtgtaatctggagaaatttatcatgtagttaataacatgtaagtgccatagtaaataatatgtattttattaactgggcatcaccattgcagtttatcatgagttattcttccttaatctaatatatgatacgaaaaggagttcagaatcaaaactttagaccaagagaattctagagttctaatatagaatgttttcttttttcccagaaaaaaagttgtagtaaagtttccatctagtaaattgcactttcaaggtgctattaatattatagttgcttttattcttaatttgaaggggaacgtgctaatttttgtagattggaatttgataattattccaaaatttatgttaattacatgttatcttaatggagggcattttggttcctcagagtacattgggtacttttattttggtggatttgaggttattgtatgtgttgtattatcttttccctttgctcatcagaaggtttctattattttttagtatccagcaacatttcccaaaaggatgtgtttgatttaaagatcacagctgaattaaatgcatttaatgtctttgtctgtgatcagaagtgtaacattgcagatattaaaatacatggtaagtagttacttcttgttgtaggtatttctgtttctttacataactaggaaaaatgagcttg

SEQ ID NO: 17417 - DNA, 1033 bp, Homo sapiens
tatgttaatatgtatttgtgaaaaatgaaaatcaaatacaaaagtatatagaggaaaaaattaatatcatctgtagtctcatgtccttccctcagaataaatactaagttatcattagtgggtatccttgaccttttaagtttctgcaataagctaacttttaaagttctgttagtgtttaaagtttataagaactctatgggatatctttaagtgaaataaacttgtattgagaataatccctactttatgtattttataggttctttataccatgatttgtttagatgagagtaatacagtagtaccataggttataccagttgtaattggtgggtactagtatttttgttttatggaatttgtttccttttttttcaaagccaggtttattgaggtaagatttatacagaacatacttcactctttttagtgtacagtcctgagttttgacaaatgtatatttgtgtacatttggctggtcctgttttaaaatgtgtgaaatgtttaattgatggatcaactttgtcttttttctcttttagactctaaaggggaacctcttcacattattaactcttctaatgtgactgacgaaccccttctgaaaatgttactgacaaaggtaactagtttcatttctaggattctttaatatttgaatatatgaagttatattacccttatatttaatattctcattttctctcccaacatttttctacctaaacttattgattatggtgaattttgcaagcatctgaaaatcctggatactttcattaaccttctgagttaccctatgatattgaataaatggtaataacctaaagttccattgtaatccaaagcaaagtgtgttataatctagcactttttcctactttttagattagtgtacctaatctagatatactagcatttcctccacagtaggataaggaattagagtttttgcttgtatggaatgtaagaaatgcttatgtggtcagtttgtttttgttttttttttttgaatggctttctttgcctt

SEQ ID NO: 17418 - DNA, 1027 bp, Homo sapiens
ctttccattttacacataaggaaattaaggctcagagacacaaaggtagggaagggttcaggagtagcatctaattggccaagagcccagattttggatcaggaagaactcagttcacatcctgattttgctacttcaaccatgtaaccttagacacattatttaacttttctgaggttcagtgtccttatttatttattgtagttttttctcttgcttttaaattataaaagtaatatctcactattaaaaatgcaaactttacagaatatataaagcaaaaaaagtgtttgaatctttaagagttggagaatgttataattttttttaacataacagtggttcacttaatatagcgaataaaccttaaaagaatgtagatgactagaatctcaccatgtgacagatgctttgttttatttttagcgattgtatcctccagagatagtgacattattgatttcaggctatttgccaagttgaatgctttctgtgtcattgtttgcaacgaaaagaacaatatcgccgaaatcaagattcaaggtaaaagttcacacggcattgaaaattggcgaaaagataaacttttccttctttttgtctctttgcaatgctaaagaatgtacaaataaagggctctaagctgtgaaacctgaaaagacgtaattggattgtatgcttcctctatttgggatatagatattggtcagaatctgaccatcccaattgacctctacacatatcctggtgtttgggaccttcctgagagttatctaggaagtggaaaagggatactgatgtcaatgtaggaatgctattgatgggctaggagaagtgtcagtctagattttaggtgaaggtctgtggacgtgctttctagtaactttttaatcttttttttttaccttcatatgatttttatatataattatgtatttgtctttatttgtctttccttatgaaaagcaatcttataatggtgacaatatctatgagcccattatgttcttttaggtaaaagctgcca

SEQ ID NO: 17419 - DNA, 1045 bp, Homo sapiens
atgtttattcattaagagcagtattttcaatttgttaggttttaactaactaaatgcaagactgaaacctaactaaagtatgttgatgtatgtgcttttctgttttggaaaaaaaaattgaaatttgtccttcattttagctcaacagtaaagatcaaggtttacagaagactactaattcatctctggaagaaataatggataaggcatatgacaagtttgatgttgaaataaaaaatgtacaactactttttgcaagagcaggtaaaccgttattcagcttttaggatcttgggattatgatgggtagtttgtgtaatatacgtgtatatatgtgtgcctatatatcaaccctgacaaccattttgcacacatattcttttggctgcttaaataaaccatgtaggacactatcagtgtaaattactacaacatttataaatagaaatggaaatttggctagtcatcttaagatacctagctccatttcaatctaagcctattcatagcctatgtttttgtaatgtgactataaaactgcttagaacacaaaatggaagttgcagtggattcatgtttttctgtcttaccgcttttgggatgactcaatattattttccttgctgccttcattatcaaatattatactatattagcctagtctttatttcaatagtattactagtattatgctgtctacttttgtagatatctgagaagtatgtatctacagaatagtagatatagtcttaatatattaaagataattaacttaattattttccaaaagctttggtgtttttctatgcttacgtaaatatttttgtttttttaaagacttacttagtttctagaagcaatacatatttattaattatccttgatcatagtatcacgttgtggtaggtcattagaggaaaggacagttatagtctctatgtgcagagtttatactctagtaggagtgttgagatttattaaaacgtaaatacataatgctctacttacttttcatatattaagagcctgttaattccttggagta

SEQ ID NO: 17420 - DNA, 1072 bp, Homo sapiens
tgaccatctgtcagtaattttcgttctacctgaacaataccaattatattattttgttgaatgcagttctgctggtgatgagtttttaaattttttttgtctttctgaaaatatctctatttttccttatttcttgaaggatacttttgtgtatagaattctaggttgttaatgattttctgagttttgaaggtataatttcattgttgtttggcctgcattttcttttgtgtattcagctgttagtcttacggtatcactttaaaggtaatttccacccatctctctcatttttctatttttaagaaaatctctttaccttagattttcagtaattttactgtgatgtgactagatatgtattcatttttgtttatactgtttggacttcttactgtttggacatcttgaggtttcatcaatttgggaaaaaaatcctcacttcctagttttatttcccatcatttttttatccttcatcctttggttcttctaatgtacatagtgggatcttttcataatatctcatgtgtgtcttattttctctgaggtatttccaagttctttatctgtttattctttggttagtttcctctaattctctcttcagctctttatatattactgttaaactcatttattgaattcttaattggcttttgtatatttcagttcttgaatttctatgtggttctttttttatagcttccaaattctttgctaacatgctctgttttatcttttatgtctttgaccctaataaatctagtagtctgagtaagtctaaaattagacacttgatgtctagagcgcctgtgaatctattttctgttgtttctgctggtttttgttccaatttgtcatgaatctagtgagcctgtctgtgtgtgtgtgtgtgtaccggtgtgtgtgtgtgtatgtgtatgtgtgagagtgtgtgtgtatgtgtatatgtgcaccaatcagtgttactgtaggtattgagatgatttgatgctgtgctgcagatcatgggagtctgcctgcttccagttcacctttactcttatgatatatagccctttagggtccc

SEQ ID NO: 17421 - DNA, 1034 bp, Homo sapiens
taagaatcataaggatgataaatgtaaaacaagtcctcttcctaaatattcttgttttcatgtgcatttatgtctatgtgttaattataatggtctcacagaaaaattattttcatactatatttaatgaggatttattttcttagaaaacttattttctcttactgtaaaaaattaaaaaatttaaaagtctagaatacattcaaatttatactaatactttcattaggtcacaggtactgataatggactagatatgcctagaaatcatgaaagaaaaatttcttttatctaatgattaaatttcttgtttataagtgcctctgttttttacaggacttggagaagactctagatgtttttaacataattttagcaaggcaacaagcacaagttgaggtaatcatttttattagctgattttatgttttaaacatgttaatgcccgcttttaaacctaggatcaagaaattgaagtttcacgaggtgaggtttttattgcttaatttagtctcaggagaaaagaaactggagtactgaaaaaaagccactaatatgaaggggaaaaaaaaccttatttttattattatttttttttgagatggagtcttgctctgtctcccgggctgggatgcagtggcgtgatcttggctcgctgcagcctctgcctcccgggtgcaagtgattctcctacctcagcctcctgagagctgggatcataggcgtgtgccaccacgcccggctaatttttttttgtagttttagtagagatgggttgttgccatgttggccagcctggtcttgaattcctgacctcaggtgatccactcacctcggcctctcaaagtgctgggattacaggcgtgagccactgcgcctggccacttagaaaattttataatgaaaaatctgaaaaactccaagaagaaagtaaataaaagacatctataattctgacaacttagaatactactgtgataattttggctatcagtttttctcccatgcttatatacctgcgtatttatgctttt

SEQ ID NO: 17422 - DNA, 1028 bp, Homo sapiens
ttatatatctatagtgagatcagattttcatcatgtacttcaattaaaacaacatatctcaacaggttgaaggcagaagcagatatgctaatccaactgtcttctactaagtgagacattaaagagatttgtaagaatgtaaaaccatgcaacttttctcacaacattgtgtttaaaaaatatagctatttttataactgtatgttattatgtaatggcctatttttaaatgaatgtcttttttcagtttttatttataatatggtaaatatcagtagttataacccacataaataaaaagttctttagagtcctcaagttataaatgctaaatgggttgtgaaaccaaagtctttgagaactgctttagtttgtgattgagaatcataaatttattatttattggattaattagaaactttctctaaagagctatattagctctaagattagatttaaactgtttagagaggtttaaacatggtgtatctgccattgagatgaaagacagaacatggtgctagaacaaatatgaaaccagaaagataattggtcaggtaagaagagaatttaacacgaggcagctgagtctatgtctttgaaagctgttctagccaagtggaatggttttcagggctagactggctttcttacttgtttcttttcaaatggtatttctttgagaactcattctttttatgtatgtttgatttatgaatagaacagagtcagtgactttcacagtggcaagaactactggaatagcactatcctgattgtgttacattacttattaaatgtttacttcttgaaactgagggttttatttttgtagttgaggatttgtttcttaatttttgtagtggcagaacaatttgcttttaaaaatcaaggaagaaccaattaaaaatttcaagctccatttcacatatattctctaaaatatatataacatgaatttagttggatctgaattttttttattcatttgaacagataagtactgtgtgctttgtgcccaggtgtag

SEQ ID NO: 17423 - DNA, 1033 bp, Homo sapiens
tcatcatttatgagggacccaccccaatgatccagtcacttcacatcaggccccacctccaacactgggaatcacatttgaacatgagatttggaggggaccaatatccaaatcatatcaatgtactatgactatatttcctttcttatacaaccttttgttttccttgaatttgtaaatgctgctttcttatttgcttagtcttctatgtaaatttatctttaattctttttcacatgctacatgaaatttgtctgctatatgagaaatgatagtattttccaatcgtgtaaacccatctgttggtactctgtaccaccctgttgtctcttggagatccccctctgaactgattgttttttggaccagctgcacaggtgtcatcttaggactggtctgaattgctcgtctatgtttaattccctgtttcctgggtcctttgccttttttgtttccttagtttactcatttgttttcctagaacacatctagaagcttttaagaatggatgcaccggatataatttcgaaaattcttttaaggctgaatgtctttgtgttttacttctacactcgtttgatttgtctggggatagaatgctaggttaaaaattagaattttgtaggcagcaatgttttctagcttccaggctcctttaaaaaaaagtctgatgccagtctacacattgttgaaagcagaaaaattagagagtccttggaccctcctgtcaaagaccttatattttaattggacaaataagaaatttgcataataataagcaagagaaagtgttgagtcccatcaaagaggtacagacagttttatgggagttcagaatgaacatgttatagtcggccaaagagatcagggtagacactatgaaggtgtatatttcaactggatttaaaggatggatctgcagaaaggagagaaggcataggtagaggagacagtgaaggtgggaaagtatagagcatctgtgggatcagctaacagtttgggagtctgatagagagtagttggatgtagggtt

SEQ ID NO: 17424 - DNA, 1027 bp, Homo sapiens
cctgtttgccatttgtatgtcttcttttgagaaatgtctattcagatcttttgctcatttttaaatcagattattagattttttcctatagagttgtttgagttccttatatattctggttgttaattccttatctcttacttgtcctggcaatgtctctgtggagctgtgtactgtaaaggctattatgcatatttatgtctatttgtacccattgtttagctcctacttgtaagtgagaacatacaatattagattttccacctttgagttgatttacttaagataatggcctctagcttcatccatcttgctgtaggggacatgatttcattcttttttatggctgcatactattgcatggtatatatgtatcacattttctttatccagtcaactgttgatggacacttagtttggttgtgtgactttgctattgtggttagtgctgtgataaacatatgagtgcaggtgtctttttatataatgacttattttcttttaggtactcagtagtgggattgctgtttttatttttagttctttgagatatctccgtactgttttccatagaggttaaaccagtctacattttcaccaacagtactcaagtagtccctctcctctgtatccatgccaatatctgttattttttgactttttaataatagccattctagctggtgtaagatggtatctcagtgtggtttaaatttgtatttctctgataattagttatgttgaacattttttcatgtgtttgttggcttcttgtatttcttattctgagaaatgtttgtttatgtactttgctgttttgaatggggttgtttttttcttgttcagttgtttgagttccttgtagattctggatatttgtcctttgctggaggcataatttgcaaatattttctacctttctgtaggttgtctgtttactgtgttgattatttcttttgctgtgcagaagatttttatttttactttttaaaaattaattaattaatttagagacaaagtcttgctc

SEQ ID NO: 17425 - DNA, 1051 bp, Homo sapiens
cgagaacgcgccattgtactccagcttgggcaacaagagcgaaactgtgtcttaaaaaaaaaaaaatagtttgtgtggtatttttttttaagtggaaagcagtcatgtctattcaacatcaagtactttaatgttccattttttccctaaagtgatttacccaccttaccaccacactggagcatagatatgttaacttttgctacaaaacaagtcacccccaaatctaatagcttaaaatgttgacttattactatttctcatgagtatatgagttggctgcttactctgttggtctcatctaggttcacttacacagccaccttcacctggaggctcaaatcataggtctggcagctggtgctagctgtcagctggggcatctctgttcccctccacatggtcccccatccttcagtaagctagtctggcttctttacatggcaatcttggggtagtgttcttagaaggtggcagacaaaagcttgaaagccacttaaagcctatgcagtgggacttgtgcaacattatttccaccacattcagtgggtcaaaaagcaaatcataaagcaagaccagattcaagagagtggagaaagagctccacctttggatggaaaaagcagcaaaatcacattgcaaagttgcatgcacaatggaatgagaggaaatcgtggccatcaaagaattggtggtcgggcacggtagctcatgcctgtaatcccagcactttgagaggctgaggcaggaggattgcttgagtccaggagttcaagatcagcctggacaatattgtgaaacccctactctacaaaaaattatccaggcatagtggagtgcacctgcatttctagctactcaggaagctgaggtgggaagatcacctgaggctggaaggtcaaggctgcagtgaaccatgattgtaccactgcattccagcctgggtgacagagtgagaccctatctctaaataaataaataaataaaaataaaagaaaattccaaatgggggcccaggcatggtggttcatgcctgtaatcccagcacttt

SEQ ID NO: 17426 - DNA, 1027 bp, Homo sapiens
gaaaaaaaatacattgattacatgttgaaatgatattttggaaatattaagtttaatgaaatatattattgattttacctgtttttaaaaaattttgtgtcgctgctagaaaagtttatgttacacatgtggcttgctgtttcatagcactgaagttactgatttttttacatattaccagaaatgtcgaacaggtgctgttttcctctgcttttcatttttaacattgcctttttttttttttaggttgctacaagatcaccacggttttcagccatgctcagacagtggttctttgtgtaggttgttcaacagtgttgtgccagcctacaggaggaaaggccagactcacagaaggtatatcatttggcattctccaacccagtgatgagattgatgattataaatgtctctatcttcactgaaaagtttaaagaaatcttaatgattaccaaaataacttatctttcattgtgtgctttcagtaaagaatggcctgttcaaatggatatatttatactcttgaccttgcagtgaactccattgacttatttttcttagtttagaacacatttattcacttagtttgcttaacttggaataaattaagtcagaatagaagcaaaagaataactacatgttataggacatgcagatttatttatttatttatttattattttttttttttattaggagtctcgctctgtcacccaggctggagtgcagtggcgccatctcagctcactgcaacttctgcctccccggttcaagtgattctcttgcctctgcctcccaagtagctgggaccacaggcgcgtgccaccatgcctggctaattttttgtatttttagtagaggtggggtttcactgtgttagccaggatggtcttgatctcctgacctcatggtctgcccgcctcggcctcccaaagtgctgggattacaggcatgagccacctcgccggccaggacatacagatttttaaaaccatatagaattttaaaatttcttttacaaaatttt

SEQ ID NO: 17427 - DNA, 1006 bp, Homo sapiens
tacttcaactcttaaaaccaaaaacataaaaactctgccaggagattaggaactttgcccacatagatcagatagaattttgctcgcgatcccaggaccccattgccggctctgttctctgagctcacctatgcacacccagggaaggggtggcacatattctccttacagtcaggaggcctaggttcaaggcctggctttgcttcctcctggctgcaggctgtggacaaatcgtgtcccttcttcaggccttggtttcctcagccacaaaatgccaggtaatcccagctactcaggaagctgaggcaggagaatcgcttgaacccgggaggtggaggttgcagtgagccaagatcatgccactgcactccagcctgggtgacagagtgagactctgtctcaaaaaaaaaaaaaaaaaaaaaaaaagccaggttggattaggtgatctcatgtcctttcggtgctaatatgttgtgatggttaagtggacactaacaactgccaatcctgactttacattgcagggacagtgtttgagggcagttacagaggatcagaagaaaccgggcaggagcttgactctgacatccaaaagtaacccccgcttgtaacgatggactatggcattggggataattagccatcttcttagaccggcttgtgtctaagcagctgcttgtagtggggcagcgtaggcaggtttttagccaagcgcttcagtagattctcccagtctggataggggagcttgaggggcctctaagcagaagtctggagaccatctcccagcttaggacgtcaagatcaaagcccaaatgcagcgttgccactgctcttcctccacggtttgcccagagctggtgcttccacaagcccaggttgggaccagctttctcctctgagtgagactctgtggcagtccaaggaaaacctgtccatctggaggctgattatagaagcttggccagaattctcctcccctccctttcacttcccaaagacacag

SEQ ID NO: 17428 - DNA, 1025 bp, Homo sapiens
ttgggtactttcttaggttctggagagacagcagttaacaaaacaaagtcccttgccttcatggagtttatattgttcttccttctttcccttctttcttcttttcctttgtacttattccttttcttcttgtcttagcttggacagtaaatagagagagagagaggtacatggtgtatataagtaggaatgttaagatcatgatgattgtgaagtaatgtggctttttatcaaacctaatagaattacttgtctttgtagcaactcatattttagttatgtttatttgtaggattccttaacaattaaaaaaaatatataaatactttgtaaacttttagagttgttaactaagtgggttttttaatgaaattgtcctttttaaattgtgaagtttctgtcttggtttttactcttcttgtatttacatgcttttatctttgcctatttgtagattaaagataggcatcaaaatgaaagtgtgaaggaaacacagttttaatgattggataccttagagaacctcttatcagatcttacaaccaaaagtgagactttttttgtttttaagagaaccctcttctctaaaaacagaaatgtgtaattacaagggctcattacaatactgtctgtagagtctggaattaatgagtacagtagtgaatacaaagatgtatataagtaagaatatttttttctgtcaatctttcatagaaattgatgcttgtgaaatatatttagaaacttttaaattaaacaggtagaagttttttattcccgctgttatttttgaaaaaacaaatccttactactttcttaaccttttttttggtttctagagattgatcaacaagctgaagaaagtgaccctgcccagcaggcacagacaccagttactactagcccatcagcctcaagcacgacctcctttatgagcagctctctggaggacaccacaactgccaccactccagtcactgacacagaaacagtgcctgcatccgagtccccgggagtgatgcctc

SEQ ID NO: 17429 - DNA, 1049 bp, Homo sapiens
ttctaataggttaatatttctttttttttttttttttttgagatggagtctcgctctgtcgcccagcctggagtgagtgcagtggcgcgatctcagctcactgcagcctccgcctcctgggttcaagtgattctcctgccttagcctccaagtagctgggactataggcacatgctaccatgcctggctaatttttgtatttttagtagagatggggtttcaccatgttggccaggctggtctcaaactcccaacctcaggcaatccacccgcctcagcctcccaaagtgctgggattacaggcatgagccaccgtgcctggcttctaatgggttaatatttctaaaaactgatatttaacttataaccactaaaagtagctgttgaacactggtataatcaaacttcgcatgcgagttaatattacagttaacatgatacagcttttctaaaaatacttaaagttactttttacaaattttatccttttttcttcaataaaacagattgttgagcgcttattttcccttctctctgattgtatgtgggagacacccattgctcaggccaaacatgctattcagataaaggaaaaagaacaagaaataaaactacaggtaattggtttttcctaaaaggtatttcttaacagcataagtgaatattctgtcacttgtctctgaatgcctgttcctctgaggcaccttgctctatcatttattccatttcctctcttggcattctgtctccctttccactgattccctcccctcagcttataaccatgcttaactcatttcctctctcctaaatcacatttttatctgtgaagtcttctctgtcttctctcttgtcctgtagtactaagcttcttagaagagtaatctgcatgtttcagccactttcttctcattatctcttcaaccccaccatttatcttgtatcaaagtacgaaattaaatgacaaagataagtgtttgttgctaaatatagtgtatccttttttttccacttcttactttacctctggaaactctagccttttgtta

SEQ ID NO: 17430 - DNA, 1048 bp, Homo sapiens
ttaagtagttatcttcccaaacttttctatctagttacataactgatataatttttatgcatatttaattgggtaccttaagatacttccctaattgagaaatgtagtatattcacataataggatgttatacagcaatcaaataaatgaaccatggttacacttagtaatgtggatgaatattagcaatattatattgaatgaaagagtgtgtccaaaaaggtgatataaaatgatactcttttttaaaagtcaacgacaactaaaaccattattcatcttaggaatacattaaaacaataaaaacaaggaaataataaacccaggcctcaggataataaaactttaggtagcaagagatgggctggaggaggagcaaatagatagaagttactgttagttttctagttcttgtgttcacagatatttattataaatatgtgatttcaaaattgggccatgcatggaccaatgatgagagtatgtcatgacgaaaggattgtagttaatcaaatttatgtatctgagaccagttaaattaaagatttgtaagaattggacatttatatatttatttaaagctaatattgacaaatgacttggacagttgctgttatgttcaaacatgttaacattttgctgtctaatgtaaagattttagcttaaaaaatacccactggcaaatctaatggtattatatttagcaactattttgatgccacttgataattttatataggtatcattttacagtaaatctcatattcttgtctgtgaaactttgcttcctctatataggagtttcacaacctgcagtaaatatgcacatgacacagtcagtgagaatgttccttatattaatgaaacccaaagggtgatgtttgtgtctgctttttgtgtaagtttacttgcccttctatattcattttttggtaatgtttcattgcagatatgtagacactttgttcagtcttaacttgccctttgtaatgataatgttaaattagatgaaatctttctgttttgagtaggtcttactagcagtgtc

SEQ ID NO: 17431 - DNA, 1075 bp, Homo sapiens
tgcagtgagccgagatcgcaccactgcactccagcctgggcgacagagcgagactccatctcaaaaaaaaaaaaaaaaaaaaaattacagagtatttgtattatcaaaaaaattaagtgatgtttagtataatgtgcaacatgcatttcattatttggtaattctttgaaaattggtagttcattttgacttaggaattaaatttttggaacagatttactttcctaattttgtttagctcaggtgaatataattgctaaaagttgtatgttatattaataaatgtatatcatttggcgctagagagaaaatggctccagacttactgagtagcataagaaatccaatttatagtttatactatattagttaagtttataagtaatagttcattggttaaaattgttttctctcaaatctctatcatgcatatggaaatataatttgagattcagtctgtgttaaccaggtcagcatgtacaaaataatatctttggaataaaagaaagtagaatcttcatctttccaactaagaaaaaactgtaatttgaatgtgaattacttaggcatggatataacacatttaggagattatattttcaaagagattttacaaaaatattgtatatttagtgactgccctttgacacagtagggtttttttgttttgcttttaaatgatagtaaaataaatgactgtattttttttccttttttgtcagtatagaccagatgccttaagccataaaatcttcagttgggcagttgaacctgccaagtctgagaactgtttgggagccattcaaactgttgagtattctgattctgacttgagccatgaaggacaaacaaatgtccagccaagtgagaattctctttttttttctttcttttttttttttgagacagtgtcttgctctgtcacccaggctggagtacagtggtgcgatcacagctcactgcaccactgaggctcaacctccccaggctcaagtgaccctcccatctgagcctctcaagtagctgggagggactgcaggcacatgccactatgcctggctaattttatttattt

SEQ ID NO: 17432 - DNA, 1050 bp, Homo sapiens
aagaccttgtttttgtgttgcatgttacagaaatctttcagtgtttcctctcagcccgtgaagtagctcgtagccgagaccgagatagaatgaacagtggggcagggtctggggctcgagctgatgatccacctcctcagtctcagcaagagcgaagggtcagcacagaccttcctgagggtcaggatgtgtacactgctgcatgcaactccgtgatccatcggtgtgccctgttaatattaggagtaagtcctgtgatagatgagcttcagaagcgaagagaagaaggacagttgcagcaaccttcaacaagtgcctctgaagggggtggacttatgaccaggtgggactgactagacactgaaaacatgacctactcacttccctttattactttatgcactgaaatggtttgtttccaaagttacagtgttctgatgttaacatagacatgaaagaagaaatgcaaattgactaggatgaacttaaagtaaagtaaatactgatactgattcagcatgggctataaatttctgattaaatgaggaggcacaatttttcgtatatataaacaacagcagtgaaaaagcatgtgaagttacttgcattgctctgtagtttagtgacatgcaaattattttgagaaggtctttgtgctcagacaagagtcaggatttcctgtcaactgacattactcctccctgtgtgtgtatattatctctgtgctccaattccattcaattttatgttcactaacagtcctaaatcaaaaaacttttttttttgtacatgtgagacaggagtgaaagtcttactgcagagagccggctagtccacacaagcccaaattatagactgatcaaatcgaggagtgaatctgatttgtctcagcctgaatcagatgaagagggttacgcactggtaggtatacccagattcagtaaagaaagatttttgttttcaaggtatatgatatgtaaggctttggttagagtaagtaatatgtttgttttagacatataaaaattttttcaaaaataactttaagag

SEQ ID NO: 17433 - DNA, 1033 bp, Homo sapiens
tagctttttctgaggggacccattttcacaagctttttcccccacttcatttagatctctgctcaaatgtaaccttatcagaaactttcccagaccaccttatataaaatagtaatcccacatatacagtactccctgttctccttaccctgctttattttccctcatagcacttacctgtcatattaatgttttcttttaaattttatctcccaccctgctcctcctaacaataatataagctctgttagatcagggatttagttttgttcactgctatatccacagcgcttggaacagtaagtgggatctaatgaggtgcatttgttaagtaacagtttagaaagatgataaaattcaggtgttggatgactaaagctataaaaattacctctgaactgttttctgagcccttttaaatgtcaatgcatcatttttattttcagattgggacagtgcaactttaagtaatgagtcactcttggacactgtgtctagatttgttcttgcagctcttctgaaacacacaaatttacttagtcaagcatgtggagaaagccggcaagtaacttaaaactatcctcagacaaatatttgctctcatgatgtcagaaattaggtaacttttctattttggttcttcatttagatatcaacctggtaaacacttatcagaagtgtaccgttgtgtatacaaagttcgaagtcgtttacttgcttgcaagaaccttgaacttattcaaacaaggtcatcatcacgggacagatgggtaaagtttgaaatcaattaatttctatgtttttctgcaagctgtgagagctagctctaaattggtttatgtgagaaaaaaatgtgccttggttattgcatatgttcaatacatgttgagtagttcttttcctagcagaaaaaaaaaaaggaaaagatttgagatttacttaacctcacatttaccaagtgtgatattggttctaagaaactttagttggctgcataaatattaataacaaattgaatgattcaaatcatatg

SEQ ID NO: 17434 - DNA, 1072 bp, Homo sapiens
ctagcccttctattgagattttctgtttcttttatcatctttttaatttataagagctcttcattctggaagtgttccttttttagtagcctcccgttctgtcttacactttttgaagatactaatttttgttcttgtttctatgtacttttttttttaaattagacaatttctgttagttttagtctctgtcataataaaggctttcctcaaatttctaataacctttggcttcgaagccaatcatgggtaagagtgtgatgctatggccgggcgtggtggctcacgcctgtaatcccagcactttaggaggctgaggtgggcagatcacctgaggtcaggagttcgagaccagcctgcccaacatggtgaaaccccatctctactaaaaatacaaaaattacctgggcatggtggcgcatgcctgtaatcccagctacttaaggctgaggcaggaaaatcgcttgaaccccagaggtggaggttgccgtgagccgagattgtgccactgtgctccagcctgggtgacaagagcaagactccgtctcaaaaaaaaaaaaagagagtgtgatgctaaaagactgatggatgctaaaagttctctacacagagagagatgaggtttgtcaaatttattgtagattgatgtgactgggctatattttaggggaaggtaatatttcatgtctgtcacttaaagtcttttctactgggctagtgagattcttcaaaggaaggctcttctaagctactgctagaaggtataaacctgagtgacagtcttctggtgaggaaaaagagtttagaagtctcaatattcagaatgaacactttgtcttgaaatcacccaattttagtttggtattcctgccttcaactgtgcctattatcttaaccagttttcaaccaatcttcctgttttgagctcttcctttttgccctcttgcagaagtatatgagcctctaggaattctacagtacaaatcaaagtgttttttggtttttctcatttttgacttagggtgtagccatttcaggtcttttaagtcagttaccctttgtctgttccttt

SEQ ID NO: 17435 - DNA, 1107 bp, Homo sapiens
tcatttttagcccccttcactagcctttctcctctgtcttttctgcagtttttcttagtctgcctttgcttgccacaaagccttatggctggatggaggtgaaagcatgtaccctggattggttgactttttctcttttttatttacaattatttgcaattttggcattctgtatcttcaagttatgctacaggtgtggtttggtatagaatttaatttttccttcttgtttttcttaaattttgggcagatagctatgcagctgccattgtcttcaactatgtagaagtcctggattacttaataaatggtgttggtataactagccttctacctggaaacaataaaattggactcagcttgtcctatatagagtgtattaaacttccagatgaatgtagaatttattttaattccagatggactaaagactcaggtttttaaaaaaaatctctcaagaatatcaaggtggttttgtataggtgattacctatataatctagaattcatgtggaatctgggtgtgagagtcgggcagggatactcttttgaccaagaatggaaaacagaagctataaaataaaagatgtgtgtgtatgtaaaagatagatttagaagaaatatttgcaatgttgaggacagactgtgataaaatacaaaaaacttttacaagttgacaagataacaaaataggagaatgcatgaataaatatttcccagaagagcatatccagatgaccaacaaacataagatgttcagatttattagtaatcagagaaatacaaattagagtaacaacgtatccctgtacagctatcaaactggccaaatttaaaacagcaaaattacatatggcttatgtgggaagggatggaggtaaataaggcacttttatgtcctctgcacaatgctggtgtttaataccaaatgaagtcagggtgggatggaggatcatgattttcccccctcttaagtgcatactttacaagtatcttaggaagatgaattaagcatagtaatcataaacttgtgaaggcaagtgtcatcagattttatatttagaatttaccagggcataatgagatataagaaactccttttaatta

SEQ ID NO: 17436 - DNA, 1047 bp, Homo sapiens
gagatctgttgctgtctcctggtaagtagtgtcataactgaattgacttagaagacacccagctagcgtctgctgcaagattgcttgcttggcgtgtggagaaaatctcccacacatttggtcacagaagtgttctgtgttgtgagagtctaataggaagaaactgagttctttcgttctatatcatccaagaaggtaatactaaatattattttacattaaaaccacaccatatattatgaagaaaaatgccaaaattgtaggagtttaaagtaatttcttgcttaaaagggaattagttggggatactccaaactcctggaagcacacgttcattctgctttgctgatagggttgtatctggaaagggttttgaaaagtcagtaatatcttctgcactagaagttatttatattctttttgtattccttccagaggtggatagaatgtagtaagaaccaattttgtgtgttgaacatttgggtttcattttcatattattttagaagtggaaaggacttcggagattattttattcaaatcccttattttttagatgaggcctggagaagagggtatgtgttcttgcccaagatcatttcttgggtattagaactttaatttcctgataccatctaatatttattgaattgcactggtctctttgtagctaaggtaggagattagaaactggtttaagacattaaggttggagaatattggtcaattgaatataaagctatcaatcagtgaacctactatgtactttattggaatttttggaaaaatgaaaaattaaatcagttatcaattattacactttgcccccaactcagacagttgctgataacaagaattacactggaaagcagttgattaaatcagtgattttgtttttgaacagttgtgtggggcatcaatataggagatgttactgccaacagataattatttagctttgaaataaatggtttgaaaacttgcttttataaaatatttgaagaaatatcaacttctttattcttagtaaggaaaaaattcattcta

SEQ ID NO: 17437 - DNA, 1095 bp, Homo sapiens
atattcttgatacacgtctcattggatatgttttacaaaatagtttctttcatcttggggcttgccttttcattttcttatttatgtatgtgttcatcatatctaagtcttttcattttcttaacagtgttgtttttttttttgagacagttttgctcttgttgcccaggctggagtgcaatggtacgatctcggctcactgcaacttccacctcctgggttcaagtgattctcctgcctcagcctcccaagtagctggaatgacaggcgcccgccaccatgcccggctaattttttgtatttttagtagagacgggtttcaccatgttggccaggctggttttgaactcctgacctcaggtgatccaccagcctcagcctcccaaagtgctgggattacaggcgtgagccactgtgcccggctagcaatactttttgaaggacaaaagtttttaatttagatcaggtctagcttatcaatttattgtgtgctatttaagaaatcttacccaggattgctaagattttctcctatgttttcttctagagactttttagttttagctcttacgtttcggtctgtgaatcattttgagttgatttttgtatatggtatgaaattagggtcaaggtttatttttcctgtttgcatattcagttggtccagcaccttttgttgaaaagattatccttttcctattaaactgccttgacactttagataagcatcagttggccatatatatgtgggtctatttctgtaccctcagttctgttctgttgatctatcttgatgaaagtaccactatcttgttgccactaccacgtcttgattactagttactagttttatattaataataagcttaaaagtcagataatgtacatctttaatgttttctctatcagttagaattgttttgctattctcagtccattgccttcctgccttgcaagtttctgagactgtgaaaagtgttttgcttcttttgttacccaattgagatcatttaataatcttgaaagagtggttaggaggaatgtattttatcatagcaacaagacttttaagaaggaactgaattggcaattggt

SEQ ID NO: 17438 - DNA, 1029 bp, Homo sapiens
ttgatgtgaataacacctctgtgagacaggcaggcagatgttattcttccatttgacaaatttccatggaagagagagggagctgccttaggaatgagcccctgaataatctcaacctctagttgttctttttttaatgatgcaaccagaaatgaactggttctggttctgcaaccaaagcctagaaattgctatttctttgtaaagttgccagagtatgagtagtggtcttctatgttatatggtactgcaggtttgatctctaaagtaagtgattggaaagctgcttaatctggaagcagaagtgcttggcattacgaatgggccaagatggcttatggtaattggcatgttcttaaataatgtttgttataccaaaagcctaggcgttttacataaatttagattaaaactataattctaatggcagcactataatatcttttaaaccaatattttaattaaaacctactagtaggctgcagtaatactgaagtggttttgactgtatcatggattagcatagaggtggggcactttactctttagaagttgaaaaagaaagtctggtagcttctaaaaaggcagatatgtggcagtagtgaaatgttgataaaagtttagtatgtcccatttctcttgttcttttgagaatagtttgaaatactttggttaatttaaattggtctaagatattaagaaggatttttcaaaactctcaaagctacgccatataaaggaataaaatccaatatgaattcacagaatcacttagctttaaagtaattgattagtgacaaaatgtgacttagttttgcaaaaatctaagaaattggtgaatattttatatttttatattcgtatttaagatgtctttcagttctttctgttattttttcctggtgctgtcttgtactgcctccttatcacctccctcttccttttcgtctgccatctgtcggtttggctccttatttcagagtaggcaggcaggaaagggtttttgtacacaagataaaactagtgctg

SEQ ID NO: 17439 - DNA, 1061 bp, Homo sapiens
gaggatgtcatcaataccagacctgtcctacaagaaatgctaaagggaattcttcaatctaaaggaaaaggacattaatgagcaataagaaaccatctgaaggtgtagaacttactggtaatattaagtacacagaaaaacacagaatatcataacactgtaattgtgtgtaaactacttgtatcttgagtagaaagactaaatgataaactgataaaaaataactacaatgtttcaagacagacagtacaataagatataaacagaaacaaaaagttaaaaagtgaggggagaaagttaaagtgtagagtttttattagttttctctttgcttgttagcttgttcatgcaatcagcattgttgtcattagtttaaaataatgaattatatgacagtgtttgcaagcctcatggtaacctcaaatcaaaaaacctacagcagagatataaagaaataaaaagcaagaaattaaaacttaccaccagagaaaattaccttcactaaaaggaagacaggaaggacggaaagaaggaaaagaagacaacaaaacaaccagaaataaaaaagcaaagtggcaggagtaagtccttacttatcagtaataacattgaatgtaaatggactaaattctccaatcaaaagacatagattggctgaatggattaaaaaacaaaaaacagttaagaggttccaagatggccgaataggaacagctccagtctgtagctcccagcgtgagcgacgcagaagatgggtgatttctgcatttccaactgaggtaccgggttcctctcactggggcttgtcagaaagtgggtgcagcccatggagcagggaggggcatcgcctcactcgggaagcacaaggggtcggggaattccctttcctagcaaagggaagccgtgacagatggtacctggaaaatcgggacactcccaccctaatactgcgcttttccaatggccttagcaaacggcacaccaggagattgtatcccgtgcctggctcagagggtcccatgcccacagagccttgctcactgctagcacagcagtctgag

SEQ ID NO: 17440 - DNA, 1049 bp, Homo sapiens
ggtcctggctcgttagtggtagggctctgactagactcccagtctcctgacaccagcccagagttaggaatttggagagtgaagagaaagggcttcattcctgtttagagttgtcccaggctctttggagctgtctgacaggaagctttctaagatgagacctgggatggcagatggagaaacatgaactgaaaaggcagctccctgtcaagcccatgaaactttgatagcagattaggacgaggaatcgggcctcctaccagccccgtgctgcagtagaccatgcataggtattgattgttgctatggggggcagagatactggaatatgtgtgctttgcatatgtataccagattccagtattcccatcatttttgatttagtgttagcaatgactttcattagaggttgaattgctcccttctgctccctccctggatgacattctgggtggctctgtcctaaagtagacagaccctcgcctcccacccatcatccctgtagcctagctggcgacttctgcactgtgggacctcaacttctggctgcagagccttctgtgtgcagaaaaaggcctgttgctgtcacctgcccttgggttggctgggccctctgatgggcatactagagccacctcaggttctgcttttgtgcatctgctgagtacagtggccagggagtgcctgactgcaaattttcactcctgttatcctccgaaagctagagtaatcttctgccttgatttgcatattcataacacagcagttagactggtgaacccctcaagcaaaaatcatgctgatgggagagacaacccctcccctctgattccctttctttactcctttcctgaaatgatcagatcagagaactatggggaagtgtaatactgaaaatgaggaactagtatgagtaacagtggtatagtttcttcatttgtgaaatggagataatcagaaagctgttgtaagtcagccctggctgcatgtcagttacccagcgggcttttaaatagccccatcttcaggcccagacccaggagatcaga

SEQ ID NO: 17441 - DNA, 1071 bp, Homo sapiens
acattctgaagagatgttattggttatataaagaaagaaggaaatgtaatttcatgctattaaactttggcaacttgtctaagagtcctccaaatgtcagcccctgttttctttccagctgtattttcttgagtcttatttggcccaaactatttcttatatcccatatcaccctctttctgtgattcttctttttttctgaatatacattccttctttcttggattctttaaacttctgtttacactttctagagtaatttttttatatctgttttgtatgttaaaatttctgagccattttataaaaattgcttcattttgctgtcatacttagaagacagtttggcttgactaaagtctgttgttctgatatgtattcttgaggcaagatgcctttccctgtttttcatttttatttttatttattttcactagagatgaggtctcactatgttgccaaggctggtcttgaactcctgggatcaagcgacttctcccctcttaattcttgtttttttctacattcttggaattctgaaatttcaacatgatgtgccttggtatagacattttttaacccttctaaaccctacttggcacttggtcctttaatctgaagatttttatttttatttttattttttttagctaaagacaattttctcttggtatattttttgctatttctttcaatattctctcttctgtcctagtattcattttaaacaaatactggacttcctatatatattctccatgctttaaattttttctcagtatttttcatctttttttattttctggtagacttcttttctttattttttgatttttaaaaattaattaattatttaattattttgagacagggtcttgctctgttgcccaggccggagtgcagtagcacaatcatgcctcactgcagtcttgacctcccaggctcaagcaatcctcctgcctcaacttcctgagtagctgggactacaggcatatgccaccttgcccaactaatttgttttttaaatctttattaaagacagggtctcactatgtttcctaggctggtctt

SEQ ID NO: 17442 - DNA, 1918 bp, Homo sapiens
acggggtttctccatgttacccaggctagtctcaaactcctagcctcaagtgatccgcccacctcggcctcccaaagtgctgggattacaagtgtgagctgccacacccggcctattggttttttagagaattgtataatagtgtatcatagtagttttgttcagtcaacacagctggaaaacttgagagaagccttcgtctgtctgatgtgttaacagatattcctccagagcaggtagtcctagcctggaaaggtgcctgagtaagagtatcacctactcaatgttaccttggtaagtgattgacaaggaagactccaagggaacaagagggtaaggcagggaaacaagttgataatcatttgtggtgacttattccagataagaatggctgaaggcagctgtggtccaatgggaacggtcttagggtttggaggtcagaaggtgtaggtttgggttctacctctgccacttgttagctaagtaatgttaaatcacctaccttggtttcttggctgtaaaatgaaaattataaaatagtataaaatagtaatattttatactattattttttactatttatagtaattatttttatactattattgtacacttatgtgtcaggtactgttttaaacacattgcataacaggttattcctcatagcaaccctatatattgtgatattattatatatatttttaagttttattattattattattattattacttttagagatggggtcttgctacgttgcccaggctggtcttgaactcctgggctcaagcagtcctcccgccttggcttcccaaagtgctgggattacaggcatgagccaccttgcccagctgatactataatgcctgttttgcagataaggaaactgaagctcagagaggttaagtaacttatgcaggatcacagcgagtatgtagtgaagctacttttgaaacccaaagtatctcagttatgctgtactacctctcttgaggataatgatgctcaaaaaagtgctttgcgaattgtaaaacacctaccaatagtgactaaaatacgtgaggatattcagacagtacacagataacaaattaaggagacaatggtggggccaggggaagaggaactctcccagatatgctttaaggcagatcctctgaagagagaccctcttaaggaaataatatattttctttagaattctctaatatttattatagaactactgtgttcaagactctataaggtcgggcgcggtggctcatgcctataataccagcactttgggaggccgaggcgggcagatcacttgaggtcagaagttcaagaccagcctggccaacatgatgaaaccttgtctctactaaaaatacaaaaattagtgggtgtggtagcgtgcttctgtagtcccagctactcaggaggccgagacaggagaatctcttgaacccaggaggtagaggttgcagtgagctgagatctcgccactgtactccagcctgggcaatagagcaagactctgtctcaaaaaaataaataagtaaataaagaccctgtggcaggcaccacctcattatatctcatctaatccttttccctgttttgggatttttcaaaaaattctcttagaaaaccaaatggtacttagaaaaccaaaaccaagttactacctccctaaaagataggtagtctaacaattatatcttgctgtattgctgtatggtttgaggttttgttgatgtgtcttagcatgggatgataaactgaacttcagtggaacttgttttaaagaagttactgtatttgtaccttgcaggcataaaggattacaaatttgagagattttatgtggcccttttaaaatggctttgacttgttttatttttttgcgtgtcctggcctgttgtggggcatttt

SEQ ID NO: 17443 - DNA, 1645 bp, Homo sapiens
atgtccctgaagtgtttggaagccacaacgtttagagccaatttggcggtgacaaacacttgactggcccaaaacagtgacaagcttcccgtgccccttgtccaggcccacgtatttgctaacctcaagcgccagctaccgcaggccagtggaacagcgctccgggcggggcgggccgcggagcatgccggggcttgtggtcttctcggagcccgggcccgtgctctgcgaggccgccttccgccggtggccttcctgtgggcgggagagggcggccgggagcccaatgagggagcaataacgtggcaaccacccacgagcccgcgtcggtgcccgccccgcagggggacctactatccggcgccgagccggaggggggaaacggcgcccgccgcccgcccggagcccgcgagcaaccccagtcccccccacccgcgcgtggcggcgccggctccctagccaccgcggccccaccctcttccggcctcagctgtccgggctgctttcgcctccgcctgtggatgctgcgcctctccgaacgcaacatgaaggtgctccttgccgccgccctcatcgcggggtccgtcttcttcctgctgctgccgggaccttctgcggccgatgagaagaagaaggggcccaaagtcaccgtcaaggtccggtggagtccgcggcatttacggtgccggagctcgggcccgggcggccttggcttggccttggctcagcccctcctccctcggcttctgtctgtggcctcgtggcgtctgggccgtcctgcccattcagtccagggaacgacccggacccaccccgacacccccagcccctgccctgacccagggagttagttggatccccggatacccatctggggccgacactggcagtctcagagcaggctttttgcaaacacccctcagtgctggggagatggtgaaagatcacgcctgccggattccgaatcctttctctccttaagccaaattttagccacttccaattacaaagcacagtatgtatacttcaaacttaagtggtgaacttaggctccgctccttatgggttttctaatgttaatttttagaatctgggtccattagctgtttagagcaaatattgttatcctgtagtccaaggagggtatagataagcatgttttccaagaaaagggtctggagctttcattagattctcataggatttttaccgtcaccaaaatcagattcagaaccacttctctaaaaatatggctctattctctctcccatcctcaggttagcttcttgtaccttccctcccctagcaacgcccctttaaagaagctaagttggaaatggtctctttcctcaggtgtattttgacctacgaattggagatgaagatgtaggccgggtgatctttggtctcttcggaaagactgttccaaaaacagtggataattttgtggccttagctacaggagaggtaagtggctggagcaggggtagtcaactcacatgaagtgaaattggcactggggatggcagcaaactgacctgcagagttcagccgatctgtagcgtggacctcactgagcaccgactgcctgttgccctgggaacacagtattgccctttcttaagagtaatggggccctgaccag

SEQ ID NO: 17444 - DNA, 1061 bp, Homo sapiens
caaaagccttttttagaaggcttatcagtctattaggaatgtctcaggaaagatgagccatttctttggggagaaatatatttacagatggaagtgtgtgactgcgtgtctgtgtgtgtgtgtggtgtgtgtgcgcacgtgagtgcgtgtgttcatctatgtgcatttcacttccataaagacccagcccaagctgctgggaaccatgtgttcctgagtattctcagaggttaaacaagtgacaagtgagcttctgaaattagtgtctcagcaagctggctttaggaatgagccccattttatcaagcagagaaaaaaaataacagcagaaaagataaagataaaccaaaaatatataccccccaatggaaaataatgttgattcagcaattcccataggatgtattacatgctctaatttattatattattatttatctgtctttgatctttgcccattgtactcttaaaaagatgttgggatgttgattgcgatttttaaacaactagataatgtataaatcagcagtggaaatcagttttaatgtgtggatgtgtctgattattgttaaatgcctctttttttactttttttttttttagatgtataatgtttcataaaccctggcactggtcacaaagctcagctgtgaaaatgaaatttgtagtatttttaaacatgaatgtcaatttcaagtgtatttgaaatggttcctccaggagagatatttgtgcaccattaggaaaatcttctctgcagaggaagtagccttctttggagaaaatggaaaatgggttctgatatgtgatctcagagtagcccatttcctagggcaccatggaaaacacaaatgtgatctttaagtatacctcttccccagtttggggaggaaaggactcagtttgcaccctttttgtatgtaaaataaaatgtcttacctttcttggctacttctgcttgtttggttggttgattggtttgtctgtttttaatctccctcggctcatttgtaattaacaatctagctaggactaactttgatgcgattcaagactcctgt

SEQ ID NO: 17445 - DNA, 1033 bp, Homo sapiens
tgccatggtgcctgtcacacacttctgtctttctgtttcaggtggttagctcaaccaatggagagctgaatgttgatgatcccacgggagcccactccaatgcaccaatcacagctcatgccgaggtggaggtagtggaggaagctaagtacgtacatctttcaagggggctcttaagtcatgggttgaaaaatcttttctgtctcttcctctctgtgtgctgctcgtctcagactggatttctcatgcttgtaaccacagctttcttccttaactgttttaatttttgcatggtaccttaaggctgctactgcccttctttagctgtgatttcggggaagacagtcacatttttctagttcacatgaaaaagacatagtgaaccgaaagaatcatgttatcagggctacagtggatagtagccatgagcttcttggggctgtggagcttcttgctctatatgggatatagagaaaaatctgctgttaaaccatgggccatgctgaatagcattcgatttctgattgtgggctagcaactggatgtacaatcatggaacaaggagttcagggccattttgttcactctcaaatgattctggcttcagagagactaagtcaggcaagaaaaatattatagtctgcatctgtgaatgagagtgtgggaaaagaatggaagtcatactcatctcaggagggtaaggaggttgccccacacccttttctgcttctcttgcatgtgtatgtcttgccccacccataccaccagccccttggtgcgctgcatggtctgtgtttaaactcttaaaatctggggtggaaggtgagataactgccaattctgctgcaaaagcagcatttctaccacttttttccccatcccaaatttagatccagatttagacttcaagaagataccaggtagggagagatagagacaccatgagtcagtaactgctgctatccctgatatggaggacctttcttgtgagccctttgagaaccttcaggatatcccagggtcttgttttctg

SEQ ID NO: 17446 - DNA, 1047 bp, Homo sapiens
cacagggaaaccgcgtctctactaaaaatataaaaaaattagcaacctggtggcgcgcgtccgtagtcccagctactcgggaggctgaggcaggagaatgacgtgaactcgggaggcggagcttgcagtgagccgagatcgtgccactgcactccagcctgggtgacagagcaagactccatctcaaaaacacaaaacaaaacaaaaaaacaaatgcaaaaacagagagcattcatgagatgtaattgcatttagtatgtattatagaactcaacattaaatggcttaccattgtctggatttttttaagcacttaagtttttagaaacctgacagtactgtataatagtttaagagcttaaatattatatttcaatattacaaaaaataaaaagttctagagaactgaaaaagtctatcactgataggtttagttatagatattacttctaatattacaagaataggtttattctcagatctccagcagtcagaataaatgagactaagtgctctgaggatatagacaatgtcagtaagtttataaaatatggccggcacggtggctcacgcctgtaattccagcactttgggaggccgaggcgggtggatcacctgaggtcgggagttcaagaccagcctgaccaacctggagaaaccctgtctctaccaaaaatacaaaattagccaggcatggtggcacatgcctgtaatcccagctacttgggaggctgaggcaggagaatcgcttgaacctgagaggcggaggttgtggtgagcggagatcgcgccattgcactttagcctgggcaacaagagtgaaactctatctcaaccaaaaaaataaaaataagtttatgattatgttgtacaccagtcttattttggaaaatgaaacatttgaacctcttttggcagaaataattgtagtaggggaatattttgggtagctttgattctctctaacataactagcagcataaaatcaaacccctcatttataaggtaatagagcaagtccatacagctgccttctcatagaatatg

SEQ ID NO: 17447 - DNA, 1050 bp, Homo sapiens
atattgaaaatgtggagagttttcgccctctagtgctcaactgtttaaaattcaaacatttgtccagtgaatttttaataaccaaggggcttcttgttacaggaagtggatataaaaatggagaggcaatgagtaggtgtgatacagtatgagaaactgcagagtcgtttctctatctgccctgctttgtgggaggcctccactcaactctccttgttcttttctctttttcatttgtgcatccttaggttgtgtcaacaaactgtttttgtataactgctttttttttcaattatgaatattttattgcaaacttcagacaagccatgtagacaaaggattctgatggtcatgctgttttcattctttttaagattgtttcaattgttgtataccaactcagttttatgttatttatctctgtcagggtacctctccttcccattagtaaccatctttttacaacctccatcaaatcattatttaaaaagttgccttttctttcttcatctaccctgtagactactattctttttcatgcaaattccctataatttaaggcaatagttaaacatgttgcacttctgtattttgagttagctgagtggctttctctggctctcttgggttttactttctgtacaaagaaagcacaatcaagttgaaggtagcctcttagtcttgcttctgtagtttattcagataaagccctaaacttgattctgaaaaataaacacataaaatgtctgagatgggccaggtgtggtggctcacacctgtagtgccagcactttgggaggccaaggctggttgattgcttgattggcccaggagttcaagaccagcctgggaaacatggcaaaacccagtaactataaaaaatacaaaaagtagccagggatggtggtgcatgcctgtagtcccagctagtgaggaagctgaggtgggaggatcacttgagcccaggagggcgaggctgcagtgtccaagaacatgctactgtactctagcctaggcaacagagcgagaccttgtctcaaaaaaaaaaaa

SEQ ID NO: 17448 - DNA, 1065 bp, Homo sapiens
actcattggtagttaatgtttgagcagccagtgcgcatatgccactcttttgattaccaaggtgatgttgcagcattgtaaataaacaaccttttgtgccaaagccacacaaagaccacagtaacataattagtgtttttactcactagtgttttgtctgtcattgttcattactgtccagtgaattataaaatatttggatttcctgacaatgaatacttaaacaaaaagcccattgtgacttaggtttgttcagtgaattaatcattgcttataaatgtatgaaattatttgggaaaaatgattgattatgaatttaaagaatacctattgctgtgatatccagagcttgagacattaaattcctaaaataggaactttttgttgtcctgggactatgaccattttcttcagtacccaactcttaatcattaccttggccttttggaccccagtttcacattgatgacctgatctagaaattcataccaattctctaattatgtagagatagaacaaaaatgacagcactgggtaattgtgaatgtggttctggttggaggtcttccacattgtctctgcttttccttgtgtgatctctaactctttctcttccattccactttgttttctagtgagtggtcacacttttcaagctttgtttcttgattacagttttaccaccaagattttcaagacttaatgcttaagaattgatatctccaagataatcagggaagaaagtaaaggggaccatgagaaccttgaaactgagaataagcattttattttcctgttagctatcattttttcatttcttatagaaaccaaattgtaaaatcttataactatttttcttattttcttcaatcatcaatgttatgttaattgtattatggtcaccataggcaagttttaatttcttttctttttatgggaatgattttaggtttcagtatttccttagggtcttttacttaggaagatacatacattatcaatttaaaaattttccaatccataaatcttttttccagcatagctctcagttttgcttgtattcta

SEQ ID NO: 17449 - DNA, 1056 bp, Homo sapiens
ccaaagtgttgagattacaggtgtgagccacctcacccagcccatgaagtctttttctttcttttttttttttttttttgaaatggagtctcactctgtcacccaggctggagtgtggtggcacgatctcggctcactgaaacctccacctcccaggttcaagcaattctcctgcctcagcctcctgagtagctgggattacaggcacatgccaccacatccagctaatttttttgtatttttagtagagacgaagtgtcatcatgttagccaggatggtgtctatctcctgacctcgtgatccacccgcctcagcctcccaaagtgctgggattacaggcatgagccaccgtacccggccaaagtctttatactcatttgttttgtggatttaaaataatatagttatgtgtcacctattatatgtcagattttcagctaacgtagtttgctttttgaggtgacttatagttagttattttcaaatgtaatttatactcagaggacaaaaatcaaataacttcctgtaataatagatgtttgtgagaatacaaagtttgcaattcagtttgaccttttttgagaagttcataagttttgtgtaaatttgtgagaaattttcttttctttttttttaaagacagattcttgctctgtcacctaggctggagtgcagcagcataatctctgctcattgcaatctccgcctgctaagttcaagcagttctcgcacctcagcttcctgagtagctggaactacaggcgtgtgccaccatgtccagctaatttttgtgtttttagtagagaaggcgttttgccatgttggccaggcaggtctcgaactcctgacctcaagtgatccgccagctttggcctcccaaagtgctgggattacaggcatgagccaacacacccagccctgagaaattttcaaatatatttcttccccatgtctctttgttttataaagagttgaaattaggccaggcatggtggctcatgcctgtaatcctagcaccttgggaggccgaggtgggcggatcacctgaggtcagg

SEQ ID NO: 17450 - DNA, 1023 bp, Homo sapiens
gaggcgccccttccgagaaactgactctagccggtgtggaccgggagtttgccacctggagggcttactctgaaagggggagcatcccccgggagccaaaaggagggcacagatctcgtcagggtgactggggctatcccgtgcttccattgccctctttccctacccaccccgctgggacagagctggacttcgaaggttgtgggggttctgagtcgactgggtaccgcggggagccgcccttggcggagcttagggcacaagagtgggtaatgagactttcctctacccaacttccgtacgcttcccccacttcttcctttactgtttcctcgcccccacgtcctacaggagcaatgtcccccaagtgggcaggcatcacaatgtaaaagagagtggaactgggtttgttgcccctaaatgacacttaagatgtttggaaagtgcctgaatgacatattcaaccaagtctcccagctcgatattaattccggtataaattaccttagaaaagtggaattctgaaaagcatttaacaataggctagtccaggtgtagtcttgtgtagtagatgtacgtgtttatttaaaaagaatggactggggaaaccatatagatgtatcacaggtctaggcaagacatgttgaggcaaggcttttgcagcctctttcttacctgccagtaaacctgtcctaatttaaatgaagtagaaagatcctcttcatttttgtttcaatcagtgactgaatactaggtgctgtgtagtgatgtctcagaacagatatgtgaattttcagagagagaatgaatgttctgctgttgagcctgtgtcttaatcttttaaggagataattgcggtcaagtggaagtattgactttcaggcagataaatcttgggttgaacctagactatgccagttgctagttactgaccttgggcaagtcatggaacctaccagagcttttgtttcttcataagtagtatgagttaaaattcttacctgtattataagtaacatccca

SEQ ID NO: 17451 - DNA, 1048 bp, Homo sapiens
ggaggctgaggcaggagaatcacttgaacctgggaggtggaggttgtagtgagccgagatatgccactgcactccagcctgggccacagagtgggactccgtctcaaaaaaaaaaattttttcaagtatatatttgatgatgtttcactttcattaggcaaatttatacataatgtttccttttcgaagcattttcaaaatgtagcatggccacttagcttttctaaacagaagggaagtatagaccccttcttttcattgaaactgaattaaaaagtaaaatctacccattaagaagatagtttaactaagattgattgattgattgattttgaggcaggatcttactctattgcccaggccagagtgcagtggtgtgatctcagctcactgcagcctcaacctcccttgctcaagtgatcctcctgcctcagcctcctgagtagctgggactaaggcatgcgccaccatgctcagctaattttaaattcttttttagatatgcggttttgctctgtcacaagctggtcttgaacccctgggctcaagcgatcctcctgcctcaacctctgaaactgctggagttaaaggtgtgagccaccatgcccagtcaaaaccaaggttttaattttgtacccttcttcacaaagttagtctgttttttttttttttgagatggagtttcgttctttttgcccaggctggagtgcaatggtgtgatcttggctcgccgcaacctctgcctcccaggttcaagtgatccttctgcctcagcctcctgagtagctgggattacaggcatgtgccaccatgccaggctaattttgtatttttagtagagatgaggttttttcatgttggtcaggctggtctcgaactcctgacctcaggtgatccacccacctcagcctcccaaagtgttgggattataggcatgagccactgctcacagcttttttttttcttttaatgcattattcaaattattaatgctagtgttactcctgaccagataatgattaaaactactctggaatttttgaatgct

SEQ ID NO: 17452 - DNA, 1025 bp, Homo sapiens
aggcctggcacagtggctcacctctgtaatcccagcactttgagagtccaaggcaggcagatcacaagatcaagagatcgagaccatcctgcaacatggtgaaaccccgtctctactaaaaatacaaaaaattagccgggcgtggtggcacgtgcctgtaatctcagctactcgggaggctgaagcaggagaattgcttgaacctgaaaggtgttggttgcagtgagctgagatcgcaccactgcactccagcctgggggacagagcgagactccatctcaaaaaaaatcaagtaaaataaaaataaaaatatgaccaatatggaaaagttggaaaatatagaaatccccatcacctagaaccaactaggaataataccatggtgtattgtctttacaacttctctgtaagtacgtaagaatagtgaaaaacaaaaagtagggataaaactacacacaccaaacttggtgtgcaacctttaaaaaaaagtttccgagtttcatccgttgtatttcatgaatatctcattccttttttcctttttttctttctttcttcctttttttttttttttttgatatgggggtctcactctgtcacccaggctgtaatgcagtggcccaatgttcgctcacttcaacctctgcctcctgggttcgattgattctcccacctcagccttccaagtagctggaattacaggcatgtgccatggagttcagctaattttttgtgtttttggtagagatgaggttttgccacgttgcctaggccggtctcaaactccggagctcaagtaatccacttgccttggcctcccactgtgctgggattacaggcataagctgccacacctggccagtgtgcaaactttttttttttttgagacggagtttcgctctgttgcccaggctggagtgcagtggtgcaatctcggctcactgcaacctccacctcccgggttcacaccagtctcctccctcaccctcccaagtagctgggactacaggcgcccgccaccacgc

SEQ ID NO: 17453 - DNA, 1057 bp, Homo sapiens
agatttaattaagaacataaaggtgaacactgtttaggacttcatgggttttaaagtcaattcaaatttctccctattataaacatttcattagaaaacatttactatttctatctcttcagataaaaggaaatagaagttgatgaatttttttagagtaacttataccctgtaccactagactaagtttctttttcttttcttttttcttttttttttttgagacagggtctcactctgttgcccaggcttgagtgcagtggtgcaatcacagcttactgcagatttgaccccagggttcaaatgatcctcccacttcaggctcttcccaagtagctgggactgtaggcgcatgccaccacacgcccgcctaatttttgtgttttttgtagagatggggtttcatcacattgcccaggctggtctcgaactcctgggctgaagcaatcctcccgcctcagcctaccaaagtgctgggattacagacgtgagccaccacgcctggcctgatgaaatttcattagagccgcatctcatcgtctggtccactgttgaatcaccagagccaactaaataggcccttactgaatatatgttgaataaatgcatcctttaaggcattttaaaaatctctatttttaatccgaataattggatgtatgaaatgggtaatatccttattttaaagataaggaaatttaatatctggttatataacttgataaaggtcacacaactaaatcagtggagttgggtttgaacctgttgctgctatatttttttttttttctgagacacagtctcgctctgtcacccaggctggagtgcagtggcatgaactcggctcactgcaacctccgcctcccgggttcaagcaattcttctgcctcagcctcctaagtagctgggattacaggcatgcgccaccatgcctggctaaattttgtatctttagtggaggcagggtttcaccatgttggccaggctgttctcaaatgcctgacctcatgatccaactgcctcggcctcacaaagtgctgggattacaggcgtgagc

SEQ ID NO: 17454 - DNA, 1008 bp, Homo sapiens
atggtttggttgggctgtgtttcagagtataccaccctttaaaattctgatcaaatactcttgacccataaacccttagcccttgttctgatggggtagccacaggagtccaccagctgggaatcatccactgagctctggatcagagcattctagaggctggaatgtcgggggagttttaggggtagttttccggtcattcctaaaaccatccgtcctaactcccaggcaggtttaaatagtgcaaactcttaggcagagagctcccagctgcatagtttcacaggtgagtgtcccaagccagggcctccaggaaacaggtcccagagtacccaggggtccaaagccacttcggtgaatggaaatctaaaggtgaagagaggggaggccagggcacagagtaaagctcctgggctaagccagtggccaagccagaaaacaatgctgggcagaaaagggttacaaggcaggtagtctggacactggattcaacagcttgccatcagccagggaaagtgaagctgaggatgcatatggagcagggccaggaagatcaggagagctgagggagaacaggaaaattgggaggaaggaagaggcagctcagcagcaaactccaggagaaataaccagcagccctcacagatttgtgattgtctcttaaaaagatttattttctcttcttgcctgaatgtacaaaggcaaaaagagtacagtttgtatatatatatatttatatatatatataaaaaaacaaggaacttggtaatgtacactttacagaagggaagaatcaggaagactgaaattaaattcaacagagcaacgccaatggaacaaaatctatgaacagcaacactgcccctccagcccgggcctccagctcgccccaacctgctcccaatgggagggctgagcaccaaggcaagcgggtgggctggggcaggaggggctggggacagggcctgggaggggcttgatcccaggaggggggcccatggtaggaga

SEQ ID NO: 17455 - DNA, 1007 bp, Homo sapiens
acagctgtgggacattgggcacgttacccaccatctctgtgtttctgtaaaatggtgatgataatgcctacttgataggtgtgttgttcgcatgatggcatggagtcgcgtgatggcatggagggagtgctgtgaaagtgcagatggttgtgatgttatttaatatcattattgtctgggttcccttgggtcctctctgaggctggaggcctctttgtgcctgagttcctgccttctggccttccttggacggggactgggatagaggccacccaccccaaaggatagtggcgtttttggggaggcaggctaatgggaagagattagaccagggagtcattagttctgtccttgctactcaaactctctgggcagccctttcctcaatagtaaaacaggttgttttactgtttcccgactaagaacattttatttttttccttccaacagccccactgcttgccccctgacagtgctgccccagagatagggtataaaagtgtctaaatgaagtatggacactgttgatcttaagtgaattgttttgaacccaaaagaccaatagaaggactgagtttttctgtgcctgggggcaaggaggtgacttcaggagaaggtagcagctgaaggacaaggtgatgagaacaagtacctctgttctctaccccagctgcatgccctttgccagtagcccagcctgagcccaggcctccacagctacgtggctgcagagaccagacctgcaggaggggtcctggaggttgtttggtcctgctctgtcttggcatgaggctaccttgcctggccttctaaccctcttgatagaatcttccccttaaagagggtgaggcacaaaagcaactgtggatggcaggcccagtggggttcagcatagaaagatggtggcctaaaagcaagggttctcagcgtcctattgcatcccacggtcctcccagactggatttcattttacgttccaacctgaggatatgcgggtcttccatggc

SEQ ID NO: 17456 - DNA, 1071 bp, Homo sapiens
tgaccccagccatctcccatgctgcgttcacctacccaactgccactgccgctgccgccgccctccacgctcaggtaagccctttaaggttggggagggcgaagaacaagggctcttagctggccagactttgcatgtgcctggccacttggccgctgctgtcccagagctgcagcagaactcttgtcttccttgatggtttgaaagcccagaccccagggacctatttgtcctccccttgggtttaggatttgacagggagggagaagataacccacgagttcccatggaggatgccaggcagcccagctgtggttccccagccccaagcacccctgcccaggcaccgactatgttctcccatggtgatgggactatgattccagtcctaacctgggtatggtctctggagtcagaccatctgcctctgccccttcctgtccctttcatcaagctcttacagattgctgtgcctcgattttttttttttagtcatctgaaaaatgggaatgatcagataatctgccttagggttgttgtgaaagttagatgtcaagacgaagtgactactgagtgctaggatgtaacctagagcgccctgagtgttggctctcgcttccatgaaggctggacgctgtccactgtgaacctgtgccgggcaggaaacagggagtgaatgcttctggggagagtcggggctgttagagcagggccaggaaggctctgtgtggggtgctgggctgggtgcccaatgggcaggcagggagtcaggctttcccctggccatgcaggcgcttcctctggtctgacttggccacaagtgcaggtcactggagcactctgcaggggaggtctcatcccactgtgcgtgtgtcggggagcagtggggtgcctcacagtggcagtgacaagttgcagccaggcagccacaggaaggggctggggggcacttttgagcccacctcaacctttgaccagccaggtgatgagcactaatccccaggaagagctgcccggccagggtgtgctgtgctgctgcgaaggagagaattgaggttgctgggacctggc

SEQ ID NO: 17457 - DNA, 1083 bp, Homo sapiens
tgatttagcctcccggactgctccccacagagcatctgtgctcaggcagacgggcccaccagctcatccgtgactgccttgaccacctgagaggtggccagggacaggatgggagctgtggggtagccttttggactctatagaacctgaaagatggaaccctgaggaaaagggtcatcggacccagagggaatcctggctggaaacgagtcttgagccaggataaggaaacagcccctacactcaccccaccctaccccaagcggaaactctgtgctgagaacttgctatttaagaggcctctggggaggtctggccagaaaggagccatttgagggagggtttaaaattagcctgggtgaaatgtgtggcccctggggagaactgaagcagaggtttccgtgggtctgctctggtctgggtctttgacccaaatcatgtcctgctttcctggggaggaaggggaggagagaagggagtggtaccgatctaggtccctccatcaggacgctggtggctgcactcttggcccatcctctggggtgaggtgttggaggcagaccctgggctacccagagggcttggtgctcgggtcctgtcgtcctttcccagcacccaaagcacccatcacctctgccaggctgggcacgtagtaggaagacttgggttttgggttttttttttttgagacggagttttgctcttgttgctcaggctggagtgcagtgggccaggctgggcatgtagtaggaagacttgggttttgggttttttttttgagacggagttttgctcttgttgcccaggctggagtgcagtggtgtgatctcagctcactgcaacctctgcctcccgattcaagtgattctcctacctcagcatcccttgtagctgggattataggcatgcgccaccacacccagctaattttgtattttttagtagagacggggtttctccatgttggtcaggctggtcttgaactcccaacctcaagtgatccacccacctcggcctctcaaagtgctgggattacaggtgtaagccaccacgcccagccttttttttctttttttctgagat

SEQ ID NO: 17458 - DNA, 1053 bp, Homo sapiens
catttacacaagtcttttatagttgaaccattattgttttattcatatgtgtcatctgtatttgtcttttaggttttccagatgaaacacacacaccattgtaaatggaatctcttttaaaagattctctctctatattttttgcccatttagccatggttcataggagttctgtggtgttagtatattttctatatttagccatttccttgaattatttgattaattctaagattttttttagttgattcctctggacgtcctatgtatattaagtattccatctgaaatcaataagtctctctcttcctttacaatatttacactccttatttctatttccttttcacaccttagtaccagggccaaaatttccatatagatgttgaataatagtgacaacagcaggccctcttctttttaccaagaatggttttagtttaggtataaacagtgggtatcagtttgggctgattggtgaagaatgtgaaattcacaatcaatggggagaggcagagtgtgcaccctgtgcagaggcctggaggagggacagagcaccaggtgtgttggacagtgtgggaccaggctgtgggttgcacaggccctttcaccagaagcacagaaaactgaacacatttcaggtgtcccacccctccgcccagtggttgcttagggcgaggagaggcaaggtggtacctgtccactgttgctcgatggcgtcgacatgtgcctccgtgaactcccaggaatatgccagcttcttccactcacggggctgcagatacctggaggccagccgccacagcacagaacggagctgctgtgtttcctgccgatggtcctgcttaaaggacaagctcttcccagagggatcactggggtggtcctgtggggcagatcccaaaagtgcagaagctctccctcatgatcccagacaggggcagtgccgagccgaggcccctatgaccctcctaccacctctgctggggtgcctgggagctggagtcagcaagggccaggggcttaatgtcctctcttctggtttctcactcc

SEQ ID NO: 17459 - DNA, 1048 bp, Homo sapiens
cggccggatcacctgaggtcgggagttcgagaccagcctgaccaacgtggagaaaccctgtctactaaaaatacaaaattagctgggcaaggtggcacatgcctataatcccagctactcaggaggctgaggcaggagaatcacttgaacccaggatgcggaggttgtggtgagccgagatcacgccattgcactccagcctaggcaacaggagcgaaactccatctcaaaaaaaaaacaaaccaaaaacaaaatggtggaaatgctttgggtgcagccagtggggtacttgtttcctaggagccatcctttcattgattttatcattttaagtaattggtaggtatctatgatgccatacagctggcttactgtgcacttctttcattgctggcaaggcgaggctctagccttaaaataaagcccagtggccaggtgtgatggctcatgccgtactcccaacactttgggaggccaagacaggaggatcacttcaggccaagagtttgaaaccagcctgagcaacatagtgagaccccatctctacaaataacaataataataaattagccaggtatcatggtatgcacctgcagtcctagctactcaggaggctgaggcaggaggatcgcttgagcccaagagttcaaggctgcagtgagccacaactgtgcctctgtactccaggctgggtgacagagcaagaccctacttcaaaaaaaaagcccagtgagtaaacacatctgtatgatcagtgttttcaaataatgtatagggaaatatcgttttcacatctacttaaaattgcactctgatattttttagttttttttgttgttgtttgtttttttgtttgtttgtttttgagatggagtctcgctctgtcgcccaggctggagtgcagtggcacgatctcagctcactgcaagctctgcctcccaggttcacgccattctcctgcctcagcctcccgaatagctgggactacaggcgcccgccaccatgcctggctaattttttatgtttttagtagagacggggtttcacc

SEQ ID NO: 17460 - DNA, 1044 bp, Homo sapiens
ccagcactttgggaggcaagatgggaggattgcttgagcctaggaattcgagaccagtgcaggcaacacagggaggcccccatctctacaaaaccaaaaaattcacctgacgtggtggtgtgtgcccattgtctcagctacttaggaggctgaggttgggataatcacttgagcctcagaggttaaggctgtggtgagctgtgattgtgccattgaactgcagcctggacaacagagcaagactgtctcaaaaattaaaaaagtaaaaaaacatcaactcctttctctagcgtggactatccctataatcagacaggagcatctttattaaagggattcttaaggtaatgtcaaaagataactgatggtactgcagttgagaactaagacaggaagtatggtgtcagaaaaggctgtctcacatctggtcctagcattgccatgtgatcttgggtaagtcatttaaattttctagaccagattccttttctggaagaactaagggtgttggaataatttctgtaagagctcttctggtggccgggcatggtggctcacgcctgtaatcccaacactttaggaggctgaggtgggtggatcacctgaggtcaggagttcgagaccagcctggccaacatggtgaacccccatccctactaaaaatacaaaaattagttgggcgtggtggcgggcacctgtaatcccagatactcgggaggctgaggcaggagaatcacttgaactgcaggaggtagaggatgcagtgagctgagatcacgccactgcactccagcctgggcaacaagactgagactgtctcaaaaaaaaaaaaaaaagagtgcttctgattctgtgattgtagtatttcaccaaattgttttctgtagttggactatatactgacaaaatagccagtttccttggctttcttctttaaaatattgttggtatagctagatgagactctacatttagttctgatgtaaacatgaattcttgacgtgaaatatcacatgcttttatttcaggattaacctccatttc

SEQ ID NO: 17461 - DNA, 1032 bp, Homo sapiens
gcatgtttattactctcagtaaatagaaatcttttttagtcagtaagcatgtttcaaaaatattttgagttatttaaaagaaaaaaattgcacatatgaaaatcgtttcagaacttttattgaagcgggcaaaagaaaagtgagctagcaagttatagaagaggctatgacatagatacagttatgaacttgttcttcaaattcatttacttatttgatttaatgttcaaattattacaacaacctaactcttctgaaagttaaataccctctttaaggggtgtcataaaaagagcactgcactgagaatcagaaaacagaagccagtcctggctttgctactaactagctgggtccaaccttgggaaaatagctgcatttctctgagcctcactctcttcatgtatgaaatagaggattgaactacagtctggaaataaatgcattcaattcagaaattttagagaacttatttcctggtgtgtgttaaattttattaacatttaaatcaggctgtaggatctcaggtatgttggaaatgtgttacatgataaaggtggtatttcatactggagggaagggtaagatggattatctagtaaatagtattgggataactggccaaccattggtgggggaagccctcaaatcctatcttttaaaatcatagtaagtgctatattataacaatgcatatgtagttaacaatactgtatggtatacttacaatttgttaattgagcacatttttcttatgtgttttttaccataataaaaaaatcaaaatatagatggatcaaggatttaaatataaaaagtaaaatcacaaggactataaaaaagcacaactgaataatttgacaatatttaataatcttaaagtgtggggtaggcctttttaagtatgatacgaaccaccaaagtaatgagagaaaagacttagaaatataattatgaaaataaaaaacttatgcatggaaaaaatggctgtccccaagattaaaagtcaacaaactgaggaaaatattcaca

SEQ ID NO: 17462 - DNA, 1508 bp, Homo sapiens
caaataacccaattaaaaatggccaaaaattctgagtaaacatttcttttttgtttgtttttgagatggagtcttgctcttgttgcccaggctggagtgcaatggtgcgaccttggctcattgcaacctctgcctcctggattcaagcgattctcctgcctcagcctccctagtagctgggattataggcaagcgccaccacgcccggctaatttttgtacttttagtagagacggggtttcaccatgttgacctggctggtctcgaactcctatcctcaggtgatccacctgcctcagcctccctaagtgctgggattacaggcatgagccactgccctggccctgagtagacatttgtttcaagcagatacataatatgaatggccagtaagcatataaaagatcagcaacttcatctgtctttagggatatgcaaatcagaaccacaatgagataccacttcacacccattaggatggctataattcaaaaaacagacaaaaactagtgttggcaaggatgtggagaaatttggaaacttcatacattcatggtaccatgtttacctcttaaaaatggtgcaacctgtgtggaaaacagtttggcagttcctcaaaaagtgaaacacagaagtatcttatgacccagcatttcctttcctaggtttatactcaagagaattggaaacattgtgctcacacaaaaatgtgtacccgaatcttcatagcagcattattcagaatggccaaaaagtgaaaacaacccaaatatccaactgagggatgcgttaaaaaaatgtggtatatagccatacggtggaatattattaatactcagccataaccataatcacatgcttatgacatggatgaacctgaaaaatatgctaagtgaaaaaaccctgtcacaacagactacatatgttattattccatttatatgaaatgtccaaaataggcaaatccataggctggaggagagaggataatgggaattttctgataatggatggcgttttttctgggagagagaggtaatgaaaatgttctaaaaattaggcaagaaaaaaacgagtgacattggttgaatgaccctgagtctactaaaaaccactgacttggaagcttcaaaagggtgaattttctggtatgtgaattacatctcaataaagctgtcaaaaaacaaaacaaaacaaaaaaacaacccaagatggaaaagagttggacatgtttgagggacagaaatgaggctggtgtggctggagcatagctggcaagatggagagtagctaaggtgaggggagaagcaagattgagtaggattgacatcagagggccacggcaggggagtaatgggattaggtatgtacattcttaaaaggttgccctggctgctgctagagagtggagtggaggtcagttagggaattggttgggtgtggtggctcacacctgtaataccagcactttgggaggccaagaagagtgaatcgcttgagccctggag

SEQ ID NO: 17463 - DNA, 1056 bp, Homo sapiens
tcttccaaggccttgtgcccaattttgtattcataattgtgtgttctttttctgtgaggtgccttccaaattatgtaagtatcagactccacaaaacatggggtgggtcaggattggcagcagaaggtggcagcggggcacagctttctgccccccagcagccccacagtcaggccaggagatgctgcagaataaggccaaggtagaattcaatctgcaagacagagacctgaggtctggtttcttacatgcaccggcttgtgaccttaggcaagtcactgaaccaccccttctctacctgcactgtgagccaacaacccttcacacggttgtttagagcatacatagtagagaagaggctctgtaagcgtgatgtgccatgcccacatccaagaccagatgttgatgccaggatggctcttccctggccaagatgaatttaactctcataacaaccctgtgggggtgggacagtattctgtagatgatggaaatgaggcacagagtggcaaagaatctttttcaaggacacaagagtagactcagctcctaaactttgatgttctccaccctggaggtaataaagggtagaccctagggtgaggtcgtggcagggagagccctgagaagatgcgtatgggtggggattcatgtgtgttacatatacactccaccccaagagccaggcggcagctgtgttttccttgggaggaggggacaggatgaaacgttcagggctggcagagaggtacttcctcatgggagaaggttcggggcgatgccggccaaaccaatggaaatgccttcaagtcaccctccttaatccagggtgtgtttcaactggtgtgcccagttcctcccctgctccatgccctgccaaaccccagcccaaccaaattcaagaaggagggcctggttgggaagacctacccctgctcatctgtcaccaaggtgtggggcataaaacctaagtagggttgaggtaccaagcgtgtgttgcttaatcaggtcattaacgtttctgaaccttgatttcaatgtctgtaaaatgggata

SEQ ID NO: 17464 - DNA, 1088 bp, Homo sapiens
gggcagattgcctgagctcaggagttcaagaccagcctggccaacatgaaaccctgtctctactaaaaatacaaaaaattagccaggagtagtggtgggtgcctgtaatcccagctactcgggaggctgaggcaggagaatcccttgaacccaggaggcggaggttgcagtgagccaagaactctaaggcagacagacctgagttcaaattctggctttgccacttacagcaataagattttggtcaagatattaaactctctaagcctgtttttttcctttgtaaaatgtaaatgataataaaaccttcttcatagagttgttacaaagatcatatgaaatatgtaggaaaagtacttaatacactatcatttgattctactaattataaatatgcatcatttctttggcagtatcttggatttggaacaccatctaatctgggaaaaggcagaagggctgcagctgctgcagaccttgctaatcgaagtggggaatcgaatactcaccaagacattgaagaaaaagatcggttattgcgtcatgtggaagccagagatctgattgagtttggcatgattcctgagtttgtgggacggttgcctgtggtggttccattgcatagcctagatgagaaaacacttgtacaaatattaactgagccacgaaatgctgttattcctcagtaccaggccttattcagcatggataaggttagatttttattttttgtacttagttattttttattttcttgctattgaaattctacataaattaacctaacaacaaaaacaaattctgctcatctagaataccagcctattccttactaaatatggatctaggaatcaaggaaggcatattgtattatgttagaatttaggagttgtctttattttttctgaattaaaaccatcattatagcctaaagcccaagaaaaataatgccattagcttacctcaacacctccaagccagacatacaggattgtcctttcagtcttggtattctaaatgcttttgttgtgacatactgtgtatatttttatattattttgccaaaatagagttttattaatcccaca

SEQ ID NO: 17465 - DNA, 1052 bp, Homo sapiens
cagatgactctagaaacagtttagcctgttgacctacaggatgtcatggatgctgcgttgctccttcatttatcatctgttcttgttcacgtgaagagcatgacagcttcctgttcaaatttctttaagacaagaatgtaggcgggaaagagtaagctaaagttttgttaatactagcactgcagatacctcctgcttccatactataaagaattcatatacattagtggggcaaatcactgttgtcaaggagattttgttaccatacgtaaatgttactccgtagagcagattacaaagcagttgtacaaaatgatggatggaagaaataaaagtgcatttttataatgtcaagctattggatatgttaagtatgaaagatcaaataactttgttctctagctacctaagtattttaaagctgaggctatcttgtgtatatctttttcgtattataaatagaatcctccttaaattataggaattgtctttctggatgaagtagataagattggcagtgtgccaggcattcatcaattacgggatgtaggtggagaaggcgttcagcaagtaagcagttgagtattttgttcaagcccactaaaaggaagggaatacatcaacctcccaaatattgtacgtttggtttcacattcaattagattctgttttatttcttccgcccccaaactccacatatcattttgaagtagtttagatcctaaaagaaagttgttgacaatttgaaataacaaattaccttgttaggaaatttaaaatattttgaagaacagaaaaaatgaaatttaatcttttttttttattcctcaaaggcccagttaaacatttctagaagacttttgaagaaagttatgattctaactagacatgaatgaactatgtacatgcttcttattccttccacttatttagaagataggtataaaataatgtttaattccttgcagagccataattgaagtcacaatgatctattggccaacttgaccttttaatgataactaattatgacataaactattaaagggtga

SEQ ID NO: 17466 - DNA, 1038 bp, Homo sapiens
gctgaggtaggaggatcgcttgagcctgggaggtgaggcagcagcgagccagccattgaattccagcctcggcgacaaagcaagaacctgtctcaaaaaaagaaaaaaagaaggaaaaaaatcatgtatcctacttttgctgttagtgtcagtaactctctgaaatgcaaagattctactacagatattttcattaatgaatcaaataatcaaaaaactcattacttaacataatttagagttaatggtaatgaattgtaccaccatgtcagccttcctatacaatccaattgaagaaagcttcaagattgtaagacttcagtgtctgatggttggctagagagtattctctatctcctaaccctaatattgagactttggttacaatttcacacttaccattaaccataattggccaccatatgaaaaggtactagatgtagtgtgtttttatgtactggaaagacttaaagtagctccatcccatagctggaatattaggggttctgaacaaaatttaatttggatcacaacataaaatgaaagtgggccaggcgctgtggctcacaccagtaatcacaggactttgggaggccgaggcgggctgatcacttgaggtcaggagcttgagaccagcctgctcaatatggtgaaaccccatctctactaaaaatacaaaaattagccgggcgtggtggcgtgcatctgaagtcccagctgttcgggaggctgagacaggagaatctcttgaacctgggaggtggaggtcatggtgagccaaaatcacaccactgcacttctccagcctgggcgacagagtgaaactccatctcaaaaaaaaaaggtagaactggatgataaaaccttctaaacaaatttgatgtgatataataaaattatacagaggctgaaaattgttcaatttataaggtcagtgtcttatattttaatcaagaaattttcctcctttttttttcttcaaagaaacatttcaacctttatagacctaaagaataatttgttgccaggcgcggtggc

SEQ ID NO: 17467 - DNA, 1037 bp, Homo sapiens
caccgtgtccagccaggtactaataatattaactattatcattttgaggagctaacagaggtgaaaacatgttaaattatgagctcctttagttgtggtatcattcccggaaaggtccctggtgactccagactcctagaaagaggcagtgggacatggggagaggagagaaagtccagttctagtcccctgctctctccgcctcaataagtcacctagcctctcaggccctcagttcctacttctgaagtctgaatcattttaacttgtcagagggaaggcagtttcaccagctattctagagtcccttttcagcaaaaaggctcatggtgtgtggctctgggggcagggtctgggtggaggtctgtggaaccaggttggagtgggggttaggagaactgcgggcaggagctgctggggagtacagcctggtatttagggtgccctgtgtagggaggtgggtcatggagggaggtagttcctggcacagtggctggtaaccctggaggcctctatcacctggaggttagttgctcaggcctggtgtgtggaatgcaagttcttctctccttcttgaaggaatgaagttcttctcccgcttaactgagggaggcctgaggaagtctcccccgcagctcctcaaacacacacatctgcctgtccattaggacaggaagctgctgtccccagcgatgagtgagtgcccatacctaggcctaccctcatgtcagggcctcacctgtacccagcctcagctcataggtaggtgcaaatggatggggttcagacactttaacctgccagtcagcactgcacaaactgaccctttctgacaccgctgagaagttgtgtggtagaaaagcccttgtctggacaccagggatcctgtgtggctgtggacaagttgcccaccctctctgggccttgcttttctgattataaggtgagggggttggactgaggctcacctctgctctggggtacgaaggcttccttccatccatcttcaagacgtgcctgcctcccctgggcctcct

SEQ ID NO: 17468 - DNA, 1033 bp, Homo sapiens
agggttcctccggagtttccactctagatgcataacttctcttcctctctcaattccatccagtggggcgtagccctctgagaagtgaattgtagaggtctttcctctttcactctcctctttccctgtaaaggcaatggatgggtagagcaatcccagggaagagtttccaaggcggaagggaagcagaggctagaccttggacttggtccctcttgtggcttcctgggtaggtccagatgtgtatgcagcgtaccagaaaccacaaggctcatttgcatctgtggtctctgagttggtctcatgactcagtcatcaccccctggattcttacgtatctttggaaatgtggctccaaggcctttcccagccaccctgcagtcctctccctatatctcggtagctgtagttaccagctagatccttctcccgtcctggtggaggtggggctccttgggctctgaaacactgccctttctcccctggatccaaccttctgttgcctgtgttgcattgtcccagctcctctgacttttgcccatgtgtaggtaaggatgggggttgtaggagaaacttcggggtagaaaagccacaggacagttgtgagggaggaagagggtgagaggtccatacataagagatcctggctgggtgtggtgactcatgcctgtaatcccaaccttttgggaggacgaagcaggaggatcacttgagcccaggagttcaagaccagcctatgcaaaatatcaaaacccagtttctataaaacaatacaaaaattagcccagtgtggcagtgtggtgcctgtggtccccgctacttggaaggctgagcgagatcacttggaggttcaggctacagtgagctggaataatgccactgcattccagccagcctgggtgacacaccgagaccctgtctcaaaaaaaaaaaaaaaaaaagagagagacatcctgttgactttggtgatgggttagccccactggtcctcagagagtcacttctcacccagtctattctccttcccacctat

SEQ ID NO: 17469 - DNA, 1054 bp, Homo sapiens
tggtatcatcttcatgtggaaactgagtcccagaaaagttaagtggcttgtcacagagctggtaggtggagcagcaagactgaaaccttgatcttcttccccaaggtcaaaagctgtttccaccacagcacgtggcccgcagtagtgtgaatgccagattggtttccccaactagaatgcaaacttggtgagggcaggggctgcttctccctgctgagcccgcgagtactgctgagactagttgtgaagccagaggtgtccagcagaaaccatctgatgaattaagaaaggcagcagcccaggtcaggtcctgtctctccgtccgcccttcacactgcaatcccaggccctggcctccttatttcacgcagccatcactgctcttctcccctcactcttgttcctctttggagctggtgggaagggagtctggagactcacagggcttctaaatgttgacctgtgtgtccaagtgttgatgagtgtggcagagactgaggcgcatgtgtttaggagtgcagagctatgtttaccaatttgtgtgtggtctcaatggtgttttatgtttgttcaggaataggtgtgtccatgtcgtgaataatcatagaatcatagcatctcagaggtcacctgctacattccagtgagctggggcccagaaggggaaatgactgggccaaaaccacatggctagactgtgatggagctggatctagaaccgagggtctcctgattccctcgccattgttttgtgcacgtccccacgtggctctgtcagcccagacctgccttgtgatgagtatgggccattgtcctgacctctggccctggttcctctcagacatgccattctgccttaaagtaaggagtcagaccagagcctaagaagggaccttgggccattgagcttttataagacaaggaggcagcaggtcaaccttctggaagacacaacagggagaaccaaccatttgtctatgaataatggtggctgggccctgcagaacattggttccaataataaacattggcttttgtgtgtttttgccttgac

SEQ ID NO: 17470 - DNA, 1048 bp, Homo sapiens
ttcctgaagaaagtgatgagtagtagagctcgacatggagttagccctgtagaaggagaatgatgatggggacagttttccagagaacagcatgtgcaaagttcagaggtgatttagttgagatcattggattaaactaaatctagctggagtttagggacaaggggtggatggggggcaggtgagggaagcatggaaaggggtcagggagtatcaagacaggaggctgaagaggggagctagatccagctcacaaagggctttacagggcccaccaaggtttctggcctgagagtccccatgagcccttgacaggatttaaaatcagctttgcatcatctcattccagccagtgtggaggatggattgggtggggctggaggcaggaagctccagctccttcgaggctgttgtagcaatccagaagagaggatggtggcagctagcatagtggcagttggggttgggctggagtggctgcattccagagattttcaggaaatagaatcagtagaacttgaggatagattgaatttgtagggggcgagagagaggaaagtaagaaataggccgggtgcggtggctcacgcctgtaatcccagcactttgggaggccaaggcgggcggatcacgtgaagtcaggagttcaacaccagcctggccaacatggtgaaaccccatctctactaaaaatacaaaagttggccaggtgtggtggtgcatgcctgtaatcccagctactcgggagtctgagactcgagaatcgtttgaacctgggaggtgaaggttgcagtgagctgagatcacgccactgcactccagcctgggcgacaaagtgagactctgtctcaaaaaaacaaacacaacaacaacaaaaaaacatgaggcagaatgaagggctggtattggggttaggataatgcctgtgcctgcccatctcctcccaacactgttcttgagtcagggactgggacccctttgtgaacaggtggcgagaagccgagctctgttcttatcacacgcacaaaggtggggctctcggctctcc

SEQ ID NO: 17471 - DNA, 1030 bp, Homo sapiens
gctaagcatgtttattaatgaagcagtacttctgattagtatatgacattctgaagttaattaaactcattgcactaaatgtgtcttccttggtatagtggaggatttgaggattggaatatagagtagagtgcttgcttaagcctgggagcccatctttatagctatttgatgtaagaaaagagacatggccatttctaaactatataaggtgagtgtgtctattcccagcagatataaaggaaaaaggaaacttttttgattcccaccttcccagcctcacctagccatcttccagcctcaaatatagagatgttagtgcaaggtcctgggctctaggtgatcatttcataagtcctttacagataaagaaaaagtagtgtttgtatgtttgtttttaagtaaccccaaaacaaatttatattgtattcagcaaaattggaattcaggtgtttaattttagaacatgaagtgcctgctgttttaagcattgacttgtataaaaagaattgcatgtctccagtaagcttatgggttttctcatttttaggtatatggcttttaatcatgtaaagtgaaacattagttttcttgcattttattacaggttctttgttgcaataaagatgctgctgaaattaattgatttaagtgttcctttttcttccatttccccatgggaaatgtacaaccttgccttgattagtgacaactgtggagggactaatacacatgaacaaggtcatgtgcttgcagtggagaagagaaactgtagtatgaaggattacatgggtgttttagtataaacactaaccaaaatgcatccaagcccaatgggaggtgtgcagagaactgctttctatctgcaagtggttaccaacatccagtggttgatactacaagggtaaatggtgttagagccagtgaggagcatatccccctgccccaagctccacccccgagcagctgggggtttgtgggaataccacctagggttgatagtggcttctgcatgctgcccaggaaattt

SEQ ID NO: 17472 - DNA, 1019 bp, Homo sapiens
atatgattgacatttgtattttcatctacacaagtcatgaaagagttagccgggcgctgtggctcaagcctgtaatcccagcactttgggaggctgaggcagcaggatcacctgaggtcaggagttcaagaccagcctggccaacatggcgaaaccttgtctctactaaaaatacaaaaattagtcgggcgcagtggcagacacctgtaatcccagctactagggagactgaggcaggagaattgctcgaacctgggaggtggaggttgcagtgagctgagattgtgccactacactgcagcccaggcaacagagtaagaccctgtctcaaaaaagaaagaaaggaagttaaattttagacttctggttaaagcttgaagtcaaatatttgtaaactttaaaaaaaaaaaaacggtcggctgtgcgcgatggctcaagcctgtaatcccagcactttgggaggccaaggcaggcggatcatgaggtcagaggttcaagaccagcctggccaacatagtggaaccctgtgtctactaaaaatacaaacattagccagtggtggcaagtgcctatagtcccagctacttgggaggctaaggcaggagaatcgtttgaacccaggtgctggagggttgcagtgagccaagatcgtaccactgcactccggcctggacaacacagcgagactctgtctcaaaaaaaaaaaaggcttaatagaaagcaactcaagagaaaaatcataggacactctcaagctttatacatttgttaaattattttgatggtaagactaaataagaagattttcccctcccagtgaagaaatgatacagtatataggattgttaaaagacattctaaaaactagattttaaagattaggctgggtgtagtggctcataactgtaatctcagcaatttgggagggaggatcacttgagcctaggagttgggagacaagcctgagcaacaaagtgagaccccgtctctacagaaaaataaagttagctaggcgtggt

SEQ ID NO: 17473 - DNA, 1156 bp, Homo sapiens
cctgggtaatttttgtatttttttgtagagacagggttttgccatgccacccaggctggtcacaaactcttgggctcaagcaatccacccacctcagcctcccaaaatgctaggattgtaggtgtgagccaccgtgcctggcctagttttgttttttttaaattatttatttatttttttgagatggagtctcgctctgtcacccaggctggagtgcagtggcgtgatctcagctcactgcaagctccacctcccgggttcacacccttctcctgcctcagcctcccgagtagctggggctacaggcgcctgccaccatgcccagctaattttttgtatttttagtagaggcggggtttcaccgtgttagccaggatggtctcaaactcctgaccttgtgatccacctgcctcggcctcccaaagtgctgggattacaggcatgagccactgcgcccggcctagttttgtttttaaagatgaatatactcttgcttaaattctagcttatcatctgaaagaggggtggtcagtttgtgttggcggggctgacttttaatatcttgtttcttgttcccagattgtagcactcccataagaactcttttgtagactctgttatgttacctattcacaggtcctcttcctgactatactcctccagaaattttctcttttgaaagtactactggatttacattgtatgggatgctctacaagcctcatgatctacagcctggaaagaaatatcctactgtgctgttcatatatggtggtcctcaggtgggcatatttatatacatatatacatacacccatatgcatatgtattttagatcttttgttttttaaatgtctagtcagtttaagattttgagcattgttgggcatttgcttttaatgactccgtcttatattccaattattcagtttagggggtcaggaaactggtttttgttggaggtttaatttgtaaatcactgagtcttttttttttttttgagatggagttttgctcttgttgcccaggctgaagtacaatggcgcaatgtcggctcactgcaacctccgcctcccaggttcaagtgattcttctgcctcagcctcccaagtagctgggattacaggcatacatcaccatgcccagctaattttta

SEQ ID NO: 17474 - DNA, 1123 bp, Homo sapiens
ttttaaaggaaagcaaatataaacgatccagtggtgggctgcctgctccaagtaagaaatccattttattttaaaaaaagaaaaaatgttggaagcagaaggtgggagggacaggggaatgtatcttttgcatgctttataagcatcaatacttgctttgttaaacttaatatgtaagttaaactaaaacataaatacatgtatgtgtaaaaaacacaggacaatgttcttaatggattgacacgtattataaagtattaatagtgaataatctcttaaataacaggattactgatttttactttttacttttgccttgactgcaatttttaatttgtttaaagtgagcccatttaaaaaaaactatttttggctgggtgcagtggctcacacctataatcccagcactttgggaggccaaggcaggcggatcacctgaggtcaggagtttgagaccagcctggccaacatggtgaaacaccatctctactaaaaatacaaaaatgatccgggcgtggtggtgtgcacctgtagtcttagcttactcgggaagctgaggcaggaaaatcacttgaacccaggaggcggagattgcagtgagccaagatcacgccaccacactccagtctggcaacagagcaaaactctgtctcaacagaaaaaaagacaacactattttttttaaatgttatgtaattattagatatttttacacactagatgtttcttatactatctgcatctacactggagttaatttatagttataggtctttggattgatataattatgttgcccaaagtaaaattaaatgttatatcagctgaagttaatttttctttaaaaagtggttttccttaagtggtggttttccttctggaaaatataatacggaatggatgcataagcctaggaaaagtaaatgggtacatagaacacttttcctgggttttcctaaaaccgagttacagttctcaactttaataatatagtttgttttagaataggaagcactttatgataagttatgttgtatgcttaactgccatttgtaacttaacagatttggcatggtcctttttaataattgtggaaaaaggcccggcacggtggctcacgcct

SEQ ID NO: 17475 - DNA, 1051 bp, Homo sapiens
caaagttcagttttaccttctgaatagtataattccatttatgtaaaatcaaaggttggggttttatttcccccaatattttatctttattttttcttattaaaaactatttaacatatatatataatagtttttaaacatatatatgtttatatatgtataatatataaacagattccaggatttcagtgcacatatgtttatatgtttatatattttatatatgttatgtatatgtttatatgtatatatgtttacatatatatatgtttaataagatggggtcttgctatgttgtccgggttggtctcaaactctcaaacttctgggttcaagcaatctgcctgcctcggcttcccacagtgctgagattacaggcgtgagccacctcacctggccgattttatctttagataagaaagtaaattgttgaaaatatcccaaagataatgtttcggtacaatcgtttgcttctttggttctcattattatttttacagtgagtatttatttatttattattatcatttttttttgagacggagttttgcacttcttgcccaggctggagttcaatggcgcagtcttggctcactacaacctccgcctcccgggttcaagcgattctcctacctcagactcccaagtagctgggattacaggcatgcgccaccacgcccagctaattttgtatttttagtagagccacagtttcaccgtgttagctaggatggtctcgatctcctgacctcgtgatctgcctgcctcggcctcccaaagtgctgggattacaggtgtgagccaccgcaccggccttggccgagtatttcttaattgaataacatgaatgtgctgtttctcatagaaattaaaaaaaaaaaacttttataacaactaatcttttttttttttttttgagacacagtcttgctctgcaacccaggctggagcgcagtggcgcaatcttggctcactgtaacttctgcctcccagattcaagcgattctcctgcctcagcctcccaagtagctgggattacaggtgcacacca

SEQ ID NO: 17476 - DNA, 1050 bp, Homo sapiens
tgtgcagtcagagaactgattgatctcccttactggtatgccatggtctcggatgatgctggatgtgtacggtgaaaacttgaagagagtttgatgtttgaactcctaaattttacagctcaggagaaatcaacatttagattgctttaagtaaatgcaaattcttcagcggcttagagtgaaaaactaatctccataattttttttcttggtgtactatagttcaagtaatttcctgtcattcctagataatgtaatctttcctccttcttgaaactttttttctgtagctttcctgacattgcttctggtaccgatttgactttttctttggcggacttttctttctctcttcgttttgtcttttcttctccttgcctcatggtttccaacatgttctttgccttcttctctttggttattcttctcccttggttattttatcagctgtaataacttcacatttcccaaatctataactctagtcttacctgatctctccctggaatttgcatatcatatttccagttcctagttggatctctacacctggatattctgtcacagtctcaagctcagctgtttgttacagacctattgtcccgcacccctttctcctcaaactattcctccttctgattttcctcctccttttgattaagtcatttgtgccactagctactcaggttccaactgtagtcatctttgactcatttgggcccatttcaatttcaggaacatctaccaagcaacctattctgtgccaggcctaagggataaagagttagctggagttgttcaaagtctagtggaaagtggaatgatcacagactggcacaaatcagagttagcctggaggagatgatgatgagctctgcctagaggactcaggagaatcttcacagaggagaaataccctagttgagttttgaagaaaaggaggaacttgctgagctaatgaagggaagaaagggcatcctgggcaaacagaacacctacagaaagaaaaggaagtgtggcacaaaatgtgagagtgggtgtgggaggggc

SEQ ID NO: 17477 - DNA, 1029 bp, Homo sapiens
ataaatgtgcaagtcaaatacagctttatacacggaagaatcacatctgttctttgttctactggtgcccagcacatagtagataactcagtaaatattgttgaatgaatgggtgaatccaggcccttgtgggtcctccttactgcagcatatatctctaggaactataaagtcatctcctcaaattcagcatctctctggagaatgctagactctaactctttaaaattatctttttcaggggtggcactgtgctgtggtgggtatagagcaggagcttttgtccctgactggctacaggttcaaatcctagttctacccttaaaattatcttttcctctgttttaagctgaccatccactttatatttatcagctttctctaagaactgtatgtagtcagtcaggttttcacatactgagtaatgaccacatcccatttatgcccaggttatctcagttggagtattggatattctataaccaatcacatgttcacagacagaatcttgaatatatacccacagacagctttataatcactgtgttggtaattattattctcagagaacagccagatttcccttagttctaaggccctggggaattctgcatgccagtatacttaccaagaaagaaattaagcaaaataaaccatttatataggggaatagtgaaaagaaaaatacgggaaggtggccgggcgcggtagctcacacctgtaatcccagcactttgggaggccaaggcgggtggatcacaaggtcaggagattgagaccatcctgactaacatggtaaaaccccatctccactaaaaatacaaaaaaaaaaaaaaaaaaacctgggcgtagtggcaggcgcctgtagtcccagctactcgggaggctgaggcaggagaatggggtgaacctgggaggcggagtttgcagtgagccgagatcgcgccactgcactccagcctgagcaacagagcaagactccatctcaaaaaaaaaaaaagaaagaaaaagaaaaatatgggaaagcag

SEQ ID NO: 17478 - DNA, 1020 bp, Homo sapiens
tactttttcctcctagtgttaggtggagaaatatgcagctgttcatcttctgatttttgtcttcttttccctgactttcttgggggttggatttctgttttgctctaaaaccctaacactaccagcatatttaattgtaaggttttctagtatgtctccccatttgtgtatttagagaaatggtcccagaaaacattggttcaacattttaggcagtaaatacttatttttactttatgctgataattactatgatacttaagtgcaaccagcaagtattagctagctctatttagaagttatgcttaatttctaaatacaggctgagctcctggaatcaagtgctccaaaatccaaaactttttgaataccgacatgatgctcaaaggaaatgctcatttgagcattttggatttcatatttgggatgttcaaccagtttgtatttttcaaatattccaaatttcaaaaacatctgaaatccaaaacacttctggtccgaaacatttctgataagggatactcaacctctactttgtaatatgcgatatgaaaatacctatttgtttggtgatgtgcagtagcccagctttatttttatttctctcactagaacttgaaagctgctatttggcactttatctcagagcaagaagagaaagagcaggctgtctctttgagaagacccttgtccttcgtgctaaagttagcatgtgctgcctcttcctgtctggatataagactaagctttatttcaaaactgaaccctctagcagctgcataccagtttaccttaatatccttagtacttggtgtcttaacatcctcatactaccttgctcctttggcctcaaagtaagcatattggctggcttatatttcttaacaaaattagcagtacacaaattgaagaattttcatctttgattacaaaagtctgcgcatgtgcttgtactctgagatggtaatagattcttctgataaagttattgctgcctttccacagttcctgttcatttgg

SEQ ID NO: 17479 - DNA, 1036 bp, Homo sapiens
gtctcagcctcccaaagtgctggggttataggcaggagccactgtgtccagcccaagcctaacactttttaaggatatctatacagcagtccctccttattcatggttttcctttctgaggtttcagttacccatggtaactgtggtctcaaaatattaagtggaaacttccagaaagaaacacttcataagttttaaattgcatgctgttctgagtagcatgatgaaatttcgtgctgtcccatctgggatgtgaatcatccctttgttcggtgtatccacgctgtgtatgccacctgcttgttaatcattgagtagccatctctgttatcagacccactgtgatggtatcacagtgcttgtgttcatgtaactcctgttttacttaatggcacaaagcagtgatgctggcatattgttttaattgttctattttattattagttattgttaatttctttttgtgcctcatttataaattaaatatcacaagtatgtatgtataggaaaatacagtatatatagggttcggtactatctgcagttataggtatccattggaggtcttggaatatagctgctgaggataaagggggactattgaaattcatattgcaatcatgtgctaccactctcgtcattcctttaccctggatttttgtttaacatttaggccatttgtttgttatatgttcatttgtattttcggtatgttgttttataaaagtgtctttactttttcatatactgccactgccactaaatggtggtctctaagttcaggaaccttgccttctctcttcttgtgctgcatgcctatgattgtgcatgtgcttcggattttcagtacatcatacatgagtgacaaagatgtgaactcagcgttatctgggccagggtgttggatgatataggatgggactcctggatttatctttctgtgactttcaatcatgagcaagaggagcaagatgagttcttcttggtaccctttctcacggatctcaagtactttgttatatctgatctttagaga

SEQ ID NO: 17480 - DNA, 1403 bp, Homo sapiens
ttttttaaatgtaaaagacactcttagctcagggccatacaaatatggattttacctctgatttagatatttgatccatagaaagttatcctggttaatggtatgaagaatggatgtaatagaagatttgtttttcactttatctttgctcttttaaaaagcttttattatggaaattttcaaacatgcaaaagtataaggaatagcattatgaacccccatgtatccatcaccaacttcaataattatcaaccaataaccaatcttactttatctgttcctttctcctttgctgccaacgttttctccttcctcaatgagttatttcaagcaaatctcagacaatgtataattttattcataaacttcaatatgtatctctaaagtaagagacttttatgttatctattttaaactatttaagtgtaacatataatgtgtcttttttttttttttttaagatagggtctcactctgttgctcaggctggagtacagtggcacagtcatggctcactgcaaccatgatctcccatgctcaagcctcagcatcccaagtagctgggactacaggcgtgcaccagcacacccggctatttttttgtagagatgggatctcacaggctggtctcaaactcctgggctcaagtgatcctccagcattggcttcccaaagtgctgggattacaggcttgagccaccacactcagctatacttttatgaatgtcaatacgttcacaaattcagcacacctgagtaatcagcactcagctcaagaaacaacattcatagcatctagaaccctctctcgtgcccatgtctagtcacttctttctttacaggtaaacattaacttctaacaccatagattaactcggctatttttgaacactttatgggctcaaatagtatgtatcttttatgaagtgtttttttgaaaacataaatcataataccatcatacttttaagtgatatttatcatatatatcaaatatttagtttcaaattttcatggttataaaactcattttatagatggttttttcacattggggtccatacagggccagcatttgcatttggctgatatgtctattaactcttttttgtctttattccccttcctctccctctttttttcccccttgctgtatatttatgaagaaattaggtgattagccccactcccttcttttcttttttaacatacaagaacagttcattgtctaagcaaataacactaaacttacagcctgattcatatttattaaaatgaatattctatactgtagattagttagatacaaaaggtaggctgctcaaataaatgatactcaaggctaatagaaagtttggggaagcaattttgaactagctgtagcagagggattacagaaggtt

SEQ ID NO: 17481 - DNA, 1025 bp, Homo sapiens
actttacttgtttttcagaaagcacacctgagctgctcttaatatcatctcttgaagatacaaatgaaacacgaaacattcaaagtagatgcttcaggaaaagacataaaagtgacaatgaaactaatttgcagcagcaagtggtctggggaaatagaaaccgtaatcttagtggaggggtactgatgggatttatgctcaatagaattaaccaggaagcaacccctggagatatagttgaaaaattgggagctgatgcaaaaattctttcaaatgttatctcaaaaagcacgagaccaaatactcttgatattgggaagccacctttaagatcaaaaagagacagtctagaaaaggaatctagtgatgatgatacaccttttgatggttctaactatttggcagataaagtggattctcctgttatttttgacttagaagacttagacagtgaaacagatgtatcaaaagcaggatgtgttgctacacaaaatcccaagaggattcaacgtatgaacagcagcttttcagtaaaaccttttgaaaaaactgatgtcgcaacaggatttgatcccctctctcttttggttgctgagactgaacagcagcaaaaagaagaagaggaggaggatgaagatgatagcaaaagcatttcaacaccatctgctaggcgtgatttagctgaagaaattgtgatgtatatgaataacatgagcagtcctttgacaagtcgtacaccaagcattgatttacaacgggcatgtgatgataaattaaataagaaaagtccaccattggtcaaggcatgcagaagatctagtctgcctcctaattctcctaagccagtgagacttaccaaatctaaaagttacacaaaaagtgaggagaaaccaagggatagactttggtcttctccagccttctcacctacttgcccatttagggaagaatctcaggatacattaacccactcatcaccttcatttaacttagatacactactagtacctaaactagatgttcta

SEQ ID NO: 17482 - DNA, 1035 bp, Homo sapiens
tgctaaacctaaggttgttatttgcatctttctaagaagggaggttcaacagtaaatatgttaatccaaagcaatgacattaatgattgccctttttgaaagagtcttaatttggtaggccttttaccaactgtcatattatctaatatgtttgctatgtattaacaagagtactaacttttaaaagtttgctaaagttaccttggagttggatgtcatgttcatttatgtttttcccttttcctcaaaaactaacttgagtctgaatttggctattacatttctaattatagtaagaagagcaacattagcatgaatatttgttgagtgtatatcacagcctgacaaagaaagatagttaaattctatgtgaagaagttattggtcgtaattatattaacctgtaaccactatgatcatctatgtgtgcttgagaactcttttttgttttgttttgttttttctaaaacagctataatggatttccagttcttaggaacaatttatttgaaagacctgaaggatttctacaagcaaagaagaacaaattgccttcaaaatcaagtagtcctaatagccctttgcccatgttcagaagaacaaaacaggtactttatcacattcttcatgtaatcaaattttagaacaagaaataaattggatatttatcctcccgtaatatgctttatcacttcatatataactattactagattattatgttcaccaaagcactgtgaagatggagcaatctgacttcaagaaattaactagttctcttgtcctagaactttattttatatgctgtttaatacagattcaaaaagaaacttgaaaacgcattaattacagacatattttgttatggaaacattataaaagcatgtgacttgtacttgtttagcactcagttaaataaagatgcctaagtgcataaatttattagtaagatctttatattttttccaggaaattaaatcagcccataaaattgcaaagaggtactcttccatccctcagatgtggtctaggtgt

SEQ ID NO: 17483 - DNA, 1075 bp, Homo sapiens
cttgagagactaaggcaggaggatcacttgagcctaggagtttgaggttgcagcaagctgtgattgcatcatggcattttagcctgggcaacagagcaagaccctgtctcaaaaaaaacattaagaatcataatatataggctgggtactgtggctcatgcctgtaatcccagcactttgggaggccaaggcaggcggatcacctaaggtcaggagctcctgaccagcctggccaacatggtaaaaccctgtcactactaaaaatataaaaattagctgggtgtggtggcacgcacttgtagtcccagctacttgggaggctttggcatgagaattgcttgaacctgggaggcggtggtgctggtgagccaaaattgcaccatgcactccagcctaggtgacagagcaagactctgtctcaaaaaaaaaaaaaaatcataatatgtatacgatttagtagtctgattcttttctcatttattgttattttgtaaatgtttttctcattattataattctgaatcgtgtcctaatttttgtctagttcactgtatggatataccattaaaaacattatttaatccaagagagtatagcatataatgctgtgaaattataatcaataatttatataagaagatttttgaatgtattggttcctttaagtgttagaaaatttttaaaactcatctctgttcttttttggtatactctgccctaagtccttatcttaaaggtttaactacttaataattcttgctcttccacttaatccacatggtatgtgatatttctaacctaataaagttctgtgaaatgtgttttgtcatatgtataacatccttttttattaatatcaatattattctttttagtttatgagctcttgtggggcagtttaggttctatgaagttttcattttttctggatattaccttgctatcgagtatctagtggaaatagtactaccaaagtgctttcgatattgatgtgactagagtttaactcaaatatacgtctacatatgctgaaagagcttagggaaatttgttatatttagtataaattttaaaa

SEQ ID NO: 17484 - DNA, 1026 bp, Homo sapiens
atctaatcttgttggtattatagcagatgacccattcagaatccataacttaatacttattatataaagtacagtcaatagtggtatagcagtatttgactccttaagatgtagctgtagtctcaactgcttgggaggctgaggcaggaggaccacgcgggaggaccacttgagcctgggagttaagactgcagtgagccgtgatcatgccactgcactccatccttggtgacagagtgagacgtcgtctttctctttcttttttttttttttttttaagtggagtcattaaagctatctttaagtccaaatgcctcgcaatgctttatcaccatgctcttttctactgttaaggaaaattaaaccttcatttctttatctgatcttcttggtattatagcagatgacccatttatgtaatacacatttatgtttaggtacaacataagcataggaggtagcctacacccttgaggattcatcatagtgtatagtgtagttggaaatagacatggataaaaacagtatttacaaagtacacttcataacaagtagatgattccaaagtagctcataagtattgggatattaaacaaattacataaaacgtaacaaaattttgccttatggaacaaataaatcatgcatgtaatatcatttgttacctagttaattgctttctaaaagtgtttgcacttcttttgaatagctaagaagcccaacagctattgtagcaatattcaaatattattaacattggctgggcagggtggctcaggcctgtaatcccagcactttgggaggctgaggcagggagatcgcttgagtccagcagtttgagaccatcctgggcaacatgctgaaaccttgtctctgcaaaaagtacaaatatatatatatatatatatatatatatatatataatcaatgaaacagcccattcaacttttgtgaaaggcagaatctcaaaggttaaaactacaaacatttaaataatactgataattaaggactctaacgctttat

SEQ ID NO: 17485 - DNA, 1046 bp, Homo sapiens
tgagtgcaatagttcacgcccataatctcagcactttgggaagccaaggcaggcagatctcttgagtccaggagtttgagaccagcctgagcaacatagtgaaaccccatctctacaaaactacagaaattagttggacatggcccatgcctgtagtcctagctgctcaggaggccaaggcacaagagtcacttgaacccgggaagcagaggttgcagtaagccacgatcatgccactacactccagcctgggtgacagagggagaccctgcctcaaaaaaaaaaaatttccttaccgtatttacatataatgaatgtaaaggagaaattagatgaatgcattttttttcctttggcaatatatgcagtaatggaatcgccagatcaatttattttaaagataacacacccattgcatgttaatataaatgtcttttttgaaaaataacttttccaaaactaaaaaaactttagtgagcagaatggcattgttttacatttttgcagatctctaatgtctagcttaattaaacatagctgggcttccatatatggtctgcattcaatctgttgcagtagttgttttggttgaaatatacaaagaaagcctggcctcccacagatatgtaggtagaaaagggagggattttggatcatattttcagaaagtttgggatattcttttttttgacactgcaccaagcttgacaaatgctggtttcttacaggttatttgcaatctaaaactgtagtagtgaactttgtcagttacattaaaatctattggtctgggcaggtgtggtggctcacacctgtaatcccgacactttgggaggctgaggcaggtgaatcacctgaggtcaggagttcaaaaccagcttggccaacatggtgaaaccctgtctctactaaaaaaaaaaaaaaatacaaaagccagctgtggttgtgggcacctgtaatctcatctactctggaggctgaggcagggagaattgcttaaacctgggaggcggaggttgcagtgagccaagatcatgccactgcac

SEQ ID NO: 17486 - DNA, 1015 bp, Homo sapiens
ctcgaacatggccacttcacaacgcctctattgccataaccctagtctaagccataattgtctcttaatgggattattgcagtagtgtcctaatccaggggtcaggcaaattttttctttaaagagctaggtgataaattaagttttacaggtcatacaatctctgtctcatagtcatctcttttttttaaccctttataaaagcaaaaactattcttagtttagatatacaagaacagaccttgggccaaatgcaggccatagttttttatctaactgatcagttcttccacttctgctctctctatcatattctttgcatagacaagagtgatcctttaaaaacataaatcagatcctatcactactctgcttaaaacccttaatggcttctcatctcactcttagtaaaagccaaagtcctcccatgcatgatccttaactgtcttgtctttgttcttttattactgttttaaattaaaaaaaaaaaggaatgtatactcaaagaaaattggagggcgaggagtatacaaattgtagatctatggagtagaaagtgagaaaatgaaggttcttgttcctacttccatgttttgtcagggctaacaatgagcaatttgacttgtgtccttccagacccttttgtgttcacatatgtggggtatatataataaattaatccttttttttaatttgaatttttttgtatttcctttttcttttttcactttttattttaaaatcggagtacatttgcaggtttgttacaaaggtatatattgcatgatgctgaggtttagggtgtgattgaacccatcacccagatagtgagcatagaacccaatgggtggtttatcagccgttgctttcctccctgtcttccccctctagtagtccccagcgtcttttgttcctatctttatgtccaggtatacccaatatttagctctcacttataagcgagaaaatgcagtatttagttttctgtttctgcattagtttgcttaggatgatg

SEQ ID NO: 17487 - DNA, 1048 bp, Homo sapiens
gaagaggaaagaggagatggaggtttttctgtgtttatccagctgatgcccataattgtattgatcctcgtgtcattattaagccagttgatggtctgtaatcctccttattccttctatcccagatctggaacagggcaaactattaaaacgcagacagaaaacttgggtggtgtttattatgtcagcaaggactttaaaaatgaatataaaggaatgttattacaaaaggcagaaaagagtgtggaggaagattatgtgactaatattcgaaataactgctggaaagaaagacaacaaaaaacagatatgcagtatgcagcaaaagtataccgtggtgatcgactccgaaggaagtcagatgccttgagcatggacaactgtaaagaattagagcggcttaccggtctttataaaggaggatgaactggaatttttatttataccttttagcgtactctttattttttctgtaagtaagtttagtttcatcatgagagatgaagggaaagatctgatactgaaaattaaactgaatagttggttcctgaaatcttggactgtttatgacctactggctcctttaaatagtaactgaaaactaaaatggaatattttagttacgcttctacaattattttcattttaaaagcttgcatgattcctaactaaaatgtcttgagaaaggattatcacacctgtagcaatttccagttttagtgattctccattttttcccttgtcatgtaaagatttatggaatgatcactttgtgtacatacaggttactgcttttttatttaaattcttttagtgttttgctccgtgagacacttcagtttaaattgatggaataaatgttatatgacacatttacgttttccttatcaaggtgtcaaatatgtggactttaaacaatgaaactttttcaaaaagaaaaaacaaaaactttaactttgtgtaaaatcttatagtattatcagcttagagggaattgatatttttaatattgccgttatattccaaaatatatattgagataaatgaa

SEQ ID NO: 17488 - DNA, 1047 bp, Homo sapiens
gaatagtgatttctgccctcagaccctgggtcacaatgctttttttgctttctggaccatcagtacatattgtgtactctgcttttcctgtttctctgccagtagcctggcaccttaggcagtatctttttcctggtgctcatatccttttgtaactttcttcatgggaaggtatgctgtgagttctagacaaaaaatttacaaataaatttttgaaacattacttgattgtaggttcgggaatgctatatttagaagggctgggtatatattcatctatggccgttattatttttaaaatgtgtgacactttcttagttcctactttgtgcttccttctgttaaaaatcacaagtagaaagcaagagagagaagagacaaaaaagaaagaggtagaaagatatcaagggaattttcctgctagtgttatactttattttcactgagaatagtgagtcattaaaatgtatagtaagagagatactgtttctgatatactttgttaaaacctgtctctcttgatctgtgtaaaaatgtgttttccatatgtatgttaaagtgtatatacatacataagttcacacagtttagctgtttttgttttcaaatgaaagctgaaatatgaagatcagaactttattaaatttcttaattttattgtaatattgttttgtagatgagagatttttatttttgaaaagttttaaaaataaatagcaaaaatgtatacacccacatacccacatataaaatgttaacatatttcatttttgcttcagatatatatttaatttaaaataactatttatatcatagttatcacattgaattctaaaagagcaatgtagaactttatacttttcttgaatattacagatcatgttaaagtcccttttgttctccccagttttatcctcctcaccttcatctcccctcccagaggaaattgttgtaatgaatttgatttgtatccttctagtttatcttttaataaactatatatatgagcaatgacatggcattgctttgggtgcttttgtagaacat

SEQ ID NO: 17489 - DNA, 1712 bp, Homo sapiens
gtgagggcagaaattgtattactctgtgaatatgttattctttaaaatgtattatacgttaatgaaaagaatagcccgaatgtaaaagaagtcttagaagattacaagctgttatttggtgtgtatatagtctccttctattttctgtttaccctagtatacctcttctctccttgggggaggaggtggagacacctgtaaacagcgtagccccggttacgctaatctattgtagtacatttgggattattttaagaagtattctgggggacctaagattgggtaataagtaaggactcttgagcaagttattcagtttatgttgatagcggttctgggattcgacttctgaaaacttaagtatacaaaatttctgagctgtttgaaccctgtttgaacttaaaataaaatattatatttggcttcttttttggaaactgttttgggcagaattaaacattttcggcaatttttactttattttcacgatttccctttgaaccacagctctcagtaggagtccagaacagcatatgttatcatcatcattatatataatatgttacataattttctttttctgaatgattaaacatagacctacttcactgtggagtttaatttttgttttatattattttttaagccccttccattctgggatcactgtggaattttataacagtgtacttgctgagaaagttaattgatcttgataccagtcgcaaattgggaataaatgtagataacttttggtccaagttttaaacttatatacacaaatttacatttttgaaaattggtgaagcaatatgaattttttgtctgtgcaagagagccaggaagttgatgctgatttgttctgaacttttccacatgaattaccactggtttaaagagttattgattctcaagttcctggaactgttgtcctatttctggtaacttgaatagtatttagtataattgggaggctagaagaagagactacatgacatttattaattcattaaaaaaattatggcagaattgtaaaataaaattagctgggattaatagaattgtaaaataaaagtagctgggactacaggcgtgcaccaccgtgcttggctaatttttgtattttttgagacggggtttcgccatgttgcccagactggttttgaactcgtgagcccaagcaatctgcccgccttggcctcccaaagtgctgagattacaggcgtgagctaccgcacccggccagttattactcttataactgctattataaaacttggttttccactgagtgatattagttacattatattttgttgtttgcagaatttttcaaagcattctatgtcctacaaaaacctagttaaagcactgatgcagatagagttgtttggtatataataaaccttgtgctattcctacttaaattgatggtgcgttgttctaggtggaaaacaaaagttgctctagcaggaaaattgacttgttattcttgccttctctgatgtcagagacttatctttgtgggatttttcctttttcctaccacaggtagaagaagagtgactgagaatagctgatacatttttcttccttttttttttttttaatctaataccctatattgattgtttattcagtagaatttgtgggaggatgctgggcgtggagggagtcaagcacaccacactttattattgtatatcatagtt

SEQ ID NO: 17490 - DNA, 1023 bp, Homo sapiens
tgccagtcaaaagctccaggctgttttgccttttttttttttttttttttttttttttttttttttttttcttgagacggagtctcgctctgtcacccaggctggagtgcagtggtgtgacctcggctcactgcaatctccacctcccgggttcaagcgattcccctgcctcagcctcccaagtagctgggactacaggtgtgcaccaccacgcccagctaatttttttgtattttagtagagacagggtttcaccatgttggccaggatggtctcaatctcctgacatcgtgatccgcctgcctcaacctcccaaagcgctgggattacaggcctgagccatcacgcccagccttggctgtgcttctaattgatgggctataaatcggggttcctgcaactccctccctgggttcaattaacttgctagagaggttcacagaattcagggaaacacatttaccagtttattataaaggatattacaaaggatatggatgaaaagatgcagagtgcaagacatgtgggaaggggtatggagcttccatgccctctccaggtgcacaatcttcccggaacctccatatgttcagctatctccagaagctttccaaaccctgtcctttggggtttttatggagacttcgttacatgggaatcattgattacattgctggcctttggtgatcaacttaaacttcagcccctcttccttataccttcccccttcagcgggtggggctgtaagtcccaactttctaatcctgccttggtctttctggtgaccagcccccatcctgaagcagccatcagtcattagcatacaaaacgacctcacttttggccaggtgcagtggctcacacctgtaatcccagcactttgggaggccgaggtgggtggatcacctgaggtcgggagttcgagaccagcctgaccaacatggagaaaccccatctctactaaaaatacaaaaattatctgggtgtggtggcacatgcctgtaatcccagctaccaggaggc

SEQ ID NO: 17491 - DNA, 1030 bp, Homo sapiens
cccaccccagctctccctgcccggggtctttagggaggatattgggacagctttatgaaagtagactctaggggctgagaatggtctcgggctcaacataaacgtgaggagtgctgatgaagtagtgcagaaccacacctgtgagctcagtggcatgcctgccctagtcacgtggtctccacccccgagagcacagggacacggggcagaagcaggtcctgcttggggctctggattggccttcacacacttccacttccttcccaggacattggaagtggaatcctgttcactgaaatgtgaaatactggatgtttcctctgctaggacttagggggcaggtggggatgtggaaagactaatcagacccccatccaggaacctgtgttctagtaataagcacattcacactagcagtgaacactcactgaatcctggctgcatgcttcgtctgacttatgcctcacaagggcccatggagatgcactttcactttcctcaatttgcagatgaggagctggagttcaaacaggattagcgacttgcctgggatcacaaagccagcggtggtgggagacactgaactctcatattagttgatgagctttgattgaagggtgaccatggaaccagacaaatctaagttcaaatcctagctctccaatccccacactgactactggcaagccacttatcctgcctgacatggaacttcctcatctgctaaaacaagactttgcttatgagaattaggaacattatatgagaagttcaaagccagtgcctgaaatacaacagacacttggtgaaatggcagcaattaccggtaagctatgagagtagtgggggaacgttgcttcccccatgcccgtgataccagtaggagggtgttgggatgagctgtacccacggatacctgatggatcagagccatgaacgtgcacaactgctgttctaggcaggtccacccaagcacctgtgggtcaccctgaatggtcggtctcagggggcactgtacgagtggacaagc

SEQ ID NO: 17492 - DNA, 1031 bp, Homo sapiens
caagattggccatatagtgatgattactgaagccgagtgggttttttttaaattagttaaatagaaggaaaagataattctataaatagctaattctttgccctctcccattctatgatttgatacctaggaatgtggaagggtctctctcctctcaccaagacatccatcccaatgcctacccacccaccccaagtaggtgggctctgatgaatctaccagagcccccccaccaactcccactaccccactgaaccccacccaaccccacccacacagtagcacagggaaaagaagatcatcagtggatgagcagagattcagggctgggaaaggtggaatcttctcatcgtcctctcaggctgtggcccggtggccaccttgcagttcccagcactccttcccagggcaggtgtacgctgtctattggatgaataaattaatctaattactcaccacaggtctgcttttctagattcccaggaacatttgctgagcccctactctgttctagatactgtgttgggagcttgctatgtgtgttctcattcagttttctgggagtagactccttaccccctttttcatgatgaggaaactacacctacccccatgatactataacttttatgactttcttcaccagattatgagtttcttgacccagggactgttttatctttcatctttatttccccataaccctatcacagtgaatggtcaaaaactgttgaatgaacgattaaatgaatgattaacattcaacaagaggttagatggtgtatctgggttatgcagttagtaagtggcagaatctggattcagatctagccgagagcaacttttgcatcatcagagctgcccagatgaccctcaccctcctacagtgggctctgaaacctctaagctcattccagttggctgatgaccactgcagaggtgactaatccaaaagagcaattgctggtgaggggagaggggacttgggtatgtagacccctccgtgtggctccctggtccacagataactg

SEQ ID NO: 17493 - DNA, 1049 bp, Homo sapiens
atccatgacccagggccagggtggccctctgttctcgctgcatgggtctttatatccttattcctggaccttgtggagcctccagacccaccacctgcctggctagacagagcctcctcatcacccccatgcccttaatcccgcctgacccaagaggcatcacatggcttgttcctccctgtgcccgcccttccctggactgccctgtcccccagctctagccgcaagtcatcctcagactctggagagacattttgctgtcttgccagaaaccactttgaaatttgcaaactcttgcaaatggaatagtgaacagagagcaggaggaaatccccacaagtgccagtgttccccctgctctctcggctcccctccccatcctgagatgtccaactcacaccagcctaactgggtcttagttccacactttgccaaaccagcatggaagggcaggggtatctgggaaactctgccagtcccagagcctcctgtagaaaagcatttgggcttgagccccgggcactggctgctgaatttccgtctccctgggacacagcctttttccttctcacagattttcagagccagaaaggagcttgcagaccaccctggccaattctcctctatttcagacttcaccttcaggacagcattattgacttttttggtttgttttattttgtttatatatgtatggcttctattcccaaagagattgtagggttaagagatttctttttattccaagtgtctacaacagaataaagactcatacatataaaagatactagggctgggtttgaattcacattgtccaaccctctcatcttgctgacagggaaacggaggctgagaggaacatttggcctgcccatggcttcctgaccctgagcccaaccttcctctactttttgttgattgattgactgacttatgacaatatcaaggagcaggagcaccagacaaggtaggggtgggctccccaagcgttgtccctgcaggcccctgcatcacctccccaagagaggttgggaatttctcaggaccag

SEQ ID NO: 17494 - DNA, 1048 bp, Homo sapiens
agcaggtgatggatggattaatgagtggagggttggatgaaatgatcacaattcagtgtctactccattgccccttctctcctattaccttccttagtaccaacaactactctataaggtatgtattattttccctaatttatggatgggattcgaacccaggtctgggtgatgctagcaactatattccttccacatcaccttgccatagtggagatgttcattgctttgtacaagctccccaagggtcgaggtttcctctcctttctcagattagacccagatcactgcctcctgtgggaagcattctcaaaactttcctccatacaccacccactacaccaagcaccccttgcatcttttcagtttttgtttcttaaaagccttattgaggaatatttcaaatatatataaaagcaaaagaataatataatgactcccatgtcatgattaccccactccctttcccccttgcccaggcatcgtgctggttgatctgtaaatacttcagcatttatgtggtcgcttacttctgttcatccttcccgctctggggctggtattgggtctttttcatcttcaattccccagtgctcagttcactagaaactgggtgtgtctgttgagtgaataaatgacagagtcccatgtggggacatgagtaggttcctggtgcctgtcactgccccattacagcttctaaagagtctggcttctcagcagggccagttcttctgggtaggacgttccttagattgcagtgtgtgaaaacctttctgttgtggtcatctgggactctggatgctgataaagccttctcaaatatggcttcttttgtgtcaacatcacgcgggcataattacattcgctgtgcaaacacacaggcgaagggcctctgggccacgcagtgtggtattatcgtggcttctgcccagacatccctcagaagtcctgccaggagagcagatggggccagttcagtcccccaggacgcccccagcatcccagctggcctggcaaggccctgttctttgatctgatttcagcc

SEQ ID NO: 17495 - DNA, 1218 bp, Homo sapiens
gtggggcaacagcaagtcaggaagatgaggttctagtgccactgctggagcgagccaggcaaccttcctgggccttgaccctacagcttgcatgagggcctatggatgatagttgtccaagctctgtaaagctagaaaaagctgcctagggaggagctcagaggagaccagcttcccaaggttttccaaaagccagcagggagaaggctcaggtaaagtggacttgtagcactgattacattcattcattcgctcactcaggaatacatgtcacttatttaataaatctgtatcagaggcctactgcgtacctgttttagatgctggggattcagcagtaaacaggacagagaaggtgcatgctttcatggatattacccttcagtaacagaaacacaattaacaagaatataaataaacacggtaatttcaattggtgataaatgctaagaagaaaataaaagggcgtgatgggttaaagtgtgtgaggtggggtggtcagggaaggccctcatgggagctcatgggaagatttgagccaagacttgaatgcaaggaggagccaccaggccaaaaactaggggagctttgtgttcgtcagccctcattcttggtctgtttttgactcagcagaagaaaatttgttttacactcaggggacaattgccaggctctgcagaggatttacaaatggatgagcatgttcctgctcacacaatgccttctatctagtgggtgtgatcatgcaccatgcaaggaactatagggcagggcggctggggacgcgaaggcatcttgctgaaagctcagagaaggcacaggccccttcctgcctggatgagcagggaagagctcctggagagcagagcgccggaagggagtcctctggcaggagctgtgggctctgtgagcagtgcctgggtcccagtggtgctcatttattccgtcagatgctgatgctgggtgggcacgtgtgtcctattaattaccggagtgaacggagttgtttcttggagaaatgcagatgacacatattgccccatcagcaaaagaactatgggcagggaggaatgcggagttggaaccagctttcttttaataattggcagcagatgagtggcatggatttttttccttattgttgctgctgccaaaggaaatcactgaggtttcccctcttttgtgcactgcatgtctcctggctccaggtcacagccc

SEQ ID NO: 17496 - DNA, 1028 bp, Homo sapiens
ctgactcccagcctgcctctcaggagcagccatgccctccacatccagtcctcagaccctggtgctgccccaaagcaggcagtcactgttcaatagtgccacagcaacagaggcagtggcagaactggagactctgtcaccctctaataaggaaaacccattctggcaggctgggtaaatggcctcaaattgaataattaataaagttataaaaatatgtctactatatggccagaataattcagcccaattagaagcagttatttctcatagttatgccacttggtatttttttttttttttacaaagatctttagtaacatgacagagttatcaagtttggctgcctgcttgagaagttcttttgagaccaatccctcttccagatgaggaacatgcatccatccatccatccatccatccatccatccatccatccatccatcctgtctgtcagtccaaccattcatccccttgtccaactatgtatcagtccatccatctgtccatcactctgtccattcatccatctatctctttattcttccatccatctgtccatctatgcatacatccatctgtttattcattcatccactcattcagcagacatttcttaagccctttccatgtgccagacactgtgctaggttccgggcatatggagatgaataagatccttcccttgtccctgccctaaggacctttcagcccaggcaagtgacctttgagtcacagaagctcttgttcctcttcctcttcagaggtcctgccaaatatcatttttgcccttcatctcattccctttatttcatggatacatacgcagctatttggacttaaacatagtcttgagctaggtaatgggctccttcccaaggtggcttagctcattctcctatatctgagagctcagggatctgcttgcttcaaaacacccactgttctgggtcccgaccttttctccgagccatcagtggctgtgagatctggcttcactctgtcccctgtcttcaatgtgatctggg

SEQ ID NO: 17497 - DNA, 1050 bp, Homo sapiens
tatcaagcagcagatctgggatcagaacccagaacttgtgttcttccctaagttccatgctgcccctgaaggggtggaagttgccttagctagttcaggctgctgtaacaagacttggtggcttccacggaaaagtgtttctcacagttctggaggctcggaggtccaagaccaaggttctggctgactctatttctggcgagggcctgccttctcacggtgtcttccagagtggagaagggggtcgtgtccctcatgtctcttctttagatcagtgccctctaaggggactgattacctcccacagactcgacacaggtcccacctccacacagcactacattggggattagggtttcaatatgaatttaggggggacttgaacattcagttcatagcagaagtcctgtgccttaacatacaggaaagctggctttgttccaggtcttccctgggggaccctggtcctttcctttctgtgggcctcagttttctcatctttaaagtgggaagggccaggcgcagtcgctcatacctgtaatcccagcactttggaaggctgaggcaggtggatcacttgaggtcaggagttcgagaccagcctggccaacatggtgaaaccccgtctctactaaaaatacagaaattagctgggcatggtggagggcgcctgtaatcccagctacttggaaggctaaggcaggagaatagcttgaacccgggaggcggaggttgcagtgagccgagatcgtgccattgcactccagcctggatgacagagtgagactctatctcaagaaagaaaaaagaaagtgggaaggtaaacagggctatttccactgtgacagctcatgatgttttatttctaaggagtcaaagtccaggactggctcacctaatccgaggccctggtgacctccctgctgccccctgatggaggatgtctccccttcctgccaccccgctcatggccaccctgattctctcttcattcccagacctggagaggatggggaggtagggaggcagggcatgagggggatggggcgg

SEQ ID NO: 17498 - DNA, 1040 bp, Homo sapiens
ttaaactggaagggttgtaattttccaggaatttatccgtcgcttctaggttttgtagtttatgtgcataaaggtgggttcatagtagccttcaatgttcttttgtatttctgtggcgtcagttgtaatatctcctgttgcgtttctttgtgaggttatttggattttctctcttcttttcttggttaatctggctaatggtctgtcagttttatttatcttttcaaagaaccagctttttctttcatttattgttggtattgttgttgttgttgtctcaatttcatttagttatgctctgatcttggctatttcctttcttctgctggttttggatttggtttgttcttatttctctagttccttgaggtgtgaccttaggttatctatttgtgttctttcagactttttgatgaaggcgtttagggctatgaactttcctcttagcactgcctttgctgtatcccagaggttttgataggttgtgtcattattgtcattcgaagaattttttaatttccatcttgatttcatttttgacccaatgctcattcaggagcaggttatttaatgtccatgtatttacatggttttgaaggttccttttggagttgatttccagttttattccactgtggtctgagagagtgcttgatgtaatttcaattttcttaaattaattgaggctcattttatggcctatcatatggtctctcttggagaaagttccatgtgctgttgaatagaatgtgtattctgtggtcgttggatgaaatgttctgtatatacctgttaagtccatttgttctgggaagtagtttaaatccatggtttttttgttgactttctgtcttgatgacctgtctagtgctgtcagtggagtattgaagtcccccactattattgtgttgccgtctatctcatttcttatgtctattagtaattgttttataaatttgggagctccagtgttaggtgcatatatgtttaggattgtgatattttcctgttggacaaggccttttaccattgtataatat

SEQ ID NO: 17499 - DNA, 1050 bp, Homo sapiens
ataggaaatcaacagcaagtgtgatttagaggactctgtttgctcagctaaacttttggcaaggtaaatgcataagctgcagaaattctctctgaaacagccgcagggctcaaacatccttcagtcctccataaaggattctcaaaattatatggactagattagtatctctattacataaaaccatttcagtgcctgctcagggctttgagaataaagtcaccagacagaccttttgttgccctgccccgccagcacatagtaattgaagatttccctttaaaagtgtgtcaggtagaaagagctcctaatttactaagtggaggggcctttgttagggagaccaatgctttgttctgcctgtcccttttaatcttcttgcacaatggacttatataaagcactactagaggattaatgctggggaggggaccatggcagggcccggccttgcagaagggaggccaggcagggcctccttctcccttttctgtctctctcttcctcctcctcttgctttttcctttcctttatttgggcctcctccttctatctggaccctagaatcaaggagcaggtgcaagcactaggacgagccctgtggctttgtaggagtggccgcccttgtttttcctaatcagagcacatgcttctcctttgctccccgttttttaattgcatctctgcatggaaactcctgaggcaagatccaggtttggggctacattctctgtgggttgccagatttgaatctagttgaggtcttcagccccaaagtcaaatgccatctggtccctgatgggacagttttggttggaggggtttctgcagtacccgggcactaagcagcatttgttgtctgagatgcctccccaactctggcttctggctccaaggaagaggaggaggaggaggccactgaacccaagttgagaggactcgcgttttgcctctagcagggagccacccgcttcaggcttgaaacccccatgatgctgttagatgtgcgccctgacctggctttcagagatggaattcacctgctcggcc

SEQ ID NO: 17500 - DNA, 1057 bp, Homo sapiens
attccacccccaaagcttctgcctcttcatttggagagcaattttccttgttagtattctctttgccattcgagtgggtagagagagttcgcaccagagggaaaatttgggcagagtgggtgtgttgatgttgggaataaaatgacaattttctcctactgttgttacatctcccccaatgctggagaaactcaattctaattgcattacaagaatgaatgaaaaatgtaccctccaatgggttcggtagtgatggttttgtaggaaagatacaaagcagttcacctaaaaggccgttcctcaggggcagggcagaggactgagctaggatgaggccttggtcagtacctcacctgggatggggtaactgagacccaggtgtagatgtgagatcagtactaaggctttcctgctgctgctctgtctgtatggagtagtgcgaaatgagaccaggggtaggacacgggactcacaaagcctcagggacagatgtaagcggcccgcgcaagctcagggcccagtgatggactcagggaaattatgaagggagtttggacgtcagcgcagagatccaggaatggacgagcacatttcctttctaatttccattagtgaacggtggcaaagctcttggaaaatgaagagcagggcagaagtgctaagcgtcctgattgcacaggaggcccagtcttgctgactggcaagggcagtttataccttccgacttactccttatgtaaccactgggtactaccttctggccaggtgaccctaggacggtccaccaggaaatcaagctcaaaaagccactttcaggatgaaagacttctaggaggggacaggagagttctggcagggagatgggatgtgtggcaccctaggtgctggtagtaatgacacagaatcacaggggtctgggtttgatccttgctctgccactgccagcttcttcctctttatcttcatcatcttcccagcacctgccacatgccaggcaccattctgatcactttacatacgctgatccatctactgctcccaacagccctatgaggaa

SEQ ID NO: 17501 - DNA, 1032 bp, Homo sapiens
aattctatcagggacatatcctcaatgtacccccagctatactagaggcagaatagagtaaaaggtaactgggggagcttgtggaagccacttatgccccctgatgctcagtttcctggtctgtaaagtgagaacaattccacctgcctaagattgtgaggaatgaaacgtattgaaacacttgacacagggtgctcgataaatgttagcacctattgatactgcagtgtgagctgggcaagtcacttttctctgaaccttagtttcttcctctataaaatggggccacttacttcacagagttgctgcaaagaccagcttccaagcatgttctttgaaaaccataaagatatgaacaatcacatatttttaaacttgttggctctgccttccagagccacacagaataaaactaccccccgcttctttattcattctctgttaaatgaacaaatgaactcgaattttagaaaatgatctgggccaaaggtcagtaaatatgtcctggggccaacctggggtcggggaggctggaatatgagggcattcagggcagggggaggatagttgggaggggggaggtcagagcctccggacacttggctgtggagcttggcctcagggctgtgggctcagatgccctgcggaatatcagctcagcttcccaagtgctaatcatggctcctatctcccatctggttctcagctatgctgtgactgtccaggaatcgtatgcacaccccttcgatcagatctattacacacgatgcacagacatcctcaactggttcaagtgcaccaggcaccggtgagtacctctctcagatgatggggcagggaaaaggcactgggctctcagggcttgcctctgtgcaagttagaaaaaggccgctggagcagatgttgtcacgcgcctccactctgaacacccaagatgctctgctgatggcttctttctggccaaaagagcttgcgggtagtacaggccagcagtgctggagagttaatgctcttgagggcatccctcaacca

SEQ ID NO: 17502 - DNA, 1035 bp, Homo sapiens
catggattaatttaaaataaaatcctgtgcctgtgttcctattaccacctcagaggttggcacgtatattcaaccttacacccctctttcatttaaaattaaaaaaaatactttgcaacaaaactttaaccttccctttagaaatcagcccaaaaggtcagagctgtgctcctgtagatttcctgggctcagctgggaactgattaaagctgctggctttggcttgtcagctttgtcatagacaactatatacactctttgttattccctttgcttcatattataaatatatttatcttcctctgtcaggcgtctgcaggacaggtgctagggggctgggagtcctgcttaaatgcttctaacaatgtcccctcttaatgacattagtgcaggagaaagggacgaagatggcaggagattctggacccagggctgctgtggggctaaagagaatacctggcacaaagccttgtacatagtaggtgcccttctctccacccccagatttgattcctgtgtgatcagcaatgggattgttgtgatccaggggtgggatcttgtagctgccgtgacatggggtgtgtgggatgatggcaggtcaggaccttgcactcccttgctcactttgactaattagaacagagctgatttgttttcttatcaaaggatgaatagcaccctgctagctgtgatcaggaaagcagagcatgggtggaatggctcccttgggagtgaggagggaggctggctacgtttgcccgtggagatgtcactagacatggcctaggtactgttgtccgtgtggggttgtcaataccacatatgttctgatccaggagctgttagctgctggcacgtctctggtcccatttattctctaaaacctgtaaggcgttggtcccatttccacagctggagagtcataagcctcaagggtttaggaggagtggtggtctggttgagtccgggcttccccacaaagcatggtcagtgaagaagagagagctttggtgggtggctgctcatattggaggc

SEQ ID NO: 17503 - DNA, 1023 bp, Homo sapiens
ttgtctctagcatcttgtgcttggcataacgtcatttttgttgtgggaagtttcttattttacagtgctgcataatattcctaaagcaacacaacactaccctatttaaaggcatttaaattgtgggccattctctctctttctacaagtcaaactaatgtttatattgtggtaaaatatacatcacataaaatttaacattggagccatttttaagtgtgcagtttggtggcagtaagcacattcacgttgtttcacgaccatcactgccatcgggccactctctttttaaaaattgcctgattgtccccaagctcctcttctgggctcagcctgaaccttacttctcagggtggttggccctgatcccatctttgctccccagcacttgtttgtcccatatggtggcacttatcacgcatggttcactgtttttcatgttgctggcagcaagtgtgtcataggatcaattccgtgggcctcaaatcatctcagaaaaatagaaaatattagattggctcctctgtagtagaggtaaatattgctttgtggagcttttgtttcagttccgcgtgtatatgcacacatgtatttgtgggtagtgggtcatgatgcaaagcatactttttattgtgggttgttttcaaagacttgaaagccactggtggtgtaactgctggcttgctgctccgtgagggcacttctgttttcccagaaccatggttggcacatagtaggtgctcactgagtgcctagaagcacaagaatcagtgtttgtccctctgagtgctcatcctcacttaaatcatattcattaagaagttggtggtgggtgggtgcagtggctcatgactgtaatcccccagcactttgggaggccaaggagggcagattgcctgagctcaggagtttgagaccagcctggacaacatggtgaaaccctgtctccacaaaaaacaaacaaacaaaaatttagccaggcatggtggtacacgcctgtagtcccagccacttaaggggctg

SEQ ID NO: 17504 - DNA, 1038 bp, Homo sapiens
ttacaggaaagttacaggaaagataaaaacagtaccaagaatttatattctttacccttctctctctcatatatatatagatccccagtggttctcaacaagaagcaatttttgtcccccaggagacatttgacaatctctggacaattgtgttgtttcaaatgcctggggtaaggatggggcatgggggggtgttactacattagtgcatagaggccagggatgctgctcgatgtcctacagtgcacaggacagtcctccggctccccccagcacagaattatccagcccaaaacgtcagtagtgctaaggttggaagtgtgtgcatgcgtgtatacttgaactgcttgatagttgcagacgagatacccctttatccctcaacatttcaatgtgtatttcctaaaagcaagggcattctcttccataaccaccgttcagttatcaaaatcatggagttcacattgatacagggaagccataggtatgatgccggctggcggatcctcaggaagcacgtgggactcttcgttaaggatgctggaatcgtacatggaaatggactgaagcttgagctctgggctgttgagatcaagccccacgaccctggccaattttggcatttttctctctgttccattgctcctcccctccgagggttgtggatgaggggaaatgagtcccaggtaggagagaccgtgctttgcgtgtgagtacacaagactgccgtaatgccaccaactccacccagagccttcctgctggaatgagaggtgggggtgtgaggggcagcctctctcctggtggttcctggttgcgacactccagctgtggccagtctcagggttgtcgacaggacttccaccctcagaggcaggcctgggctcagccactgagccacagagagcaggtgggtgccccagtggacagggagctgggctcccctgtgtgtggaagaacatgacaggtatctgggaaggcctgctctttctgtcctttcacagagagagggatgggggaacaaaggagctggcatca

SEQ ID NO: 17505 - DNA, 1199 bp, Homo sapiens
cacccagtggcttactccagagatgattatttaacttttttacaagtgatttgaaagtcagcattcagcctgggcatggtggctcatgcctgtaatcccagcactttggaaggccatggcaggcggatggcttgagcccaggagtttgagagcagcctgggccacatagtgagacacagtctctagaaacaaaaggaggctgggctcggtggctcacaccagtaatccagcactttcggaggcgaggtgagtggatcatttgaggtcaggagtttgagaccagcctgggcaacatgatgaaaccccgtctctatcaaaaacaaaaaaattagccaggtgtggtggtgcatgcctgtagtcccagctactagggaggctgaggcaggagaatcacttgaacccaggagacagaggttacagtgagctgagattgcgccactgcactccagcctgggcgacagagtgagactccgtctcaaaaacgaaaaacaaaaaacaaaaaagaaagtgacttcgatgaatgagcttcaggcttgctgatgacgttgagatcacatgggtggtgaagtaccaaggtaggaaacaaaccagctatgggggaaactgaagaggtttgtgcgcgatcagagaaatggtagatgagggacaaagtgtctgagtataaagaaatagattcatagcagtggtttccaacccagggtccctttaagaagtatacccagaatttccaaaagaatctccccgcctctgttgaacgtttgtctatgttaagggaccatttttctctgcttttatttgagactgtcaagttcacatggtaggtagtcttcacgctgatcagagctcttgactggtagttatgaatgcctttgattaaaattggaaaaactgtttcaattatttgtttatgtatttatttattgagatggggtctcactgtagtgcccaggctggtcttgaactcctgagctctagcgatcctcccactgcggccttccaagtagctgggattacaggcatgcaccagcgtgcccagctttcaattatttcttgataaatataacttgttctgtgggcaaaatttcttgaaacctggaggccttgttaaggcggggggtggctcaggagaattcgttaaagaggtccttattggaagaaatgttgaactcctgctgggatgtaagctacctgttaggaca

SEQ ID NO: 17506 - DNA, 1050 bp, Homo sapiens
ctcttctccttctgatgacacagatgttatatattttgttatagtcccataagcccccgaagctgcatttttttcaagtctgttttctccctgttattcagaatgggcaatttctgttgttttgttttccagttcactgctgcttttctctgcccctctattcagctgctgagtccacccactgagatttttatttcagttatgtttttccattttgtcctttatgccttgcatttctttgctgagattttttgtttcgttcatttgtttcaagcatgttcataagtgctcaaagaaacatttttgtaatggttgctttgaaatctttgtcagataatttttaacatctctgtcattttggagttgacatttattgattgttctttttcatccaatttgatattctcctggtttttggtatggtgagtgattttgtattgaaacctggacattttcatgttataatatgagactctatatcttaattaaacctctgtgtcaattgactttgtctgacaactctggcaggggaaggaggtggggctgctttgttactgacaggtagatgtagaaatctagattccccgcttgtcctctgttgacaccaaagagtgagggcacctacttgtgccagctgagcacgggtaggagttccacctcaccacatggtctccactgacactgcagggggcagtttgttactagctggagaaggtgaaagtttcagctcctttcttggtcttctctgataccaccagcgagtgtgttgaggtgccttgtacaaccttgagaagacagaagtctgggcttccctcttggcctttgcttgtgggcccacagttggtgtttggctggagttgaatggctgttatccccaccacccccaagacaggatctcgttctgtctcccaggctgaattgcagtggtgcaattatagctcattgtaacctcaaattcctgggcttgtgtgatcctcccacctcagccttccaagtatcttggactatccaggtacgtgctaccatgcccggctaagtttttaaattttt

SEQ ID NO: 17507 - DNA, 1047 bp, Homo sapiens
ttgatttttgatttcaggtctcagttagctgtggctcaccagcacttccccagtgcagggatttgcaggcctcatctcctgcggcctctcctttctgcccgtcctttgtccacaatttcccgatatcaccaaacagcttcttggccctccctcgcagatctacaggactggaagcctgggcggggcatgaggggctcaccccattcacatagcttggtcctccctgcctccactgtctggaacctgcagctgtttctccctttggataccttctgtgttccgtggtttaaggtaaactgctggagccttcaacttgagtcccaactgctggtgctcctgtatggctgggggggagtccctggcaggaagtccctggcagtggggactctgtgctggctgccacctcaggacatctgccagcaagcctctgggggatgggccctgacatggggatgccgcgtgtgcggatgcaggccaggcaaagacttggcagtgggggtggaaggaagcgcattcttgtgttactggggggctctgtgccaagaggagaaaaataaatgtaattaccttcactactgggatcctggcagagtgaggggccagcccagcctggctctagggctctgcaggctgagggtttggtcatgctaggaggagaagcctcctttatcttctctctttcttagaggcctagggtagggccagggagggcaccctagcttcccttttgcagccagtccccccacgatgcacccagcttgtgctgatggggatgggagaatacaatccagagggcggagagatgataggtgggtgccaagtcccacctctgtgtgctgggcctggggttcggccgtggtgtgtaagtggctgtgtgtgagaggggtccgccatccctttgggtctctctgattgccacttgctccctgacacccgtcccttgttgcccttccttgccctgccctctgccctggagaggcttgctcttgtgtgggctcccttgctttctgtctttgggttgggtttggccaatgggaggccctgcgg

SEQ ID NO: 17508 - DNA, 1030 bp, Homo sapiens
aaggtggaggttggggtgggttgctcagcagggccctggaaggcaggaagcatcttgtcttccacaaacatggctgagtaccagctgtgtgcagggtactgggcacagtgctgctgtgagagtcccagggcccagattaggaagatctctggctgaagggagttcgtatgtgacctgacccttctgcggttctgtgcctcaatgtctccttagggcaatgatagggcatccttaagaaccacagccacttccctgggatgtggatccccctacatgatggctgcagtcccccaagattggacagtgcataatttcaagaaggatctggaatccttcccccaaagactcctccaggccaacagctgccattgagctatcacctttgcctcagcatcaatgggaatttcaatttacagcctgtggctttggagagactttgtgacagaagccatcaatctctgcctttcaaatttattttattttattttatttttccagcctgagcgcctgttctgctatgaactctgtctaatcacctcgcaggcagttgaaggagagtgggtgtccccttgatctgtggggtttatgtgcataattccctttaattcatctcagacgggttggagagcctcggttgagaatgattttcaaagtctctcactgaagttcaaagatgcatttctccagccagaccagtaaattataggagcaatttgccatgaatttccaatgtggagccattcctagttcctctcagggtgcagtcctctgtccctcattccctcctgccagtggaggtggagactgtggcctggtgtctggagagcatctcctcccaacattcactgaactgtttatcccaacccactggtcttcctggcccccaactctgttgaccctcctgttccccatttcaatcttgtctcgaacctgtgctgatgcctcatttttgagggtggggaggtccaggtcaattgtacactctggtacagataaaaccttgatcctgagtgtatgtcttcacacttta

SEQ ID NO: 17509 - DNA, 1087 bp, Homo sapiens
ccccaaggagggggacgtacaggagttcgggccactggggctcagtccttcatgaacccacaccctccacacataatgagtgcctaaatgactaaaacaagagaaagatttgtagcagctttattgaaatataatccacataccataaatccaccattttattttttattttgtttcatttttattttatttttttgagactgagccttgctctgttgcccaggctggagcgcaatggcaccatctcagctcactgcagcctctgcctcccaggttcaagcgattctcctgcctcagcctcccgagtagctgggattacaggcatgtgccaccacgcctggctaattttggtatttttaggagaggtggggttttaccatgttggccaggctggtctcaaactcctggcctcaagtgatccacccatctcgcaattcactattttaaagtgtacaattcaatggtttttggtgtatgcacagagttatgcaaccatcaccacagtcaattttgtagtataatcccacaattaccccaaaaaagtaaccctatatcccttatcagtcactccccatttcccctcccccagcccctggcaagcacttatctacttttgtctctgtggacttgccggttttggacaattcatataaatggaatcatacaatatgtggtcttttgtgactgatttctttcacttagcatgttttcaaggtccatccgtgttgtagcatgaactagttagtacttcattcctttttattgccaaataatatttcactttgtgaatatagcacgttttatttatccattcattggttgttagagatttggtttgtttctgcttcctggctattatgaataatgctgctatgaaattcatgtacaggtttttgcagggacacgtattttcttttatgttgggtacatgcctaggagtggaattgctgggttatatggtaactctatgtttaacatttgagaaactgcacgactgtttttcaaagtggctacaccattttacattcccaccagcagtgtatgagggttttcatttctccacatcctcatcagcatttgttattat

SEQ ID NO: 17510 - DNA, 1095 bp, Homo sapiens
ttagactggggactgttgagctctgaacaaatttgaaatgagttcatatgtgacattacaaaccttactttatgtcctccatttttttcttgagatggagtcttgctctgttgcctaggtgggagtgcagtggtgcgatctcggctcactgcaacctacctcttcctggttcaagtgattctcctgcctcagccacctgagtagctgggactataggcgtgcaccaccatgcctggctaattttttctattttagtagagacggggtttcactgtgttgcccaggctggcctcaaactcctgagctctggcaatccacctgccttggcctcccgaagtgctaggattataggcgtgagccaccgtgcccggccatgtcctctattttgattagaaaagcatgacactgatagagtcaagtctttttagctcagtaaattagagcaaagtcttgcaaatcctacaggatggcactgaactgtgatatcaatcttgatgacagataaattagcaaaaatttcatttagtaaaaaaactctttgccaccaagtcattttatttaaaaaaaaggtatacatttggaactcataaaaaacatagggctaattttcctaatatgtaaagagcttttacaaattaatcagtaattgatcttgaatccaaaagaaaaatgggcgaagaatatagttaacagaaagggatacataagtgacaaacatacgaaaaaatggttagctttatttgtaatgcaaattaaaaccaatctaagataccatttttcatctatcaaattggcaaagataaaaaaatacaacatattgtgttggcaaggctataggaaaatatgcactctcatacattggtgacaggaatataactggtgtaacatttaagaagggcaatttgattatattgatctaaacacaaatgcacatactcttgacacagaaatcccataatcaaatatgggaatttctctttcacatatactgtattttaaaaaatgtgaaatggtctgggcatggtggcttacatctgtaatcccagctttttgggtggccaaggcggaaggatcacttgagcacaggagttcaag

SEQ ID NO: 17511 - DNA, 1023 bp, Homo sapiens
ggctttctgacttcaggtggggacaggaagtgacaaagatggtttgattgaaaagccaggaagttagctcaggtgtggtggctcacgcctgtaatcccagcactttgggaggctgaggtgggtggatcacgaggtcaggagatcgagaacatcctggctaacacagtgaaaccccgtctctactaaaaatacacacacaaaaaattagctgggcatggtggcaggcacctgtagtcccagctactcgggaggctgaggcaggagaatggcgtgaacctgggaggtggagcttgcagtgagccgagatcgtgccactgcactcctgcctgggtgacagagcgacactccatctcaaaaaaaaaaaaaaaaaatttaagaaaagccaggaagttgagcacaagaacatcaaggagaacatctgggatgggggtgggggaggggtttgtgggcctgctgggaactgccacagggatgggccaagaagcatgtgcattaggaggattgtggctaactgcagccaataggggatcagctagaagatggagagcagtttcaagatgccaatgcctatagaaactgcttcctcaggagggcaggttcaggcttctgtctaccctcacaaactacattagataactgagaaagaagagttaatttttcttttttgagatggagactcgctctgttgcccaggctggagagctgtggcgcaatctcagctcactgcaacctctgcctcctgggttcaagcagttctctgcctcagcctcccaagtagctgggattacaggcacctgccaccacacaaggctaatttttgtattgttagtagagatggggtttcaccatgttggccaggatggtcttgatctcttgactttgtgatccacccccctcagcctcccaaagtgctgggattacaggcatgagctactgtccctggccaatttttgtatttttagtagagatggggtttaatcatcttggccaggctggtcttgaactcctgaccttgtgatccac

SEQ ID NO: 17512 - DNA, 1061 bp, Homo sapiens
agtggctcacagatcagacagtaactctgtcataaggacaagggacagttaaccactgccagtcttattttaaatatgttagtaaaacatagtttttcttaattcttaaatgaaatataaatggaagatctattatttactttaataccactgtggatcatgttggggacatcctaccttgagttaactggtttacagggctttaataatgtattacttataatgtagagcacactgaatttaaaaagaaattaatttggaaatatgtccataaagttttaaatttcttttcttttttcatttgtctgtgtttaactctacaaaagataatgtcctacataaaattaccttttactggccgggtgcattggctcacgcttgtaatctcagcactttgggaggctgaggcatgtggatcacctcaggtcaggaatttgagaccagcctggccaatacggtgaaaccctgtctctactaaaaatacaaaaattagctgggcatggtggcgggtgcctgtaatcccagcttctcgggaggctgatggaggagaatcacatgaatctgggaggcggaggttgcaatgagccaagatcgaaccattgcactccagcctgggtgacaagagtgaaactccgtctcaaaaaataaaataaaatgtattaaaattaccttttcccatattgacactgggaaactattgaaatgtgttggtttaatgtagaacaagaatatggtttggattccttaagctctttgattaggccaagcataaaatatttctaattacaatcaagaactttttgtttctttcttttttttttttttttttttttgagacagtcttgctctgtagcccaggctggagtgcagtggcgcaatcttgctcactgctgcctccgcctcccgggtcccggttcaagcaattctcctgcctcagcctcctgagtagctgggattataggcatgcgccaccatgcccagctaatttttgtatttttagtagagatggggtttcaccatgttggccagactggtcttgaactcctgacctcatgatccac

SEQ ID NO: 17513 - DNA, 1050 bp, Homo sapiens
ggaggctgaggtgggcagttcacttgaggtcaggagtttgggaacagcctgaccaacatggggaaaccccatctgtactgaaaatacaaaaattagctgagtggggtggtgcacgcctgtaatcccagctactcaggaggctgaggcaggagaattaacttgaatccaggaggtggaggttgcagtgagccgagattgcgtcgttgcaatccagcctgggtgacagagtgagactcttgtctcaaaaaaaacaaagccttggtacatctagaatgttgtatatcaaatttgttgtagaatatgaacttttgaaaactctggtgacccactgatcctatatagcacttgttaataaaaatatatatcaagataaaagtgttcatatacatatacaccattggataaagtggtactgggaaattaggcaaaataatttatgatgaaagtttgcatttcacttggagcgcagctctcggatataggactttagtgagacctttgtgactgttcctggtattgattgcatttgttagttgtacagtgcaaccatagacagtcacacacattaaaacagatggttcctgccgacagggtctgtatagttatcagattttctgtgcgatggctccatacatgtttgtttttgttttttaacttttaacagatgtggaagaaaatacaggttccatgtagaataccctaaagttatttataaactactttcaaacatgtaaaggaatgtgatttaggccgggcgcggtggctcacgcctgtaatcccagcactttgagaggccgaggcgggtggatcacaaggtcaggagatcgagaccatcctggctaacatggtgaaaccccgtctctactaaaaaataataaaaaaaattagccgggtgtggtggcgggcacctgtagtcccagctattcgggaggctgaggcaggagaatggtgtgaacctaggaggtggagcttgcagtgagccgagatcacgccactgcactccagcctgggcgacagcaagactccgtctcaaaaaaaaaaaggaatgtg

SEQ ID NO: 17514 - DNA, 1036 bp, Homo sapiens
agaagagaaatgattacatcatttatgacacacccgtatgattaaatactggacaagaaaagactttcatttctagaaatttcaaacagtagggattaatattttttaacagtacttctagaaaaacctaggatctctatttttttaattttttccagatggagtcttgctctgtcgcctgggctggagtgcagtggtgcaattggggctcactgcaacctacgcctcccaggttcaagcaatttgcctgcctcagcctcctgagtagctggcattacaggcacccgccaccacgcccagctaatgtttgtatttttagtacagatggggtttcaccatgttggtcaggctggtctctaactcctgacctcaggtgattcacccacctcggcctcccaaagtgctgggattacaggcatgagccaccgcgcctggcccagatctctattgttttgtcataaacagaaaaaacgtaacgtctatatcaacacccaaaggcaaatgaaagtagagtgagatagcactggacacaactatttttggtaaaaaccaatagaacataataggtatctgggaaatggccaggactttcaatgtcatggagtatttagttaaggaaacagggacaactacctggccatttgaaaaagaaatgaaggtgtaggggccgggcgcagtggctcacgcctgtaatcccagcactttgggaggccgaggtggggtggatcacgaggtcaggagatcgaaaccatcctggctaacacggtgaaacaccaccgtctctactaaaaatacaaaaaattagccgggcgcagtggtgggcgcctgtagtcccagctactcaggaggctgaggtaggagaatggcgtgagcctgagaggcggaggttgcagtgagcccagatagcgccactgcactccagcctgggtgacagagcgagactccgtctcaaaaaaaaaaaaaaaaagaaagaaagaaagaaaagaaatgaaggtgtatccctactttttatcctataataaattccaggtccttt

SEQ ID NO: 17515 - DNA, 1032 bp, Homo sapiens
taataatgtttgtaaatgaggtaacattctactgaatctggggcatttactgttgccccattttggtaatggaggtgggggtataaaaggaaagtggccatacctcttagtcataagtactggggatagatatgcaattgagatctgattttaagtcatttttaagaatttgctgttttgaggccagcatctttcctgctaatctgtgatgcccttggccaatacagatgttggtgcatgtagacaatgaagcatcaatcaaccaaacaaccctggagctgagcacaaagagtcatgtgacggaagaggaggaggaggaagaggaagaagaatcagattcctaaaggagggggaaagccaggctggtcagttatacaaattgcatttctaaggctcaggctacttctcctcaaggaaatcatcttgccctgggccctgtgatctgcttgaaaggaaagcaagaactataaggaggatgtgtagttgcaaaaatggctccatcggtaactcaagcttcagaatgttatgacatacagaaaatcaaagatgctgtgtcttagcattgagtaatatgggtggtgctgtctgtaatctggtcagattcagttaactgttcagaacaaaatttcctctgaaatactgttgagaaagtctgtcatttgcaaaaagagcagagtttaaatacaagccagtctttccagtcaacaatgcctctttgaagaaaaccaattaaagactgtttgcatgccgctgaacccttgtgagcagttaggacacagtctaggacagaaagatgacaaggggaaggactgagggccgtctgagagcacaagctgtttctacctctcagaggcattgaaatattgcatgctataaactgctttgtgtatctgttaccacctctcacttgagacatcactcactggtaaaatgttttataaataaatttataagtagccatcatggagcctgctggtttctagatagcgacagagagaagcagcagttccttctctgaggaaaagatacaac

SEQ ID NO: 17516 - DNA, 3062 bp, Homo sapiens
agcatctccaaaccttacaatatggttttgatttagctattgtgctttataaggcttgctttgaaagttttatgataaacaattctttttgaaaataaaattgtgcagtagaggttgagattctaagggttctagtcatttactgctattttggtttaagggttgtttgcctcaccataccagtctcttctgcaattgagtatttaatggtattgttggcgtatgagaagagtttgcttcaaacattacttgtcaataaaaataatccttgtctttttctttaggcgtgtgctcgcccactgatatcggtgtactccgaaaagggggagtcatctggcaaaaatgtcactttgcctgctgtattcaaggctcctattcgaccagatattgtgaactttgttcacaccaacttgcgcaaaaacaacagacagccctatgctgtcagtgaattagcaggtatggatttatatcttctgcagatattttagggactgctttacagtagtgatgaaattccacttcattggtccgtgtttctgaaccacatgattttctcggatgttctgatgctgtttgctaccatgcataatagtcatgggttggtatgtatgatgaagcagctacaacttttatctcttctcaattttaggtcatcagactagtgctgagtcttggggtactggcagagctgtggctcgaattcccagagttcgaggtggtgggactcaccgctctggccagggtgcttttggaaacgtatcctttgtttcactacctaagactggtcatctctgatggaatttagcggcctgggtctggtttattgatgataatacggtgtaaaaatattacttttttttgtcttgaagagaaggggcttcatttatatggggttattttgcttgcaatgatgtcgtaatttgcgtcttactctgttctcagcgacagttgcctgctgtcagtaagctggtacagaaggttgacgaaaattcttactgagcaagaaataaccttgttgtaattactaaaatttgagaaatgtgattcttgactggaaaaatagatgtgtcgtggaggccgaatgtttgcaccaaccaaaacctggcgccgttggcatcgtagagtgaacacaacccaaaaacgatacgccatctgttctgccctggctgcctcagccctaccagcactggtcatgtctaaaggtttgtaatactttatataagagagtttgatagaagaaataagacacctactatttgatcattagggtgatttttattcacagtaacccatttcaagatggctagaagagaataatttgaatgtttttagcataaaatattttagttcatggatattccagttacactgatttgatcttgacaaatgagtgcattcagttatcaaatgtactccagaaatacatgttacataccggtttaaaaattttttaatcaaaaatatttcgtatcagtgatacaaaatgccccactttttctttcacgtgaacctttgttaaaattgcacattcttttcattctgaagtgtctgattaaattttaatcctttactaaatactaggtctgactacttaaatctgacaaatcaatcagggaatactagcgtaactggggaactattcaagtagtagtttagtatatccttagaaaacttccaacttaaacttgcctgttgcgtacccatcgcatttttatttaactgtcaaaatgatgagattccacttaattggtccgtgtttctgaaacacatgatatttgtggaaattctgacttggcaaacggaataccattttgcttttattggttgtataaaatgtttgattttttttttttctccaaaagtttcaggataaccaagtaagtgtcattggtttttgttaggtcatcgtattgaggaagttcctgaacttcctttggtagttgaagataaagttgaaggctacaagaagaccaaggaagctgttttgctccttaagaaacttaaagcctggaatgatatcaaaaaggtccgttcaatgagcacatttacagtttggtactccttgttcacagtttgtcactttgaatttcagaagataagggcagtatagctaatccttaatgtgtgagagaacaagaacctcagagcccgattacttgggtttgaatcctaactgctgtttatggctctgtgtaaccttggcaagttattgtgcccagtttaatcatctgtaaaaaggaattaaaactctgaagatctattgcagagattctatcttaatcagaatactaaaactgctcactttgtaggtctatgcctctcagcgaatgagagctggcaaaggcaaaatgagaaaccgtcgccgtatccagcgcaggggcccgtgcatcatctataatgaggataatggtatcatcaaggccttcagaaacatccctggtaattaaactgcttacatatattgactaggtatactctgcaagtctactcagcttttgttatgatgagattccacttaaggtccgtgtttctgaaacaaatgattttgtggaagttctgatttatggctgaaagagttgcaccattgatggttgaaacttcataattaataagttctcaggtaccttttatagctcttaagccataaagatgatttgtgtttcttttgttggaatacaggctccctaatttttctttccctttaaaaggaattactctgcttaatgtaagcaagctgaacattttgaagcttgctcctggtgggcatgtgggacgtttctgcatttggactgaaagtgctttccggaagttagatgaattgtacggcacttggcgtaaagccgcttccctcaagagtaactacaagtaagtatctttcatatactaagcacagatgtttatattgtggatattaacattcagaattggcttacatgttttctaaatttattcccatttccccttatgtgcagcaacagtatgccaaaatgagactcacctggtctatatttttggttttttgttttgtttttgagacagagttgttctgtctcacccacgct

SEQ ID NO: 17517 - DNA, 1039 bp, Homo sapiens
cctcaaggacatctgttgagttcttgaaggaatgaatggaggggctttcgaatttatctttgaaagaaatttacataacagggtgtttgttgctggatctcctgatagagaaggatcggaaatttgataattgccaataaatggaagagagttttgtttccaaagcaatgaactcacaaaaaagtggggcaagacaggagttttcggagagtttgtgtattcaaaaaaagcaaaacaacaacaaaccaattggcacattggggagctccgcggcttttctccccaccaaaagaattcaggggcgtctgcccgcagggccctcggcggttttcaggagctactccaggcccctcggcctttctcttgctgcctcccgcagccgactagccggtgtctaagccctttgtttgtttttaacagcaggaatctcccacccccacccctgctttgttaaaaaaaaaaagttatctggaaccctcaagtgggtggggagttacaaagccctgtgaggtgtggcggaatccacagtcagcccagaagcggcaggggcccttgccttgctccggagaaccgcctcccacaagccaatccgcagctgctgctgcagaagtgcgctgtgctcctcaccctcctctcttcctaaatacccgcctgaaaaggagaatacgtgaaagccaactgaggcttgacaacctggcttccgttccttgctggtcctcctgttaacgcgctgccgctgtggtcttaggtttcactctcctcttcccgtccgtcaagagagacaaggatgacacaatccacatttattgattgctttcttcattccgggtagtccgcctgctgccctttgattcagtcttaacagtggttggtgaggtagatgttcctgtgcctcacgtttacggaggcacagagagattacattacttactcagggttccaagtggcagagctggaatttgaacccaatactttgttgaagcctcagtctccgatcttgagactgcacccagctgcctgggtcacggaaggcaaagat

SEQ ID NO: 17518 - DNA, 1057 bp, Homo sapiens
tctgaattccaaggacatggcctgcaacaatcatgcttccccaggaaattctcaggaagtcattaatggtgaagttagacggccttaaatttgttccttctaccctggtgagagcagaaacaagaacccagggtccagccaacactgactgtgaacgtcgttggtgccagaatctgagctaggtgtggcagaggacacagacttgagtcaggatgtagtttctcctttccatgagctcagagtccaactcaggtgggagcagggggcaaaccagacaaggtcacaaaagacaatgccaagacagcatgtgaagagtgctgtgaccagccctaatggctgtgggaaggagagaacacagtgggttggggagaacaggaagtgtatcttagagcaatggttctcagaagtgagctatgtcacagtcacctggagggccccactccagagttgcggcttcagtaggcctggcgtggggcctgagaatttgcatctttaacatctgtgtgataaccgatgctgctggttcggtcctgggacccactttgagaaccgctgacttaggggaaataatgctgcttgggtcgagctagaaggataaaggattgggacagataggtgagtggaggcagcaaagttgttggagttatggcttgaacaaaggtacggaaagaagagtgaggggatgtgctgggaaaatgcaaggagtccacatagagaaatggtggcagatgaggatggggtgatgctggaggggaccttgtagagtctgtgcctactctggaggtaagtgaggagccaaaggttttgagcagaaaaggcatctaaccataattacattccaggaaaacgtggcagcagtattagcagtttttctgtctaaccaattagctgtgttgagaaagagtctgaggctgaggatggacccaacccggtgacgagtggtttttgccatggatagaaatagagaagaggggaattttgccatatatttgctatccctggactgcagagacacagattagaattttggaatagctgtgatagcaggtaatcagga

SEQ ID NO: 17519 - DNA, 1050 bp, Homo sapiens
actgaaataaaaactctggtttttctccttgctcattttaaagagtgttgaaaattagcatgtacatctttttctgtgtttttctaggtccctgaaacttgtgccctgttttgtgtatgtgagcctgtgtgatttctggcactagaattttctctttctcttgtccttgggagtcagtatttgactgttatcattttggaatctctgctcctttatactactttatttctcgtagccctttgtctgaataatgttcttgtattcattcagcttaatcttaaaatgggttttttgatatgtcatctttaggtaaggtaatgaaaaccttcctagacttttaaaatacaaattattcctaagccatatttcctcatcttttacttgcatgtattattcaaacatgaatataggactttatgctagtttgtattaattttcctcttactggtactagctcttcatttcagaccacatttttggttcctggttatatcatctaaagtattagttattcttttgagaattaagtcattcacaattaagataaacatgacttttaggtcttcatccagacattggtggtgataaacttatcttggtagagtattttctttctttatttttatttatttatttatttatttgagacagagtctctctctgttgcccaggctggagtgcagtggcacgatctctgctcactgcaagctccacctcctagattcacgccattctcctgcctcagcctcccaagtagctgggactgcaggcgcccgccaccacgcctgggtaatttttttttttttttttgtatttttagtagagacggtgtttcaccatgttagccaggatggtctcaatctcctgacctcgtgatccacctgcctcggcctcccaaagtgctgggattacaggcatgagccaccgcgcccagcagagtattttcaatttaatcactatatttctgttaggttggcaggttggtattctttaaatgattcattgatccattaaacagttgctgagtgcctgctgtttttcaggcactgt

SEQ ID NO: 17520 - DNA, 1021 bp, Homo sapiens
ttccctctagaaatcgggccttgatagtgtctcctcatggcttccactggcaaaagcatggttacctgaggtgatgatcttggtctgcgatagagtgtctgaagatggtaaggcctgtggatgggacagtagttggtacatgcatttgccattccttgataaacagagtacatctgtttctttaacttaggacatacatcccatgtgactttatggctttatgaaaatattttcagctatttttctttggaatcttgtaatacttactttttttttaagaatggatacttcggggctgagaagtcattttctttttattattttagatgcctttagaataacattgacattaagggaaacacattgagatttgtgaagaatattgcaggaatagtcatgttttattttctttttacttatgaagattcttttgcatattattttaggtataaaccgacaaaaagctcaagaatggtgcatcaaacatggctttgaattggtagaacttagtccagaggagttgcctgaggaggatggtaagtgtttatgtgttaggagaaaatatggcacttagatatgagagattattttaattcagggaagaagaatcacagcaaaattcaagaaacttttttccccagctgtttcaaggatttaagcaaaatccattgatgtaatcttataatcttacacttagtgtaataattcatttttttggttttaccacctgttttagaacttttgaaaatgtgtgtttttcttatggataaaggtatagggctgctttctaaaatctttgtcatttccataatcctttttcctttccctactgctgaagaaggagagttagaccttcgtagtagttaaagttgatgtttcttattttgaattcatagtaacctaaggctgaattcccaagaatcgcaggggacatttcaaatccatttgaatgtcttttggacatttgaagccaaaagatagaccccaaatttaatcccccacctccaccccaggtagctct

SEQ ID NO: 17521 - DNA, 1098 bp, Homo sapiens
actgaactgaaatgttgccttggcacatggcttccttcaaagctcttgaatcttatttcctgtaacttaccatatgagattatagggaaaagaagttgaccaaggatgtgagaaagtaaatgggagttactggagaattgatggctttgtaaaaagtttctcaaatcgggatagaggtttatacttgcacttaatactgaaggaaaggtttatgtttgctactagaactgggttggcatctaacttcctttgtaaaagcactacaaattaactattgtaagctgtgaaatggagtttgtagtaacagacctggcaagtaaacacctagtgtttgtctcttaaaaaatgatgtattacagctccaccaggtggctgccaacagtgtgaatgagacaggctggcatcgaccaggaggaggggaaagctgctcttgattttctttgtgcatatcggagtctacaacataataatttagtgaaggacaaagaagggagcccactgcaggtttttctaggaagtctggcaaaaaacaaaaaaacaacaacaaaaaaacctcaagatcactgtgactcatctttgacatataaatacctgaatgtcatagacagttttctgatgggttaattgtgctgcagatccgtatataattgtgcccctattctggctattatttttggtgttcctaaaagggcagaggatcctttaggtctatagactagttttggcttgtgattattagagactcaagtgtgatccagctcaggtgctaagtattgtaacatcacggtgtagtaggaaagaatgttggcgaattgaatccagttttaggctctgctcctattaggcaagtggcttcttttttcctgggcctcagtttcctcatctgtaaaatgagtgaattatattagctgctctccagaaacctttagccatgtgcacagtttgaataatttcattttaatttggaaaagaataaacttgttaagcatttgaaaatcaaatagaaaacatgagggaagaaagctatatttagtgtagacatttacattttttaaattaaactctacattatgatattggtaataagaattagaatga

SEQ ID NO: 17522 - DNA, 1034 bp, Homo sapiens
tcaccagctgctcctccgtcttctcaggagaccagctggtccaacgtgagtagataggcgcctgggccgacctccaaggcccctgagcctcagcgggcgacggacccagcaccacggcctctctgggccttgtccccgcagcgggccctgcgttcttcctccagtcagtggaggcgcccagtctccccaggtggctgcccctatctcttaatctcgtgcttttctgcccactcggccttcttcggcgttcctttcggcttcctgtgtaaagtgagactgatttcccgctctgctcagcccaggccacaggtttttgcgaggatccgttgagatgaacctgaaggctctccggaaattgcgctaggttacaggagtgtaaggtgctggaattgttgatatcgtgatgttgttatccttgctgctccgggagagagtgtttactctgaattctgaagtttattctgcgtatttactctgaagtttattctgcttcttaatgtgtacattataagacttgttagctttgtccgctccactctagttattcacgcctttcatctgaggcatgggctctccgccaacatgagtttttgggtatgattgggctagtgcttttgcttgtagaccctcataatggctgtcagacttactaactcttaaaagagagaacatgggactggataataagccaactctactaaagggctctgtgaagttgaattataggtaactcaagacttctgttttaagtgtatggcttagaatcagagcagtgacttagctgtatgatctcgagcaagtcacctaacctacctacattccttccttcttttctttttttttttttaaagagacgggaacttgctctgtcgcccgggctggagtgcagtgatgcgatcatagctcacttcagcctcgaactcctgggctcaagcgatcctcctgcctcagtctcccgagcaactgggactgcaggctcacaccacgaaccctggctaatttttttattttttgtagagccagagtcttgctat

SEQ ID NO: 17523 - DNA, 1039 bp, Homo sapiens
cctaggcagggctcctcctctccagctctgaggtgtgtgtattgatggccccctacacctcccagtttgctgccttgtgggaaaaggagaccagctcttctgttatctaggaaagggaagaaatttgagagcagtggcctctgtgttccaggaatatttgcgtttcccacaaatctctggaaagcagaaagcttgccacaagggcagcacacggtatgagtcacaaaggcaaggacctgagggagaacacttcccaggactttcaaataaggtctttcctaaatgtacttggctcagtgtggcaaaagcactgggctagcagcagtcagatgtgggttcaaagcaaggcacaatcatttattagctataaatttgggcaagtcacttcttgagaataagtttcttcatctgtaaacagaagtaataccttccttatatcttaaattggtgtggaagtaaatgagtaaaaacctcagggtttttctgagtttaaatgagacaattcatgtaacgtgcttagcacaatacctggtacccagtaggtactctgcagtatttattgatgatgatgatgatgatgatgatgatgatgatgatgacaaagaaatacaaggaaatgtcaacaccttaacagtgcattcatagatctacaaaatgcttaatctcagtgttctggcaaccactaaatacataaagataatctaagacatcaagatttcaacatataaaaataaatataaaaacaagtgaacaataatcatttatatgtagtttcatgactggaaaaaataataacctagattttttcttaacctagaaaatctagattaaaaaataaagatcttgcatttttgatataaaacacaaataataaggacatgaaaaaagaatatcccttgctagtaatcaaataatagcaatgagaagctggattcttatatctaaaataaaagtgcaaatagttcataatatccattggtggtaaggttgtggtaaaactagtattcttattctctgccagttgctttggaaattggta

SEQ ID NO: 17524 - DNA, 1118 bp, Homo sapiens
tttctatcttcccaaagtgtatatatattgaatatctgttataagccagcaacaggggcacatcttctttatctcaaaaacttgtgaaatgaggccgggcgcggtggctcatgcctgtaatcccaacactttgggaggccgaggtgggtggatcacttgaggtcaggagttcatgaccagcttgaccaacatggtgaaaccctgtctatactaaaaatacaaaaattagccgggcgtggtggtgggcacctgtaatcccaggtacttgggaggctgaggcttgaatccaggaggcaggggttagagtaaattgagatagcgtcattgcactccagcctgggcaacaaaaccaaaactctgtctcttaagaaacaaacaaaaaaaaagacaacaacaacttgtgaaatgagtagttaggaagttttttttgctttgcattgagtaacaacaaggtgatggacgatgggcgaccacatcagtgtttcagagaggctattatccattttgaacagatcatttagagctaatgacttgggaagtgtggaaataaaaatatataccttgttgataataaacaagtgctagaaaaaatacacttgacttttgaaaaaagtcagaattccagattttcattccatcatgattgcactggctctgggaatgcaattagcggctagctttgtggggctgatagctctagggcaattcccatcagaagaaacttcagccccatctttgccactgcacaggcttgcctccactttttccagtgcccacatttacctctcagagtgcatcaacaatcgtcaggacgttggaaggttccaagacatctgcagaaagcatggggctccaccagcctggccgatgcaccccagagattcttgtctaccaagtatgtaacttgcctcttgctctctctttttctatcaagaaagtgtaaatttgaaggaagagatgtctgaatgaatgaaattcaggatatcttaggggaagccagtagactctccattgcactcaatgactaaagctagtgactaaagcttaatactgcactcaatgactaaagctacttcaaactctacagagttagcttccccaaccaagtaaattccaag

SEQ ID NO: 17525 - DNA, 1026 bp, Homo sapiens
ccagtcgcttcaatggcatcacaaggcatgtcaattagaaaaaaaattaagatgttttctgaagtgataccacttgcaaaatggctagaaaatatgccagtgatttgtaaataatttattatatacagagaacaaacatacttctcttgctaatgcagaaacaccctttggtgtggtcactgagaacttcttccaatattctgttgataactataacacaaatgatcatatactgaagtatttatgggaagggacaaggaaaattcatagtatgataaaatcagagaatctaatatctatctatcccattcatccaatgaatgtttgagctccttcttcaaaagccttgcaataccatccagcatctgctagaactcctccattgttcattcattcagtcaacaaatatttactgaatacctactttgtgccaggacagaagtaagtgctgagaatacagtgggggagcaaaaagaaacacagcacatcgcttaaaagagcttacaattaataggaggagaaaaatattaatcagatagtcatgtaaataagtttaaatttgtaactgagataagtggtacgaggaatgctcacacacagctacacaatgatatgaaaacctaaaaaaggagaatttgactttgtcaggaaggtcaggaagcgcttcagtcaatgtggcttgagctgaaatgtgatggctggaaaaggggctaactaggtcaaaagaaaaggcaagagcatttaaggtggaggaacagcatgtttaggccctgtggtagagggaatatgatgagtaagagggaatgagacagggtgtgtggatggaccagaacaaaacagagggcaagttagggtgagacaagactggccaggtacatggaaccagccaagtgaagggtgggacctttcagccagaagcccagaagggtggtaagcccaaggaaggactggcatcgtgtttggagaagatccttttgactgctgtgtgcaagtttccttataccaaactcaaataaataaaagcca

SEQ ID NO: 17526 - DNA, 1068 bp, Homo sapiens
gtttttatcagaaaagaatgttacattttgttaaatgcattttctgcattatcttccttttttttattcttactcccatcacccagactcactgcagcctcaacctcccaggctcaaatgattctcccacctcagccccccaagtagctgggactacaggcatgagccaccacacctggctaatttttgtaatttttgtagagatggggtttcaccatgttgcccaggctggtcttgaactcctgggatcaagcaatctgcccacctcagcttttcaaagtgctggaattacaggcatgagccattgtgcccagcctcaatcaccttccatttttatttagcctttactttgctggtaaatccttgtttaaaaactgaaaatacctaccacaatgccactaagtaggagacagaaaatactagcaaagatgaatctattccactgcttcaagtttttgttattgtacctatattactgagattgaaagtttttgcctttagacctaacatgagtaaaaatcaagaaaacaaacattcatatcagaaggctagaaaccatgacataattaaaagctacctaagaatatctgactttttatgattttgaaagtcagagaaagggcagagaaatagctttcattttgtcaaaggtggttgactctgcccacagcgagacaagcccagaatcaacttagtctgaatgcatttgaggttaaagcatctgattctgattattagctatatttggacaggctgaatggatgaaatgcagagaggctcaaagttttgcacatggcactaacagataagatgatgctactagctagcaggaacttaaaatgtaaatgataggctgggcaaggtggctcatgcctgtaatcccagcactttgagaggccaagacaagatcccttgagctcaggagcttgagaccagcctaggcaagacagtgagatatcctgtctctttaaaacaaaacaaaacaaaaaccagtaaataatgagcatagatcctttaggaccagtgaacactgatgtaacatttggtctgtcttttcttgaatcttct

SEQ ID NO: 17527 - DNA, 1049 bp, Homo sapiens
tgggattacaggtgcctgccaccacgcctagctaatttttgcatttttagtagagatggggttttgccatgttggccaggctggtcttgaactcctgacctcaggtgatctgcctgcctcggcctcccaaagtgctggggttagaggcctgagccactgcgcccagctttctcctaactccattttacaagcaaagatcaaggtttacatccattaagttcttgagccaatgatggcatcaggattagtacccaattcttctgatatcaaagactgacctaaaaactatgcaatagtttttagaaaaactattgctagaaaaaaaatgctgaaagaaaacccatccaagatgttaccaagtggttctctctggtaatgggattatgggtgatttttgttccttttattgtttcctgtattttcaacaatgagaacacatacagcttttcataatcagaaacaagttttatgttttgttttgctttttctaagaaaaaaagtagtttcagagcctggggttgctgtttgcattgggggctggacactcaggaaggagggactggcgcaggggaagggcatccgctgggaatagcacttgacccggagcccataggctgctgctcagtctcaggtcaccagcttcctcatctcaggggggtcaccaccatctgctagggttaccagaggccccactagaggatgcctgcagttgcgctgggagcccaccctggggcaggccacgctgggcccaggtgggcctctgaaagcctgcagcctggcggtgggttgctcagtggtctgatacctgagatcccccatgtccagctccaaaggggtggtggtttccttgatttctgtcccctccaaacaggaagttgtagtccagggaagttttgatttcctgcagttacatcccagccagggcccgtggaggaggggctgggatggagactgcagtgaggggaaggcaggtgagcagcccagcctgcgactgaggcttgagaccccaggtgggggtgctgatccatcctggtaagatgtactgtggt

SEQ ID NO: 17528 - DNA, 1366 bp, Homo sapiens
gtgctagtatgttagagggccgacctgtcaggagaaaaagcaggaaggagagccaggaggtgaggagggagagtgaagagatggtggaggaaggggccagcaggaagcccagctgggtctccagcaccctgttgtcttgttccagtgcaggaatgcaaagttcagatgtggccttccaggtctttaaaggcgtctgaggcagggagacagcacgtatctgatgtgaaggtttgtgaggaggtgggcctctatttgagccctggccctgctgctggcaaggaccacaggcccccagtgactgacagggcttgtcggggagtagtgaagtgcccccatctgcagatccaggctgattctggaccccaagggtgtgatgagcaccttccagcacaggtcaggcagggagagcagtgggccttgggcccaccctcacccaagggcaaacccagacagaaagacaaggtgagggtggccatgagaggtccccaggggtaccccctgtagtgctaaggttaagctctgtgattggggcagccctctctctgtccccctgacgtgaggtgatggcattgtcccctctggcactgggccctcttgcaggcaattgggttttatgggaactaaacctggggtcttaggccaggctctggccctgcttcccctgggcctttttggcccctgccacctggtcctgactttggtttgccccttcggaagctcaggctctggaatgttctgaaagggcagttgtgcggggctggggctttcctctcagtctctccacaaaggccgcgaatttgtctctaaatggtacatggcgatctgcctgtctttagtgacccccctgaaatcctaccagggaggcctgagtgccttcattagggaatatgaagggacccctggtctgggctggggatttggggggctccttctgcatcctctccctcaccctactgctctcagtggtgtctgccctggaaccgaaggcagtgtggcctggtgggcagagctgcccacagccaggctctcagtgttccagccctcaatgtcctgtccgcacatgggaatatgagggggcgcatcacagggttgtggggatgaagcgagggcctgggggtggagtgctcagcaacgtgaattgtcattgttgctgtcatcagctaaggggctattattgtccaggcctctaaggacctacctgggtggtgtgagaagcaggagagagaacagagccctgagccccagcctgggagggccagcgccaggccactgtgtttccacggctccacccacaggcccgggtgcctcgtctgggctggacgagaatctccctgtcctgatggcagccccacctacccctaaatca

SEQ ID NO: 17529 - DNA, 1040 bp, Homo sapiens
ctctactaaaagtacaaaaattagcctggtgtgctggcaggcacctgtaattccagctactcaggaggctgaggcaggagaatcacttgaacccaggaggcggaggttgcagtgaaccgagattgagccactacactccagcctgggcaacaagagcgagactctgtctcaaaaaaaaaaaaaaaaaaaaaaaagccggtcatggtggcacatgcctataatcccagcttcttgggaggctgaggcaggagaatcacttgaacctgggaggtggaggctgcagtgagctgaaattgtgccattgcactctagcctgggcaacaagagcaaaactctctcaaaaaaaaaaaaaaaaaaagttggcaaaactcatttgtggtaatcaagtggctagatggaatttatttatttgagacagagtcttgctctgtgcaatggcatgatctccgctcatttcaaccttcaccacccagactcaagggattctcccacctctgtctcctgagtagctgggactacaggcatgcaccaccacacacaaaacatttgtaaatattttgtagacatgaggtcttactatattgtccaggctggtctcgaactcctgggcccaagcgatactcctgtctcaccctcccaaagtgctgggattacaggcgtgagccactgcacccagccctagatggaatttataataaagaatagtgtacatttctgtattatttgtaaattgtgtgctacacatcctttatgtttgtacagtgcagaggacacaagtacatttatgatcagagctggtggttaaacatccagcacagctggtgttatcctaggccttgcacaggtctctttcttgtcctgggggatttgcattttcaaagagaagacttaaaggggatttttaatccaattcatttaacccaattaatcctttcattcaacaaatgtttgtgtcccttctttgtgcctggagctacatacaacagtgaactcaaagacaaaaatcccttcctcacagggggtcaccatcgagggagggg

SEQ ID NO: 17530 - DNA, 1641 bp, Homo sapiens
cccggcatcctgccgcgggggtggctgccgtcgtaatggcaattgtttgttgctttctcctctagtcagtttttgttgtgtggaagtataaacttaatgtgaccagagaagccagaaatatacatttgtaggtattctgttatttaaatattggcaacaaactcaacatttaaaaaacagtaactataccagctaaatcaatatgctgcccatgggctgtggcttagagcggcatagttctctgagccctggcaccagaggactcttctgcctgcctggagggcagcctggctctcgcacacaggaagggatgccaggcaggacggggttgccacggcagctgcctcactcacccctggcctttccaggtacctggtcaccgagggccagatcttcatcctcttcatcttcaccttcttcgccatgctggccctcgtcctgcaccagaagcgcaagcgcctcttcctggacagcaacggcctcttcctcttctcctccttcgcactgaccctcttgcttgtggcgctctgggtcgcctggctgtggaatgaccctgttctcaggaagaagtacccgggtgtcatctacgtccctgagccctgggctttctacacccttcacgtcagcagtcggcactgagtccctggcaccaggctctggcgctctgctgggtgggagggtgggccatggagggcatctgaatacaggagtagggggggtgtgggtgtgtaaccagagaccgagagcatgagtggggtgtgcctcgtgtgcgtggattcgtgtgtgtgtgtgtgtgtgtcttgtatatgtgtgcgcagagtgcatcattttcagactctactatttccgtcaagtttctgtttgatttggatcatctcaggatcggattctgttttagagtgtttctgggccaggatccgggcccctgccctcctctgcacctgaccacactccctactcagggctagtctgttcttcccggacatcttctggtagccgtgcaggagagggctgggtggggcagaggccaggaggggacctggtgtgtcacctgcccaccacctggctcatccctcaggcccaccctgaccctacattacataggttacgtcagcctactgtggctgttgagcaaagcatttctcctttctgggcctcatttgcactagatgggcctgtggtcccaaagtaggtcagtaggttggggttgctgacaccccttgggtgcagctttgggacagatgagtggctctgtcctgtcactgccctctccctgcctgggggctatgtgcactccagacccctgcccaggctcaggcccatgaggtatggagacaccctggcccccaggagctggaggcaccgcccactcccctggcattccagctttgcaggtgaccctcctctacccaaagctctgtccccctgctcccactccagaagaactgcggcacgcgcttcgggcagcctagccacaggctttgagcgcctgcattcctgggggctggagggtggggtgccaaaggccctgagcaaaagccagagctcctctcatcaaagcctttacaaggtgctgggcccagaggctttgccttgacagagtggcccagggtttcaagggaggaggaacctccccctacc

SEQ ID NO: 17531 - DNA, 1040 bp, Homo sapiens
gacttcatctcaaaaaaaagaaaaagaaaaaaatacaaaaaacttagggccggcatggtggcttacgcctgtaagcccagcactctgggagcccaaggcaggcagatcacttgaggtcaggagttcgagaccagcctggccaacatggcaaaacctcatctccattaaaaatacaaaaaagttagccaggtgcggtggtgtgcgcctgcagtcccagctacttgggaggctgaggcaggagaatcacttgaatccaggaggtagaggttgcagtgagccgagattccaccaccgcactccagcctgggcgatggagcaacactctgtctcaaaaaagaaaattctacacatatgtacttaacacaaactttgtttcatgtacaaaattatttaaaatgttatataaaattaacttcaggctgtgtatgtaaagtatataggaaatataaatgaatttttccaggcatggtggctcacacctgtaatctcaatactttgggaggctgatacaggaggatcacttgaggccagtagtttgagaccagcctgggcaacatagtaagaccctatctctacaaaaaatttaaaaattagctgggcataatggtgcacacctgtagttccagctactctgggggctgaggtgggaggatctcttgagccactatactccagcctgagtgacagagtgagaccctgtctcaaagaaaaatgaaagaaatgaatttcatgtttagacttgcatatgcattcccaagatatctcattgtgtatatgcaaatattccaaaatctgaaatttgaaacatttcagataagggatgctcagcctgtatcaccatttactatcaccatcattttgtattgaagaaagatacttcaaatctccagaagtaggaggggtataatcccagaactccggtgtgttttcagttaaacagtggcatttcagaagcacctgcccccatccctgacattttcttcatgtttgctgggaccactcagaaatcagaaggtgccttcagcaggctgggccagcca

SEQ ID NO: 17532 - DNA, 1741 bp, Homo sapiens
tccagtgctgaaactggcactttgtacatactagtgatcatgcaaattagcaaagcccttttggggccgggcatggtggctcatgcctataatcctagcactttgggaagctgaaacaggaacatcacttgagcccaggagtttgagatcagtcagggcaatataatgagaccctgtctctataaaagatttgtaaattagctgggtgtggtgatgtgcacctgtagtcccagctactcaggactgagctgggaagatctcctgagcctgggaagttgaggctgcagtgagccgtgatcacaccgctgcactccagcctgggcaacacagtgagaccctgtctcaaaaaacaaaacaaacaaaaagcaaagcctttttggaaagcagtaataattcataagtaacaacttggcaagattagtacttagaatagtgcctaacacaataagtgtttaatgcatttttactgaatgaataataattatagcaaagttagaatagtggctaacatcgaatgtttactctgttctaagctctttatgtgtttcagtttatttaattctcatatcaacactattgctgatctcaatgttatagatgaggaaacttgaggagagagagaataagtaactggctcgaggtcaagcatagaggccagcatctgcccaggcattctggccctggagcccctttctgacaaggttgaattctctgtcacataaatatccagaatcctaatatattcatccctctgacccagtaatacccttccgagaatctgcccgtagggatataatcagcaagaagacagcagtttcctctaactcaaagatgttcattgcagtggtgtttatgatagccaaaccttagaagtgacttgcgtgtccagcattagggactgggtaaatcagttttgctatgtccattatagagaatgtttcctggcaattaagcagaaattatggatactatagagcaacctggaatatttaaggagaaaaaaggttcctaaatgacatgcagactgactaattgcaagtcaataacgagcttgtctacctgggatcaaagacttgataggtgtaaagaaaagctgtcctggcaatgctgtcagggagtgatggtgggtgctggttctccttcctgcagtctttttgaaggttgccttttaaatgtggaaaaataagaggaattgagccaagagttggggcatctggttgggtttgtgggtgacctagggcaagtcactgtcctgggcttcatttctctctccaagaagactggctggactggctgctctgaaccttcttctagcatgaaggaaccacatactgggggccaaagaagctgcccatcaaactggtgctagagagagagatgaggccaggagtgggctcgtggctcccttcactcactaggacccagcttctactggcataacagggtctcctattgggcaaatcacttcccccatcctgcttagagctgctgtgaccactgtaaccctaagtaggacttggtggaacgtagacatttgaaaagctcttgtatacgctagagattttcaaatgtatgcataatagttgcaaatttgttaaaaacaaaaacatttacaagttataaaagtaacatgtcatagatgtaacatagttgtaacataaagaagtgttagactctccctacccctttcctgtcccactgctgacagtttcgggaacacccctttcactcttctctgctt

SEQ ID NO: 17533 - DNA, 1003 bp, Homo sapiens
atgggggcatttgaagggttttaaagagggaagtgacaagatgctatttgtgttttttaaaaagatcactctggctgctgtatggagaataaactctggaaggcaagagtagatagggggacaggccttggattaggatggtaggagtgaatggtaggtgatgaagcttctgggacagtctcaaaaaactcaatatgaaagtgacttcctccctcttcctcccttccccaaaggacaaaatttaccatagagaaagaacaaatgcatttatgtggctccaagggactgggctcggctcaacaagttcacatacattattttatttgaaccccaccattccaattctaggaggtaaaggcctcacttccattgcagctattggtggaggtgtgggtcacttctcaaattctctccattctacagctcagctttacccacttattgcagatccctacagaaacacgagttatttttctccttaccataaacaaaaacagcattggcaataagggctgaaggtaagattctactggtagcgtctctgaaatagctgatagagaagtgggggaagctggctggtttatttggggacttcagggtcatgaaaaaacccagtgtttgacagggacccaggctttttggtctcggattcacacattcagatgtgtgatgacttccttttctggctccatacggcaagcatgcacctcatctaccatctgtctcctctctgcctttctatctctctctgtctctccatatctctaactccgtctccctaccaccctccctctcctctgccaacacactttgattacctgggcacaagctgacctggaggagtgcctggctctttagaaaaaccatctcctcatagccttttaccctattatgttcctgaatcattctacattctattccgaaccaactttctgaagaaggtgatgtaaaaaagtccagacacaggccccttcttccagttttgttttctaagggagacctg

SEQ ID NO: 17534 - DNA, 2027 bp, Homo sapiens
tcctttctcctaggaggatgaagaaggttataacgatggagaggtagatgacgaggaagatgaagaagagcttggtggtatggcagcctttttactctcagctggtagcagcctggccctttcactttggccttagattgcttagactcagaggcccctggcagtgggcaggacactcctgtcagaggcctcagattccccttccagctgtgcagatgtcttgcctcggtttccaaggatggcacagcttgctagtcatgggtcccctgacttctcactgggtgggttgagttaaagaggtgggattaataactaatctaaatgccgctttcttacttttccagaagaagaaaggggtcagaagcgaaaacgagaacctgaagatgagggagaagatgatgactaagtggaataacctattttgaaaaattcctattgtgatttgactgtttttacccatatcccctctcccccccccctccaatcctgccccctgaaacttatttttttctgattgtaacgttgctgtgggaacgagaggggaagagtgtactgggggttgcggggggagggatggcgggtgggggtggaataaaatactatttttactgccactctttatttttttcccctactttttctttgtgtccggtttttgtccctgtaaatgcgatagctaagtacacactaagtgagcatttgttcctgactctcaaagaggatggtttggagttctcttacgtttcctggtatttcccaagtctcttgggttggttggaaggctgtggctggtctcagtttggttactcaatgcccaggaggggctgagcaccagccatatcttttgctttggttcacatgatgatacctgcttttctcaggcctgctagaggcatccaacgccctggtttgtaaatagcaacctaaaggcgtattttggcactggtctggggacattccccatctctcatcccttttcccccttcacagatggtggtgggcttcgctctacaaagaggactctgatgttactcttgagcttatgagccagagagctgaaaaccgcaggcttgttgtgttaagttacaaggaaaatggatttggtaattaaaattagaagaaacacaccttcaaacttcaacttctttaaaagaaaaaaaaaactgtcctatcttgttctgtaaaatattagaacgctttgttttacaaaaaatgatgagagaattcttccacatgtacttctgtgcttagaacatttttacggacctaagcgctggagacgttgctgcatgtcggctgggttttttttttcatacacccgagcacggaaaaactaacgcaaaattgtattttcttacctagtggaaatctgaaatgactgcaaattcctagtgaatgtacaggtttgctttcgtgtccctcttctggttgctttagaagtgacgtgtaatttctgaacccatgtttcatctgtataaaagaacatctgcaccagtttttctcctgcccctcagaagagccaaactttgagttttatgtctgtttgtcattgataaatttcaataaatctttttatacaatttttttggggatggcttctttgagtccaacaggccattgatcttttcaagatgcattccagatgaactgctaggtgagggggaagcttcatttttgttacctgatagaatagcttttcttatgagatatatataatgtgatactatgtttggatatttttggtcttaaagcaagactcagtggtgtatcttcattaaaagcttcctttaaaaaagttacagagttactaaaaaaacaagtacccaaacaatcaagttgggccaaccttggaaccttgttttgaatatctttcattgttttgtttgtcgtattgtaaaaagaatgtatggttgaaaactcaggaatgtttataaaacaaattatttcacaaacccagaggtttacatatggtgttttattttgttactttacttaacagtattataatcatttccctgtttctttaa

SEQ ID NO: 17535 - DNA, 1049 bp, Homo sapiens
tataaaatccttgtaaaacattgtgattcagtcaccattaggggtcaggcactcaggcacgttcatgttcacactctccactgccccctgcccagatcacacgtgtctcagtgctttctccgcccctgcttgtcagtgtgtgttgccttaccgtcctggggcgggaagctgcttttggtagcaggtgctgggcttgcccacacagaccactgtcaagacttcctccctgcccttggcttctgctgagaatgacccaggtctcaactgcaaggtcatagagagagcaacctagctcccgacattgactccaaggagcaatggtttcactcccttgttagacctggccacctttggaatggggactcagcctgggatgggatttttttgtacctggtgcctcaaaggtgggtgaggtgggaagtcaaaatgtagctcagttacttgcaagcagtatgacccttcacttcctgggcctcagtttcctctaccatcaaacagggataacattggctagaacccgtctggtgtaaagctttgacagagcacatcgtgtcaaataccatggacagaattggggtcctccattgctttttctcttgtccttttttgacaggcaatattcaaagagtaagagcacaggtctgaagttgggctgcctgatgaattaccaaatcctgtgccctccatttccacatatgtgaaattaactaataattatttctaccttacaggggttgtgagataaagtgactcagtacatgaagtgccatgttaaccgcccttatcatcatcattatcagatgcagaaggagttagtttgttagttcaagttgacttttggtttccctctggctccttagtctcagggagaggcagtaaacctcttggctcatgcaccaagaaagccccaggctaatttcaagtcaatcactgttaagacagaagctgtaattgcagaataaaagtgttaacattggataaggcttcaaagatcctccagtccaaccccccattttccagatggagacgccgaggcccacaaactgcag

SEQ ID NO: 17536 - DNA, 1091 bp, Homo sapiens
ggggcaggagcaaccctttgaacaatgctggactgctgttgagaaggaaggcttgtgccatgtgacccattggtgagaaatcagggcctgtgcatggaagttccagggagggaggcaacaaatccagttgacattggtaagtgtttcctggcacctgcagggagcttgggctgctgtgtcctgggctgaagggactctttgagataccaggtgtgggcagggatcacatttaaggtgtcttccagtccagagaggccgggtttcccagaagctggctgctctggggcaggaaggagaactctgggccagctgcctggagggccacacaccgggtctcctttgcttactcccagggtcatttcatgcctgcgacctggttacttttcctcggcctgtctttctaccttcttcattagaacctgcagtttcaccttcagctaagtctacctcttaacaaccctgtgagagggtggctttttattcgttctttctacctcattagaaataaaggatttaggacccaaattgtgggtaagggagctgagtggggaaaaagacagggccacagaggtgcctccaagcacagactttgagacagatctcagcatttcattatgggcccatcctaagtttgtgggtttccattctccttccacgtctatgctggaccgtgaagagcaaagtctagagctgtgctatccaatatagtagttacctgtgtctgtttacacttaaattaattgaaattaaatagaattaaaagctctattccttagtctcactggccgcactccgtggccacatgtgactagtggcccctgtcttgaacagtacagaccgtttccgtccttgaaggaagttctgttggacagtgctgggctagaggtgggagagctggaggagcccctggtctgctgcgcctgcctcaggacaggccacatgggtactgccatgtgaatgccagctacagcggcaggctctgctgtgatggcaggagtgggtgaaagcaactgggcatgtgggggtcttgtgggggcattggggtggcggggcaaggcccagaagtccctaacaatgctgtggctggtgca

SEQ ID NO: 17537 - DNA, 1091 bp, Homo sapiens
ggcctgtctgttcagattctttgtggcctctctgtgtagcattccttcctcctagatatggggcaggacttccctggcatgagggtcttcaagggagaagggacaggagagagtaacctttctcggctttgctttgggagagaggaattctagtttctgtgacccgccttggggaagagaagttctggattctgtgacttctggggagagagggtgagagacaggagggcaagagaaattcacagagcttgcttctgaggccttccaatctcctttagttcaaagtacccagcacgccaaagccccttacatttgggtattgtgttctgagccccagcacagccaagaacttgtagaattgacttgggggtctggggagagtcccaagaagccaacaggggcccctcctcatcttgtggctaacactagccacctgagtgcagtagacacccaccctcctgtgaccttcttttgggattttaggataagcagttcggacgtgcctttaaaacggagagaacacaccccaaggagtggttatggggattaaacgagactgtgtatgaagcacctagagtgtgcctagcgagtgcttgagaaagatatgacgattatttttaatcaaagcattaatagtgattgcttgagtattgtcctccagaggagcagccaccagttttggtgttgtggtaggagccagggactggcctcgtcagggctccgaaacctatgtctatctgtagcattcctaggcagcctaccccagcagcagccccttgggctgtgggcaggggtggcaggcagcactgttcctctccaggaaggagaccgacttcctggacgaattccctgggctccccagcactgctctctgaggccctcctctcctcggccaacggcagtaaggagaagccattgacccgtctagaaaaaccgcatgtctgcagtctttgagggtagactggaatctcttctcatatttgccttgctttggtggagcttcaagaattcccaggccttccaaggaaaccaattactaaagaagactgtgggccacgtgactccagtgtttactgcaaacgaaggagatg

SEQ ID NO: 17538 - DNA, 1078 bp, Homo sapiens
ggagttgtttactggtggctgtctcctcccagccggccaccacacctcttgctggcaaggaccccgaccttggcttactgtttcttccgtgtctcctcagccaacagtgtcgcaggtgtgccccatgtggagagggctggagacctgcatgcagagcactgggtcattcaggtcagggggagtgtgcacagctgacctgcctctcaggggcttatgcttgtcttgggcacaagaaagactccaaaaaaccactggtgtttataaaagatagggttcattcaacatttattcgtcatactgttgaatacgtttcatgacagtttgactcacctctatattcccagcacctaatgttatacctggcgcaataaacaggacatttgttaagcagttgctctggtctccgctccctggtaggctgattacggaggacagtccctgacctctaggaggatcggatgcttaatacacgagtaaatgattcatgcagcagctgcccttggtgccccaggatgcacagagctgggttggagaaggcttcctgggaaggggaactggatttgtagggtaagagtgagagattgggggtgctgaggttggataaagaggagggagctccaagaatggagaaccttggaggtcatgtgtaggaacttgaatttttcccaaggcagtgagaagccaggaatgttttccaggctggagtttactctttataggttaaacagatctcatcatcccctttctacagaggcagaagcctgaggcctgggggagagagctgagatcatggagccagttgggtcgagccctctaggtcgaggcctgttcccagtaatccaggctgcctcttgaccacttccatcctcacagtcatagagacctggtgtggaggcaaaagcaggcttgaagtgactcgaggtgacagtgaccagtgctgcaacgttgggaacagaggggaaaggccaaatttgagagatctgtaaagacaagatttcagttttaaacaacaaattgttccttagagtaataacgtatttgtgtttatcatggaattttcaggtcccattggtgaaaa

SEQ ID NO: 17539 - DNA, 1056 bp, Homo sapiens
ctgcccctagttaaggttttaaaagatcttctagaggtgtggagatctgggtctactactgttgaggctgcagaatagcctcctgttagcagaaacttgaaagctacacgagtgatctgttaattccatggtcttccactggggatgtgagttctgatgcctggtggtggtgtgtgctgcagggaaacgaatcgcccagctcacagtgactctggccccaactttggaccttgcttcttcctctgaaaaaagagaactgacctacaccagagttttgcagactgtaggtcacgttacacatattttgttctaagtaacataagaaagtaattgcaagtgttaagttttgttttcagttgtgtatgcctatacacacacaaaaacgtgtgtactgagccacggtgtaaaatgtagaaagccactggcctaggagatccctaaggcccttctagctttcaaaatgtctaacttttctgtcagagctttcacttttccccaacatggaacctgactgatttctgcaggttttgccacactggctgttcagcaaaaccatcgattttatggttaaaacaacaaaatcacaagcatctatcaccccagtctaaaaccttggtgtctcagacagtttggccttctagctgaaatgggatctgcaacaggggatggcccatttaaaagctgacctatttaaaacccacgagcaccaaaaaacacagggtcaatttgatatgagtcttctcttgtgtgcaaagactggaacctgaaaaccaaattagtcagggactgacaaggttgaaaccaaagctacaaatatgtattgaattcttgctccgtgaaggaaaagaaaatcaagggtggtcagggttagtgtgaaaaacaaaacaaggtgtggatgtaaaaatccaaaggggtcggttttaagcacaccattcctggttccccaacaggttaagaggcctcgtatttactataaggaagccgtacagacagcttagttgactcaaatctgctaacctgcccttcgtttccattcttgtgccttgactgtacgca

SEQ ID NO: 17540 - DNA, 1023 bp, Homo sapiens
gtggagacaggtggatcacatgaggtcaggagttcaagaccagcctggccaacatggtgaaaccccgtctctactgaacatacaaaattagccaggtgtgatggtgggcgcctgtaatcccagcactttgggaggcggaggcaggtggatcacatgaggtcaggagttgaagaccagcctgaccaacatggtgaaaccctgtctctcctgaaaatacaaaatcagccagacgtggtggtgggcgcctgtaattccagctacttgagaagctgaggcaagagaatcgcttgaatctgggtggcagaggttgcagtgagccgagatcacgccactgcacgccagcttaggtgacaagaacgaaactgtctcaaaataaaaagagttgagtctgtaagattttcactgggtcgtgtaccctgccagttctaaaaccttcatctccccttttccacactgcagctcccatcccccagcaaagctagacccaaaacccctccttcccttcttcagaccccaaaacagttcctgctcctctgtgaacacttttaagagctatacacgctcttaaaccagacaggcctgggctagaggctgggcagtcagggaaggcttcctgcgggaggtagaactgacaggtccttgatgtggagtctataccagctggaaggtaggaaggaggtttaagggggaggaagcaaaggaacaatatcagggaggggcccagctaggattcaccagctaaacaggcccatttggcaagcccaaaactcaggtcctgcagccaccccagcctgcggagtactgccctgagtctgtgtttctggctggaggaacatctgcggtggaaccagctcctctgctttggtgaagcagaaacccaagtccctctcacacccgcgggaggagacagaggaagccggttccaggcggtgcaggagcaagtcacagggtttatgttaatgcgggccctccccgcgccggcggcttagcctatgagccggggccctggcagacagcttaatt

SEQ ID NO: 17541 - DNA, 1123 bp, Homo sapiens
agtgaagtcttgtccaaagccacacagtttgtaagcagtaaagcctgaaaccaaaccagatcttccgactacttctcatgtgtccaaacccccataatcaaaacattctcccataggagatgtccggggtgtagattaggcccatttctacctggaaacatggggcaagcacaatcctgattaaagcttcttctccttcacttttttcctttgcttttttttttttttttcttcttcttcttcctttaaggcagagcaaggtaactcttaggcttatggccagatctcaggtcttaactactttcctgtggtctaagcaattcttcttgcattgcctgtgaaacccactatcctaccaccagttgcatgtggaatgtcccctgtgggtaaaggtgtgtaacctacagcagccttctctccaccccaatctcatgctgccacctcctttcttcccttccacaaattctctcgtacccacctggcttcctagctgttccccaataaggccaagcatgccacccactcaggatctttgccctggcttttccttctttctgtctggaaggccctcctagttgttgacttggccttacgtctctgctgaaagctcactttggataggccttcctggttaccctctctaaagtagtgtcccttgtcactattgcttttctgtccttttcttttctttcttttttttttttttgagacggagtctcgctgtgtcgcccaggctggagcgcagtggcgggatctcggctcactgcaagctccgcctccctggttcacgccattctcctgcctcagcctccggagtagctgggactacaggtgcccgccaccacacctggctaattttttgtatttttagtagagtcggggtttcaccgtgttagccagaatggtcttgatctcctgacctcatgatccgccagcctcggcctcccaaagtgctgggattacaggcgtgagccaccgcgcccggtgcctttctgtccttttttttttttctttgcagcattcatacacattatatacatgtgtatacatttattggtttattctttggctcccctgctagaatgtagatctgtgagacaggcacctagttttgtttaccacg

SEQ ID NO: 17542 - DNA, 1057 bp, Homo sapiens
cttccggggcacactgagcggcccttgtgtgtcggaatgttcccttctgtttgtcccttccaggctggacactttgggagcagaagtcaaagacacctttatcattgtaccctcagcacctggtgtagtgcctgggatttagtagttctgaggagcgtgtattgaatgaatggaggttaagtaacttagacattagatagtaggactctgggctgggcacaatggctcacgtctgtaatcccagcactttgggaggccaaggtgggtggatcacctgaggtcaggagttcgagaccagcctgaccaacatggtgaaaccccgtctctaccaaaaatataaaaaattagccgggcatgatggcacatacctgtaatcccagctacttgggaggctgaggcaggagaatcacttgaacctgggaggtggaagttgcgctgagccgagatggcgtcactgcccgccagcctgggcgagaagaacaaaattccgtctcaaataaataaataagataataggactctgaggctgtatgactgccaccctgtaggtcagaaatgggatctgattccagctcttatccgtaagctaggtgaatgcaaactgacatgcccaagcttattgatattgcaaaattatttattacacaaaagattggaagcaacccagatactcatcaataagagactggttaagaaaaatgatgacacactatgtagttgcaaagaagaaacgaagagggtttttatgtactcttacacaaactccatgaaaaaaaggcaaggcaatgattagtataatatgctaggtttttaataaaagagagaagaaataagattctgaatttgcttgtatgtgtgtgaacattctagagagatgcttagcaggtggtatagttgactgggcagacagaggataagataggagggagagttaactgtatatcttatatattttggttttaaaaccatgagaatgaatgtgttagtcaaaaaattgaaaaggagaaaaaaaaagaggtgaccttgaaccagcgagtccactgacctgtgtgttagc

SEQ ID NO: 17543 - DNA, 1032 bp, Homo sapiens
gcttgagacccacctgatgtctccacctgggtgctccaaaagtgccctactcttaagtccaaagggaacccatgtcctctgtcccttgcccaccactgcccacacacacacactcatgatcctctttccatccatcatcatcacaagtcttgtctgtttaaaacatgctctgttgcttgccactgatctccctgtatcatagtctagtcttcttgaagccatgctgtgaccttcaactagaatgatcttatcaaaacacacatgtaatgtcaccccatacttaaaattcaccattgttcctaggataaagtcccaaatctttaataagaccaacaaggtgctgcatggtctggccacttcccgtcatctgttcccttgccccactctctctgggcctccctggctgcctctcattcctgcaaacctgtgccacactgagattgccactgtatccagttagcatctagtcatctttaccatctccagcctcctccgtcaggtttagatctagttcttttgccagaaaactcttacagaacttttccctcagagtgcttcagtttgtaactacatattccagattatgagtgtttaattagcatctctgtccccttgcctaatgggtgcactgcacgatttgagggacttgcttttgctcatcattgtggtcttcagagctccacactgtgcctggcacatggtaagcattctagaagtactgatggagtgaaggatctgtggtacttataccttcttgtcactttcatcacctaccggttggtacatcaagcacgaagccactgaaacgaagcgcacaccttcacacccgcacccccacgcccgctggtgtgactttctgatggagttgctctgggtgggtgatgcacacttcttaggtcgctggtcatcatgtttttctcattatcacatcccttatcagtaaacaatttgaacctgagccccagtatgtctaccttgcagttatggattattcacatacactacctataaatatggacattataaaatgta

SEQ ID NO: 17544 - DNA, 1045 bp, Homo sapiens
tcaggagatcaagaccatcctggctaacacggtgaaaccccgtctctagtaaaaatacaaaaaattagccgggcatggtggcgggtgcctgtggtcccagctattcgggaggctgaggcaggagaatgccgtgaacccgggaggcagaacttgcagtgagcagagatcgtgccactgcactccggcctgggggacaaagcgagactccgtctcaaaaaaaaaaaaaaaaaaacttcctggaaattgtgtaggatactctttagacatctcatgcctttgctattttggtgcagtcacttaggaaaggagccgggagcttgttggtgattgggccctggcccaatgaacgtggcccaattgtctggcctgaattctaacttagtttaagaggaggctcatagctctggtgtctagagaggcattcctttagaaatgtttgccaccagcatccctcctctttgttttggcagtccatcccttactctagctagttctctggtctcctaggaactaccctctcccagtcccccagcaccactgccttcaagtagagaaacatggacctgactctgaatcttctatagctttgaaatagaattatacaacaaatgataaatacccaacaatgatgttttcattaaagagatggagtctggcagggacagagatttgtgaaggcatctgttattcagaacttctcatttaataaaatttgttgaaactagatgagcaaagcaccatggccctgagccaccttctcagacatggaagcagcctccttgtctagaactagttgtcctgatgatatacagactctaaggaagataaaagtccctttattctaccacaccaagccctgtcctgggcctgctgggccacaccctgcaacccagtgctttccctcagatttattttgttttagctccacagctgccccctgaattcattcagctactgtttcctttaccaaaacttgctccaggcagcagatctaaaagatcagcttacttactactccactgttatttactctaatgtggattaa

SEQ ID NO: 17545 - DNA, 1045 bp, Homo sapiens
ttctccctcactctttccaccccaccttcgggccagatgctgatgtttcttcctttccttccgaagggaggataaattagaaggagggggagggattttcgaacgtgctaaggcacagataatccccgcgtctccctgcctccagcgatcgctggtgcaagttgcccaaaggctacgtcccggtgccccctcgccccagctccttccggcttccccaagatgccagcctttgggccctggtgccccccagctcgaacccccggcccgtctttctcagtgctgggcttgtcggcagccattcggcgcctgcttaataaatgggcacgggaaactttgtcaggacgcgagctgcccggagctggcgcccgtggtgggtactggctgggtccacgtttatgcgggcatggcaaacacgcagctctaggatgggagtttgcccgctagccgccgttattgattgggcagcggcgggagcacggccggaggaaacttacacgggtgggaatcgcgaggctcgagcgaaagcttacccctgaggagggggaaggtgagggtgggtgactcgaacgctggtttttatttctgcctccctctcgctttcaaacctgagtgttttcggcgagttggcggctctggggcggagaccctggccagctcccctcttggccccttggggggaccggggacgcgctggcgggaggacgcccccagtctcggtggcccgagctccatggagttgggagtttgggcagcaccgtgcgctggcctgtcgcccctctagcccgttaaacccgaatcccggcgaaggcaggcctcgcttcctcttttccctagttcctcccccaaacctgagtgagacttttgaaaacaagatcctttttgtctaccccctccccgccttaacgcagctgtggactggagacgtgcgagtgccttatggcgcgcagggcggggagggggcggccgcgggagaggagggggcgccgccggtggaggccggagtttccgcgcactatttgcgggcggtttgcctctctccggccgc

SEQ ID NO: 17546 - DNA, 1150 bp, Homo sapiens
ggaccccgacccgacccctccggccgcgcccctccccctcgcagaacgcacctgcggccccgcccccggccgaacgctgaggcggcggctggctggcaaggccgggcggctcggccctcgaggcacagtcaccttcccttcccccgccattccgcccacccccctcactcagccacagagcagccgccgcgctcctcagccgccccgaaatctaaaggggtccgtctccggcaccactaccaaatggccgagcctccctggccggctgcgcagcccgcccattggtcccttcccccccccgccgccactgccattggctgttgcccggagaccctcggcggcgattggctcgggccgctgccgctcgtccatggggccgcagatcccgcctccacggcgatcaggttagtgtgcgccgcgggtgctgggggctcgagaaccgagcggagctggttgagccttcaaagtcctaaaacgcgcggccgtgggttcggggtttattgattgaattccgccggcgcgggagcctctgcagagagagagcgcgagagatggagatgggcagacggattcatttagagctgcggaacaggacgccctctgatgtgagcatttgccaaaaatatctctgtcggtccattctcctactttgtgtgtgtgtgtgtgtgtgcgcgctggggggaggcactttttttgggggggggcgcccgggaggtgcgggtttgggggtcggactgcaagcgaattggcaaggctggggggttgcaatgccatccgagcatgttccggctgccgccgccgctgcccttggtgtgtgactacctgtgcgtgtgctcccgcgtgtgcgagtgtgggtgcgagagtgtgcgtgcgagtgtgcacccatcgggggccggcgggcgcacgcgtttgggtcggagagaatgaggcgaaatcaccctcggagatcgctgctcccgtgactccgtctggggggaagattaacgagggaggaggaggagaggggctgcctcctggatttaacaacaaaaaaagggggttttacattttataaatgtatccccccttccgcccccctcccgcgcctcccccctccctttctctcgctcgctcgctcgcacacacaataagtttggggcttcgcgagtcc

SEQ ID NO: 17547 - DNA, 1027 bp, Homo sapiens
tcatcttgtaccttcagtgcccagtgcagggtctggggacaccggctgggcagggaagggaaggtgaggactgctgatctctggctggggatttggcctctcagtgtatggactttgctcagtgggggcttatgcccacctcaggggtggggcccaggcagattcaccgttttgtgctgccttgccttccctgaaccttgccgctcctctgagcggccagtacttccaggaaaggctggtggagttgtggtgagtggagaagcccagctggagctcaggtgggccagagtgaaagcaggagactgaaaggtatcaggttgggcgcccagagcctggcaggcccctgcctcactccccagcactctttagaagccgattcctgctcatgtgcccagccacaagtccccaggtgtgactgtccctacactcttgctcactctccagccaagtcttgtctttttgaggggtaatgaattttaggtctgcagaattccttgattgtctgtattagttattccctcagcatcccctcatgttttcttatattttacccatttaccattgatacacatccttaggatctaaaaatgaggggatttagcagcatcaattttaaggatcatcgactttttaaaaaagtaattaaggaatgcaaagaggaagcctgacccaaagctgcaatcaggctgtgggctactgggggacatgggaggaagcctggtggcctcatcctcccatttctgaatcctggccataggctgggcctgggctcctcagggctcttccagctgccactcagagagcacagctggtttgctcttcgggctgtggctctgggtctggaaggagcaagaaacccatgcctgggcagaaatctcaggtgagaaactggataccagaagggctgtgcagggccgctaagttggcctcagcgtttagttgaagccacttagttgtagagcagggagaatggggggtggggtaggggagggaggcatgggtccctcatcagagaagccttctgctt

SEQ ID NO: 17548 - DNA, 1024 bp, Homo sapiens
atccaagatcaaatttcattaatcaatagcattcctattcacaagcagcaaccaattagaaaatgtaaagaaaaatgcatttataatagtaaaagctacctatgagtcaatccaagtaaagctacgtaagatctttaaggataaaaatacaaaattttattgaagatttaaatgtaaaaagacctctgtatatcacaaactatgccatagtcatttatgagctttttcatttaagaagctgtattttacaactatttataaatacaatgttaaacaaatccaaatggaatgttttctgtgtaatttgataatctgatactgatatttatatgaagagtaagggaccaagaatagcaaatacaattttgaagagaaatgagggaggagaacttcgcctgccagatatcaagacttactgtaaagctacaggaagcaggaaagtgtgctcttgctgcatgtgcagacaaatagaccaatggagctgaatagagagtccataagtagactactatataggtgagaatgtgactaccacatagatggcattatgcatcagtggagaaaagcactattcagcaataagttctggagcaacaggccatcttcatggtgggaaaatggatccctacctcacacagtacacaaaaataaattctcaaaggattaaggtttttaagcttatagtacagaatattggagaacaacctcaggactcagaggatgggaaaaattattgaacaagacagtaagcaaaagctataatgaaataaagatcaatttgatgatattaaattttaaaatacctgtacaacaagagatactataaagtaacaaaacatgaaaaaacataaacacaatgcctacaactgaccgaaaaaagtggtgtctggaatagataatgaattattccaaatcagtacattgaaagccaacaactcgagaggaaaatgggtagaggacataaataggtgattcacaggagaggaagcagaaatgctcaacaaacacgtgaaaatacctcatc

SEQ ID NO: 17549 - DNA, 1048 bp, Homo sapiens
ggaatagcataagtgtttttgctctgggctggatgctgagcacctgcgggaggtgcgctgggcacctgggcacccggcagccttgcccagagcagtgttgcctcctcaagtgagtgagtgtttccacctgcattcagcaccagcagggacatggacaggaaagagaggaggaaaggaagaggctttttataatctaccaggatctggggcctgccatactgcactgattggcacacacacgtgtgcacacacacacgtgcactctttcccatacacgatcaaactcacactcatttactcacgcacacttggtctcccccacacactttcttcctctctctctcttgcgcttccacacacacacttgcattctctctcactccctcagccaacatgccgctttctggacccaggctgaaatgtctggtgtgcagcgtgtcaaacctcattgttagggtctctagttacagcacatgcttcaaacatcaggtggcaatccttttcctaactcatcaggctgtgggcctgagctgctgacgccagctcctagcttggaaatgcttcttcctatttgtaaactcggaggagaagctcttgctaaagcgtcctgttctgatcattatgacttactgtaaagatcacgtgggagactgttactgagcttttccttatggaaaagcaggtgggaggggagctctacctgaaaatgcttcatgggtgctttaaagcctcccccacctcctcttcaccgcactgtgctccaggtcggagcatcagagaggggcagaggagggcaattgttgccgagagaaccgagatggtgttgagcactggaaaatgaattcctgtcttttttctccctgcaccccacgccttcctgctgcttctcctcgtcttcctcctccagtctaaagaatcctcgtctgtcttgagttgtgacatttcagcggatgacaaatacattgtaacaggctctggtgacaagaaggccacagtttatgaggtcatctactaaacaagaactccagcagggctgtcaaactctggg

SEQ ID NO: 17550 - DNA, 1416 bp, Homo sapiens
tccatcttgccttgggtacaaatgttcagtgcacattttctctagaaacagacttgttcatgaaaggagttagctgtgtctgcaggcagcaaagctacttctttgaagccttctttcccctcctcttctttgtctcttcctcaagggatcttattggctctgcactataaaatgtggattaaataccttgctttcagtccttgctttctgggattttactaaatagttatcaccagcagaattaacgggcctaccaacaatttgtctaaacaaaggggccctactggagactcattttaaaaccaggtatccagataaagttgtattgtccgaccacaccagggaatactaggtagccattaaaaaggacaagaaaatttcttcagaacattcctaaattaaaatcaagctgtatagcagtatggttcacaggagtccatttctgtataaatacatttgaaatgtgtagattttcataaagaaaaacctaggcagatttaacagtagaatcttccgagggtaggattgaagggtaattttaaaaactttttaatgtctacttatttttagtattttcttaaaatgggcatgtattagttttgtaataagatattaaaaattacattttcttaaaaaagaaaaagtggaggagctcagagtaagcgcccatcctagaggagctggagtttcttagctgggaggggttggatctccgcattggactctgtgatgctggctccaggggcccccatagctttgtgtctgccatagtgtctcagtgcagatgtggggtcagaccaccctgggacagtgcccatgaactgcctagcaacagacgtcacagaagtgctctgacagctttgaacaacggccgcagtgccagcctttcacccagaactgacaaagggagccctctggggccaggagtgccatggcttctgtggctgccgttaactttgggatgaggccaggtgggcagtttgcagcttagctgggggagagtagggccctttatccataacctgaaatgcttactgcctcctcctgccagagccatgggccttcactgtgttctgttatctgttcgcggttgccagaaaaccatctcatattgacaggcgagctcccttagtaaggtgtgagatctggaagcttctcagatctattctctatggcactttccaccaacccctcttgctttggggatcttcttaggaatgagcattctttggatgaggggtggtggttgacagatttactagtggtgggatttggccaattactagctacctactccagccccctaagcatctattaaatggccacaacccctcccttgccaggtggttggaaggtgcccaggcattcattcaggcattcagtaaatgttagttttcttctcttgcactagttgag

SEQ ID NO: 17551 - DNA, 1129 bp, Homo sapiens
gctggggcaggcccagatccacagcaaggggtcactgcaatatgaagtctcaataaatgcagagatgccagtgatactattctttgggccaaacatttacggagcagctactgtgtgccagacactgctctattgttgtttaagataacaggccttggacctgtgagcttcctaaacagtaaggttggttttttttgtttatttttgtttgctttttgttttttacatatctttctattcttatttggtgcatgaactcaaaggtgagagaacttgttactctgccggtttggagtgagctgcagcctatgcttgtttctagaactcctgccctatccaacccggacttttttgcttcattccccattcctactatcagttgatttaggcgaggaaaaaataagcagagtgaggaaggaccctgtttgggagagctcttcccacttaactagattaacaatttatataatgattatttagtaatcctcctgggttccttagagtatgaatgacgggtgtctagtgggtggagaggccagggatgcttttaaaagccctgcagtgcacagaacgggctccacacagcagtgaattatctgacctcagatgtcaatagcatggtgtttgagaaaccctgatgtatggtgtcctggctagagtgccccacacatgtgtcaatgtggagtcccagtgggtctgagctgggcagtttggaagtgggggccattgttgacacagttggcctgggatatgagcgacagtcctttataacaggaattgtctctccccaaatgccaacagtggtgctggctgggaaacactgactctgttcctgaggagctagagtgttctaggcagaaagctgacagcagtgattcctgatcctctccctgccaggaacccccactgtagcggacaggctccgtaggttggcgagccctgccaccgtggctggcagcccaggacacaggcctgcaaaaacccataaggctctttagttgatggcctgcctttccacaaaccagaggcgtcctctttagtggccaagggtggagggggtggagggtgttagcccaaggaattctcccgaggtccagggtctatttatgcgccttcagattgtttttat

SEQ ID NO: 17552 - DNA, 1087 bp, Homo sapiens
tgcagaggctttccagtgtcagccacaaataacaaagccagcttaaaaccaggggccccagagcaattgccatgcattggatttgaggcactggctctctgagaagctgggtcaggcagccttttcacccactgttggtgagcactgacatttttgaaagtggacttgagccattttgattttggggcagtgtcgtgccgacacaatacagtcacctttttctgtgaactgaacaacctttcctgtaagtttctctttgaatcttggaactggaagagccctttggcttctcatgcaaacttttcaagttacagatgaggaaacggtggcccagagaagggaagcttatgtactcagtcatacagtcccacgttagtggtaaagctgctactgctgcttcccttccaacccaggactcttttctgtaagactcaagaaatgaagagtgctccttttctagtgtattctgtgtctttaattactattgcttctttctgtgttattatccaaacaggctaaggctacaaaactggccccaccaaagtccaaagtgccccatttcgggttgtataatcatatcactgaacccttattgtccacagtcctgttttgaattgccagctatttgcacaactaatgatttgatgtgtgtaataataatacataatgcataactagcaatcccagaggaaagattcacagaccgggaaaggtggtatatataacctgtgaactttttaccctagccatggggtgccataaacacagggctgaggtaggaaatggaaaatccccatttgtcactcccctcccctccccgctctggatcttctcatctaaatgataaggggctcacctggaagatcttgaggcacacagaagttttgtgaccacggtgaaggtgcaaggtacaggtggccagagggagctaccaggcaatgaggttacaaaggactctgccaaggagttgagcctatcttgataggagaatgtgggaccacttgcaaagtagaaggggtcaaaggtccttagactagggaagtgcctatttgtgtggcatctgagttgagctgtgaaattttttttt

SEQ ID NO: 17553 - DNA, 1044 bp, Homo sapiens
gcttaaaaatatgaagccagaatgaaatacaacttcagtgccttgcattgacaaggtggctttctcatccctgtcttgatttgaaggcagccgagttcccattttacagagaaggaagctgaagctcctgggtgaagtaacttgcccaggggcagcctagccaggactttcgagatggctgggggttgagctcagctttgaaatcctgaagtcaaaccagtttagctagtgtggtgtcgtttgatggatatgtaaactacctggtattgtcactcttctaataacagtatacctcaaaccgagcaaatacaaacaccctttatctcagtgcatatcagtaactagtcccagtgctaggctgggctgtgggagaggcctgtttgtgtatttgtgttctgaggaaaggctgcctataatttggcttggccaacgtttagagttgacttggcacgtataaatggagcaggcaggccggttgttctttttaacaattggtgttcatgaaatctcagaaggctgttgactcattctagcctttggtgaccgtgacttgaatggattttctgctctaaattaacagtcgtttacaaggtttcaattttgctctttaaggaggcaggacccagggcaggtgagaagggcaggtgaccctggaaagtgggcagattcctacccactcgggtggcttcctatagagcctttgggatctgtagtttcctttcccctcctggagggagcccccagtgttgggtgaagggaagccagaaaggggcctgagtttattgagcaatgtgtgggaagccagcttgtggcttcctgagggattagttagtcccttaggaaggcacatgaaggctaccatgtttttacttcttgacacacagaaataatagacagggctttatacgtaaagatatttctccttggaaaaatagaatagagacaggttctgcaactggaaggggccaggtcccggaagaatgcttgaaatggaactgggggcccaggtgtttcaaggaccttggggtgtatgcagggtgccac

SEQ ID NO: 17554 - DNA, 1032 bp, Homo sapiens
cggggctggcggggaggggtgggtcccctgcgcggctcctgccatcccccgcggggacggagggggctcccgacctaggggcggcggggcagcccgggcctccgccttttgtttcccctttccgagcgcgccgccttaaccctttactgcccgcagcagcccggctcccagcgccgcccgtggggtccccgaatgagggtctaggtcgcggcgagcgggttcactccgggttctgggtgtcgggagccagcgtcagggtcctactcccctgctgccgtgataagtcctttggctcgcgggaagtttcgaattgtttcacatccccctccccacggcggggacccaaatccccccgcgtccccaggctgtgggataatgggggcgcccccgggggggtgtcaggaaagtggaaaagtggctctagaggcccttgggtcggggcctcagaggaggctgtccaggcgccacgcctgagccggctcctcctgccctcgcagcctcaaagtggagtacgacaagctggcaaacgagaagacggagatgcagcgccattatgtgatggtgagatgcggccgcgggcctggggggcggttggggcgccgaccccggccgggggcgcggcgtggatctggggagatgagcgccaggtccccaccaccgcccagccgcagggcggccctgagagagggcataatctggtcttgccctccccttccccagcttccattgccggggccacttggaggagggtgagtgaggggaggggcagaaagagaaaccccgattccaggccggagacttctgtactatctttatgtgcctttaatttgtgttttgaaagtttcccaggggctgattgccattgccctatcttggctagtaagataggattggaccagcccatgtgaaattagggttggtaaaaatctctcttagtgacctcctgggagtgtttggaaacttttctgctttgcagctgggatctagccagagtaggacagaagccctccttccccagggtgttgtgaggag

SEQ ID NO: 17555 - DNA, 1048 bp, Homo sapiens
gtagcagacggaacagcaggctctcctctccgagggggggcgtcgaagcgcccgcgccgggctcccgccctcaccctccggcgctcctgcggccccaagccaccacctcgtagcccgcctccttcctcttctcgccgcgagccccaggcccggacgcctctaggatcggacccgcgcgccccggatgcttggggctgccccggcgcgcccccctacaggcgcgacccgctgagtgacccggagggggcccgagctcgccccaggaggggcccccggcctcgggaccccgcgccggacctgctggggagccgacgatgtccgcgcagtcccaggcattgacgcgctcgacgcagcccagggaaggcggccggccgctgcccgccgagccctaggcgcacaaagcccgcgcccgccgcccggccccggcgcccgccgacgactttgccgcctgctccgcggctctttgtctccacttggggcgggcgcccgactctgggatttcgctgcgagaacgagctgggggggccgggggcgagctctcggtttcccggccgccccccgctcgggctcggctcccccctcccccgcacctccccggcccgggctctcggcgcttccacgctctcggaatcacgacccctccctgccatgtatccgcagggcagacatccggtgagtaattgcaactcggtttatttaagcatctatcatggcagggtaaacgaggcagtttatctggcacctccattttgcttgttgctacctttatggtgtgtgtgtttgtgtgtgtgctctcacacaaagggggatgcggccggggggcgccgttgagagaggaggttaattccgcgcgagtggcgcggggggctgcttgtgttccagggggagctgttcacgcggtccccggccccgctctgaagtctcccaactcacccggcttgtctcccgcccccgccttactggggagagggaggcccttggtgaaaggcatgggagccccgctgccgacggggagagatggggcgccccccctccgccccgtcggaga

SEQ ID NO: 17556 - DNA, 1067 bp, Homo sapiens
aggaatcagagatttgtgtggcctgcttggaattcttggtggttccctgccttgggaagctgcccctgctcatttgctgactgtggcagggcgaggtccacgccccaggaaattggatgtgggctcagttacccagtggcttcctagctgtgagagggagggcaggtcatttcgcttccctgagctttgctttcctcatctgtgaaaatgacaagagtgaggcaagatggctctgggctcttcccagctctggtagttcctaggagactgacacttgtgtgcaagtgtgttttgtgctcgagtcttgccttgcacagaggctcaggggtcaggcatccccccactgagcgatatgactcccttcttctggcaggcttctctcctgggcccccagatcttcttgggagtggtgacaccttaagccatgaaccaagagcagtcaattctgtctattgccctcttaggtctgcgcagctctgctgtgagaggctgagcaggtgtaaggaaggctagcagctgggagcaggccccagagggaatggggcttgctgggacagagacttgaggagggaatctaaggaagagccagaggtctcagagctggaggagagggctcaaagggaggggagtgggacatttaaggtgacatctattggagctgcctgagataaactctgcagattgtatggttgtgccagaggcctgcctggggcctagggatgctggtttggggatttgagtttgatctcctgaagtttattttaaacctagctactggctgaggcagcaaatgaaagcaacagaaatcctcagtcagcagctaatgaaacatgcaccacagccacccgccgtcggcaagccctcctgtctgacacctgtaaccacttcatcttccggccatgagtctctcaccactaagccagacagtcctgccccgcaaggagccctgagaggtgtcacccagtcatagctggtttccatctgaatgtgctctgctgggtcccagagccgtgggctctcttccatctcttctctctcagcttcctctgggcaaggcctcaggcagc

SEQ ID NO: 17557 - DNA, 1043 bp, Homo sapiens
ttttgttttttttgagacagtctcgctctgtcactcaggctgaaatgcagtggcgtgatctcagctcactgcaacctccatctcccgggttcaagcaattctcatgcctcagcctcctgagtagctgggattacaggtgtacgccaccatgcctggctaatttttgtatttttagtagagatggggagctttgccatgttggccaggctggtctcaatctcttggcctcaagtgatccgcttgcctcggcctcccaaagtgctcaggaggctgaggtaggagaatggcatgaacccaggaagcggagcttgcagtgagctgagattgctccgctgcactccagcctgggcgacagagcaagactccatctcaaacaaacaaacaaacaaacaaacaaaaacactgctgggattacaggtgtgaggcaccacgcctggcctgaaaggacaggttcttaaggggttgccattgctgctcctactgccagggctaatgagtgtcgaccattttgtctttttgccactctgctgcagattcaaactccagggagaatccaagtgggcctagcatgtgcttctgtttcaccatctgctgctctatccctgttattctttcctggtttttgcccatccctcacagtcccatccatcacccgatacccacccagacatgcatagagcaccccacaaggggtttccagggttgcctccatgagggtgctggatttctgcctagcccaggtaacacatccttctgagcagtgatacaagcagcagtaggacaattagctaccaagggaattgtcctctgcttatccatcattgtagaaagtaatgagtgactttaaatcacaaaccttatgttttctttcccatggcatgaaatgcgtaggtcaattctcaaagcttagtgactagttcttgtactagaaatgcaaacttgaggacaatttactcataaactaattacttgtccttcccgggcattagcaatgggatctgcaggcacaatagacatattcacattgttgatccccgttgttc

SEQ ID NO: 17558 - DNA, 1032 bp, Homo sapiens
ttgagacactctgaaggtctttgcaaggaggcaattataactacggttagtttctttgaacttcttgatttgctcaccccatcttctattgagagatgctgagatctcaaagatgcgttcactggggtttggcctaggtaagtctgtaggttctgggcatgaaagaggccttggtgagcctctgatctacctgtttattttacactgaggaacccagaaggggtgaggaactttcccagcatcatgcagctggctgggggaaaaccaggaggtgggcccccagcacctgattcctagtcaggtgtgagccattccacgctgatgccaagggaaaacaaactcttagattggagagcagaggaccgagcctgcctggagccagggactactgggcaaggctgaggagaaggcatggctccttcctgtaggaaactttgggtgtgagggtggtgccctcatttggcaaactaagatgactgttggcccagtatttctttaactttctggcttttctgtgaatggtttatggaccagttttcttactgcaaagctacaaagcaaatatatatatatatatatatatatatatatatatatatatatacacatttatataaaatataaataaaatattatatataactctctctctctctctttctatatatatatatatatatatatatatatctcactggccaagctgattatgcggccttttctcatgagcatctcattgagttctcacaattctatgaggacagtactattatgaccccattttgcagggagaccgtgggcatgatgtgagagagtccactcctgctaccaccccacagttcctgccttgcacaagccctcagtcctacctggacagccccagtggcattttggcttccctggtatcagtgtcagctcagacccccctgtccagaattcctctaaaagtctgattgttctccttttccagtgcagttatcaagtaactggctgcaggactctttgggaagggatcaggaaatgatttatcac

SEQ ID NO: 17559 - DNA, 1064 bp, Homo sapiens
aatttgtgttgttgttgttatttttagtagagacagggtttcacaatgttggtcaggctggtctcgaactcctgacctcgtgatccgcccacctcggcctctcaaagtgctgggattacaggcgtgagccaccacaccgggccctaatatattcttattttaaagaaatagatctgactgtgttaccctctgcttaaccttcttgaaccctgtgcctgtgagacagagccaaggccttaccgcagcatccagcgcctccccagcccccctccagctgcttctccttaagaggaggtgtccccaacacaccaggcacatttaatgcctccatccgcccttcatccccactttgtgtttctgccaaacttccatttgtttatcaggacccagctcaaatcatgccttgcttagtgggatcagtggttctttggtctctgctcccatagcgtttccattaaagcatgttgtatactgtaacacagccacttgtatctgtttcttggaagaaagtatgagctcgtgagcggagagaatgtgtcttagtcatctgtgctttctcaggacacatagtggatgctcaacgtctcattaattcactcaacagccatctcttgaggggggtttctcagagtagggcttctcaatcttggcactactgacatcttgggtcagataattttttgtcatgggacctgccctgtgccttgcaggaagttcagccacatccctgggctctactctctagatagcagtagcacccccaccatagccttgttgcaattaccaaaattggtctctagacattgccaaagtttcccttgttggggaggcaaaatcacccttgttgagacccgctggtttggaggcatctctgtgataagccctgtgtttagtatcttcattcagtttcttggaaaacacactggggctgaggccagagcctgcagcccacttctggttatcacttgccccgctgaccaagagagcttgtcagcgtctgagcccaagcccagcctccttggctcacccgcatgtctgtctaccagtctaggaaacttgcgaag

SEQ ID NO: 17560 - DNA, 1035 bp, Homo sapiens
caaaatagaactgcgtggaagaggaagagaatgcattgtggggagaaattaacattaaatcaagtaagacatgtcttttagagattagtgggctcactggaagttgagactttctgcagaaatttcttcttactggacagtgtgtgtgtagattagataatccaggacatatttaatgatggagaatttataaagttttgtgaaatgtacaaatgtaaacaagacttgagtttggctcctaggtatactcctaattattggtgtgaccttgtataactaacttaacctcagtacctagacctgagtgaaaagagagatgctttgattatcacaaaactgcttcttagcacaagagttttatgaggttctattcctggtgtgattgttgagcttgtcgtggcatttggaccaaccatgttcttcttgttttcactgaattaggaattttgaagttgctttttctgacactaagtttggttgagatgtatgtctacatgcatgtattgaactcctcacactgctgttatgtagtctatgatgtgcttatgtgcattaacagaaagacaaaatacagggggaatcaagcagctatggatataagagctcccctcctgcctctacagtagtgactggaggacgagccctatgaacaaaggggaggttaaaggcagagagttcaaatagctcaccaaggaagtagcagagtgacattacaagcagactcattcaaaaagaattccatagtttttccaagtggcctggcttacttcctgggtcattggtccaaaagttgaaatgggactctgctacttccccttagaatatatttgtgtagcatgaactaagggttttaattacaaaaatagtcgtctgatttaagaagaaaagtaattattggaaaaatattaggtaactcaggaatcactcaaaagatggaaagactgtatgcaggctatccagccaaaccgtcagaagggctcggtggagatgccattgttaccactgaatgccagattcagggcgggtttgccatcc

SEQ ID NO: 17561 - DNA, 1052 bp, Homo sapiens
gggaagctctctttctgggctgcaagaaaccaagaacactggggagcatctagagttgatctcggtactcacccatagtagtaaactgagccctccaattcattttatgttctgttgctcatgtctttctacagactagaaagtctacatcccctcacccagaatgtcctttccctcctttctactgagttgaatcctatacattcattaacatgttatcctccttcttaaagccctcactgtccaatctagtctatagtaaacagttcctcctctaaggtggatgttttactgtggctttgccatccatttaaaacatttatattaccttgttagaattatgtagttgatcttcccaatcagtttttatgagcagggtttataacttaactttccatcttagctttaattctcatggtacaatttacagaataggtactcaacaatatttttgacactgatgttgcataaagtttttactatggatatgacatataaagattggctgcagttttatccattcaacatgtaatgattaaatgccttctgcatgtcatgtgctggggatacagtggagtaaacacagacacagactgccctccccagtggaaagtacttgtacatactgtcctctggcacaccatctctgtgattgagaatttaaatgctctaagcttgttcagaaggtacctatgaatatatatagtaatatataagagttaattattaatatctacttgttgccatttattgagcgggtgcatgtaattgcatttcattttctttgttttttttctattattatttttcaataaaaaattttgtgggggaggagatggtatcttgctctattgcccaggctggtcttgaattcctgagtttaaacaatcttcctgccttagcctcccaaagtgttgggactataggtgtgagccactgtgcccaacctgattttcttaactctgaaagattgtccacctttcaccaatgtggaatctaaggctcagaaaagtaaattagccaagctcatacaagttgactctgtctgactt

SEQ ID NO: 17562 - DNA, 1694 bp, Homo sapiens
ggtcacagagatggaaggccaggcaaaagaattgtcagcgaagttggccctttccattccagctgaaaaatttgaaaacatgaagagctcattatcaaatgaagtgaatgagaaagcaaaaaaattagtagaaatggaaagagaacatgaaaaatcacttagtgaaattagacagttaaagagagaacttgagaatgttaaggccaagcttgctcagcacgtcaaaccagaggaacatgaacaggttaagagcagattagaacagaaatcaggagaacttgggaagaagatcactgagttaacattgaaaaatcagacactacaaaaggaaattgaaaaagtttatttggataataagctcctcaaggagcaagcacataacttaacaattgaaatgaaaaatcattatgttcctttaaaagtaagtgaagacatgaaaaagtcacatgatgcaattattgatgatcttaatagaaagcttttagatgtaacacaaaaatatacagaaaagaagttggaaatggagaaattgctactggaaaatgacagcttaagtaaggatgtaagccgcctagaaactgtgtttgtacctcctgagaaacatgaaaaagagataatagctctgaaatccaatattgttgaacttaagaaacagctgtctgaacttaagaaaaaatgtggtgaagaccaggagaaaatacacgctctcacatctgaaaacactaacttgaagaagatgatgagtaatcagtatgtgccagttaaaacccatgaagaggttaaaatgacactgaatgacacgttagccaaaactaacagagaattattagatgtgaagaaaaaatttgaagatataaatcaggaatttgtaaaaataaaagataagaatgaaatattaaaaagaaacctggaaaacactcagaaccaaataaaagctgagtacatcagcctggcagagcacgaggcaaagatgagctcgctaagtcagagcatgagaaaggtgcaggatagtaatgctgaaatcttggccaactacagaaaaggccaagaagagattgtgacactgcatgccgaaattaaagcccagaagaaggagctcgacacaatacaagaatgcattaaggtaaaatacgccccaattgtcagctttgaggagtgcgagagaaaatttaaagcaacagagaaagaactaaaagaccagttatcagagcagacacaaaagtatagtgtcagtgaagaagaagtcaagaaaaacaagcaagagaatgacaagttaaagaaggagatttttacccttcagaaagatttgagagataagacagttctcattgagaagtctcatgaaatggaaagagcattaagcagaaaaacagacgagctaaacaaacagttaaaagacttgtcacagaaatacacggaagtaaagaatgtgaaagagaagctagtagaagaaaatgccaaacagacttctgagatacttgcagtgcaaaatcttttgcaaaaacaacatgttccattggaacaggttgaggctctgaaaaaatctcttaatggcacaattgaaaatctaaaggaagaactgaagagtatgcaaaggtgttacgagaaagagcagcagacagtgaccaaactgcatcaattgttggagaatcaaaagaactcttctgtacccctggcagagcatttgcagatta

SEQ ID NO: 17563 - DNA, 1899 bp, Homo sapiens
caggtaaggaggttgaggcacagagaggtttacccatgaggggtttcacaaataataagtgacagagtcaggacttgaacccaagcatctgttgtgcttttaactacaatgctagttttacacttagaattacttgaatgagaaaatttaggagtatatacagggccttttaagtattaatcaaagtataatataatttcggtactatttatgtatgtatttcttctaggagctagactttcgcatgtcttaagtgtaaggtataggccaggcgcagtgtctcacgcctgtaatccccgcacttttgggaggccaaggtgggtggatcacttaaggtcaggagtttgaaaccagcctggccaacatggcaaaactccgtctttacgaaaaatacaaaaattagcagggcgtggtggcacatgcctgtaataccagctactcaggaggctgaagcaggagaattgcttgaatctgggaggtggaggttgcaatgagtgagatcacgccactgcactccagcctgggtgacagtgagactctgtttcaaggggaagaaaaaaaaagatgtttttctgtagctttagacaaacaatttgtctaaaatgtcaagtctataacttacaatagtcataaaagtaacttatttttcttataaaaatacttatttactttagaaaaataagaaagtatatttaaactgaaagcagatgcaaaagacacctataatcttaactctgctagcacctgactgaaatcctttcagacatttgtacataatttgtgtgttatatactcattcaacaggtgggatcatatagtacatcctgttttgtaactgttcccattcagtatgatggggacattttcctcagtcactacgtattcattgtgatgaaattttatgctagatatgattttttactttcaaacagaaaattacaggtcccactttatatgtgacccagtatttataacagcaaccattaaaaactactaagaatttgcctgggtgtggtgtctcagcctgtaatcccaacactttggaaggccgaggcaattggatcgcttgagctcagttgttcgagaccagcctgggcaacatggtgaaatcccgtctctaccaaaaacataaaaattagctgggcgaggtggtgcatgcctataatcccagctacttgggtggctgaggaaggtgaatcacttgaacccaggaggtggaggctgcaatgagccgagatcatgcctctgcactccagcttgagtaacagagtgagaccctgtctcaaaaccaaccaaccaaccaaccaacaaactactaagaattcatcatttacaaacattgaatatctactgctgtattatctcacatgcttaaaaaagcttaactgtcaaaggaattactgttacgagttatgtataataacttaacatgtagctatttcccttgtatgtataaaaatatggggaaaatggatattttagaatgagactgattttatgttacaacttttatatttgttttcatttgagtaatagagataataagaccaaattaagttttttgaactccttatgtgcatagcaccccctaatacatgtatgaggccatttagtagttattgtaaactttagtattaaatattccatagaacaaagagcttaactaagcttataggtattttttcatactgtgggggcactaatgattaatggaggtggcattaatttagtcatggaattgtggactgttttatcatggtcaactacttcagagtttggtatgtagcttttaggactgatacacctaaatatacaaatatgaactacatctgcctgtccttactcttcatttcactctggggttttttgttttgttttgttttgtttttgagacaggat

SEQ ID NO: 17564 - DNA, 1132 bp, Homo sapiens
tgaatttaacaataatttttcctaatataaatatgaactatagtgttagtcaaagaagcataatgtgattttataattattagcaaaatgaccttactttgcataaaggtagacattgcaatctctgcttttatgagaaatatgaattgtatgattcatactttacttactgtgactattctataaaaaatggatatgattctttaaaaaaactgagccaacacttcaaggatcaagtcagttatagccatgtttaaaaatatactgtaagtacaaaatttagctttgatttttattgtctgtgcttatccttagaatagtagtgtgttcttgtcttctacaaggttgacgttattccttggtcctaataaattgtagacaatttataatcttgtctaatccattttcagatgaaaaattgtgcttataatgctaaactaagagtgaaggacgtgaagcttggtaatttagaaattgaaaaacttattccttatatggacctagaaaaacactatgtgtcttaccaacagatgttcaccatttatcattttcttttgttccttaaagcaatggcagattgtccttctagcatacagctgctttgtgaccatggggcctctgtgaatgccaaagatgtagtaagttagtttatgtttattctcatttcaactcatgcattctaacttctacattttgggagatctgttgtcttaatgctgttttatttttcctgttgcttaggacgggcggacaccacttgttctggctactcagatgagtaggccaacaatatgtcaactgctgatagatagaggagcggatgttaattccagagacaaacaaaacaggtaattcttttatcatggctcccagataccagctggatacacagggatggaaaggccaagtcaaagcagcagctctgttctctgacttggcctttctttcctgtgggttctccccttccctggcttgcttttccttggaattaacatctacttgtcagttttcttcagagtctgctgaagaaagaaggagagggaaatagaggaagatgacagggttaatgtgaataaaagcagtgattaggccttatgtttggatcaaagaactgaaggagagaggaattaca

SEQ ID NO: 17565 - DNA, 1093 bp, Homo sapiens
atctcttactaaaatatcaagctagatgaaacatctttggaaactgaaagtatacttacagattaagtatgttgtcaactagttttgggaaaaaagaatcatatttctataaaaatcctcaatttacatatgaagaaaataatccttcacatgtatcttaaattatttatagggagaaatgctcttcacctggctgctaagtatggacatgcattgtgcctacaaaaacttctacaggtagtggaagtggttaatactttagctttattattttgacaacaaatcatagatgtacttttaatgtgtttttggaattttagatcaaagagaatagtaaactaactttgactatgagcttacatattttttccatcatttgtgaaggaatgtgaacaataaagagcaaaaactgagggaagtgaattgcataactcagtgtattaaaaataaataacaaaggcttgaccttcctgttgacatagctgaaggttggaattttctgttgtctagactatcgtggaagataaagtaatacaacataggacctgtatatttctattcaaacacagataacttatactacataatattattacatttttaatcagataaccacaaaattctaactagttggctaaagttcccatcaaatatttcagtcatacatttttataaacatattcactaagtttcatagcagaactcacctgcttttctgattcagtatctcaagttttaattcttggtggaaaaaaaaaccccaaacaatacatattttcctgtatttcatgccattcattataatgtaccatatgtttcctgtttggtgaaacattgttaatttagttatataatgttactgtatttgttccatgtcagcatatttcatggattgtcggatagtctttagcttctttgataagtggaatattttaagattaaataacagctgttcatctgagtctggatatctaattttaaaataaaactctcctactttactaagttttctttactttaacagtacaattgtcccactgagcatgcagacctgcagggaagaactgcacttcacgatgccggtgagcagtgg

SEQ ID NO: 17566 - DNA, 1050 bp, Homo sapiens
ttatttgtacctttgtctgtcctttaaaatcttacaacaaaggtttgtacatcaaagaagtttgtacatcaaatgtagacctttaagtatttgaatataactatctcttttgttccatgagagtgctagttttctatctatcaggataaacattctcacttctctgggactgttgacagcttagttctttgcagttatactttgtttttctattaaatacaggagttgacccagaactaaaaggcttttgtttgttagtttttacagttttttatcctgtgattccatgtaggggcaaataaatacattacttttacccagcattgtgtttagaaatggaagggagggagagggagacagatcacaattgaattagtgaggtaaatctttacttaagaatacatcagattctaagaagaccaaattcaatttatctgctacctttgagtgaacaaagaaatgtgtttattgcttatatatgctttccattgatgtagaagaatatttatttttagaaattttggactaaccttacctcttcagagctcttaagactatttattgtgtggatcccaattcaaacaggtatctttcttgtttttgtctgtattctttctgctctggacattttgcctagtggctaatctagtgacttctgcttgccttctttctttgcagatcaagctcaaatgcttccccaagctcagcagacattatttcatatattgcaccccaacataccgtgtttaactcttctgtcttttgtttttgctgctatttatattttcatttgatatgttttataatgtttgtccctagagttgtcctttattgaatacaagggtcttttctcaattgctataatgtctgttataatccagatgtagatatttgaacaatgtgaatacacatctttatgtgtattatcttaagtgctgtttaatattaaagtgtatttaaaatgaccagatttcaaattagtgcagttttgagatatttgttacttaggtcttaccaggtatgcacctgtgttgtaatttatgttggtat

SEQ ID NO: 17567 - DNA, 1035 bp, Homo sapiens
agagacgggatttctccatattggttagactggtctcaaactcctgacctcaggtgatctgcccgccttggcctcccagaatgctaggattacaagcataagccactgtgcccagccatgtttcattgtttgaagccacaaatttattaataaaaattattaactgcttagtttttattgcatggccattcagattgtcttttagatcagatgctgagttcagcttttattgataaaacatagatgaatactgttaggttttaaatgaatacttgcatatctttgggaaagaggaaaaatactttttctaataaaattttatcagcataatattattaatattgtatctattttccttcttttaggagggtaaaaagacatttctgttcccagctcatcccctatttttagataatggataaaaaaattataaactattatttctcaatttggctgctcttatatctataaaattgaattagactacaagaggtaagatgtttgtatttctaaaccaaagaatacttgcagctgtagttagtggagagaatctaggctctagattcaggcagtcctaggtttaaatttagtggcttataacaactattttatttgctgatgacttcgtaggtcagcaatttgggctggactctgctacatggttgttctgctggtctggtctgtctggggtcactcatgtggctgcagtcgtctggtggctgcacgaggactggatggtctaaaatggcagcactgataatgtctggcacatgatgcttgctggtgtggctgggtggctgggctctttttctgtcatgctctcctaccctcaagggggctagcttgttcacagtgtgctagcagcattcccagagtagagcagaagcagcaggatctcctacaaaggtcacttctgccacattgtatttgtcaaattaagttacaagtccaggccggattcaaggattcaacggatgaggaaataaatgtcatttcttgatgacaggagtggcacaatcacattgcaaagggctg

SEQ ID NO: 17568 - DNA, 1043 bp, Homo sapiens
cccagttaggctgctcgggggtcaggagtcagggacccacttgaggaggcagtctgcccgttctcagatctccagctgcgtgctgggagaaccactgctctcttcaaagctcagatggaaatgcagaaatcaccgtcttctgcgtcgctcacgctgggagctgtagaccggagctgttcctattcggccatcttggctcctccctccacagctttttcttgttgagaatttttaaccactctctgaagctgagtcaagttacagagccgagcaaaatacaggggtagaggaagcagcagaaaggccctgggagctcggtgggtcccttcacaggcggcggaagggttgttcccatctttatgtccatgtgtactcagtgtttagttcccactggtaagcaggaacatgtgggatttggttttctgtttctgcattaatttgcgtgggatagtggcctctgattgcatccaagctgcagcaaagacatggtttcattctttttttatggctaagtagtattccatggtatatatgtaccacattttctttttccagtccactcttgatgggacctaagttgcttccatgtttttgctattgtgaatagtgctgcagtgaacatacaagtacggtgtcttttgggtggaatgatttattttcctttgagtatatacccagtaatgggattgctgggttgaatggtagttctattttcagttctttgagaaatctccaaactgctttccacagtggctgaactaatttacattcccaccagcagtatatatgaattaccttttctccatagccttaccaatatctgttattttttaactttataataatagccattctgattggtgtgagatggtaactcattgcagtttttgatttgcatttctctgattagtgttgctgagcattttttcatatgcttggtggccacttgtatgtgttcttttgagaggtgtcggttcatgttctctgcccactttttaatagggttatttgttttttgcttgttgcattaagttacatataga

SEQ ID NO: 17569 - DNA, 1044 bp, Homo sapiens
gttagatattaatactgtcacactgccccttctgtcattttgctttgtatgcatgtatacttacccagtatattatactgtcatccttggttttatttggaggggtgtgtgtgtgtgtatctacaactgtgtacacttttgaggagatgatgcgtttttaatattgaccatatttatatattgtcaaggttttttatattacctctgtagtaaggttttcccttgcagatgcacaaatcattttaaaaaaaaaatctcattgactcttgtttaattttcttcttaccagattgtgacattttctctttactagagagagacattccaagagagctctagagagagagagagataagtggtgggggggaggggagagagaacaagaacacatataatacatcatgctttctacacttttaaaaaagtaggagtgtttaacttttcttccagcatgctgttatttcatatggttttcgcattagcagggtgcctactttgtgcagatgttgaggtactttgaaaatgagtcccagtggggaggccctgtgggtgtggttgtagtaaagccagtacactctgatcttttcagctgtgtataagaatagcccacaaacacttcctgatttacacgtgagaagtttttttttttttttttttttgatggagttttgctctcgttgccccaggctggagtgcaatggcgtgatcttggctcgccgcaacctctgcctcccgggttcaagcgattctcctgcctcagcctcccgagtagctgggattatgggcacgcgccaccacacccagctaattttttgcatttttagtagagatagggtttctccatgttggtcaggcctgtcgtgaactcctgacctcaggtgatctgcccgcctcggcctcccaaagtgctggctcccacaggcgtgagccactgtgcccggccatgttagaggtttttaaatgacaaatcctttttaaatgattcttctctttgtttttttttaaaaattaacattttatattttaaaaaagcactttatgaaa

SEQ ID NO: 17570 - DNA, 1026 bp, Homo sapiens
ttgtagtctcagctactagggaggctgaggcaggagaattgcttgaacctgggaggcggaggttgcagtgagctgagatcatgccattgcactccagcctgggcaacagagcaagactccatcaaaaaaaaaaaaattgcggctgggtggttcatgatgcttattcacttttgtgatactgttgtatttagcgtatgtcctaaaatttctgtactgtaattagaaagagctagtcacagccttcaagaattttaagagctagatataaaaaataaatgaatatggcatgttaacagttattatagaagtcggtataaattgctgtgggggcacatagagtgtagagtgagcccataaaaaggttgaaaggtagagtgtgagcttgggccagaaagacaatttcagtggctttccaagcaaaagaagagcaaatgcagtggtatggagctgtgaaattatacagctgagggagcatcagatttggaaactaattctggttttatggtagaggatggcacagatgaggcatagacaaatcttcaaataagaattctattgaaaatagggagttagagggcgtgcagcttggggattgtggtaaaggaaggttttcattcattcttttttttttttatttttgagaataagtctccctcttgtcgctcaggctggagtgcagtggcgcaatcttggcccactgcaacctctgcctctcgggttcaagagattctcttgcctcagcctcccgagtagctggtactacaggctcctgtcaccatgcctggctaagttttgtgtttttagtagagatggggtttcaccatgtttgccaggctggtcttgtactcctgacctcgggcgatccacccacctcggcctccctaattgttgagattataggcgtgagccactgcccccggcctcattcttttttttttttaaaccttgaattaaaatttaaattacttgacaagtttagatcactgttcagagagaactgactagtcatgaaagtttcatcttcag

SEQ ID NO: 17571 - DNA, 1035 bp, Homo sapiens
aaagaaagaaagaaagaaaaaaaaaacctgattcacatcaaagactaaaacataaaagtactggaagtacagctctggcactccatcctggcagaggttctcactgccctgcatcctgtagaactcaagtaccctacctctctaccttaatactgccaaaatatccaagtagtttaactcagctcaaagggcaatcgggaaggagcacaaggggaaatcagcaaagttatcagctaaaccttttcatgcaaaagttgaaaccaagccataaaaggtggctgaagaggatacatctttagggtgaaaaaagtgcaaataaaaagggaaaaggggagcaaatggaaagagattaaccaaaaaacatttatcttcataaaacagaaactgaaaacaagccagaaagaagcttaagtgtgattaaagatctcttattaagtcaggggtcccagtatctcattgtacaattcagaagaatttttaaattattttataagtgtacctttttagagctctgaaaacacagcttttaagaagagaactccacttcctcccacttgaaaggaatgaattcagtgctagtttatttttctgtacaaactgagaatagttagctctctataagcctaataatgtcttaaactgcttcctgatcttggctctctgtcaaaagcatattatctgtgatgtctttggtagtggtagtccagtccagatttttctgataatcctgttaatgtgctataaaggattggaaatctgggtattgtatataatattaaattgtgatttagtaggacttgagacctactacttatcaacagttcaagataattgtatttgatattctcattttaggaacagtttgcctgcaaagtttaagccaggaagtcactggaatagttactgagaaaaaggatgacaatatggctttatattttttccagtacttgcattaagagttgggtacaaattattcatgtagtctgtgatcagtcaaaaccaatacaatccctattatgatggaaaaatataatc

SEQ ID NO: 17572 - DNA, 1080 bp, Homo sapiens
tcaaactgataattagtgagttgagcatgtatctttgtagagctgtagttttagtactggaattcatgcaggggactgactctggtttcattctcaacttctacattttaccactgttgggaaggaatagatctttttgaactaaacagagtaaagcatgtccttgtgtgggcaagaacctgtgttcagtgctgtttcttatgaacaaatcaatgagaaatgaattgagtatgaaaataataacaatgactggtaagactcaggcaggaggttccgtctacaagagacttggtctactttggtttacaggcagttactgactttgtctctgataccttgaaatagcacaagtgaaaatcaatcatcctgaatcttccccagtcatctaatctgtatatccttagggagtttataagtgaaacgggtgaaggtgtttcctttacattttctaagctcagttatcactgtccttttatctctaagaatgacttaaaattagccttactttcagaaagtgtcctgtatgcgttttttcatttgtcatgtaaaccattgttactcaaagtgtggtctgtggacaaatccaaaaccaggtaagtacagaaattgagagcaagcatgtagagacgtttatagcagtataacagtgcttcagcacgaaaacattcattcattcattcattcattcattcagagacagtcttgctctgttgcccaggctgtagtacaatggtgtgaccttggctcactgcaacctccgtctcctgggttcaagcaattctgcctcagcctcccaagtagctgggattataggcgtgtgccaccacacccagctaatttttatatttttagtagagacaggtctcaccacgttggccaggctgctttctgtctcctggcctcaagtaatcggcctgtctcagtctcccaaagtgctgggattacagtcatgagccgctgctcctggccatgatcttttattttacacatttcagtccacaacaggtttggaaaacaaatacacaagacgtattctttcaccacagttagaagcacagttccaaagcatggaattacatt

SEQ ID NO: 17573 - DNA, 1032 bp, Homo sapiens
tgtttgcttcataatgacacatgtataaaacttaggattatagctttttatttatatttggaaaaaatgtattaaggtaggccttgtttttaatgctaatatgggattatggataatttctttagtaaacatttattttattaataagaaagatactgactttgctaaataaaatagatacttaatatatctaagctgtataatagaattaaaatcagttgatatatgtttgaatataattgtatcctgtatctttatattctttactcttgtgtcatagttgaaattgggtttctctcaattcctgcctgaggtggtatttagcatgtagggggctacttttttcctttattatcaaagttagtttggatagaatcaggatataccattggacagagggtaacgagcatacacattgggaagacaagcatgtgaaatgagaggaggtaaacattttcatcgagctccagatagggtttggcaaatctggtctagttctaagttgtaatgggctacatagaatctaatttctccgttgtaaacatttgtagagaaaaattgtagagaaaataaattgacagttatttgggggatgtttaagaaaatcctaaatgctgaagagacccaagcagaagtaagccagttgagttacttggctccctaacaggttgccagcaatcaccaaatgttatcacagaagtattcaggactttagactgtagtaaagaaataataataattatcaaactccactggtttgttggacttgtatatagctacacatattgtttcaaacatgtagcaaagctatgactttgttaacagtaagcatttaatatgctagtatggttttatattctcttcttttctttgggactgagatctttgggatctaacttgacgtcctgcaaagcatttctatccaggtttttaatatcagacttcagcttcttgggagatatgatatcatctccctttgaaaagtggtaatttttaaatacgctttctgtacaaatgtgctgtctggattta

SEQ ID NO: 17574 - DNA, 1034 bp, Homo sapiens
acaaatgaattgaaggagatttgagtttttaaattattaatcagttgttacctgctgtgggaggggaaacaagtgtagtagtttccctccttagtgactttggtgttttttaacctcttacttcaaacgctgccgtttgaataactgtttagtctctatgtgctgctctcactccatttttatacacaccacattggcatttactcaagaagaatggcgttttctgctaagcagttgtttttaagatagtttttttttagtttctgtcttctgaatggtaagcgggttagtaaaatcatttctattccttatttataggattagtataggaaacattatacttttctctgtacagttttcttttatcatcccccagatttaaagcagtcatctctatggatatgacttctgaatggctctccagaatttcaatcttcattacttctagcatagtaaaactaaatttctcattattccccccaaactgctgtcacttcttatattcctatttctgctattctctgagatactctctgatccttgtctgtgttgaattttctttctctctgatgtctactccatagactgccagaaaaacctgttgatcaaacaaagctgtttattagcttattacagtaagagaaaacccactttgactgtgtcttagtaatatctcacaagggagaagtcaggagaggatattcataaagttttaggacctgggctaggtgattttgaggttggtcttgcgtggtagaaaactggttgttattgaacaaagttcattacttaagagttttggattggcagccttaagacagcagccacactgttgactatacacttagtatttatatgtgtattttatttctctaaaaaaagtcaggaccagtttatagcattgcagctatctgttctttgaagatttggcagaatttttctatgaaaccacctgggattggtacttttttgtggtgtagttcctggataagtttttctttttttcttctagggaaatcagtcttttttaaacc

SEQ ID NO: 17575 - DNA, 1027 bp, Homo sapiens
cagtggattgtatttgacctgttggccatagtttactgatccgtggtttagtttactgatccttggtctaaaataatccagtagcttttagctacaatgcacttttacattttttgcctgtaaactttcttcctccacctcactttccactaataagaaataaacatgaattttaaaacatatagtgagcaaaaagtgtcttcctggaccaacccagccaaatagaaggctatatgtaatgtgaatttgtattaatcacacaatataacattggtgttgtgtttgaataaagctgcaccattttaagctaagaatataactatatcatcttctcagcccaaatcaggtgtatatgtggtttgacaagtattatagtatattgatgggtatattaatgcaaagaattttattttggaattgtcctagaaatatataagataaagaccgtatgtctaatatgaaccagaacatcactgatgaagtagagtgaaataacattttatttccatacatatctgtaactgagctctctaatattctttagtgtctgtcaattatcagagaaaaattttagaatggtctttatttgactcattaaatattctatctttgaactgttttaagctgtttgaattgtcaaagatctaattaattgaaatttctcctattgtccagaatactctcgttgtcttttatcttttgttggaggtagacccagtttttaagtgacaaaagtgatgttttatgaaggcaaaaacaacaacaacaaaaagagaaaaatgcaaaacaagtcccctgattagataaatgagtcattaacctgagccgaactgtaggattatagaaattggaaacattctgtgtatctgataatatgtataattagagccaaaatcttcagtgtagaataaaataatagcattttggaggtgccctgtatttgagttataaataaggaaatatactgtgttatctgattaacagttaaatacgaaattatgtaatggaacaaactaattttgatgaa

SEQ ID NO: 17576 - DNA, 1095 bp, Homo sapiens
aactttaatttcacacttaaattaaaatttcactttaatttcacacttaaaatttcactttaatttgaggtttactttaaaataaaggcattattaaaatgagagctttacttctgaattagtttacattttgactgaaatgcctaggtagaagtaatacacttaatgaaatatcatctgactcatggaaataggaaaattatgaaatgtgcattcaagttagtttaagaagaacttaggtattataaaaagattttacaactctgcattttttcttaaattctcaggaaatatgttattttcagtggtaactaagatatttctataacccattttgtctgtttttatatagatttaaagctttaaaagaacaaaggctaagagaaacaaagccagaagttggattggtgaatattaagggatatggatctctggaaattcagggttcagacccttcaggatgggaggattgttcttttgacaacagaataaaagccatagaggaatgtaaatctgtaatagagagtaatcgaattagccgtgaaagttcagtggactgcttgaaggagtcaccaaacaagcagcaggagagagcccaaagccagagtggtgtggacttgcaggaagatgtgcttgtaagagagagacccagatccttggaggatctccatcagaaaaaagtaggccgggctaagagagaaagtaggagaatgagagaactagagcaagctatatttagcttagaattgctgaaagttcgttctcttggtggtatttctccttcagaggatcgcagatggtctacagaattggtgcctgaaggccttcagtctccacggggtacacctgatagtgagagctctcaaggaagcttggaacttctgagctatgaggaaagccaaaagagcaaactagagtctgtcatttcagatgaaggagacttgcagtttccatcacctaagatatccagcagtccaaaatttgattcacgggacaatgccctcagtgcctcaaatgagactagcagtgcagagcatttgaaggatggaactatgaaggaaatggtggtctgcagttctgagtctattacctgta

SEQ ID NO: 17577 - DNA, 1046 bp, Homo sapiens
aaacttcctgtttcagccttctcagtagttaggagtataggcatgtagcaccacacccagctcaccttccgtattctactatctccatttcaatttgagaatgactactttggataaatctgtaggaatatttatcagtacttcatttacatgcctgccactgtgtttgttcttctctaaaagcttatcacagaaaggatgattcatgaaataaatttctcatttcttcttaagctgcattcctcatctttcttccttttggtaggtctttctaaaggagcaggaacgacagcacttacaagatctgcttcaccaagaggtgctccgcagaatcatattgttgcagcgatggttcagggtcttgctgtgtaggcagcatttcctccatctgagacaagcatctgttattatccaggtgagaagcaaaggattctttgcatgagattgactagtttatttggcctttgtttagtaaccagaacctttttactgtaaaacattttcagtaataatgtgaacttcagaaatgagaatatgtcgtacccaattttgaagtgctcataacacccaacagattatctggcatataatagactattaataaatattgattccattgaatttaaattaaattgaatttgtagttataatgtcttgtgagatctgtgtaggggctaaggagttacctaatatttgttgacatagttgtttttatttaatagtttttggagtgatgtttgagagttgtatatataccgttggttttagacactcattttggatgataggtaccttattttacattttatttgttttattaactccctcattgatttatatcatttccataagatcttttccatttgtgcaagaaaatctttagtatcttcatctttggaatgtgtgtcaggattaccttaaacccattagtgttatttaggaaaattgtaacaaaagaatataatatgttaaagttactaataatttgaaggacatgaaatcatccaaaaattttaaattaggttctgtaattaacttcttcaagg

SEQ ID NO: 17578 - DNA, 1066 bp, Homo sapiens
gtatacatatgtaactaacctgcacattgtgcacatgtaccctaacacttaaagtataataataaaaaaaaaaaagaaaaaaaaaattagccgggtgtggtggtggggcctgtagtcccagctaatcgggaggctgaggcaggagaatggcgtgaacccgggaggcagagcttgcagtaggccgagatcgtgccactgcattccagcctgggtgacagagcgagacactgtctcaggaaaaaaaaaaaaaaaaaaaagaaagaaatggatattatctgattggataaaataagacctaactgtatgttatctacaagaaacctctttaaatacaatgatactaaagggttaaaaaatgaaaaaaaataaaccatgcgaacaaaaaccaaaagaaagctatagtgactatagtagagtcagacaaagtagacttcagaacagagaaaattaccaaggataaagggagataatttcatagtgataaaaggtgcaatttaccaagtcttacatgtatattcatctaataacagaactcccaaatatctgaaccaaaaactgatagaattaaaagaaaaatggacaaatctgcagttatgcttggaaacttcagcatacctcttggtaattgacagggtaagtaggcaattaggaaggatatggaagacttaaatagaacaattaacctacttgacctaactgaaatttgtagaacaccctagccaacaattgcagaatatgcatttattttaagtgcccatgaaatacttgccaaggtagatcgtaaactaggccataaaaccttaacaattttgagttaaaatcatacaaaatgttgtatttataatagaattaaaccagaaatcaaagaaagacatcaatccccaaatatttagaatatgtaaaagcgacttctaaataatacatattttagaggaaggaaaattttataatattttaaatagaatgaaatatcaaaatttgtgcaatgcagctaaagcagtgctccaaggttaatttatagcactaaatgcttttattagaaaaggagatatgtctcaattcaata

SEQ ID NO: 17579 - DNA, 1050 bp, Homo sapiens
tgtaaaaaaacgaaaatagcaataacttatggagcaatatgatgcagtctaacatagatgtaattggaatctcaggagatgaaagggaggagggcacagaaaaatatatttgaagaaataatgagcaaaatattttctgatttgatggaaaaaaaaaaaactacggagatcaaagaatctcagtaaacctcaatcagagcaaacaaaaacacaccaagacacattatatcaaattgctaaaaccagttaaaaagagagcatcttaaacttagccagagggagaaaagagacattttgtgtaactaagtgaagatgatcagaaactatcaaagccataagacaagagtgatagcttcaaaagaccaaaaagagaaaaaaagtcaccctagaattctatgtgtggtgaatgtatcttttaaaaactaaggttaagtagagacattttcagaccaaaaaagctgagagaatttattaccagcagatctataatatcagaaattttaaacatggaagaaaaatgatgggaaaaccacatggaagtttgaatttacacaaaacatgaatagtggcagattgatagaaatgtaggctaatattttaaaaatatgttttcttggacaggcttggtggctcacacctgcaatcccagcactttgggaggccgaggcaggcagatcacccaaggtcaggagttcgagaccagcctggccaacatggtgaatccccatctctactgaaaatacaaaaattagccaggcatggcgatgggcgcctgtaatcccagctacttgggaggctgaggcaggagaatcgcttgaacccaggaggtggaggttgcagtgagctgagattgcaccactgcactccagcctggacaaaagagcgagactgtctcaagaaaaaaaaaaaaaacttttctctttttaaaataattggctatagaaaacaaaaataatagtatattgtgaggtagaaataaaatatataataaaagtatcacaaaacacctaaagtggggctaagtggaaatatagtgttgttaagctttta

SEQ ID NO: 17580 - DNA, 1010 bp, Homo sapiens
ctactaacaactgaagaaaatgaacctgtggcttagaatgtacaacacagtgttactaatcatcaggtgtaaatctgtttatacttatataacaaggcaggtatcttttccttgtttattcttccttcccaaggtgcctgcttggctgaatcagatagtgttttcatataaagaacctacagtcttggtaatgggtatataatctgttgttttaggagagaccttgaaatctttcttctctacagtagcttttgtttttgtttttatacagtagctttttttaatgaatgatttatctctataggagaaacaaaaatttcaaatccaagcctgcccttccaaaggtgagtactatgaaaactttttttgtattggtattctgctacacaattattttttattactcatacaatcttcatacatcaaaaaacaagaaataaccttatttgtatccaagatagtgatcgtgcacttagttgaatccattttagaaataacactgttatgaaatggctgagcctaatggttcaggtaaatatttatttgtgatatataccattttctagcgttttaatagctcctgaatataaatgttgtttagttattgcctctttatgtaaggtcttttcatttctccttgagccaagttaaggtcaaattctgaatggtacctgattttaaaataatttctgattagtgctcacctaatccaattatctataataaatgtttgccaggtttttctataaagggacattgtcttttcaggcttatggtttctgatataactagttggctctgctgttgtagcagaaatgcagctataatttgcattccaataaaactttgttaatggacactgaaaattgaattttatataatttttcacatgccataaaatattattattttaacccatataaacaatatataaatagtgggcaggatttggtgagcagtacttgcccctctgttaatatagctctggtttttttttatttttttatttt

SEQ ID NO: 17581 - DNA, 1092 bp, Homo sapiens
taatagaaattcttcaggctcgagggaaatcaccccatgatcgtaacttgggtctatagtaggggttggcaaattttttctgcaaaaagcagacagcaaacattttaggctttgtaggccagtatggtttctgttgcagctactcatctcttctgtgaagggagccatagacaatacataaataaatgagtttagctgtgttccaataaagctttattatggacactgatacttaaatttcaaacaattttcacatggtacaaaaatgttctcctttttctcctcagttaaaaactatataagccattcataggtcataggtcatacaaaaaacaggcagtgggtttggtttaggccatggactctagtttgctgatacatgcatgaattactggaaggaataaagaaggcagaactaataaatatgtataaaaatataaatgactacacatattttcttggcttctcttaattaaaaaaatgactgtttaaagtaaaaaatctgacattattttggtggtttaaaatatgtccacaaattgatactgcccccttcataaggcatgtcctgtacttagtgacttgcttccaagaaatggaatgtggcagaagttacagtgtgtgaccttcaatattaagacataaaggtattgtggcctttcctccttctctttctttctggtgctctcgccttctctccaaagtggctcttctctgaaatttctcagggaggaaattagaggagtgaggaaaaattgaagttttggggagcatgagctacagctcacttccagaaatgacaggagccctagaaagaaggaatcagatggcagaaggagagcaggggtagaaaagaagaatctaactttaatttgaacccattcttttggccttcagtcctgtttgggatgattgagaatatgatgtgcatcagcaagatgaaggatcagcaattgccagggaagggctgagggcttactccacctaaattaccctcaccatgctgacagtgcctactttaatgtccctaacctcaggtatcaggatggtcattcagatgattgaaagtttagtggattgtctgatcaaaat

SEQ ID NO: 17582 - DNA, 1078 bp, Homo sapiens
tgctacactgaatattgtaggcaactgcaacacaatggtaagtatttgtgtatctaaatgtatctaaacatagaaaagatacagtaaaaatacaatataaaagataaaaaatagtacagttacatagggcacctcccatgattagagcttgcaggactggaggttactctgggtgagatgttgggtgagtggtgataaaggcctaggacattactgtacacacactagttagactttataaacactgtacacttaagttacactaaatttattaatttttttgtaataaattaacctgagcctactgtaatgtttttactttataaacttttttaactttttgacttttgtagtagccatttaaaacacaaacacattgtacagctgtacaaaaatgttttctctttatataattataagccctctttctattaaaattttttaaaactttaaaaacttttttgttaaaagcaaagacacatacatacatgttagcatgtatacatacatattaccatagcatattagcataggcctacacagggtcaggatcaagacgtcagtagataatatgaatttttcgtgagattagggatccctgttgtatatgcagttggttcttgactgaaatgtgtttgtgtggcacatgactgtagaatgggtgagtgattctgaactgaatcaaggtagtggtagagactgtaatgtagactaagagacagacccaaagaggtttctgatatttgaaagtacagccatccctgggtatccacaggggattggtttcaggaccccctgctgaagaataccaaaatccacagatgctcaagtcccttatgtaaaatggcatagtatttgcacataacctatgcacattctccagtatactttagatcatctctcagtttcttatacttaatacactgtaaatggtatgtaaatagttgctatactgtttctaagtttatattttttgcatttttttctctaaatatttttgatatgtggtcggttggatctacaaatgtggaaacttttgcagatatggagggccaattgtatgttttctgttacttgt

SEQ ID NO: 17583 - DNA, 1026 bp, Homo sapiens
cttcctatcattttataactcaatctcctccttataatctattttttttttttttttttttgagatggagtctgactctgtctcctaggctggagtgcagtggtgtggtctcggctcactgcaacttctgcctcccggtttcaagtgattctcctgcctcagccacccgagtagctgtgattacaggtgtgcaccaccacatctggctaatttttgtatttttggtcaagacaggatttcccatgttggccaggctgttcttgaactcctgacctcaagtgatccgcccaccttggcctcctaatgtgctgggagtacagtcgtgagctaccactcacagctgttataatctaatattttttacctgataaatttttatattgcctacatttatgaatgttatgtttttattatgtatggatacttttataaaatgtccttgttttaccacttcatgcccatcatcatgacaaaattctaaggtctggtaacattaagtatagtcaaggtttggaagaaataagaactctcagtgctactgctgagagagcatattggtaaaaattatatataggagtttggtagtattctctaaagctgaaaatatgtatgctctaaccttctacttttaggtttgttcttcacagaaacttttgaactcatgtgcaacaatattcattgtggtttattttctaatcatacaaaattgtaaatcgtgtaaatgcctacaaagaggagaatggattacacactgtggtatatttatatgctgcaatgctatgtagcagttaaaatgaataaggttgatttaaattatcgacatggtgtgtgcctgtagtcccagctgcttgggaggctgaagcgggaggattgcttgaatctgggcggtcgaggctgcaatgaattgagatcgcaccactgcactgcagcctgaatggcagagtgaaactctgtctcaaaaaataataataataataaattatccacatagttagatctgaagaacatatgggcaatatggtactt

SEQ ID NO: 17584 - DNA, 1716 bp, Homo sapiens
aaccagtatcaaagacaatggcaaatggcaaatatgatttgacagaaaatcttacttttgaaccctggcttcttaaatttcttcttgtgtatagtttggattggttctagggctgaggtttagtattaagtagaaagaaaatagcttcaaagttcaggagctaaagaagatacctatcccatctttagttagtacttagaaattattttagaaaatgattgcctctagttggttaagactgataataataattgcaatcttaaggctttggttgagatagagtacaaagataagcacattgactggattatttaacattcagactctttagttgtgatttaatttaattcctctccttcccatggtgatttaatccaatgctaaatatagaatagaggaacaaatgtttttaaagtagtggtttaactttatttatttacttttcagttatttttttgtagttacctgaggcaataatgaatgttttgagcctttactaatgcctatttggcatggatacttgtgaaaattattgaaaggtgaacaagctccagttgataaattgtgggtaattgtggaagatgtttttgttgtgagatattagaactatcatcattaccaaaaactgttcagtttttatcaggtttatgtattttgagtatattttaacatctgttgaaacaatataaagaatagggtttttttttgttgtttttttgagatggagtttcgctgttgttgcccaggctggagtgcagtggtgcaatcttggctcactgcaacctctgcctcccgggtccaagccattctcctgcctcagcctcccaggtagctgagattacaggtatgcgccaccatgcccggctaattttgtatttttagtaaagatggggtttcaccatgtttgtcaggctggtcttgaactcctgacctcaggtgatccacccgccttggcctcccaaagtgttgggattacaggcgtgagccactgtgcccggccaagaatagatttttaattacatatcagatttttaattaggtaaatatgagaagctttgtagaatggatattgaacccattgctacttgttctgtattaatagtttttgaatattctaaaagtaatatatttaagaatttttagaaaattatagaagagctgattaaaaaatcgtgaattgggtaatatttaggatccttaccaaatatgatatgcaagattagtatgttttggggttgtgtgggtatgcgtagatctatgtacaatctttgtcaggtttttgtgctaggtaaagagaactcatgaaatgagttgagagtttttgtacccttgctcctttttctgcaattagaaggatcattagcagagaataatatgttcctcaagggtttgagagaggtcagccttatgagcaactgtatttgatgtcttttatttgttcctttttaactaattttttaggattttcaaatctggcttgagttatttggatgatctatgtttttctaaaaatgatgtattggatatttagaatttgttgcttttgagttcttattttttttttttttttttgagacggagtctcgctctgtcgcccaggctggagtgcagtggcgcaatctcggctcactgcaagctccgcttcctgggttcacgccattctcctgcctcagcttcccgaatagctgggactacaggcgcctgccaccatgtccg

SEQ ID NO: 17585 - DNA, 1512 bp, Homo sapiens
gttgggatgctttcttgtttttgctttatccttaagaaattttgggtacagggcaattagatttgcatggttattctgtcttaatccagtctttgttaagtataaggaaagaacttggttctaatcccaagttccttacaaacatttgagacagcaggggaaaaataatttttctttgtactctttggatttttgtataataaaacattgaaatatatgttttttttggcaagttactattttagaaagtgcctagatttggacagtgaaacttaatattatgtggtctcaatgaaactgttgctgtgctaagacaagagttagtattttgtgttttagaagatgtaatcaacatgcttgttaagcttttctttcttgagcatcagaaagcaatgtgtatttacttctaaatattttgcatcttttatgttacagttattttaccaagaaaatggtttgcacgactttgaacatatactatccatgctgatgggacaggatccaatatgaatataaatgatggaggaagacgacgctttgaagataatgaacatacattacggatatatcctggggctatttcagaagggacaatctactgtccgattcctgccagaaaaaactccacagctgctgaggtgattgagtctcttataaacaaacttcatcttgacaaaacaaaatgttatgttctagcagaggtaaaggaatttggtggagaagaatggattctcaatccaacagattgtccagttcagcgaatgatgctgtggccccgaatggctctggaaaatcgcttaagtggagaggactaccgcttccttctgagagagaaaaaccttgatggatcaatccattatggtagcctgcagtcatggctacgggtaacagaagaacgtcgcaggatgatggaacggggttttcttccacagcctcaacagaaagactttgatgatttatgtagtttacctgatttgaatgagaaaactctcttagaaaacctacgaaatcgctttaagcatgaaaaaatttatacctatgttggcagtattctaatagttattaacccattcaagtttcttcctatttataaccccaaatatgtcaaaatgtatgataaccaccaactgggaaaacttgagccccacatttatgctgtggctgatgtagcttatcatgccatgcttcagcgcaaaaagaatcagtgcatcgtgatttcaggagagagtggttctgggaagactcaaagcacaaactttcttattcaccaccttactgctctcagtcagaaaggatttgccagtggagtagaacagattattcttggagctggaccagtacttgaggtaaatatatagaaatcttatttttgattttaattttgatttttatcctttgaggtgggggggtgtaccattcctggaggtactgcaataccaggtcgatgtgtggagtagatcaagcaagatactgttccatctcccagctccaaaaactcatttagggctgggc

SEQ ID NO: 17586 - DNA, 1051 bp, Homo sapiens
tggcctccagctccatccatattgctataaaggacattatctcattcttttttatggctgcatagtattccgtggtgtatatgtgccacatggaaagttacacttaaaaaacctttttttttttctttgagacggagtctcactcagttgcccaggctggagtgcagtggtgtgatcttggcttactgcaacctgcgcctcctgagttcaagcgattctcctgcctcagtgtcctgagtagctgggattacaggcacgcagcaccctgcttggctaatttttttttttgtacttttaatagggacagggtttcaccatgttggccaggctggtctcgatctcctgaccttaagtgatccgcctgccttggcctcccaaagtgctgggattataggcgtgagccaccaggcccagcctaaaaaaaagtcttttttagtggctaccctagaacaaccgtcagcagaattttcctgtaaaggagcatatagtaaaagtttttggctttgtggaccggcctgggcagcattccatcttgctatggggtgatacttcttggggtgatacttttcaggctggaaacgtctgtggccactggcgcctctgcctgagtttttcttgggcctgctgggcttattctgatcactctgaatggcaggctgtgtttggcttgcactaccagcctggatcccacacctaccaaaggagggtgtgtgagtgagtgaggagtttggccactctacacaaccgagcatgctggctgcagcggggcaggcagctccgggtgctggcataggcgctggcttccttgcaaggctgtggatcaggcatacctcaagcagcttccatggctggcactggggaatgcagtggtgctcggaagcttgaagatgccaggaaccgtagagccccaaagagggtgtcagagccctggcttggggagcccccaggtctggactccatgaagggccttagctcttttctccttctctcttctctccttctgttgcctacaatgggacgaacaaggggcgtatttcagccctgtttgtgt

SEQ ID NO: 17587 - DNA, 1031 bp, Homo sapiens
aaacaaaacagcatggtactgggacaaaaatagacatatagaccaatggaatggagagctcagaaataaggcacacctacaaccatctgaccttcaacaaagctgacaaaaacaagcaatgggcaaaggactccctcctcaataaatggtgctgggataactggctagctgtatgaagaagattgaaacgatgccttcctttcaccgtgtacaaaaattaactcaagatggattaaagtctctaatttaaaacctaaaactgtaaaaaccatggaagacaacctaggcactaccattctggactcaggaatgggcaaagattttatgacgaagacaccaaaagcaattgcaaaagcaaaaattgacaaagagcttagagtgactaaagagcttctgcacagcaaaagaaactattaacagagtaaacagtctacagaatggaagaaaagttttggaaactgcatctgacaaagatctaatatctagcacctataaagaatttaaatttacaagaagaaaacccgctaaaaagtgggtaaaggacatgaacacacacttttcaaatgaagacatacctgtggccaacaagcatgtggaaaaacactcaacatcactgataattagagaaatgtgaatcagaccacaatgagatgccacctcgcaccagtcagaatgactattattaaaaagtcaaaaataacagatgctagcggggttgcagagaaaaaggaacacatatacagagttggtgggagtgtaaattagttcaaccattgtagagagcagtgtggtgattcctcagtgacctaaaaagaactaccattcaacccagcaatctcattactgggtgtatacccaaagtaatataaatcattctatcctaaagacatgtacacatgtgtgtttgttcactgcagcactatttatgataacaaggacgtggaatcaacctaaatgcccatcagtggtagaccggtaaagaaaatgtggtgtatatatacaccatggaatactgtgtagccatcaaaaag

SEQ ID NO: 17588 - DNA, 1101 bp, Homo sapiens
acattcttctcatcaccacatggcacatactctgaaattgaccacacaattcgacatgtttctctgcaaatgcaaaagaactgaagtcgtaacaaccactctcttgggccacagtgcaataaaattagaagtcacatctaagaaaattgctcaaaaccatacaattacatggaaattaaacaaccttcttctgacttttgggtaaaccatgaaattaaggcaaaaaccaagttctttgaaactaatgagaccaaagataaaatataccagaatctctggaacacagctaatgcagtgtaaagaggaaaacttacagcactaagtgtgcacatgaaaaagttaaaaagatctcaatttaacaacctaatatcacaactaaaagaactagaaaaccaagagcaaaccaacccccaaacttgcagcatacaagaaataaccaaaatcaaagctgaatggcaggagattgagacacgaaaaaccattcaaaacatcagtgaatttaggatttggttttttgaaaaaattaatagattgcttgctaaactaataagaaaatggagaaggtccaaataaacacaattagaaacaacaaaagggctattaccactgacctcacagaaataggaataatcatcagactgttatgaacacctctgtgtacagaaactagaaaatctagaagaaatgtataaattcctagatacgtacaccttcctaagactcaaccaggaagaaattggatctctgaacaggtcagtaatgagttttgaagttgaatcagtaataaatagcccatcgagcaaaaaagcccaggaccagatggattcaaagccaaattctaccagatatacaaagaagagctggtactattcctactgaaactattcccaaaaattgaggaggagggacccctccttaactcattctgtgaggccagtatcatcctgatatcaaaacctagcagagacacaacaaaaaaaattgcaggccagcatgcttgatgaatatcaatgcaaaaatcctcaacaggatactggcaaaccaaattcagcagcatgtcaaaaaacttacccaccatgatctagtaggcttttatcactg

SEQ ID NO: 17589 - DNA, 1049 bp, Homo sapiens
agattgagtggcttaaaaaacaaaaatttattttcctacactcctggtgactagaagtccaagatcaaggtgttgtcaggtttagtttctcctggagcctctttttttggcttgctggtagctgctgtttgccgtatccttccatgacctttttttgtagtgcacacatccctgacatctcttcttacaaggacacccatcctattgaagtaggacctttccttatgacctcatttaaccttcattacttctttaaaggtcctgtctccaaatacactcacattgcagattggggctttaacatacaaattttgggagaacagcacagttcagtacataacgacagtagtataaacccaaacagcagaaaagaatagaaggtaaattttctctggagaaaggcatagtggaaaaaaaatatgagaaagaaaggaggaaggtgggcaagatggctgactagacacagccaggtggaatggctgccactgagggactgggacaactggcacactcctaacagatcttcagagggaaggcactgagagtagacagagggaagacacagatgttgggatgaagtgggaggaacctgggaaccctgcacaaggctactatgcaccaggacttgttcctggtgcccagtgactccagggaaacgggtgagttgaactggcaaggaacggtatgctctcaccacaggcctctggaatcctggcaggaggagatccctcaaacttcatggacactcgagttggcagggagagctgcttgattctcaagcacacttgaaaagtggtagaggcagcactccagtcagtgcagagcccagagggtttggtgcaggagtgtctatagtggagcatggccagggatgcccatctccctaggcttgacttgctcccataggagactttagccctagagaaagtcagacctgaactctgcagggcagtcttgcccatcaacctgagcatgctttggtctgctggcctcttctggggacccagcctggttgcgcctgcttgcagtgaagccttgggtaccctggg

SEQ ID NO: 17590 - DNA, 1026 bp, Homo sapiens
atatacgaccctttcaagcttgtttgttgctttaaactttagaaagcagttattttatattctctatgtgatcttttctaatatctgaaatttttgcatgtgtgttggtattctttgcttgcttgcttttcatttgtggtgctttttttcttgttaatttttcctgggacagtacttggtgggttttgcacatgtattttctaaatgtttatggcctgatgttttttacttcatctaggtgatgggaattagagcctcaaatctctgtgtgtgtgtgtgtgtgtgtgtgtgtgtgtgtaagtaaggtggtggctgaagtggtggtgtgtgtcttgttgttacaagtaaatggaaactggcttgtgccacctgttttgtttgggctgcaagctagtagagttttttttacatttttaaatggttggaaaaaaataatttgtgacatgaaaatcatatgaaattcaaacttaagtgcctataaatctttattgaatacatccatgctcactggtttatgtattgtctgtggctgttttcatgctacaacagcagagctgattggttacaacagagatcatattgccttcaaagcctaaaatatttatttatttatttattttttagagacagtctccctctgttgcccaggatggtgggcagtggtcgtgcagtggtgaagtcatagcttactgcagtcttaaacccctgggctcaagggatcctgctgcctcagcctccggagtagctgggactacaggcaggcaccacactcagctaaggcctaaaatatttatacctctggccctttacagaaaaagtttgctgtttcctgttaataacttgtcaggaactctcctttctcccatcattcttttctgctcagtgccaaagcagctttctttgaagttcttaggggattaggttagaataggacaggtttacttttgttcattttactggttccagccatatggtataggggtgtcttatcagactcaccactaaggctgggtcatgggcttggct

SEQ ID NO: 17591 - DNA, 1081 bp, Homo sapiens
ttgatagcattttatgcacaatataacttttttcaaaattggagtcagtcttctcaaaccctgcagctgctttatcaactatgttgatgtaatattatacatacttcgttgtcatttcaacagtgttctcagcatcttctcaaggagtagattctatctcaagaaaccactttctttggtcatcagtaagaagcagcttatcatctgttcatgttttattgtgagattgctgcagttcagtcatatctttaggctccattttaaattctaattatctttgtttccaccacatctgcaattccttcttccactgaagtcttgaagccatcaaagtcatccatgaggcttgggaacaacctcttccaaactcctgttaatgttatgttgacctcttcccacgagtcatgaatgttcttaatggcacccagaaaggtgaattctttacagaaggttttacgtttaccttgcccagatccataaggggaatcactgtctatggcagctaaagcctcatgaaatattttaaataataagacttgaaagttaaaattactccttgatccatgggctgcagagtggatgttgtgttagcaggtgggaaaacattaatctccttgtacatctttaacagagcccttgggtaactaggtgcattgtcaataagcagtagtattttgaaggaatcttatttttctgagcagtaggtctcaacggtgggcttaaaacattcagtaaaccttactgtcaacagatgtgttgtcattcaggctttgtttttccatttagagagcaaaggcaaagtagatttagtgtaattttgttgttgttgttccctgagacaggatctcactgttgcccaggccggagtgcggtggtgtgatctcaactaactacagcctctgcctcctgggttcaggtgattctcccacctcaacctcctgagtatctgggactacaggcctgcaccaccatgcccagctaatttttttttttcttttttttttttttttgagacagtctcgctctgtcactcaggctggagagtatagtggcgtgatcttggctcactgcaacctctgcc

SEQ ID NO: 17592 - DNA, 1032 bp, Homo sapiens
ttgcggtgagccaagatcatgccattgtgctccagcctgggcaacaagagggaaactgtctcaaaaaaaaaaaaaaaaaaaaaaaagctttcccagcatttcgggaggctgaggcagtaaggttgcttgaggccagcagtttgaaaccagcttgggcaacataatgagaccctgtctctaccaaaacaaacaaaagaactagccaagcattgtggtgtgtgcctgtggtcctagctactgggaaggctgacatgggaggatcacttgagcccaggagttcgaggttacactgagccataatgatcatgccacggtagtagtccaacagcctgggcaatagagcaagaccctgtctcttaaaagagaaaaaaggaaaaagaaaaaagtgtttttcccaagtgactgagaaggagctgattttttccagaagagtcttgtagctttcagaggtatctttgttctgttttgttgttgttgagataattttaggaaaaaaacagtagatatattttggtatggtacctaggtctgaagggacagtagatgatttgcctgctttatttcactgtttcctgctttatttcactgtttcctgactccttgaatcattagaactaaaaaaaagcccatgtcttgaatgttttcatgtaaggatacattgtatcttcactgggttttcctgaaaattctgctcttatgtacatcttatgtaccatttccccttaactttaacctttcttctttctctttttttgtcttaaatctcagattatgtataggattctaagcatttaatgtacagcttcttacagtatagtagggcagaacagatgtatcctatgaatgaagagaaagagatcaggaaaatgctaaaggcagagggaatagtctgttgggatataaagaattcagtctctgggcttgtagaatgacagttggtttagggaatcattcagatctaaattgtcttttacttcgtttaatcagaatggaagttgtttcatttattgatcaaaatatttgagcatctac

SEQ ID NO: 17593 - DNA, 1048 bp, Homo sapiens
ataaactccatctttcctaatcatttggattatactatgtggaagtttgttcagtctttaatagcagagaaatgtaggaggtttgaaaatatgatttgccaagaatattaaggtttttagttggagtgatttttggttatgttaactcagtttgaaataaatattagtcaaagacttttcagacattttaaaaaccacaatattgacttaatgtattgattcctaagtctagaactgctgtctagagtgcttgcctttgctctagacccctgtaaaagcactgcctaatggatatcaccactttgattcacatttcacaaacacttcaatccaaacatttaggaaacaaaactcttcctgcctcttttccccccacaaaaacagtggagagagagccggagacagaaactgcaacaaaattttttcttccccccgatttcctaccttgattaatggcaccactctttcctcatgaaaccttcaggaacctgggaattgccctccgcttcactctgtacttcactgccaacatccagtctgtcactgccttgtacattttccctcatgatatttcaggtcattccttattactttttgttgcctctatcttattttaactgaaaatatctgtttgttgggcttctgtaatgctgagtggtcttcttgccttctgtcttctgcctcttgtcatgccctcctgttcattctcttgactgctgttggagtaagtattctaaaatgctcttttagtcaggctctttcacttggagggaagagactcaagttaccttaagtaatgaagtgcttattgaaaggaaccatacacaagggaacccaggaaaagttaacttgctctcaagaagaaaaagaacctaataaaacttgctctcaagaagaacaagaacctaataaagctggagaccccactccagtgctccattgttagcttgtcctagataccgtttctttcttcagtttttttccccctatgtcatagcttccatttattactaatttctgctccttataactactatgtgacccccat

SEQ ID NO: 17594 - DNA, 1091 bp, Homo sapiens
tgtgctgtggggtggcatacacagattacgtactgatgtggccattgtccctgtataaggtagggtatcatcagatgacaggaagcagctagctctgaccctgggcaaggctttgcaccctctccaggatagtgaatgatgtccaaaggtccctgccaaccctgccatctgagtgataaggacatttcagggccttcctcctgtttgcctgggctgtgagtttggtgccaccttgtggtgtgaggaagtagtggtcagccagcctagttcagtactcaggctatggggcagctgcccaggtgcaaacctgcctggcttggcttttactcaccaacctcccttctcttcctccaggcaaggcccgaggcttcttcaagaagggagatgtggtcattgtgctgaccggatggcgccctggctccggcttcaccaacaccatgcgtgttgttcctgtgccgtgatggaccccagagcccctcctccagcccctgtcccacccccttcccccagcccatccattaggccagcaacgcttgtagaactcactctgggctgtaacgtggcactggtaggttgggacaccagggaagaagatcaacgcctcactgaaacatggctgtgtttgcagcctgctctagtgggacagcccagagcctggctgcccatcatgtggccccacccaatcaagggaagaaggaggaatgctggactggaggcccctggagccagatggcaagagggtgacagcttcctttcctgtgtgtactctgtccagttcctttagaaaaaatggatgcccagaggactcccaaccctggcttggggtcaagaaacagccagcaagagttaggggccttagggcactgggctgttgttccattgaagccgactctggccctggcccttacttgcttctctagctctctaggcctctccagtttgcacctgtccccaccctccactcagctgtcctgcagcaaacactccaccctccaccttccattttcccccactactgcagcacctccaggcctgttgctatagagcctacctgtatgtcaataaacaacagctgaagcacctgtttcctc

SEQ ID NO: 17595 - DNA, 1061 bp, Homo sapiens
caggacacaagctctgtgcagatgccctcagcagagggctccagcctcccactcttggctgaacagctccaacccgtagggttgacctttcttaaaaggtccagttcttgctgtttggctattttaagctctagtcttctggggtttcactcagctggtcctggcttcagcaattgcttccctctgaaggccttgcatagaggccaagcgtgaagtgcagggacttctctgctgtgatgtggcttaagtttccctgacacctgttgagtgtcctcataacttcccttctggtgcccctccccagctcctgagacacagctgcagctacaagtgtgcagtgtcagtgttcaagaaagtgcctggcagaggggctttagaagggtcccctgccttccaaaggagctttggcaggcagagctgctcctgcagcaacactcccatttcctgttcttgcctgctgagtagcacctagatttctaagcctcatctagatactcagatttgattctgggcctttatagcccagttgctgggactgtttcaggagctaggggccatgtggggcagggagagggcacaaaagtagagaagcctgatgttgattcccagggggctggtcagctctgctactgctccttgcagatgtcaagagtcaggtgctagtcacgtgctgcttggcttgtcactgtcattggcagcgagaggaatgggtgctggtgacattgggccagggctgcctctctgtgtcagagttcagggtgtaggaggggttctgccaaccatgggctgtgtggggtaagtgggtgaggctgatcttgctgggtcaaggtgatcctgagcccttggcctgtggaatgggggtagagggcaaatggtaacctagcatgctgtgggggatataggatgaggggctgcccgagcctcgggaggggtcctagggagcagatgttgaagaggccagagccctcagtgagctggatgagagggtgagctgtttgaacgccctgagggtacttcctggggcctcgtgtaatggtctcttctgtatgtcccccatccca

SEQ ID NO: 17596 - DNA, 1033 bp, Homo sapiens
tgaggcagcgtggtcaagtcctctgccagggagtggcctgggcccagcctgggcatgttttcatgccagggtgctagagcctactgccagattgtctccctccacccccaatgaaaaaatccttccagaagggaagagccaatttcccctgtattggaggggaagtggcagcacctcctgaagcagttggactttcatcaccctacctctgcatctgcctgaaggacagatttagccaattaacctaaggttaccttcctctctgataaattccccattctgtcttcccatgtgttgtgtctcgtttttttcctcctccttccctcttccttgccccctcttcccctaaaccttacagatagctcgtgaggctgaggcagccatgttccaccgcaagctgtttgaagaacttgtgcgagcctcaagtcactccacagacctcatggaagccatggccatgggcagcgtggaggcttcttataagtgtttagcagcagctttgatagttctgacggagtctggcaggtagggccctaagggcaggtaacactgttaggataaccagcctcttgctccacctgctctaggagaagacagccaggcccaacctggcatctgggcacagagcctcttctcgtctgtaggaacaccgccagggaggtcatggcagggcaggaccaaagggtcctgtggctcagtaggcacagtagatgtcacaggcacttggtgaaggactggtttctgtggagtcttgatcttggctcagctcagaatctccagtgattgggctcctcttggcctttgttcccaggaacatgttcctcaccagctgtccggtgactcttcccctccctctccttttgtgacaaagctctgacaaagctctgtccccctctcgtccctctggacggatgttgctcccctagattgcccgtgaggcagaggctgccatctaccacttgcaattatttgaggaactccgccgcctggcgcccattaccagcgaccccacagaagccaccgccgtgggtgc

SEQ ID NO: 17597 - DNA, 1143 bp, Homo sapiens
tgactagatgaggccatgggtctttgtggtggaagcagtcatcaggcctcaggttccctgtcttgaagtgctgattggaaaatggaggccctagagagacccctaacatgcatgggatttggagaggagaccttgggaatgagcccatttggatttgccctctcccctttcttccgtcaatgaagcatccatattggtgttgaagcccagcaggcagaattgttggcccactctgggggcctaaggtagctggactgccttgccatctgtgtgcacccatgatgatatcatggatgtctgtcctggtacaaggacatctaagttagggaatcccagggaaacttcttgtctactgccatacttgtggcctctgttctatataacctctctccccccaactttgtccatcaggtttgatgaaatcctggaggccagtgatgggatcatggtggctcgtggtgatctaggcattgagattcctgcagagaaggtcttccttgctcagaagatgatgattggacggtgcaaccgagctgggaagcctgtcatctgtgctactcaggcatgtgcccacccttccccacattctcatgtgcacactcgcatgtttgtatgggaaagctctggaggctgtctgatctcttcccatggaattgtcgcacgtaacacacagataatccccttcccccatgtacctacacaaagccatactctgtgtacctactcactatccagaggatcagcttgctgtcatttgtctctgaagacagctcaagctacatctcactaatgctctgtcccctcccagatgctggagagcatgatcaagaagccccgccccactcgggctgaaggcagtgatgtggccaatgcagtcctggatggagccgactgcatcatgctgtctggagaaacagccaaaggggactatcctctggaggctgtgcgcatgcagcacctggtgagttctggggcctgccccatcccccagggcttcggactgggcctgggatggatgcaagctctggtgcagagctttttaggtttctccatcctcttatgcacagcctttcattatcctccaagttacagcagcaagagggtgggggtggaagtggaggtggcttttttttttctcctgtt

SEQ ID NO: 17598 - DNA, 1085 bp, Homo sapiens
gaggaaagtgaggtacagagaggttaaatggcttgcccaggattacacagtgtagtaggttttcaactctggtaaaacagctccagcacccataatgcaccacttcccagctcactgtccttgcgggaaaggtgcctgcttcctgttgacctgtgccctcgtgctctgcctcccctacttaccctttttcatacaggtgccgacttcctggtgacggaggtggaaaatggtggctccttgggcagcaagaagggtgtgaaccttcctggggctgctgtggacttgcctgctgtgtcggagaaggacatccaggatctgaagtttggggtcgagcaggatgttgatatggtgtttgcgtcattcatccgcaaggcatctgatgtccatgaagttaggaaggtcctgggagagaagggaaagaacatcaagattatcagcaaaatcgagaatcatgagggggttcggaggcaagtccccgttgtccctgctccagtcccagcgcagctctccgaagggcatggtccatcctgtgaatgtctgattcccagcccctagcccatcagaatgtagactcccaagccagttccaaacctgctgaatcagaatatcttaggagagtagaaggcattatgtttttttgtttttgtttttttgttttttttaaaaaaaagcttcccaggtaattgagatgctggcagcttgacattgttccctgggcctggggaccaacatttgagagaacagggtcactgctcacaggaccaggggccatgatgttctgttcctgatcagaaacactaccagtgtttgctggaatggggggaccagggggaaagatgacagcagacacttaagaaagggctctttttggcccttcctggggagccatgtggaatttcagggcctggtgtccatgttaaagcttatggcctcctggtcttcacttagaatgcagctggctcagtgatcatgctaactctggtatggtccattccactctcagaggaagatgtgtggttcttctccagtttcagattgccccaacttagcttaccccctccccaatgctcacaaagtagagccca

SEQ ID NO: 17599 - DNA, 1083 bp, Homo sapiens
gacttggtttcaccttgttggccaggctgatctcgaattcctgacctcaagtgatccatccgccttggcctcccaaattgctgggattacaggcgtgagccaccacacctggcctagaaataatgacttttaaacaacctaaatgtagagccttccacaggacagcattgatggatgctttaccacataacatcccaataaagccacagctgaagtggaagactcagtacacctcccagagatgctctaagagattatgatatatgacatagatttgaataatatacctaataattggtatgtttataatatatggttttacatccccaagaccaaaaatgcatgtttgcatgaaacactcatggttacaaaaatatattaggccaccaaaaaaacccccacgtttcataaagtagaaattatacagacacattctctgataaaattttttagtggaaattaagaacaaagtcaagaaaactgaagtgtgcttactttagaaagcaaagatctcaaggtagatgaaataaatatttaactcagaacactaggggaggaaaaccctaaaaagggtgaagaaaataattttgtaagattatagctcaatgaaatgaaaataaatttgacagattaagctaagagctgattctttgtggggaaaaaatagtaaaatagaaagttctgagaagccaggtgaagaatgcgaggatgtgcaaataagagtatgaatagaaaagagaatatttcctacacattggagattttaaaagtcaagaaagacttataacttaattcctatatagagagatgactctggctattttcaaagaaaagataaatatccaaaagatagaaaatatgaatagaccagtggccataagaagttgaaaaagtgggctgggcgtgcggtggctcacacctgcaatcccagcactttgggaggccaaggcggagggatcacttgaggtcaggagttcgagaccagcctggccaacatggtgaaaccctgtctctactaaaaatacaaaaattggctgggcatggtggcacatgcctgcagtcccagctactcgggagcctgag

SEQ ID NO: 17600 - DNA, 1078 bp, Homo sapiens
ggagccaggtagcagctgttgggatggctccattcctgcctccattgccagatttagaattaacccattctgaggagcttggggttccctgaggtaccatgacttatttatttttttattttataaaacaaaattttgctctgtcatccaggctggactgcagtggtatgattatggctaactggatccttgacctcccaggttcaagtgatcctcttgcctcagcctcccgagtagctgggaatacaggcatgcaccaccacacctggctaatttaaaaatttttttgggggaaatgaggtctcactatattgccttggctggtctcaaactcctgggctcaagtgattctctcaaatgttgggattacaggaatgagctaccatgctcagcctgggattgtgcctttttaaaaccttcagacttaaccataggtttcccatagatcatgggatttcgtaatggcattgataagaggaattacagaagaggcaaactttgcacctgtcttggcttctgtatttcctgttgagagtaaagaaaatgctatcctgtaaggccaattgccttacagaggttgccctctggcatttggaagttggtattaagtttggactaaaaataaagcctcaggaaatgcaatccaagagtgaattcctccttttgggaaacacaagactcttcatcatagattccctaacctgtgttcataaacagcctatggcctggctagtggctggcccttaaatgtcatggggacctgaccaagtccagcagacataccatgtaggttaagacatgtccctgtaccttttggaaaattctgtagttttccaaaagcaaggggtccttagcaggagtcaccgagaattacttgttagagaattaagtgttagcttagcttagagagagctgaagacaatgctggaggtctgttcgctgttgatccctgctgctgtagtctgccatgggctcctgcattcaggggaaggagcagaaatagatttttaagaagttgacctttaagtaggctttatggttccttcatccagtaaaataacaccacatagctctaaca

SEQ ID NO: 17601 - DNA, 1847 bp, Homo sapiens
tgggtatgtctttatcagtagtgtgaaaatggactaatacactatattagactgacagagtaggccttgcttgaatgacgggtctctgagggccctatagatatgtgagtatgtataatgggatgttgggggaaatgtgtgcaaatgttccacttactgtagttactccagcatttgaccaactgtcttgtatgttttcttctacgctattctgctctggttttctgttttttctttctcacactatctttagcctaatggcattgagtgccctctggaagtgagggttggtgtaaatagcgttcatatatctagttccagtgacttggctataaagttcaggttgaaataggggacagtgaaaaaggaggtgatatactccatctgtttgtttagtcttgtttagggacttctgataagtgcatactctggacacagaacatctagggattattctagccaccatgatctcaggttctgggctcaggaaatggacaatcattggatcagtgtggaaaggatagtgtacaacaggattgagttgggacaagatttgggttatatcataagggccatctctaagacctgccagagaaatcagattgttctttattatcttttatgtgcctcctctggagtataacctgaatgggaattttactttttgtcactgacatacccagtttgagagaaggtcatgatgtttgggtggagagctgaacctagttaaggctaatggggaaggtgaaaacaggggttatgagtacctgtcctgtaaaaggaagaaatgggcaattcaagccttgaggctcttggtgtcctgagttttgttcaggccctacctaaatctgtcacgagacttgagtgtaaatgcatgatgaattgacagcctgagcagtgaagaatgtcagttcaacagctatcagtctatttctacaccatggctatgagaaaaccaagaactgatcagagtggagttaatagtaatagaaagttccagggtagagtggtgagagtgcttatgacctataatgatagcatcatctccatcttcatctctctccctggtggacacacacaggcacgtgtgtccacacatgggtagacatttttatccctaactgtggtaagattgggcctatgataaagctgagtacagagacttaacgtcctatcctcaaaccaaaaagagtgaggagtgggagcacacaagcacattttcatatctaaataagaaaagtccaagttgagtctataaatgttataaacgggtaaggaaggtagagagtttatggatttagataatgtggaaactagaaggaatgggcacttctttctcaagcctgggaagactgtttgaagtaggattcttcaagttagttgccattgtgatttcctgtacaaaattattcatcacttaactgctgatgcttttctcttgaatgactggtcaggtttttaatgtaactttgagactagagcaaatctgacttgttctgcttgcttcctttccattcattttactcatccaggcacttgacaccaaggtattgatgtcccactctcctgggcccctcattcctggctgatttcatgtgctgctcccctatcttagaaccctgcagtggttccctaatgttctgaggatagactttagttgccttaacatggcctgcaaagccggcttgatctgatcctagcttgcctcttctacatcatttctcaccactcctctgcaattcactattctctatgcaactaacacacactaccttatctttccttcaggccttctgtatcctattacttcttcccagacacttccccgctgtttatttaattaactc

SEQ ID NO: 17602 - DNA, 1077 bp, Homo sapiens
ccagttattgttaaaaatgatggttttattcatagcaggggcttggccctgggaatgggtggaggaataacagggacataacaaggctttttgtagaacacgtttggtgttggcaattatagattgtgtttgtgtatacttgtacatgtaagtttacatgtgaaaacatctgaaggcctgaaggcttgcgtcctttccattggcttatatttctagagacactgttctctctctcaaccatcttttaaaatttaaactgtctataatcttacactattatgttagtcacattgaatgcaagataaagcattttattctaaagatgaggtccagattctaatcaggagatgagtcaagctcagaaaaggaaatctgatttagagttctctcagtcttcctggcttatgtcttagttcattttcagtctgcttttgtgcttgtttgatgtagtctctgtacaaggtatagtcaccatgtagttgcatgttcactacatgaaggggattgtgctagattcttaatagattattacttgatatcctgtagtaatttgtaactgttacaaagatcagaaaatgtagtgccatcaggaggctgaggcaggagaatcgcttgaacccgggaggcggaggttgcagtgagctgagattgcaccactgcacaccagcctggttgacagagggagaccccgtctcaaaaaaaaaaagaaaaaagaaagtgccagaatcagaggcctaaaaacatctctaacaacagaataaaccaaacaaaatagaaaaaaggagataatacaggtaagaactaacacctgtgaaataaaaataggtacaatagatagtaccaaaaaagtccaaagatgatttcaaagaactaacagaacagataaaccctggttagattaagagaaaaaggacacaattaaataatataatgaccaaaaaaagcagtacaactatagataagcagaatttaaaaaggtaataaggcggggcacggtggctcacacgtgtaatcccagtactttgggaggctgatgtgggcagatcacttgaggtcaggagttcaagaccagcctgg

SEQ ID NO: 17603 - DNA, 1779 bp, Homo sapiens
gaggctgaggcatgagaattacttgaacccaggaggcggaggttgcagtgagccaagatcgcgccattgcactccagcctgggcgacaagagcgaaactctgtctcaaaaaaaaaaagtgtattgataaatacgtgtgcctgtatatatacaccacccagctattaagtggtgatgaaacccattattatctactttccacaggacagtgacttgttaccaccgcaacagcagagcctgccatccccaacagatcaccagttgtccctgacatcgtgccctaccttgtctccctttgtggtctcctaaatgcccatctcgttggccttggttcggctagtggtatggaggggtgctgcctagcactgacctgagagtgtgtgtgacccactgacccaatggtgagaactgactgcccacctctccaactgattgttcaaagggtagaggagacaaagtgcagatctcaccctttcttggtattttcccttctacccttttggaagatagagtggctatttgaagttaaaggaaagggaaggggcacagaaacagtattacttggtgtgtttgtgtagtgggttttcttggggagggagaggagagttaagtactttaaaggatagaaagaaaataatgagacaagagagtttaggtgtgcttgggaactgtcttaggtaatgatcctggaagaggccagcttgtactggaacccagatatgcttaggagtcaaccttgacattgaagtcatttgcatttctttcctactggctaccagagcctctcagtcatcatactgagacttcagaaggccaaaattccctagatgttttcctctgtcccactaagagctagtttatggatatgatcatatcaggaagagactgagactctcacaaagggtgacatgaaaggtgtaaagggatcagggcttcagttattctatatttcccaatctttgtgggaatctgttcctcaccatatcatcccacgcctttccatgggataatagggacctaacaaagcatgatatccttatttctcaccactaggacatcaaaggccagttctggaatgatgacgactcggagggagataatgaatcagaggaatttctctatggcgttcaggtgaggttacatctcccaagacccccgtgttggatggtctagatatgtgctgctttttggatacatcaggagtgaaagaggttctggagcacagatgagatgaggttataatgttgatgtggtctgagcatggtcttgtcagagctgatcccgtgcccttgctctttctttggagtcatacctgttccagagtaaactacatcctctgtatgtggagactacccatatcttaattagacataattattttctgacttttataacactagccagtgggggtagtttcattcattagggtcacatcttaaaagattactctgccagcgtttgcttaatgccatcactacccagggcacagtcctgagcagaagtacccagactctcagaatgctcttcacttagaaccaatcttaggaaacctgtaactcttcagcctgttctgagttgtcatagaaggtatcctggtcaaggtctgagagaaaagctggagatttaaggaagtgaactccaagcaaaagcctacatttggtctgctgaacctttttaaagtcatgatgagatggagacctctgttaatgaaatcccttgctagggtcaccactgagaaccccttcacataagtggcttttacttcccctatactgctgtc

SEQ ID NO: 17604 - DNA, 1542 bp, Homo sapiens
cctcagtgattcttcctagtagtctttgtttagtggcctactcctgagaagggagcacacgggatggagtggagtaacctcctccaggaccacaaagccgggagcccaacccacaatttaaacattgagctctgaagctgctttgactagacgtgaagttgtcacacctagagaagcgcccatggacctagggaaagacctttgtgatccagacttgaggctcatttacatttgacttattctcgtggaaactcataaagcgttctatattagccgctgagttttaacaccttctctggacactcatcatatagtctatttttggcccaacttcttttgaaagggcccattctttacctcatttagataaatcagataggtctttcttgcttacttcattaacaactcaattaattataaccacatcacatgaagattagatgtaattaggacctgtccaatgtctttacatcccagtccttctgtactcctaaccttaagcaaattggtcgacctctgtaggtctaagtattctgtgtgtaacatgaaagctttgaattaggccacgtttccggctaattttttaaaaagtgtttgtgatcctgtgaattccataacccaccaccttccttttccaactcttcaccttttaaatccactttccatctctccagaggaaagggcattgagagtagaggaagcaagtccctttcactaaagcagcctggtttgaaaaagccggtaatctctgaactgtctcttgcttgaacaagaaaaactccctctgaaatacctttttctccttgtgatagcaacagaaaccaagcagcaacagcccttggaaagaggctaaatttttcttgacttctgcagcaacaaagaccgtgaaaagttggcacttctggcctaacgctgccgtcatcctacccctcaccccagggcaacccaggctggacatttagtgcctccctctttattcctctgtgatcatccagatcagcacttgactgtttattttcaaatctcacgaacctcaccccaagatcttcacattctggatctcagctgctcttgaaggtgaagttttgctttttaaaatcatttttttgtgtgatttttgtctatgtgtagaaacatgcaggttattgtatatatctcccatttgacttaagtatccagcagagggttcattcatttattctctcattcaagaaatgtgttaagggactaagaatgtagactgaaagcagtcaaagcctctgccaccagaggttacattctgataaacattttatatgttagaacatggtaagtggaaaaaaataaagctgggaagggagatagagagtgctagtgtgtgggtgttgagttgtttctgttttaataaataggatggtcaaggtggcctttgagcagagatctggaagagtgaaggaacaagccatgtggatatctgggtggaaagcattccaagaaaggggaacagcagggacaaaggctctatggcgggaatatgcttgggaatatggtgggaagatgaag

SEQ ID NO: 17605 - DNA, 1132 bp, Homo sapiens
gtgctgttcctcaccctccaccgttgctcctttggtccactgatcataagagcatttacctgaaggtcgtcagacctcgaatgccaacaggtcaactgcagtggcctgcagttaccacccagtctgttccaatgaacagaatcgctgttgccccaactcatctcccttcacctaggctgtaaattgaaagtcccacccctgagcggaacacaggccatcttgtgtgctgtgcaccaccagggggtggggaagtttccagactgacttcctggctccagtcatcctaggaaaagagttctccagtcgctccccacccccaccccttcccattccaggagtctattaaggaggcaaagcaggcctaacgggtatcaaagcaaaggagtgaatggagactgggagagtcttcaacctctcctctccttggtaggagctgaggctgcatgccaggtaccttcccttcgaggaatctaataaagctaggtcactggtgttttcaggtgcttctcaaaggattgccgtaggggtaggatatcaggatgtgggagcacaggtgccaccacagcactagtgatggagagtcattgcccctagacttctgggacagtgagactgtgaggaaagctgaaatgatactgggaaagggtgaaagaaaggatgtaggtggaatttatttagtattaatgtaggtacacataccttatggcaacattcctagcactctaaattctagatttgtatagtttctgtcaatatcttttgtaagcttaatcaatacagggcatgacaagtatgtgtcacatacttttttttccacgaagaaaaaaaataagtaggaattgggtgctttgtttatcaaaatttgtatttcctttataaataaactttgaaataaaggttgaaaattagtatcttttctagccgagccaccattgtttttaaaaatcctctttgaagcaggtgtgtgtgtgtgtgtgtgtgtgtgtgtgtgtgacgtttttcaacaaaatttttaaaaatcgaaatgtcagggtcaggtgcagtggctcatgcctctaattccagcactttgggaggccgatgtgggaggattgcctgagctcaggagttaaagaccaccctgggcaacatg

SEQ ID NO: 17606 - DNA, 1033 bp, Homo sapiens
ttatgaaggcttaaaattgtctagttgaagagtcaagacacagaattcaagactaataggtgacaatgtctaattagtattcagttgtaaagtccaaacccttggttctagtaagctcaaaagaggctgaggggcttctttgagaagagggcgctagagctgaatctggggaaatcaatttggctttttggagatgtgagcaggggaaaatattccagaaggagaacaatgtgagcaaaatgtggacgtcataacgcaagggatctgcagcaggtgttagacagcaaggcttgtcatccaactggaagagcagataggaaagccgaaatccagtgtgctggagcttcaagttaagaccttggattctcatgttgcagtccagagaggattaatatgttttctctttgggagtttgaacttaaaactcttcaggtccagactcagcctttctcagcctgtgtcaacagcccacctgcttcacataactttgcttggccacactttccacatgtagggcttctgagatccttgcttatttgatttttcaggtgaaaagaggaagttatagggggccaggtgactaatccccaggcattaggctttcaggatgttgaaagattaatcttcattttctcttgggattcaggaagtccaacccagagatccaggactttatgaggaagaaaggcttcggtgaggacttcaagcagctggagtccttctacatccagacgtgaggaaggaaggagggtgggtggggtcccttgggggtcctcctgtggggtcctccctttccataccgagtcaggccctgcttggccactgtctggtccctgcagggttcccttgtcctttgtcccatcctttcagatttggagtggttggttttcagcccaggggaaagacactgcttaatgaggaataggcccctggccaggctcaacccctagagcactggcacaaacagtctagaacccatctgagctaagcagacacttactagacactcctctcctctccaggctgctggaca

SEQ ID NO: 17607 - DNA, 1051 bp, Homo sapiens
tatttatattctgttaaatggacatagtattaatacctaccatgattatctcactggcattatgatactcagataaaacagatgtgataacttctgggaaattatgatcaagttttttgaagatagtccctgacaccaaagggctatgggcaggttttctgatatctggggagtcttgtgggcattttgagtatcttctactctgctagctttcaggaagtgtgaacctgaagggtgtcttgtgcctttcaggggtcctacaaccctgtcacccacatctacacagcacaggatgtgaaggaggtcattgaatacgcacggctccggggtatccgtgtgcttgcagagtttgacactcctggccacactttgtcctggggaccaggtaagaatgatgtctgggaccagagggactctgcttgttatgctcagagtgaagcttcagggcactggctcatggaagtggcatatcccagccttggtccttagaagaatgttttccatcgacttcttccacctgggaatttagataggaagaactcactttggacaatggaggctgcttcttactattaaaatatgtactgttagactatgtaagggcacatttttctcagatgccgttgcaggtagttgtgcctagagtggatgctgaggaatctgaccaccagggtagaatctgaaagaaagaagcccaagggcagcctgcagaggtcagagtcagtcagtacccctgctccctttcttctgtataccctcagccctccagtgtgagcccccaacacaggttaaatgacagttgaaaagggctactggcctgatagaaaactgaagatattggccgggcgtggtggctcatgtctgtaatcccaccacttttggaggccaaggcgggtggatcacctgaggtcaggagttcaagaccagcctggccaacatggtgaaactccatctctactaaaaatacaaaaattagccaggcgtggtggcaggcgcctgtaatcccagctactcgggaggctgaggcaggagaatcgcttgaacccaggag

SEQ ID NO: 17608 - DNA, 1033 bp, Homo sapiens
aaatgaaatacagaagtaaagatggatagtggcttcctaatatccccttttcatcagtgttaaaaatcgtcaagcctacactacatccattttccctgtgtacccaaatgttatgctctgctacattgagaaccttccaaatagagacatctctttttccactccctgagtctttactctgcctctctacatcttcctaggtctggagacttttagccagcttgtttggaaatctgctgagggcacagtaagtgtggaccctcaaaaagggctcctttttcatctctggggttggatcccaatattgagaatcctagaaaaatcttgttttgccttaggatcctggtggcttgagatagccccagtagaaatggaagaggagatgtgagtggaaaactggtttggtagatttggtctgtttggaatcactgtaatttggtccccctgagtcatcatttagtaatgaccttgaggccacactgctttgaagaaaataaactatgttaacaggaaaatccagaatttgtaggctgagtggtgtttgggacagttgtattaggctggcgttggacaattgctctctgggaaggtggctgcttatggtcatttatagaggtggggagcatttagggagagagcgaccctgagaacagtcacagattggctttttaagaatcctgggagagttgtcttcatctccctgtgcccccatagtaagcttcctttgaaactgacatgttcaatgtttgttctgcacagttctttatcaacaagactgagattgaggactttccccgctttcctcaccggggcttgctgttggatacatctcgccattacctgccactctctagcatcctggacactctggtaaccaggccttaaggccttcttcacacttaagagttctagggtgatggagcaacggacagaccaagttccaaattcttaaagagttagagagggaatgtatggactgggtgtggtggctcatgcctgtaatcccaacactttgggaggccgaggtgggcgg

SEQ ID NO: 17609 - DNA, 1025 bp, Homo sapiens
ctgataggatctagcttctagactgacccctctcaagaacaaaatacagggagggacttgttctggattccctttgggcaaatgcagctgcaatactcagcaggcttggcctcaacttccagggcttttgttttttttcttttaaatgtatactattaaagttggattattaatctaatatttgtgtttgccttggggactaataaacctcacaacctgaggatcacctcagttaaaccaaggctttgtcatcacagagctactcagcagaggtctgtctcagctgttccttgaactaaggaaggagtcagtcagctaggagagaaaagtccttttgaaagcagacagcatcatgtaccttgctgactcagctacatacataaggcctcaagccttgctgccagttcttaaaggaactgtgttctcttttcacttttcctggcttatggggcagtagagggtttccgacctcaaatgccaataccaggtaggtagaaggaccttaggctcaactgctggctcctcgtaataacacacactgtattctgtggtgggtgccactctgctctgcctgtgtcatgtcacctttcctaatccagcacatcctcgcccaagaaaaccctattttggggtcattcattctattcttatttctctcttatttgttctgatgtttcagttggacttgattccaccgcaggctctggctccagaggaagagatgggggctttgtgaactgggatgttcctccagcacctagtaacaaaataaaaacttgaatcctcatgttccacaatttcagaagaaatcattcttttttgctgttagagttcaagaggaaaccccatattttctggaaccagtgggactgacccattaactataagggaagactataactgagaaataaagcaacagtcaagtttgccttcaatgagtcactgaaaaatatttacgtgtcaacttctgataaagcagtaaaaattaaacattgcataacaggatatacttaataacatattgc

SEQ ID NO: 17610 - DNA, 1536 bp, Homo sapiens
agtggatgagttccacctcattttagagtatcaagcaggtaaggaaatgagtaagtaatggtggcaagaccagtcaaggggctgtgtattgtcagattggggtgtgactgtgccggaaatttatctttgtaaattagcaggatcctgtttttgccatactgaaagtttcctgacctattggttctactgagctgatactggccgttgtctcaagggagactgagtattataacatggaagaaaattcccaggtctacaagcagaattgctccgaacccaagataaatcaggtcataggaaagcaagcatctcaaataaaagtgaaaacgtgttaaacacacatatataaagttttcctttatgactaagacaagagaaaggcaggtagcatccattcaactctgtgctggattctgccctaggcctttctgactgactcttccaagctgcttggggttgattccaagcttctggcaagtttctctggagcattttatttttccttgggtgtgtgaatggaagtgttttgtatttaacatcactatattgtttcccatcagatgttctaatgttaataaatccacatccactgcatcccatcccctcttcccagcagattttatatgttacgtagattaggcatctggtttctgagagaatattaaatacttggacatactttgatcctgtgtatttcctgctgtaattttccctctgctcagaactcagactcttgagtttctgattcaacacattgttaatacacattaaagactcaagcatctaaacagactaattggtaccttaaagcagcacttaatactcttcagtgaactacttccaagtcaattaagagaatcttctctactagagtaattaactttaacataagatatgaactatgttatttcttgagaattatgcctttctccaggtagaaaaaagagttgtaacatgttctggttctctttcgggtgcttactagaatcagttgggaattaaagaaggatagggtctgaaaattagggacacagcgttgacgtaggcaattcatacttaatgctacacaagtttttgagtttctcagctttagttttcccaaatgggaagtaagagtaatagtttttactgcctgatcattgtggtaaggattaagagattggttggtgtgcggaaacattgtgagcagcttggatgaaaagatgacctggccgcacgtggtggctcatgcctgtaatcccagaactttgtgaggctgaagcgggtggatcacaaggtcaggagttcaagaccagcctggccaagatggtgaaaccccgtctctactaaaaatacaaaaattagccaggtgtggaggcgggcgcctataatcccagctactcagtaggctgaggcagagaattgcttgagcctgggaggcggaggttgcagtgaactgagattgcaccactgcactccagtctgggcaacagagcgagactccgtctcaaaaaataataataataaataaataaaagaatgacctgactgtggact

SEQ ID NO: 17611 - DNA, 1045 bp, Homo sapiens
aatacctattaaactgtaaataggtatgctgtcattcaggctttgttatatatatagaacacaggcagagtagatttagcatcatacttaagaatcctaggatttttcagaatggtcagtgagcattggcttcaacttagtcaccagctgtgttagccccaaaaagagagtcagtttgttctttgaagctttgaaggtaggcattgacttctactctctagctctgaaagtcctagatggcatcttcttacaataattttacgtacttcttcagcattaccctccaacagaaggctgttttgtatacatcgaacctgttgtttagtgtagccatgttcatcagtgatcttagctagatcttttggataacttgctgcagcttctacatcagcacttgctgcctcaccttgcatttttatgttgtggagacagcttctttccttaaacctcatgaaccaacctctgctagcttctgacttttcttttgcagcttcctcacctctctcagccttcatagaattggagcgagttaggacattgctctggattaggctttggcttaagggaatgttgtagcttgtttgatctgctatccagaccattcagactttctccatatcagcaataaggctgttttgctttccttttgttgctgttttttgtttctgttttgttttgctttcttacattcgtatgttcactagagtagcacttttaatttccttcaaggactttttgcattcacaacttggctaacagcataagaggctttactcagctttctacatgccttcgtcgctaagcttaatcatttctagcttttgatttaaagttagagatgtgtgattcttccattcacttgaacacatagaggccattgtagggttattaactggcctaatttcaatattgttatgtctcaggaaattagtgaggcccaaggagagggcgagagatgggaacagccagtccatggagtggtcagaacacataaaatatttattgattaagttcactgtcttatgtgggaatgatctgtggtgtc

SEQ ID NO: 17612 - DNA, 1716 bp, Homo sapiens
catccaatacacctggccctttcttcaatttttaaaacagagtgagtgtcgcattggtattgtatcttccttaaatgtttatagaatttaagccttctagtgaagccttctaggcccagggttttctctgtaggaagattttaaataactgatttctttaatagatatagggaaatccagattttccttttttttttttaaatgagctttagtagtttgtatctttcaaggaatttgtttcatctaagttgttggatttattggcataaagttaattatggtattctattattcctttaagatctctacaatttgtaatgatgttttccttctcattcctgatattggtcatttgtatcttcttttttttcctgatcagcttggctagaggtttataaattttattgctctttttaataagtaattagcttttggtgaatttatttttctctgtttttctattttcattggattttgcttgcttcagatttgacttgctctttttctagtttcttaaggtgagaagctacaatcattgatttgagacctttcctgttttctcatataggggtttagtgctataaatttccccttaagtactgctttagctgcatcccaaagattttgatggattatttttattttcattcatttcaaaatactaatatccctttgatttattgagatgtgccatttaatagcccattcatggactacttagaggtatgttatttagttcctaaatatttggggattttccagatgtctttctgttactgatttctatttcaattccagtatggtcagaaaatatgctttctatgacctgaatcctactaagtttttgagacctttttcatggtgcagaatattctatcttggtgaggttctgtgtgtacttgaaagcttcaagaatatacataagcctttctgttgttgggtcgagtgttctgtaaatgtcaattagatgaagttgattgatagtgttgttcaagtcttctatattcttattggtttttttttttttgtctatttgatctgtcagttattaagaggtatgttgacgtctccaactgtaattttggatacttgtctatttcctttatagttctgtaactttttgctttatgtattttgaaactcttattaggtacataaatgtttaggattgttacatccctttaatgaattaattcctttatcattactagggataaataaaatcatttcataatattctttgctctgaaatctattttgattgaaatagccattccagctttcatttgattagtattggcatggtatatctttttctgtccttgtgcttttaatctatttgcatctttttaccttaaagtgtattttttatagacagcgtatagttggggcttgctttttaatccactttgacaatctctgccttttaatcggagtgtttagaccatttacatctaatgtgattattgatatatcaggttaggtttaaatctaacatcttgctatttgtttgctgtttgccccatctctatctttgtccctctttttctgtactcttttggattattttctatgatttcattttatcttctctgactttattaggtataattctttttttcttagtggttgcattagggtttatactgtacatctttagcttatcacggtctactttcaagtgataacaggcatacctcagagatactgcatgtt

SEQ ID NO: 17613 - DNA, 1029 bp, Homo sapiens
tgttgaaacacagatttctgggcctactaccagagttcagattcagtagatgtgggatgggacccaagaatttacctttccagcaagtttcctggttgatcctgtaggtctgagaacctccttttgagaaccactggtctgcaaggtagaacctgtcgaagttagaaccttagtggtttccaagttcacctggtgattatatacaaagccctgcatggtccaggcacttcctggaggttcacgtggaataagaggcagtgctggggctggagacccaaccatggctcttcctacctcaccccagtatgcctgctcctacatgtaccctcatgcctcttgaggctgagttttggttggttggttatctcccatgtcttgcccccaccccattcttcctcctcatttaaacctccctttggctgggcacccagtctggtttggtagttctagccagggaagctcttaatgccatttttaattggcacctttcacaggcaaacctttgtgactacttttattttgatgacttaagattttaggccgggcacagtggctcacgcctgtaatcccagcactttgggaggctgaggcaggtggattgcttgagcccaggagtttgagaccagcctgggcaacatggtgaaaccctgtctctacaaaaaatacaaaaaattagctgggcatggtggcatgtgcctgtgggaggatcacctgagcccgggaggtcaaggctgcagtgaaccatgaccgtgccacttcactccagtctgggcaacagggtgtgaccctgtctcaaaaaaattttaaaaataagttttttgtcttcgaagctgcctatttgaacattagaaatggacataggcattacctagctgagtttctaaaggtgacagcaagttaagatttcagttatcattttgacaactgggatcagtagtgagattcttatctcttatgagagaatctcgatagttctaacatgatgagttcactgctcaaaagtctttatgattacggaatttaaaccac

SEQ ID NO: 17614 - DNA, 1046 bp, Homo sapiens
ccaagatagcgccactgcagtctggcctgggcgaaagagcaagcctctgtctcaaaaaaaaaaaaaaaaaaagaaatagaatttgagccacatatgtaatttaaagttctctagtatcacttttaaaaaaagataaattggcagaattggttttaatattttatttagccaactatatcaaaaaacactgaacaaattgatgactagattgtaaatgatgtaaaacattaatgagacagtttgcattttttttatactgtctttgaaatccagtgtgtgttttacacttataccacatctcaatttggatgttggattttcaatagttaaagtgaaatgtagtcctactaaaacaataaagttgagattaataggaaaatattgttcactgctttcattttttaaatctaaatttaaattaaattaaatttaaaattccatttttagttgcacctgccacatttcaagtgctccacagccacatatgactcctactgatcttggacagtgcagctctatataaactgaactctaacacgtattgttaggcaaaaaagcaagctacataacaatgtccatcatatgctacttttttaataagagagaacataacaatgtatattctttacataaagaactagaggactaatacacaagaggctaataaaaatattatctgcagggagtgaaggcgaacagtgcagatgtggcaggggtgggaataaaagctttctctatgcctttttacattgctctgatttttgagctgtgtaagcttcttatgcatgtatgagaaaatttgtgcaaacatttgtgctggacaacattattgtttaatgttatgcttaatgcttatgcataatgcttaaatttgtggacaacactgtgcttatagttaacaatactgtactgatcacttaaaatgagggtaaatttcatgtcgcatgttttttaccacaattttaaaaaggcatgaaacagcatagcctgtctgggaacctgcaaggagaccactgtcgctggagttgattcagggggggataccc

SEQ ID NO: 17615 - DNA, 1051 bp, Homo sapiens
gtgacaaaacagcaaaaatgaggtgttttggttaaggaaaactaacatgatgaagtaatggaaaaccaggtttggaaaaatcacttctcaaagcaaatgcaaaacccagcttgaaagtagtatctcatctcaagaacagaggtaggtgcttattccaataatatttgaaactgccaaagaaatgcagaacacatatttctgggagaaattctatagtcatgagtctcaaacttttttatcacaagaccccttatgaggccttcaaagaactttcatctgagttacatttatctggtatttatcatattagaaactaacacggaatttaaaaatgttcattaaaaataataaacccactttacgttaatgttgaaaacattttatggaaaataacttttctaaaacaaaataatgatttttgcaaatctctttactacctagtttagtagaaggtgactagattcttatatttgctgctgcattcagtttgctgtaatgtgctgctttggttgaagacatgaagaaaatctggcctcacacaaattatagatggagaagggaggggtattttagaatagcctgttcagataactgtggatattccttgatacaacaccaaaactcaacgagtgagttgcttaaagttaagttgcaatatagaatctgaaaccatggcaataaacttgttatactgttatattacaatcttttagcctatcttacacttttgaatagctctttatccacgtataattttgtggcattcaggcatcggtcatctggacaatactgattcactgaatatactgtctttcaaatattgacacatttcatcaggtaattacttataaacaagtaaatcacatttattaatagcacctttagaaaagtcttccgggttgggaagttgtgaagctcatgtggcagatacaagtttttcaagattctaattttcacttggaagcttaaattttatcattttcaataaatactatcagttgttttcctgaagtgatagttcatttcactgatttttgagaaaatgtctgcc

SEQ ID NO: 17616 - DNA, 1131 bp, Homo sapiens
cccctcaggcttctttgatccttgaaacttacctattttttagactgcagttgctgtttatttcttcttaagtgatccctgtaagtagagaaacttagaatcatggtggaaggtgaaggggaagcaggcaggtcctaggtggctggagaggaggaagagagtgaaggagggagatgctacacacttttaaacaaccgggtctcatgagaattcactgtcaggagaacagcaaaggggatatccgcccccatgatcctgtcacctcccacaaggcccctcctccaacactggggattataattcaccatgaaattggggtgaagacaaaatccaaaccatatcacttgccttcaggataggacactgaaagaaccgagcctaattctcgtccatttatcctgaagaaaatactgtttttgaagtggtcttagagaacctgccttgtttttttagtaggaaacaaggtactgagggcaattattagtacattcctgcaacacagaacatactgataaggaattggggcaacctgaggaggcccaaggtactgagggcaattactagtacattcctgcaacacagaacatactgataaggaatcggggcaacctgaggaggcccaagggcagccttggcagccttagacattgggaacctgacggtatttgccccagaaaatgtcaaagagaacatcttttccgatcagtgggatgattcatgatgttgtttggagagtcagagctttagaacctcactttctctctcattatgattgttgacccattaccttttctgtcagagagcgtgtcaagcgttcctctgatcccatggatcctctttgattatcagtcttcagaatccaaaaggaccttaaagatcattaatccatcttctttggaagggttccatagtagccaagataaattagtggcaaaaccaagagttgtatctagtttttttaaatttcaagtccattattcttcctacttcatgacatcttgataataaaatgttgagttgtgataatgactccaacatcagcgatgatttcagagacccgttaacgaggagcaggatgaggattgccgaggtgaagatgctgagtcttttttacaagacactgaactttct

SEQ ID NO: 17617 - DNA, 1171 bp, Homo sapiens
ggattccctctttcctgggagagccttggtcattgttacttattgagtagcttctccaagcattcattgtttttacataccttgtaataggacttgattgtagttgttttatctcagaatctcatttccttaagggaatgtgtgatatttgacaggatgcataactgttgttcatgcaggtgttttaagaaaaaacttgggccgatagaagagataatagtgtttgtttgcattttctttaaaggtaggcttaattgagggcagttggacctgcatccttttccagtaggttggagaatcacctacattagtagagcctcatatattagtaaccctggtatctgcctgggcatctttagcgggtggggggtagaggatgggtttggtccctttaccctattctgacctgaaatgctcttcatcaaagctgagtatgacagtaagcataaagactgactacattacaagcagggctctgagccagaaggtggggcctttgtatcctgtttggagtagacttccgtggtaactgcgtctaacgctttctcacagccgctcctgacatcactggccataaacggagtgagaacaagaatgaagggcaggatgccactatgtattgcaagtcagttggctacccccacccagactggatatggcgcaagaaggagaacgggatgcccatggtgagtaggaggcaggcccgggtctctggttgctggagttttccctgcagaggtccagacacgtgggtcagttactgtagtagctgtatcctcggatgtgtgcatggcgagggtcaccctttctagagtcacggtttacagcatgaatcaagaggtcattgacagtctcttccagcacaaaaatccctgtacgtgatttgttaaagctgtccctctggtaagagattagattgctcactgtattagtccattctcactttgctctaaagaacttccagagactgggtaatttataaagaaaaaaggtttaattggctcatgattccacaggctttacaggaagcattgccggggaggcctcaggaaacacaggaaagatgatctttcctatcttagacaacagagtgacatctggcctgctttgagttttattgctttcagattactgtaactgaaggtgaggcattgacaggtaatatagttaa

SEQ ID NO: 17618 - DNA, 1045 bp, Homo sapiens
tataagtttctcccaaagttagttcagcctgcgcccaggagtgaacaaggacagcttggaggttagaagtaagatgaagcagttaagttcgatctctttccctgtctcagtcataattttgcaaagacggtttcagtctctccctttgggttttataacaccttaatcttaaggtgtaggctctgaagatggcaaaaggccgtagatcactctggcttcttcctgctgataggggacattgtgggaatgggagtgaaccccaaggtgagaagagtggaaccaccttgtaactgtctgagtgtactcatgcaggcctggctaggattccaaggcttgtgtgggaaaaacattactactctcatctatagttttactacagtgtttaagtgaacagcctactgtaaggtaaataacgagtcctaggatgaggagtacaattcccaattttaaaagcaaagatttgaaagcattagtttggggacttccaacccacaaagaatttagaatttcatctaaactgcagaaaaaaacctcaagaacagctaacaacagtatactatagtttttcttttgaagcgtaatttttctctctccagtccccatttttattaaaaacaaatcatgatagaactgatttatttataaaataaacttattcttactgtacttggcctgattatttgcataaagtgcagcaagagtagttatttttcacttaggctttttaaattggctttgacagaactctgttccatgaagaatctcagataagactgttaaaaagtcgagcccagccatgggtttgtaccctcaaatacttacgagttgggcaaattcctctcctcttgaggtcccaagataacttggggttcctggcctgttagaaagtgacattcttagccaggcgcagtggctcacacctgtaaacccagcactttgggaggctgaggcgggtggatcacttcaggtcagtagtttgagaccagcctggccaacatggtgaaaccccatctctactaaaaatacaaaaattagccaggtatgg

SEQ ID NO: 17619 - DNA, 1049 bp, Homo sapiens
ggtcacttgcttacagtcatacagttagtgacagagccttatgtgaatccagacaactgattttagagtttgctgcatttggtcactaaactatgtagtttctcttggcatgaactagattcccctatttttccaaagcagaaggctggctggtatagatgcctttggtcattttgaatggtataatttcagaataaagggtggaccctggtttagaagctagtgatagggatgatcttaatttccaaacttttgtcatatctgcctgatcaaggtacctgtggaaggagcaggtttgaatttggaaaatgttttgtaattgctgccatctctacctagagatgagactaatctgtggtacctcttcctgctgcagagaatgaggttaccccatttcctctgctcccaggacttcaagcctgccttacccttggtcagtacacacagaatgagtgcatatagacttctgacctgcctttggtgttaaggaatagtgatgaatgatctgtttcctgattaacaggaaggataggcaggctctacagtagtttgtgtaggctcaagtctgtgacagcctcacagcagttaagggtcctttagacatttgaaatactcatagttcctgtattcacgtttagatgtcagtgggtcttgctcagtctttattttgaggtagacgatttgaatttgtgtgtgtgtgagagagacagaggagagaaacgctcttatgatcttggctgtcattttctctttattgcgaggaacgaaggagagaacagcatgagccagccacagggaattagaggtagagggggtttgaagggaacagctgtttttaaaagaggtgacaaaagcaggcaagacttaaaggcctggccttggcagtagtcagttgagggagagagaaagttagtctgatttcttgttctgtgggttgccctggaggtaaatgtgaaaaatcatgatagtctctcctatatagggctaggctagctttttttacttccttagggcatatatgaaagcagttttcctgggattgggctcaa

SEQ ID NO: 17620 - DNA, 1048 bp, Homo sapiens
gctcatttccctataaggtgagctctcatcttaatagacccttaactgttcactcatctaacagtagtacaatctagactcagggtctggaagacccctgaaatatgcaaaactttggttatatttttctgagttgagagattcccataatttttgttttctttctttgttgagacagggtctcctctgtcgttcaggctggagtgcaatgttgtgaccccagcatgctgcagcctcaacttcctggactcaggtgattctcctgcctcagcctcctgagtagctggaatcatagacttgcaccaccacacctggctaattttttgaagagacagttttttgccgtgttacccaggccggtctcgagctcttggactcgagcgatcagaccaccttggcctcccaaagtgctgagattatgagtgtgagcggcccatgtttttttttaaatcatacttttaaatttttttcttttttgtcattgacttttttttaaacctgtagatctaggtagatcatgcttgtttagcttgtcagtaggaattggcaacaggactgaatgaaagtttttgttgagggagatccgtcataccaaatgcttatttcttgtctgtcctaaagtaacttaacatttgcatagagtagtttacagaactcttacacataatgtaacatgattttcacaactaccctataaagaaagtggcatcattcccatttgaagaaactgcttaaagttaagagaatttgtgttgtggaggtgctgactcaaaacctgacaccttttcttaggctgaaattaagctaatgtgacatgatctcagattccataactacatcttatattttgtaaattaacagtttggcctgttcaatatccagtatcttcccaaatattgttaagcagcctgatttataattgataggattattttctactttaaaagaattttttttgaaaaggagaatttgtactgcctctctttattcttattattcttggactttccagattattcataatatcttagatttaatggtttataac

SEQ ID NO: 17621 - DNA, 1045 bp, Homo sapiens
ctgtgtagaatggcaaaagcaaccttaagaggtagactgtatctttatgtagcaaattaaattatgatatactttgcgttatgtctaacacaaatgatcaataaaggctagctgctgttataatgaatttcctttcagagacattagttatgtgctcagtaatctttttgaaatgttcttttttattttttaagaatagttaaaaagtgtcctattccctgtccatccctggcccaccatggttttcttcaagattatctttaaaaaaaaaaaaaaaaagattgttaagctgtttgtttttgatgctaggagtttcacagaaactgtgaacatccatctcttttagacctagtgatgagcagcatcactacctaacttggaaaacagtggttaagttgaaacctaactgtaaagtaaaaactcaaataagaaatctattttaaactcaaatttattcccttgcttgttagaaaacaaactgacattagggatttgatttttttaaacaaaaggtaacttctaaggtatctgtggtaaattcaaatataacaaagtctagtcttttagaatgtattaatatgattctgttgatattaagaaagatggctctgatggctacctttctatgaaaaactccactaatcaaagaaagatggtttcatttattatacatttattaacatgactagtacattttaagtttttaataggttgcaatttaatgaaaggatttttttcttaatccttcattaataagaatcttattcctcacctttcttttaacaaatattgagtataatgtgtgcagcaaggcactgtggggaaacaaaattagagacatatcctggtttccaaataatttataatctgttaacatatattctttcttcttaccttgtgcatcttcatggattcatagaatatggcatttgaattaattcatcaattacatctacaaatacatagatttgctgaatattaaagctgaaaggaccttagaaattgtccattccagtcttctggttatatacacaagggaactgag

SEQ ID NO: 17622 - DNA, 1048 bp, Homo sapiens
cagtaatgtattgcaccatcaaaattaagttgttccatagaagtgacatgttttggtagttgttgcttgacttagaaatttagcagcatgagttttactaggaaactatgatatattattttcttccagttttccagtgaatgttttgaaagttttacattttcttgcttcttgtaaaattttgtagagacgtacatagcttgctgtacatcttgttttcagcttttagcagcagaaagttttctttttaaacattagtaattaagacaatgatctaaatagttaaagcaatagaagctttattcccatcaccataattctgttgtccctctttgttttcctctacaatatgatttggaatccttttaaagacctctatgccttagtttaaattttttaatttaagttaatttattgttactatttttttttttttttttttgagacagggtcttgctgctgtgtttgcccaggctggagtgcagtggtatgatcatagctcactgcagcctcgacttcccaggctcaagcaatcgtcctgtctcagtgtcctgagcagctgggattacaggtgtgcaccaccacacccggctaattttttaaaaaacttttttgtagagatggtgtctcactctgttgcccagggaggtgtttttgttttgttttgtttgagacaggatcttgctctttcatccaggctggagtcagtggtgagaccacagcccactgcagcctccattgtctgggctcaagtgatccttctaccccagcctcccgagtagtgggaccacaggtgcgtgccaccatgcccagctaatttttaaaaatatttcatagagacagagtctcactgttgctcaggctggtctccaaagtgttgggattacaggcttgagccactgcacccagcctgtaatttcttataaagttattttatttttcctatcttaattttattctcttcttacacatactttcttgatcctgtttcttctggtatcttcagttgtttctagataaacatttgccacttaaaatttttaaattc

SEQ ID NO: 17623 - DNA, 1027 bp, Homo sapiens
tgagttatagggcatggtatttatagtgtttacccttaataggttaactgcaactctggtagttcataagaaagttaagaggaaaaataaagtactaatgagaaaggccagattatttcaaggttggctcttttgacaaatgatgagcatatcattaaaatgtgcattttagatggttgttaataggccagtcttttcattgaattaattattcctctctactagggaaggttaatatcgaatttctgtaatctttgtagtgtgctcactgctctcacttcaagttaaatttagtcacagggacccttgttatttttcatccccattctctcctccccgagataggtgactgaaagtgaaatcagatgtctatctgtgttaactttttatagcaaatttttgtagctcccttttactatcctgaaataaaattcatagatgttttgacctacctacatgttattgaagaaaaaacaatctgatgtcctaaatgtaatataaaggagaaaataagggtaagtaactctaataatacaatgtttagatcagtctgtaagtgctaagagatggctggacagaaagacattgaagtagcccattgtttatattagaaaaaccaagctacaaattcagaccgatacagttgtgctgtaatggtgaattgaatactatagacagtgttgctgttgataatgtgattttctgaaaaggtgaacagctcttggtagagttccaaatgaacgaaagaacagtctattctcactttacacagtaattacattcctggaaaattaagtgatgattaaaatcatgcaagaatactttgtgttatatttaaaacagagttgggttctgggctcagaacaagtttttcatcttgaatgtcatttgaaagtggtataggaagcgggacaattctttactgtgcaagacttttccttactttgtgggatgttgcaaatccttggtgcctgcccactaaagactagtagtttcacctcagtcattgtgtcaaccaaaaatagag

SEQ ID NO: 17624 - DNA, 1030 bp, Homo sapiens
acacaaatatgtaatatcttgtgaaacattacctattattaatctgtgtgaggtagttaagagaaccatagtgaccttctaaattgaattcacaattcatgggccgtgaaactcagtttgaaaaacagcattttcaggtatggagtagtttggggcttttgtttattttttacatgccatgttagtctggaataattatgatttttgttaacacaaggattttcactagacatttatcagtaatatcagcatatactgttattagtcattatgagtaaagaaaataaaacattttggatttatacattagccattatatatagcgattttttttccttttagaactttagaaaaaggggaagccacagtaatttgaatataatcaagacataacttttccagtatattcagttgaccttccttttaaattagaccttgtgttccttattcctgagcctttgagtttgcagggctgggagtactaatgtttattctaagccaaatgctttacttggttgctgtagtctgaggcacatttctgttgagtacagattgacttgaatactggccaagggaagagagagagagggtaagcagaaccatcactaaagaatcatctgccgttcatgtttaagatcctagagtagtgggattatttcctagtttttagacactgcttcctggaggaaaaaaaggcaacaagatgtcctcctttgttggcaactatctgtgaaaaacttctaaattcatagattgaaggaatgtgttaaatttaacttgggatttttttgattatacgagtttagcaggtttgggaatcattgccgaacaactggaaaaaaatagcacaaggagctccagcattgaaattatattcattaatgctgaatctcaaatcgtgcatcaagggagatgaaataaatggccttaatgcaaaccaggaaactgctacctggaaaaaagcaagtataaagaggtttcaaatagcttgcagtgaactgtcattgaattacccttacacaaataacat

SEQ ID NO: 17625 - DNA, 1044 bp, Homo sapiens
gcacaataggtgagagattcttgatcttaacatgtttaatctctgctggcttagcttttttccaatgatttataatacggtaaaattgtagtttcttagcaactaaagcaaggtttctggataggcctataaagactcatctgtctgctcagtgatatgtgttctaaatacagcatagaacggcctttcccttgaaatgagcttgaattcagtcacatgacatgaccgatgaaatgaagctgagctgctggttgacccaaatgaatgtaaatttaattcaaggaagagatggctatttttgagtttgagttcctatagttatggatgccattttatagctttctatataacatgtcttattataatattcaagctttcagctggtaataaatagccctgcagtgatctgacttcatgtcatggagtttgtgttttcttacagtgctttcaaaaagggataccttgcttgtgcatgatgttgaaatgttagaaatgttagattttctatttaaatgactggagaaaaaaactcacaagtatctctgaattgggaatgtagtagtttagattgaatatagatgtttttcaaaaggcatttgtttcattattcctaaaatgaagaatttggcctgtatgactctcaaggtctcttgaagctccagtgagtttctgacccattgttgtggacattcagggctttcattcagatggattttgtttctcatccaagaatttaaacttgtaagaccaattccaagtaaaatccttatttgttgacttctatatgtatcatcaaaatggtagtttaaagaggaacttgttctaaaaagtaaccttataagacattcaaaagcattagactgcaattgagtgagtgtaaacaaagcagtataatgtgatgatcaagagtgcaggctttggacggtgacagactcaggtttgagttccagctgtcagtagctgagtgatcttgagtaatgcaaacttcagtttcatcagttcatcatctgtaaagtggagattacaatcatgtccattccctag

SEQ ID NO: 17626 - DNA, 1040 bp, Homo sapiens
aaatgagctgggggaagagggctgggtttgctaaagagggtggagtgctgggcattctagggtagtggttgggagagcaaaaaggagtttctaaataaggagaggaaaatgagcagaggatggagggaaagggttggaactgaggtgggggaatatttattagagaagtaaggaggcctgggtatagagatgggggtgggggaagacgaaaaataagggaagggagtaaaatgcaggaagtcgggggtgtaatgttggtttgcagtgtggaggataaattagggaagggaggagttgggatgtggcaaatgctgtatgatattggtcgggcctttgggaaaacagggacacatagctgcaactaattgcagtggtgggattgagggcagtgactggcgacagggagatggggaagtggatttttgagatttaaaagtttcaagacagaagagacgttatttccgaggaacatgaaagtggcccctgggaggtggtacagtagaaagcagagaattactgggttttgaattgaagctcctttgagaagatggagaagtggtggggaatcatgggcatagggacctaaacagagcagattctgattgaagacatgtgttagcattcagctgctgaattgatctttcacaagtgagtctaggattgtgaacctgtttctgcccttgtggaaacagccattaagaggttaaagaatattttttctgtgaaggaatttatgagaagtcagtactggagagtgaactataaattatttttgctaatctttcattgtttattgttaggccagaacaatttatgattactcttattagagaggctgcaatttaaattttaaaaaatcagtgatagagccagtggagttttttgagaaactgggtttaaaatgctgaatgttagagtttgtttcattattcctaaaacgaataaaggattgacaatatccatcagttaaatatgtgttcgtagtaccaaattttatgtgtgcttcatggccttggatatcactgcaggggtcaggaagg

SEQ ID NO: 17627 - DNA, 1053 bp, Homo sapiens
ccctctcccacacctccctcgccctcgcaaacccctactatagctctgccactggctccctgggcgatgagcaagttctatcccattggtggggaaagtcttttaaaggattaagtgaggtgaggatgtaaaagtgctttgaaagctaaaattgtgctgcagagggatatgacggtcaatcgttaattagcccttatctctcccaggctccccagtactccaggataccgggccagtcccagcaggttctctaagctcctcaaagttctgtagatcttaagtaagagatgcagaacagctcaggggctatgagcatgggctctgcagctagatgcctgtagttcaaatctgagctccaccctctccttagctgtgtgaacttgcgaaagttactttacctctctgtgcttctgttttcccattggtaaaaatggggagactacattttaggcatcctcccctacccctgccccagggttgttgcgagaattaaatgagacatatataaagcacttagcacaatgagaggcacaaagctcactccgtatctgtttgatgtttttaatgaattattctaaaactggcctgctcctcagctccacgtacggccttgttttctggaatcacatcagtttcttagccatgaccagggaggtcaggaccacatcctggcctcctggctggggccctttagtttctcctgcagtcagcagtctcactccctgccagtgggaaaagcagatagagagtgacagggatgggggcaggaagggggtctccaataaggtggcctttgaacagagaccccacagaagtgaggatacaagtcacatggctatctaggggaagagcattcccggctgagggtgcagccggtgccaaggtctcgaagaggaagtgtgcttggcatatgcaggttcagctaaggaagccagagcagctggagggcagtgaacaaggagaagagtagaggaaaggtcaaagagggagcagggagtcagattccgtcgagccatgcacagcatgcacggaatttggattcgttctcagtga

SEQ ID NO: 17628 - DNA, 1068 bp, Homo sapiens
ggcagttatgaagctcctcttagcttgacaacatcttgtcatcttcctccctttgggaaaccggtaagtgactatcattgctctgccactaggcagggacctatggccttgccgtccatctcctccctacattgctgccccgtgagccaactgtgctgcctatgagttgggcacagctctggggctaatcctctttatctccttatttgtggcttctctgagtctagaggagtctcagctttgaatagcagaaaactggaagtgacaacttcatccaaggcagctgctagcctaggaggccaggtaacccttggcctgctgcctccgccatggtcagcactgactgagtaccttaccttctttgtgttaggcactgctaagtgctgggcatccgataatctgcacagcatcctatgaaatagatactgttaatgcctgcagcattgctttcattaacttcagtaagctactaagctcagtaaagagaaccattggcaactgactgaggagaatggagagctatggtacttgctgtgagcttattaggagttgaggagaggtaaaggcatgagccagagtaatcccagcagaggtaagtcttgaactggatctccaagaaaaggcggttcagagtttggaaagtgaaaggctttctgggcaggggatgtagtttgagcataagcaggaaagagccttacaagtgcaggagaggatgagaccagccctgctggagtgaagcagacacgttggggaagaagagcagacaaggctgcagaggaactattaagtgttcatgggtcagcaaagcggtgttgtggcaacagtgttgtgtggagcaagatctgggtgaaccacttagtgggaggacccagcaatgatgtgaggttggggtttgggacaacaggagtgccaccctatagacctggcctgcagtggattttgtccccctctggagcctgggacttggtgagcagtgggtaagagatctgagaccaataggtgctacaggcaattgtctggtatagggtgcaagggattggcaagtatgtagctgatactgcttcttca

SEQ ID NO: 17629 - DNA, 1046 bp, Homo sapiens
aacttaggccaggcgcagtgactcacacctgtaatccctatacttcgggaggccaaggcgggcagatcacttgaggtcaggaggtcaaaaccagcctggccaacatggcgaaaccctgtctctactaaaaatataaaaattagccaggcatggtggcaggtgcctgtagtcccagctactcaggaggctgaggcaagagaaatgcttgaatctgggaggaggaggttgcagtgagctgagatcacaccactgcactccagcctgggcaacaagagcaagactccatctcaaaaaaaaaaaaaaaaaaaaaaaagatctgaagttcagaaaagggtcttagctgatgctagagatttaggagttgtcagcttgtagatggtgtaagagtagatgagatcatataaggagaaggtgtgaacagaaagggcctagggtgggattctggggaacgtcggcatgtaaggcacagttagaaggatgaagaagaaggcaggagaggtaagaaaccaagagggtagcgtgtaagaaccaaggaaatagtctttgaagaaaaaaggaacggccggcaatggtagtgctgagagatcaatcaaaattagagttgacaagtgcctgttggatttttcggtaaagaggaggatgtaggcaaccttgtgggagagtggtgtctggagtggggaggccacttccaaagagcagggcagatctgggttcactggggcaaggaaagcctcctttccctgagcagcactcacagatccaaagcctcacatgataggatgttgcttcccacagggccccttccctatttgcaaaatggaacctggtccttggcttgtgcttccagccatggtgtttgggagtgcttgccagaaaactgatattgcagataaatcctgtagctcctcactccagcctattttcattctctgggcctgataatgtgtttggatggaaggcatctcctgattctgaagtgatcttaattcaagcaggcttactccaagccagatgtaagatttccacctccctcatcctatttgagt

SEQ ID NO: 17630 - DNA, 2037 bp, Homo sapiens
gctaaattgctaagggagcttaagtttgtccccactctgtggtgacctggaacaagttgttacttggttcaccagtcactacttgagctctgcagagctgcagagcgtgccttagtcccggaagatgaagaggatgggccaggggtgatccatggtaaaatgttggcatttgcagaatcttggatagagtatacccggtttggacttggtttctgtagtcactttccctttctcttctccttttgaactgcagactctggcctggttgtcccaagtatttcctatgagctgcataaaaagctgttgtccgtggctgagaagcatgggctgacccttgagcggagactggagatgacaggtgtgtgtgccagtcagatggcactgaccctcctcggaggacctaacaggtaaatgtctataaactggcagggactcaatgtggagtaaggatgctctgcctggccaccaccacagtgcctcccatacacacatacgagttcattaggcagtttctgctcatctgatgggagtgtctctctgaagtcactttcctggatgctgtgaggtttctttgcccctcctcagacccatctcctagatgtcctcattattcttctggcaagctgccttttgactctctcctgatagcagccatcgggcctgagactcctgctaactatcagaagccttccttctaggaaccttcggagacctggcctttggcactcatcatttactttacgtggctgggatgcaaatcagtctccatacctgagagcttccagaaccacactgacaactgagtaggggagctggagtttggcaccttcccacctgccccttatgctcatatatcaagggcagtgccttattttatttgtagacagactgataccaggtgccagaccttctgctagacaccggggacacgaagaataaaatactgtgcctttcctctagtagcccaatgaggtctctagaaagtatagtgctgtagtagaggaaacaaaattctccagtaagccatattattgccccaggctggagaaaccagtcacccttctggagcagtggcatccaagctgagccctgacgaacaagtggtgattaacaggggcaagcaagaaagaagaaggcattctttttttttttttttttgagacaggttctcactctgtcacccaggctggagcacagtggcacaatctcagctcactgcaacttccacctcctgagcttgagcaattctcccacctcagcctcatgaagtagctgagactgcaggcatgtgccaccatgcacagctaattttttgtgtttctggtagagacagggtttcgccatgttgtccaggctggtcccaaactcttggcctcaggtaatctgcgtgcctctgcctcccaaagtgctgggattacaggtgtgagccattgcacctggccaagaagaaggtattctaagtacagggagtagcatgtgccaagggcagagagaatcgagagaccatggcacatggttgttggcaatccgtaagtcactatgtggctggaaagtagggcctcagtacagctgagtggtagggagctgctgaagacatttcagtagagctatgacatagttagtcttgtgttttaaaaagatgatttttagctacaatgaggacagtcaattcaatggaggcaagactgaaggcagtgagatcaggtagaaaactgcaaaacttagaaaactgagccagggcccaagtgatggtggcccaactagggaagcagggatcagaaaagtggacaaaccaggtttggtgaggcatgcctataatcccagttactccagaggctgcagtgggaggactgcttgagcccaggagttcgaggccagcctgggcaacgtagtgagactttgtctgtctcttttttttttttttgtctcttagaaagagaagtggacagatgggtgttgttgttgttgttgttgttgttgttgtttttaaggtaaattcagcagggcaaggtaattgaatggattttagaggtaatg

SEQ ID NO: 17631 - DNA, 1023 bp, Homo sapiens
attgaaaaaaatttcaaacttacagaaaaattgctagaatagtataatgaacaaccatatacccttcatttagattcaccagttaacattgtgacatatttgttttatgtaaaatacatacgagcacacacacatatttctgaaccatttgagatttagttgtactcatcattagatttcatccctaaatacttccacagcacataaattcagtgtgatatatattgctctacacaaccacactacaagattgctctcagcaaaatttaaattattacaaaaatactatctaatatactccgtatgcaaaacttcccaattatcccagtaatatcctttatagctgtatttttaatcatccattgcacattacattcagctgtcatatctcttctgtttcctttaaactagaacagttcctacaacttttgttgtcctttgtgatactgatattagtgaagaatctaggccaattgatttgcagaatgtcttagttttgatgtattgtttgtttccttttgatctgattcatgttaaacatgttttctaggattttggtagggctgtgtctttctcaaggcgtcacatcagggagtacgtcacatcagggagtacgtcacatcagggagtacattgtatccccttgtcccatcactggggctgtttgaccacttggtaaggtgttgaccaccagatttcttcctcgtaaagataatttttcccttcataattagtaggtttttgttgagcagttctttgcctcttaaagttcaaagcttgttccagtggagctttagtatgaaggaatgaggtccactgtggacatggggctggtctagttgtaagtggggaagggaagaggtggggagtcagatttatttatatatatatatatatatatgtacactttaagttctgagatacatgtgcagaatgtgcaggtttgttacataggtatacacacgtgccatggtggtttgctgcacccaacaacccgtcatctacattaggtatttctcctaa

SEQ ID NO: 17632 - DNA, 1026 bp, Homo sapiens
aggtattgaacctgtgaggcaggaagaatggcagcaagtcaagttatcatgagattgcacgaatttatagtgggccaagcctacatggttttgtgaccccccccccctttttttccctcctgcaatgctttgtgcctgagcccagagaaagcaaaggcaagagttgctacaatgagggatagggagatgtgggagttattggttattaagagctttaatgaggagttaaaagttatatagccaaagagaggctactaagctggtttccttatctataaagtgggctaatactgtggattaaatgagattatgtggaaaagtagctagcacaatacccaatctgtaattattattcagtaaatatttgacttcaaatgtgaatttgcaaaggccacctcagtaagattatttcaaagcatcagcatttatagaatacctactatgtgccagacactgttttaaatactctgggtaagtcatagttcatcaccttaggggcctctgagtataactgaaccaaatatgtaaatatactaataacagaagtgtagttggctgcagtggctcacacctgtaatcccaccactttgggaggctgaggcaggaggctggctcgcttgagcctggcctaagcaacataatgagaccccatctctacaaaaaaataaaaataaaaaattagccagggtgctaacacggtgaaaccccgtctctactaaaaataacaaaaaaaaaattagccgggcgtggtggcaggtgcctgtagtcccagctacttgggaggctgaggcaggagaatggcgtgaacctgggaggcggagcttgcagtgagctgagattgtgccactgcactccagcctgggcgacagagtgagactctgtctcaaaaaaaaaaaaaaaaaaaaaattagccagggtgtgatggtatgtgcctgtggtcccagctactcgggaggcacaggttgggggattgcttgaggccaggaattcaagaccagcctgggcaacatagcaagatcctatctc

SEQ ID NO: 17633 - DNA, 1040 bp, Homo sapiens
gttatgtttgtagagtcctacagttgagccagaaaatgatgaccagtgcccagcatcattaaggcagaattaaggcgtctcccactgtggaccctgttagtctttatagtggggcactttgtcaacatgctgtgaacgaactttacagctagtcatgtttgttttctttacttttctactttgcatttcaatagctcctcatcatgtggcatgatatgaagtgggtactatttattagcttttttttttttttttttgaaactgaacaaaagttttctttctatgctgcactctctcctcccaaataaaagttgcgtatctcttaacgcaaaacgcttgggaccagaagtgtttcagattttggattttttaaaaaggattttggagtatttctggaatacataccagttgagcatccctaatccagaaatccaaaatgctccaatcagcattttctttgaacatcacgttggcgctcagaaatttttggattttggatgtttggattagggatgctcagcttgtgcttttgaacattcatattggtgttcagtggttagcgcactgcttagggctaacaaatactgggctagtggttagagaagcaacttatgcttttctttttctttttctttacattttattttttatttatttatttattttttgagacggagtcttgctctgtcacccaggctggagtgcagtggcgccatctcggctcactgcaacctccacctcctggcttcaagcgaattctcctgcctcagcctctggagtagctgggattacaggtgcctgccaccacacctggctaatttttgtatttttagcagagacagggtttcaccatgttggccaggttggtctcgaactcctgagctcaggtgatccacccgccttggcctcccacagtgctgggattacaggtgttgagccactgcgccaggccagctcatgcttttcaaactttagttccaggataactggccttctaccagtgtcatttggcaagtctgacctgccttcagagtatttgg

SEQ ID NO: 17634 - DNA, 1073 bp, Homo sapiens
aggtcaggagatcgagaccatcctggctaacacggtgaaaccccatctccactaaaaatacaaaaaattagccgggcgcggtggcgggcacctgtagtcccagctactcaggaggctgaggcgggaggatggtgtgaacccaggaggcggagcttgcagtgagctgagatagtgccactgcagtccggcctgggcgaaagagcgagactccgtctcaaaaaaagaaaaaaaaaaaagaaatggagggagaaggaagacaaataagactaaatgaactttggtagcaagttcttgactgaatagtaattcacaacatctctgaattcagtagtcattacaattttaggaataatttattgggagaataacagtatcaatgaagcaagagtaaataagaagtatgtttaagaaaataccaaaaccattgcaccccaccagaatgagtaagttgaagagaacaatagtaccaagttttggcaagatgaggagcagaaagaactcacgtatggtgggttgtataaatgtagatggtaatacaaaatggtacaaccactttggaaaactgttcagtggttcctaataaagtcataaatataacatgacttcctgtgttatatgcccagtagaaatggatgtatttgtccatcgcagaaatatactgtatacagtttaagaatattatttgtaataagtcagaactagaaataacccaactatgtatcagcagtagaatggataaatacattgaggcatgcttacagaaaacagcacagctatgagaaagaataaacttctgatacatgcaacaatggggatgaatctcacaaatgtactttttttttttttttttttgagacagcatctcgctctgtcacccatactggagtgcagtagcaggatcttggctcactgcaacctccgcctccccagttcaagcgattcttgtgcctcagcctcctgagtagctgggattacaggcatgtgccaccacgcccagctaattttttgtatttttagtagagacagggttttgccatgttggctagattggtattgaactcttgacctcaagt

SEQ ID NO: 17635 - DNA, 1043 bp, Homo sapiens
tcactaaattgagtctgacccctaataggtcatgacgtatagtttgaaaaatattaaggccgggcactgtggctcacgccagtaatcccagcactttgggatgctgaggcgggtggatcacctgaggtcaggagttggagaccagtctgggcaacgtggtgaaaccccgtatgtactaaaaatacaaaacttagctgggtggtggtgggtgcctataatcccagctatttgggaggctgaggcaggagaaacgcttgaacctgggagggagaggttgcagtgagccaagatatgctactgcactccagcctgggcaacaagaactaaacttctcaaaaaaagaaaagaaaagaaaaatattagactagggccgagtgcagtggtgggaggattgcttaaggccagcctgggcaacatagcaagactctgtctaagaaaaacaacattagaaaatgtttaaaatccttgccatttgtgagattctgtaattaatacaaaatggaagatgtatcatttttcttttcttatccagagaagggcttactagagttctcctaaattcagccagaacaacaggacaggacatccaaattgtggctcaaaggagtgtagtgaccataatgatagtgtgtcagaattttagcaaggcatttatgaagtttttgtttttttttttgagatggagtctcactccattgcccaggttggacggagtgcagtggtgcaatttctgctcactgtaacctctgcctcctggttcaagcgattctcctgcctcagcctcccaagtacctgggactacaagcatgcaccaccacgcctggctaatttttgtattttcagtagagatggggtttcaccatgttggccgggctggtctcgaactcccgacctcaggtgatccactcacctcagcctcccaaagtgctgggattacaggtgtgagccaccgcgcctggtcttactgagtcttactataactgagtgggcgagatggaggaatttgccagattgtggtagttagatggagtcatgagtttgaa

SEQ ID NO: 17636 - DNA, 1677 bp, Homo sapiens
gcttagagccttggcacgcattgcagctgcctcctgcacagcctgaaattttatggtcctgtttatctcatacactcaacccttgctcaaggacgctgtgggagagatgagggggtaacccctctgtggggtgttcaggcttccatacatagaacataatataaggaccttgtagaacattccagagtcctgtaggtaggactcaagtgctgtgccaaggaaaagagcaggatctcaagggctggggcatccagagaagcttctgagaggtggggagacttgtgaaggggcagagggaaggagggtgggcactcgggtggggtggcaaactcctagaagtggtgtgatcttggtgcttatatggaaaacattagaccagccaggcaggaactggggttgtgcaggcttgaggaggcagatgtgagccggggaggcgagaggcaggcgggaatgggctctgaactgtctctcttcgtgggtcctgctcctcagctagcgccctgcaattcctgcatgaacggaatatctctcacctggatctgaagccacagaacattctactgagctccttggagaagccccacctaaaactggcaggtctgtgtctgaaacagcagggatgaggtttggagagtgcagaggcctccctctgcctgggctcactcagcagccctggttcttatggagccctctatagagtcctcaaagagtgacaggccgtgaagtctggggttgggccctgtcatcaaaaggtggaagctttctcaggctacccatgctcaagtccagcagcataatgggtggagttagggctcagtctgtggccagagttgggactcactgtgtgtccaggtttaggggtcaatctgggaacagtgccagggttcagcgtgtgacaagcatcagggatccctctgtgggcagggacaggacttggtctgtcatcagaattggggctcaagtctgtgactccatctgtggccacataggaggggtgtggtgggggagtaggaggtggtgacccttgataagatttggataattgacactggaggccagagactgtgatagaacctaagcctggggggacagtgagagggtgggggcttatgcaggtagctggtgtgatcaggtgggcttcctaggaaaaggtgcccaagggagctgggaaggatgggtaggttttataccccagaggcagatataggagggtgttccagcctaatgatgagcagaggcttggaaatagggttgatcctggcgggtctggagggtggagaggagcctggggtgaggctttacaagtcaggagctgaagcagctggaattcaagccctgctgcctctcctcttgcctgcagactttggtttcgcacaacacatgtccccgtgggatgagaagcacgtgctccgtggctcccccctctacatggcccccgagatggtgtgccagcggcagtatgacgcccgcgtggacctctggtccatgggggtcatcctgtatggtgagacctcttttccctgcttctcaccctgaggcctacagtttcctcaggcaaggcctctctgggccacttctgaagggttctgatgaaaactgactgctggcccagggcccctgctgaggggcgtcaggccaggcttgacccattccctcccagcctccgctctgcctccc

SEQ ID NO: 17637 - DNA, 1081 bp, Homo sapiens
ccatctgccttcacgtgtctcccctttccactcactgttagcaggcttgcactgttttccttctcacacatccaccaggctcttcaaatgaggcttgggtctgtgggtttcttattatagtttagtttcttgtgaggtctttttcccaaaggtcacaatcactgagcgctgccttgacccagtatggggaagaggtggagaagccaatgggggtagttttcccaactcaagcttagggatgaggggagaggacagcttagtcatggccaaggggtcaggaaggtgtgggggcagtggaagacaggttggcctctctaaggtggtctctggtacctaagacactctgtggggcggggactgcttctgggactccttgatggctgtccctgcctggggcaaggcctctctgcctgcctacccaggctgacactgtttctgtttgttgtgtctggctgtccctgtacctcccctgttctctccaggccgtggtgtctgcagcccaggcaggcctgctccggcagcaggaagaactggacaggaaagctgccgagctggaacgcaaggagcgggagctgcagaacactgtagccaacttgcatggtaagggaggctgctggggcctggggctgccctgcctggcatagaagagtgtcctgaaacctgtgcggagggcctcccagcattcaccctgagctgccttagagttttgtggggctcttctcatcacaggatgctggtcctgggaagagcagtaagttgcaagtcaggagacctgcagtgtagttgtaatggctgtagattacttctgcactccttcctagctctcaaattccttgattctttgatagcataggggctttggtcccacaattccttgctaatgatgatgaactgagttctcacacttatgggctgcttgttaataaaaataatcacttaggccatttagctgtctgtatttcccagtgcatttggggtcttttatctccatgtgagcttgttggtatctctttgggttccattatcctgttctgtcccactccatgctccatgcagactccaagccccgcttgctggagcc

SEQ ID NO: 17638 - DNA, 1023 bp, Homo sapiens
agctcactgcagcctccacctctcctgggttcaagcaattcttctgccttagcctcctgagtagctgggattgcaggaatgtgccaccacgcccggctaatttttgtatttttagtagagatggggtttcaccatgttggccagactggtctcaaacttctgacctctagtgatccacctgcctcaccctcccaaagtgctgggattacaggcgtgagccactgtgcctggcctcaactctattctttcccttccctttcctgccctgtagtctttccattcccaggccaacccagagagttgctgagcctgtgggattgatgtgaggaaggtctctgaagtccctcttgttcctcttctccatccccagctgctgtccctcaatttggtcctcacttcacccatgttgacagttgtgtcctagccagtcttcccgctgttgtcctaccatgctgttgcactcccttcactgctgatagaatgatcatgtcacccctgactgcaaatctctagttgttccccgttgcctgtagagcaacatccaaagtcccacaatctggccccaccctcttcagactggttccctgatactccagactcttctctccacacacccctccacagcctccataaccttctctcttctgaacacatgcaagctctttttaaagattctcggccaggtgcggtggctcaagcctgtaatcccagcactttgggaggccaaggcggacggatcacaaggtcaggagatcaagaccatcctggctaacacggtgaaaccctgtccctactaaaaatacaaaaaattagctgggcatggtggcacacacctgtaatcctagctactcaggaggctgaggcaggagaatcacttgaacctgggaagcggatgttgcagtgaactgagatcacgccactgcactccagcctggacgacagagtgagactccgtctcaaaaatatatacatatataaaataaataaataaataaagatcctgtggctttgcaagtgtggttc

SEQ ID NO: 17639 - DNA, 1029 bp, Homo sapiens
gcctcccaaagtgctaggattacaggcgtgagccactgtgcccagcctgtttgttttttcaaagattcacaaggcttggccaggcatggtggctcacacctataatctcagcaatttgggaggccaaggcaggtggatcacttgaggtcatgagtttgagaatggcctaggcaacatggcaaaaccccatctctacaacaaatacaaaaaattagctgggtgtggtggcatgcacctgtgggctcagctactcgggaggctgccacagggggatcacttgagcctgggaggtggaggttgcagtgagctgaggagtgcctttgcactccagcctgggtaatagagtgaaactctatctcaaaaaacaaacaaaccaaaataaagattcacaaggcctgttagtttgttaaaggctctgagaaatcctacaaaaagacattggctcagctttatttgacccagcatttctcaaggttattcgaccatggaatctgttttctgctcagtcgttatatcctttgaaactcccagtgcaccatttagttgacttcctcatccaaggttctttattaagtgcctgcttccaccccgcactgtgggcatgtgcttttatgacctcttccttgcgtgtggttatgatcgggatgattagaaaacttcctgcacagaaagagctgtgaatgggaagttaagatatgagtgtgccacagaggtttgcccacctcctaggaggaagcaggaaactgcaagccaagtgttgttgatttcacagcctccactggcacaccctaattcctctgttggttatggcagctgctttgtaccctctgagtatttcggtctctgctttggaatgatccagggtgtctgctcccaaaagtttctcattaagtcttgtcaggtgatgaaggggtggaaagctaaagggagtcattgtactgtccatttttcagcagtccactaaaaatcagaccacccaggcaagtgcctagggctgctttcccactcagcacttctgccagattatcc

SEQ ID NO: 17640 - DNA, 2524 bp, Homo sapiens
gttcgagaaattccgtttgctctattcttcctagctctaagatggtttgcaggcttgaccttcaagacagcataaagtgagtccttttgtccctcttcaggttgcacctgtctaactatgacagggatcatagcaggttgcttaatgatacagcaggatcctggcttccagaatccctggacctggggcatccccaactggtccaaccgtccgggtgagtttagtgattctggtttgcccttccctagttagagaaaaactgctctgacatgttcatatttatttatttgtatttccttggtctgggtgagtttcttcacccagtctttgagctaaagattaggtcgaaggtactggggctggccccagaagcctgcagtttttattattaccagcagagggagctacagggagcagtccggtgccttcctattgtttactttttaaacttttgagaagtagcaatggactcgtgagagtgggtatacagctgtgtgggctttgtcctagactgaggcttacagacaggaagggtaagagagacctaagccagctcctagacccttgcctgaggaaatcagtccaccagtgtagagggcctcccttcactccagcatggaccattctattgccagattcttctggtcacagcatgggccttactggatactcaggattgggctttaagcagacctctgggtgtgacacagcctctttcagcccccagcccaaacagcagaaataggcataatttctgctgtgacaccccctacccacaaattggagagtatatcttgctatactctataccaagcctctttctagaatttttccaacaggttttgttttgttttttggcttaactcagaaccatggtgagcgttctgctttgttttgttggagacagggtctctgtcacccaggctggagtgcagtggtgtaatcacagctcactgcagcctcaacctcccaggcccaagcagtcctcccacatggtgagctttgaatgggcatagacagggttcccagcccaatagtcgggattggggtataggttctacatgggaaagtatccagtctcttgctttactcagtgtcctgtgaccaccagaggcatgagagggacaacacactcttttcgctctaccacaaggggtgactagaagatgagcaagtctaataaaaagatacggccttatttgttatttgtctgacaaccatccttacgatggtaatcctgtgagtgcctgatggacatctatctttgtgtttttctcaaaccatggaaggttgagaggaatatacagtatctgggggctgacttactctactagctaggagcatcacagcagagagataggacagagaccagagtcatgccagcttggggtcttgggaagagaggcagatggttactctgttctggaatgggactctgcagctctatgcagtggccaacattctgagcactttgtgcaaatgcttgtagagctcaagaacatctccatccagaaccccttccccatctgcagagaccatgtccaggcctttcttgtgtctgcagaggtgaagtgcacatgtggaaagggatcaaatgtagcacagtgtaaagaaagacagcaacacaggtagagggacccagtgtgtgctgggaggtggctgtggaaggtaagtatagacctacatctctgttggggaggtggtcagggcagaatggcctgggtgtttagcagcttctaggggtgagggtggcaggaccccaaaaccaaggccctctgcatcgttgttgtaataatcagctctggcatattcagctgcaactgtccctgaagaagaggtttctgagctggctgaccccatgtaggagggtgttaccttgtagaaaaagctggagggacctggtgggacagtgcagtgaggcagggtagaaatggtcagttgtttagggccagtggccacataccaaaataccaccaatgtgcccagggccaaactgccttaattctgagtgctgtgtgttctgcaggtgacagtttcctgaggagaggggtgtatccaggcttacctcccagcaggagtggtaccatatggtgtttatgtactactctatagaactcttggcttgcacttctacagctctgtacatttataagaataaatgcaatcacactagttgagctgtgtctgtgttgcagtggattttaaaggccttggccaggcacaatggctcatgcttgtaatcccagcactttcagaggctgaggcaagcaaatcacaaggtcaggagtttgagaccaacctgaccttacctggaattgtagatcctgtcaccccgtctctactgaaaccccgtctctactaaaaatacaaaaacttagctgggtgtggtggcaggcgcctgtagtcccagctactcaggagctgaggcagaagaatcgcttgaacccagtgggcggaggttgcagtgagctatcgcgccactgcactccagcccgggagacagtgcgagactccgtctcaaaaa

SEQ ID NO: 17641 - DNA, 1055 bp, Homo sapiens
gttgggggtatttttggtggtggggtgggtatttatttgtcttaggttcctagtgaacataattttttttttttgaattgtaagttatttattttttgagacagggtctcattgtcatctaagctggagtgcagtggtgcgatcgcagctcactgcagctccacctcctgtcagtcagcctcaactgcctgggctcaggtgatcctaccacctcagactcccaagtagctgagaccacaggcacacaccaccatgcccagctactttttctattttttttgtggagacggggctttgccatgttgcccaggctgctcttgaactcctggcctcaagcgatccacttgtcttggcctctcaaagtgctgggatgacaggcgtgagccctagtgaacataatttcttaagtggaaaagggaacttcccacatccaggccaggatcattgagtacaactatcacaagaccacaatttcttcattaataatgactttatataatctctaagagctcttccaggccgggtgcggtggctcacacctgtaatcccagcactttgggaggccgaggagggcggatcacgaggtcaggagattgagaccatcctggctaatatggtgagaccccgtctctactaaaaatacaaaaaaaaattagccaggtgtggtggcgggcgcatgtagtcccagctactcaggaggctgaagcaggagaacggtgtgaacctgggaggtagggcatgcagtgagccaagatcgcgccactgcactccagcctgggcgacagagcaagactctgtctcaaaaaaaaaaaaaaaaaaaaagatctcttccagccccaaagttctatgatactagttaactaaaagaggggaaataggatattaattcaacaaatacttattactataaccttatgctaaaaagtgaataaggtctgcccttggggagtgtaaagtcaaatgagagaataaacactaaatccttgtaatgctgtataagggttgtgtaaataatagcatatatttcttgaacacttactatttgccaggtgtca

SEQ ID NO: 17642 - DNA, 1118 bp, Homo sapiens
ggcccactccaacctccgcctcccggttgaagagattctcgtgccttagcctcccgagtagctgggactgcaggcatgggccaccacaccaggctaattttttgtattttagtggagacggggtttcaccgtgttgcccagggtggtcttgaacttctatgctcaggcaatccattcgcctcggctttccaaagggctagcgttacaggcatgagtcaccgtgtccggcccaaaaaaaatttcttttgttaaatggcagctactggacacttttctgattgggaaggaagtaccagtgtataaacaacaaaaaagccacaaagctagtcgcttgtgggttgacagtaggcaggattaagtaagagcagtaaagggtacagagagacagtgatttccctggttgtagcactaagggttatttttaaaagatttctactttttctttattctttcctggctaattctttgtgttttctcttacagatgggcttccccaaggatttattgacattgctacttgagtgtgaacagttacctggaaatactgatgataacatattaccttatttgaacaagttttcctttattgagtaccaagccatgtaatggtaacttggactttaataaaagggaaatgagtttgaactgaaattaggtatttgtttcatgtgtttgcattaataagcagaaaattaagtgctgtattggtttcatggttttgctgccctcttacatgctgagagaactgtgttaattctctggaaaccatctgacatgaaaatcagcttcattaatatgtttgggtgccctagcttgtaaattagctgaaggctagaagtcatttatatagaattttcttgttgacaccctaggcttaggggactggttgtctgtggggatagatcaaattgtgtacctttccaaaacaggttttaatgatgtttaaaagtggtcactgagatagtcttgaggatgtgctatgcagtagccaagccctcttacggtgtgttcctctcttagtgcccctttcctttcctacctgttcttcccttgcagtggtgtattagccttggacattaaaacatttgctttgtaaatttggaggcattctgattaaa

SEQ ID NO: 17643 - DNA, 1083 bp, Homo sapiens
gcttgctgaccggtacaggatctctgcccgcagatagttgccaatgccattgaagaacctctggtccaggagggcctcgcagatgggccggtcaaaggccttatccgctaggtttcgtagcacattctccctggaggaacacggtctgggtgcgtaagacccatccccaccctccatgggatggggagaggggctcagagaacctgtttctgggtgcaaggggaaggaaactgggagttacagttcctcttctccctgcccccgttttcctatctgttaaatgggaacatcaagggatttaaattcattgtgaaaggacggccaggtgcagtggctcatgcctgtaatctcagcactttgggaggccgaggcgggcagatcacttgaggtcaggaggtcgagaccagcctggccaacatggtgaaaccctgtctctactaaaaattcaaaattagccaggcatgatggtgggtgcctgtaatcccagctacttgggaggcctgaagcagcagaatctctggaacctgggaggtggaggttgcagtgagctgagatcgcagcattgcactccagcctgggccacagagcgagactccatctcaaaaaataaaaacaaaattaaaaataaattcattgtgaaaggtgaaaaatactgatctaaagtaacttgaggctggtgtggtggctcacacctgtaatcccagcattctgggaagctgaagcaggaggatcacttcagcccaggagaccagcctgggcaacaaggaagaccccatctctaccaaaaatttaagaagtagccaggggcttagtgatgcactcctgtggttccagttaatcaggaggttgaggtgagagaatcacctgagccctggaggttaaggctgcaatgagctgtgatggcgccactgtactctagcctaggcaacagagcgagaccctgtctcaaaaaaaaaaaaaaaaaaagcaacatgaggttgtatatgaggttgtgtgtttatcacctcagactcctcaggacatgagaacagtgtggccacaggacctcaagtgtgtttgcagtctggagctccctgtatagca

SEQ ID NO: 17644 - DNA, 1225 bp, Homo sapiens
tcccagctacttgggaggctgaggcaggagaatggcgtgaatctgggaggcagagcttgcagtgagccaagatcgtgccactgcactccagcctgggcgacagagcgagactctgtctcaaaaaaaaaaaaaaaaaaaatacaaaaattggccaggcgcagtgttctcaggcctataatcccagcactttggaaggccgaggtgggcggatcacgaggtcaagagatcgagaccatcatagacaacatggtgaacccccatctctactaaaaatacagaaaaattagccaggcgtggtggcacatgtcctgttatcccagctactcgggaggctgaggcaggagaatcgcttgaaccctttaggcggaggttgcagtgagctgagattgtgccactgcactccagcctggcaacagagtgagactccatctcaaaaaaaaaaaaaaagccgggcgtggtggcacatgtcctgttatcccagctacttgggaggctgaggcaggagaatcacttgaatcctggagggcggaggttgcagtgagccgagatcaagccactgcactccagcctgggtgacagactgagatcctgtgtgaaaaaaacaaagttttacatttaatttgatactcatgatcattcgatggggtgagtactattatttattcccgtttcacagataaggaaactgaggcttaggcaggttgggtggcatgcccagggccccgtacagtgggagctggagttcagttgtgtggttctagagcttgtgctcggcctagtgacaggagctctggagtctgggagcacaaagaggggcacagggccaccaagtgggtcttggatctgccctccaggtgtgggcccatcgctggatggatctgtcagaacacggctttgggctggccctgctcaacgactgcaagtatggcgcgtcagtgcgaggcagcatcctcagcctctcgctgtaagtggggtacccaccaggcctgggagctggcatggagaaatgggtcttcccgaccacaactccaacagcttcagcgtggcccctacgcgccctcctcaccccagcttgcgggcgcctaaagccccggacgctactgctgacacggggcgccacgagttcacctatgcactgatgccgcacaagggtgagtgctggggacggtggggccttcctgcagccctagacacctctctgcccttccctgagcccaaaccccag

SEQ ID NO: 17645 - DNA, 1111 bp, Homo sapiens
tttaggagatggatagaaacataaatgcagtgcaattgggaattcctggagtggggtgatcctgaactttaaaaatagtaaaatgagctcttatgtgaacttaatcaggccgggcacagtggctcatgcctgtaatcccagcactttgggaggctgaggcgggcagatcacctgaggtcaggagttagagaccagcccagccaacatgacgaaaccccgtctttactaaaaatacaaaaattagccaggcgtggtggtgtgcacctgtagtcccagctactcggcagaatgaggtgggagaatggcttgaacctgggaggtggaggatgcagtgagctgagaacatgccactgcactccagtctgggtgacagagcaagattccgtctcaaaatcaataaaataaataaacttaatcctccatattttgctgatgttactttgtcaccctccatacccccaccccagaagtaaagtaaatcacagatctcatatcatatcctttatatagatactaatccagaattttgaaagatagtcccactgggcacagtggctcacgcctgtaatcccatcactttgggaggctgaggtggacagataacttgaggccagaagttcgaaaccagcctggccgacatggtgaaacctcatctctactaaaaatacaaaattagcctggcatggtggtgcacttcttaatcccagctactcaggaggctgaagcataagaatggcttgaacccgggagacggaggttacaatgagccaagattgctccactgcactccagcctgggtgacagagcaagaccctgccaaaaaaaagaaagaaagatggttccaattctgtcctactctccctgtaagtcatcagtgtgtagaaggtacctgtattttgacatcaaaccacgtctctgtcattacctatttgtttctggaagagggacaaaaattattgttatagtcaggtcctaagttttgttttgagacagagtctcactctgttgcccaggctggagtgcagtagtacgatctcggctcactgcaacctttgcctcacgggttcaagtgattctcttgccttagcatcccaagggctgggattacagg

SEQ ID NO: 17646 - DNA, 1025 bp, Homo sapiens
ccagttttatatgcatatacaagctcatctatatcaacctgtctagctatctaaatttacttttttttttgagacagagtcacactctcgcccaggctggaaggctgtggcatgatctcagctcactgcacccttcacctcctgggctcaagcaatcctagcacctcagtctcccaagtagttgggactacaggtgcatgccaccacacctggctaatttttgtattttttctatagagacagagtttcaccatgtttcccaggctggtcttgaactcttggactcaagtgatctgcccgactcggcctcccaaactgctaggattacaggcatgagccacctcgtccgccctttctgcttttctttttgtacaatgtggatcatacattacatactattgtgctgtttgctcttttcatttaatatatagtggatatctttctacttcagcatataactggtctggggaggccttcaacctcatttgttagtgaccttaaaaatgtacggctggtaatgggaatataaactgacgtaatcttttttgagagcaatttggcagtttgtgtcagatggttttgttagtttttgacctggcaattccatttctaggaatttagtataaaaatataaagaagaggaaatgcagctgaagtaggaaatggtgattccttaggtgtcactcttcctcaggagtccccttgaggctgtctaatcccttcctgtggggctggggcagcagtcagaagactgccaacagatggcatcttttaggacttggaagaaaaaaaagttgcttgtttaccttgggtgattactttcattatctaaacaggttaatgactgttttctacatttgggatagttaaatttcttccgaatggaaactataatgtgtttgtataagtcagtctagtgaaagcctgtaaaccctgtaaaaaacatgcatgttggaatacagaagctcagaatactagcccatctttgaggtacattagagcttttagaattgtctaaatagttt

SEQ ID NO: 17647 - DNA, 1919 bp, Homo sapiens
ttgttatggactctgggggcgggggcaacaccggacttgcgggaggggcggccgggggcgggagaggccaccggaaagagcccctgcgcctcgccgctagccctgcgagctgccgggtctccaaactccctggccgtggcggtcgagtcagcattcggtgccggaacccgtcaggccgcgacccagcaaggagctcgcatcggtggtgcggaaaacccccagaaactcggcggcttcgtccgcggccccggctgatccccttgcaaacatggagctgcctgcttccccgcccaccccaaggcggcggcggcgactgctgctctcttcccctcccccgaccgtgccgccgccgggctcccccttcccgcgaggtgctgctgcggaccgctcggcgcggatggggcgggggcgggggcgcgggcgtgtgcgcgcccacgagggggtggcctgaaaggggcagtgaaggtcggaaactgggaaaacagtctccacgctcggaatcgggaaaaggaaatgcatcagcgggcggggaggggcgcggggggcgcgcctgtcagccgggatggcggccgcgggcgggtaggcggggcgccggcgggaaccgtcccggccgggcggggcgacgccgggagaggcggcgcaggggcccagtccaccgagcgccgggcggcccttgcctgcactcctcggcccagactgtttactatctactccgccggcggcttgtgcaacccgcctgcaggggagctgaggggcggacccctttcctctctcccacccacctccggctctcccggaggccccgccttctcttgtcttccactggctaggcgagactccctttttttctccttcttggatgtggattggatgacattctcccgagctccgcctatcgggaggccgggctggagtttaagttgctaggatttttttttcgcggagggaggagggacggttcttgcggatgacgtgaggcgcaaggtcccgcccccgcctctgattggtggggcgggtagcccggcctcctccggcggagagagctgggaggggaagtccacccttgctccccgcctccctccgctcttgagcgcgctccgcacatgtgtgaggcccgcctagctccttcgaactgccctcccgcccggaagtcctaggctcggcgcccttggcgaggggggcggggagagccgagaagccacacaaaggttccaccgaggctcgagacctagtagccttcggggtgaagccaggggattacagtgcggagtggatttcgggagcgaaactccggaggttctgctgggtttgagatctgcctttcggggccggggccaagtactaaagttctaaccctgtcgcttggctatttccgtgccccttgacttccctgagcttaagctcgagaactctgcagacgctgcaagtgtctgttctttcctaggcatggcagcggctgtccttagttggctgtatctgagactctgacaacctagtgccctggcctggggcccttaggcgagatcttagcgcaggtggtaccctgtgttcacgggaagtcgtgggcggcctaatgctggcttgggttctgagtagttcttgataccatggtgggaatgccctgtggtactcagtctagtggtggaaggcggcgcaaagttaaaagtagccgtgggtcagttctgctggagtgccgcttcctcctaacctccgagcagtttggccctggggtcgcttcgttggtctgacttatttttagagctctgtcctggggcagggcttggctactggcgaggctgctcccacctgtcggctacccttggagttcacaattcgctgctgtggtttcgcggctcgaagccatcgctggagtcaggcccacctgctgccagagctcgttcctggccgtttccgctgga

SEQ ID NO: 17648 - DNA, 1035 bp, Homo sapiens
ccagtcctttctgtcattctgtgtgtgtgtgtgtgtgcacttatgtgtatgggtccatatgtacgtgtgtatataatatatattgtatgtgataatatgatcgtattctataaatacatatacacacgatactcctttccagaagttcctggggctccgtgttgcagttcaggactccttgcttcttggaccctactatttatcctggactagcttgggttggtgatcatgtctcctcttgtcaggctacagagtggtggaagaggacacacacacatctcctccatgttcctgccacagggccccttccttaagtaatgacttatctccttccagttgccacctgttggagccaagaatgtattagtttgtggtgacactgggttagctcagcatggatttcccttatccgatgatttttctacatttacttggccaatttggggaacagacctccactgtgattccatactctctctttgctttcactatcccagggatgggaggcggagggtagagatgaactcactgagcagccagagccaaatgcaatcggtacgaatcttagaaggaaggagggggagcccaggtatgagaaagaaaaaaccactaagaaaatacctccctgggaggatgagctggggccctttttcttttgctggatggttcctttatgcagcttggccctgtctaccgagatgcccatctcttcctgcctgctagcctgctagaccctcaaactgggtgggttctgtgtcaataaaaagcttcaccccctggctgagtgaggtggtcccctgcaatcactgtttgtcccctacccacccaacctgtccctgcctgctcccagcccactcatccttatgtgctagggataaatcaagagtcctcagcactccacattcccaaaaaatcccaggaactcctaaaccttcccctgtgacagaagatgaggttggcagctgatcagacctcaataattttatactgtaataagctctttgaatgtgtatattattattttttacaatcatt

SEQ ID NO: 17649 - DNA, 1030 bp, Homo sapiens
aaaaagagataagctctcattacatttcccagactgctcacgaactcctggcctcaagcaatcctcctgcctcccaaagtgctgggactacaggtgtgagccaccatgcctggtctccctctctcttttgaatggagatatgtttacttttagaagtagtatgtacttaccacaaaaaatgttaaatgatatggaactgtatgggctagaaattgaaaagcttccatgtctccacccctaagagtaattgacacccctttagcatggtcagattttgtacatacatactgtccccactttttctttattcttgcttgtttgtttcgtttccttcaggtctccaggaaacctagagaaaaaccgttatggggatgtaccctgcctggaccaaactagagtgaagctaacaaagcgaagtggccatactcaggtagacagataaatgtaatctttttaggtgcactgggggaaatagagcttcttccaaagtgaagcttactaatacttcggtagaatgaaagtagactccgaggccagagagattaggtttgagtttatattttgctacatactagtctgtgaccataggcaagtcctcaaatgcccatctcacagtattgagtggaaattaaatgaaattctttatgtgaatgctgatagtgcaaggtctgttgtattgtaggtgcttcatagatgttaaattatttatcattttactccttagttgtaaagtcatggtcatatagtgcaattcctttggtgagtatatatgcatcaatacaaagcaactttgattataagtgacctctgatttctccatctgtatctgaggaaattgtggacaacttatgtatacataaatgtctagggatagagatgaaatggtcaaatgactatattatttaatatattaatttgattatatctacatgttaaaagcctcatatgtaatctattaacagagatatttaatgaacattttattcaaacactttacatacacctttaactttagtgtctttgtcacatt

SEQ ID NO: 17650 - DNA, 1059 bp, Homo sapiens
gtgtaagggctttccttaattacattgagatccttggcttttagttcacatttatggtccttaaaagctgcatggttacaaaagcagacagtgatgaacaaaaacaaaaacaagctgcatggaagctcgttttgcatggatgagcttcagattataatgatcagacaactagctttttgttgggtattctccaaatgacagaattctttcacctgatgctgtttactttatccagtgaagagttctcctgtcctttggatccgctgaggggatccaaacttggatatgagtgtaggtcaggacaatgagaatgggtcagggattttcactacataacattcagattttcattttattcccatttttagctctgttcctcaccttgctttccatggtaagggagttctaagggtgtgccatcttgtctctctataggtacctcccttggtcctagcttctgtgtctggccacgtcagccaaaatcctcctatctgctttttctctgtcaaaatgagttgaacactctttgtgtgctgatgtctccactgtcactttttgggtttgtagtgaatactcctttttcatcattttagtgaagctactggatgaatggagtgcagtcaatatgtgttatcaacctaccatgttaaactggcatttaaggtcaggctcggtgactcacacctataatcccagcactttgggaggctgaggcgggaggattgcttgagcccaggagtttgagaccagcctgggcaatgtggcaaaaccctttctctacaaaaaatttaaaaattagctgggcgtggtggtgtgcatctgggactgagcccagggagattaaggctgcaagtgagctgtgattgtgccactggactccagcctgggcgaccctggagacctttgagaccctgtcccaaaaagaaaatgaaattggaattgaagagatttggtttgaacatcttttgacaaataagtagtagaaatttttatctgcagctggagttttttggtggtataccccatttctctccccttctctccctctctctcttttta

SEQ ID NO: 17651 - DNA, 1050 bp, Homo sapiens
gtgccagctggagagatcttttctaaggtaactctttgagaggaatccataggcaagttcttgcacttgaattataggaattatacatgcatgtataaactcaaaatatattaagcactttttgtagtcgaagcactggttcctgataattaaaaattaagtgagacagtctaccctcaaggagctcatggtcttgatagggaacacagagatacacataggaggactttggctctgcaggaacgcagaggagcatatggcctcaggcagtcaggaaagacttcacagaagaggtgagctgtgctggtccatgaagaggcagaggaggaaaggaaggcattccaagaagaggcgacagcaaaagagatgagcttttaggaggaagagaatccccattccacagagatcctaaggagaaccagttaagctaattagttccagcatggctatgtccaagcagagagcagaattaagttttatggttactacaaaaaattagctgggcgtggttgtgtgcatctgtattcccagctacttgaggggctgaggtggaaggatcacttgagcccaggaggttgaggctgcagtgagccttcatcacgccactacactccaggctgggtgaaaaagtgagaccctgtctcaaaaaaaaagtgttatctcacatttttcctgggctaccctgcctctgggtgtcttgctttcatagaatcctatctttgtgaacagttataccaagctgagtaaaatacaagctaacaggccttagaattggttgtctgagtatggggttgacaaaaataactactacctatgcattcttagtggccaaaaaaagagtaccagcatgcagcgatgctgggaagccttgttaataatataaagcttttgttcactacatcgtcctttcagaagatgtataacagtgtccctaattccaggagtgaattttatatacattctgggagttcacacttttatctggcaaattcataggacttaaatctcaggcagatgaaatgtagtctactacttttacaagtatacctt

SEQ ID NO: 17652 - DNA, 1024 bp, Homo sapiens
gtctcactgtgtcacccaggctggagtgcaatggcatgatctcggctcactgcaacctcagcctcctggattcaagcaattctcttgcctcagcctcctgagtagttgggattacaggcgcccaccaccatgcccagctaagttttgtatttttagtagagacggagttttgccatattggtcaggctggtctcgaattcctgacctcaggtgatccgcctgccttggcctcccaaagtgctgggattacaggtgtgagccaccatgcctggcctgcaatcactagtatttctaaaagaaaattgtaaaagttcctttgttcttcatcttctgtctgccctctaaatgttaataatattgagacttcaataattaattcattcattcatcatagatatttattaagtaagtgctttgtgccaggcacagtgctaggaactaggtgaataaaatagatatgatccctgtcttcagggaacttacctccctgttgctagattttttttcctttcagtctgacttccccactgcttatagttatttttttgaggtgggagaggggaaccaaactcatcatctcatccctttgcttaaagatctctattgaatcttttatgtttataggatcatgtctggaatttgaagtacagcatacaagggccttcccagtctggttcagcccccctgttcacacatctcccaccattctccctcatacacattggacacactagctatatgatatccccaataagccctgttctttcatgaccctgatttgaaacattttgttctctgactagaatacttttctctgcctgacagattcctactcatccttcaaggcactcctaaaaaaattttttttatatccatagagagagtttgaatcccatagcattctgttcatagaaccttcctagaatttattacattatgtggtaaagatgtatttatacatctgtctccatagttaaatgattgtaaactgcttggaatagggtctttatgtctctatgttgtg

SEQ ID NO: 17653 - DNA, 1384 bp, Homo sapiens
tgtctcccagctacctagttctcctctgagacagctgatgctaccagtttcttatttattcttccagagtaattttgtgcatagatcaacaaacaaatgacatatatattacccaataagatgaatgatatgtgtcttgtatgtctcatgcccatttagtgaagtggaaagactataaggatttgaaaagacttggattcagtgctcaaaacctcagctctgccatttattggttgagtaaccttggacagtttgcttcggctctgtgagcctttgatttctttatgcggttaataatacctagcttgtcagtgttgagtatgatgtagtatggttccttctctggtatatcttaaatgcttcacacatggttactactactgtgatttcttgcaggactttgctctttggtctgtgtgaactgggaggggcaaaatcttgctctagaaaaatgaagggcagccataaaaaatgatgagttcatgtcctttgtagggacatggatgaaactggaaaacatcattctcagcaaagtattgcaaggacaaaaaacgaaacactgcatgttctcactcataggtgggaattgaacagtgagaacacatggacacaggaaggggaacattacacaccggggactgtcgtggggtggggggaggggggagggatagcattaggagatatacctaatgctaaatgacgagttaatgggtgcagcacatcaacatggcacatgtatacatatgtaacaaacctgcacattgtgcacatgtacccgaaaacttaaaagtataattaaaaaaaaaaagccaaaaaaaaaatgaagggattgaattgccttctttaatatgtgactaatgctgtcttatgtgtacaaaggaaccatgagccaaaggagacagaaatagcatttgaaaaggaatagaacattttctgctcatcaggtattggagacaaactattcctgatctggggctgtcacacttggctggtggagtgctgataaaccttagcccttcacttctgctggtaggaagtcattaacactgaggagcttttcgtgtttaacagttcagttaactctggcccctcagtgttgcctgaagctttggactcagatgggaaacttcacttggtcaaccctggtttcctgttgatccgttcccagtgggatattaatcctttaatagcagttagctttttttcttcttgggttcttgcataatgcttgatgtggtagatggaagagtcccatggtttcagaaccatcctatttggtttcattaggcagatgggtgttaggcctttcttcatggttatttggccttaccctttctgatgagatttgtagggctttgagtttgaagtgcacatagtcccttaa

SEQ ID NO: 17654 - DNA, 1008 bp, Homo sapiens
tgctctgtcgcccaggctagagtgcagtggcatgatctcggctcactgcaacttctgcctcccaggttgaagcgattctcctgcctcagcctcctgagtagctgggagtacaggcatgtgccaccatgcctggcttattttttatgcttttagtagagatggggtttcaccatgttagccaggctggtcttgaactcctgacctcgtgatctgcccgcctcggcctcccaaagtactgggattacaggcgtgaggcactgcgcctggctgaagttccctatttctatacaccattatcaccctgacaattttgggatctgagtcaagaaaacaatctatattttctgttattgagaagtttgaaggggtctcccagtagctgtatcatgtccattactctcttttatcctcattcagaaattttctactgtggtttgtggatttctccagggaatatcattttgggatgtgctgtcattccacttcccctcttgagatctgaattacttacttttgtttgtaaaagacaaaaataaataagtaaaaataataaagatttgaattccatttgcccattagttggtgtattgtgttcacagttctgccagactcagatttttatgggtagagaccatgtcttacttattttacaaaatccataaatttactttaatctattttttcagacagaatcttgctctgtcacccaggctggagtgcagtgatgtgatcttggctcactgcatcctcccatccctggctcaagcaattctcgtgcctcagcttcccaagtagctgggactacaggcgtgcgccaccacacccagctaatttttgtatttttagtagagacggggtttcgccatgttggccaggctgttgtcatgatgtcgaactcctgatctcaagtgattccacctgcctccgcctcccaaagtgctgggattacaggcatgagccaccgcgcctggccataaatttattttaaattattttattttgtatatc

SEQ ID NO: 17655 - DNA, 1035 bp, Homo sapiens
cacgaaatcaggagttcaagaccaacctggccaacatggcaaaaccctatctctattaaaagtgcaaaaattagctgggcatggtggtgggcgcctgtaatcccagctacttgggaggctgaggcaggagaatagcttgaacctgggaggtggaggttgcagtgagccgagatcgtcccattgcactctagcctgggtgacaagagtgagattccatctcaaaaaaaaaaaaagaagaagtttatattatgatattttaatttagttaaatctgcattttgaaagcactgtaatacagtggttataatgtggattctctagagtcagaaaacctgtgttctgattcaggctctaccacttttcttgttctgggactttggacaagttacctaacagttcgaaatctgttttctcaactgtaatatagggataataatagtatcaatctttaagggctattgagagaatttgataatctatctaaatcttagtctctgacttgtgattagaactctgtacccagtaggggccaggcatggtggcttacacctgtaatcccagcactttgggaggctgaggcaagtggatcacttgagatcaggagttcgacaatagcctggctaatatggtgaaaccccatctctgctaaaaatacaaaaattagccgggtgtggtggcgcatgcctgtaatcccagctactcaggaggctgaggcaggagaattgcttgaacccaggaggccgaggttgcagtgagccaagattgagtcactgcactccagcctgggtgacagagcgaggcttcgtctcaaaaaaaaaaaaaaagaaccctatatccagtaaatattagctattgttaaggtctggtgttacttaatgcagtgtagttaagttttacacaatgccttcaaggatagccagttatttgatcatgcgagacagcataggcaggtttccttttttggatgagaaaatgtatggcacagaggttttttttgtcttgttttgttttttgttttgttttgtctgccaccac

SEQ ID NO: 17656 - DNA, 1039 bp, Homo sapiens
aaagtaattttttttttttactctcactctgtcacccaggctggagtgcagtggtgtgatctcagctcactgcaacctcagactcctgagttcaagcgattctcctgtctcagcctcctgagtagctgggattacaggcacgagccaccatgcctggctactttttgtatttttagtagagacggcgtttcaccatgttggtcaggctggtcttgaactcctgaccttgtgatccacctgccttggcctcccaaagtgctgggattacaggtgtgagccaccgcgcctggctttaaagtaattaacaacaacagcaacaaaatatagatgggtgtctcactgtgttgcccaggctggtctcgtgctcctgggctcaagcaatcctcctcttttggcctcccagagtgctaggattacaggtgtgagcctctgcacccagccaggaagttatttttactgctcttttatactttctatattttcctgatttttttcttggaatcatgaaggaaaagagttactgagagaaaggcctgaagacttaaatgtaatatatgaggacaattaaacagttttatttgggaatgaccatttgcctcactaaggaggctctagctcttccatgccttgaaaaccccaaaaatgaagaaaaaatggtatttctggctaggttagggacttagaagtggtgtagccagcaagattaaaatatacaagattttccacatacttttgttttcaaaaataacctttctagattaatttctaaatgctctagagaaaccattagacatttccggaaactgaatgccagtgtgtgccattttgtttatgggtaaaacaacgttattatggaattaagttatcagataaatttttttttttttttttgagatggagtcttgctctgttgcccaggctggagtgcagtggcactatctcagctcactgcaacctccgcctcccagattcaagcaattctcctgcctcagcctcctgagtagctgggattacaggcacatgccaccatgcccagcta

SEQ ID NO: 17657 - DNA, 1022 bp, Homo sapiens
ctcagcctcccgagtagctgggactacaggcgcccgctaccacgcctggctaattttttttgtatttttagtagagacggggtttcactgtgttagccaggatggtctcaatcttctgacctcctgatctacccgcctcagcctccagaagtgctgggattacaggcgtgagccaccgcacctggccaatgtggtgtcatttttatttttccccttcaagtgtttctcttttttaaaattattgtttttggccaggcatggtagcttaagcctgtaattccaacactttgggaggctgaggcaggaggatcgattgagcccaggaatttgaggttacaaagtttacaaagctatgattttgctgctgcactccagcctgggtgacaaagtgagaccttatctctattaaaaaaaaaaaaagacataatgtacataataattatacatattgtgatgtttcagtacatgtatacctccaaatgtttctgagtgttgccctgaagtgtctctgttcccctgataatcaccacacagtgttattttttatcaattctttatcgtgttaatgtcaactgaggattttttttagatcataagcagaaatatagtttgttcattcaaactatatttgaattatctgttggtatgtgccaggtccttgtatagcaaggttggagctctctatccttgaggaattgctttctagttctttgaaggcagttattaaactatagagtacctgtcaaggaggaggacttgttacgtgcaatgaggacagggactcgaacttctgaattcttagtatattttggagggttcaaaatatgtttgctgacacatagaatcaaccttagtgcccatcagcagttgactgcataaagaaaatgtggtacatatacaccaaccatggaatactaccgagccataaaaaagatcatatctttctcagcaaggatagagttggagaccattatgctaagcaaactaatgcaagaacagaaaaccaaataccagccaggggt

SEQ ID NO: 17658 - DNA, 1076 bp, Homo sapiens
agtaatatacatagcagagtactgaggctaccttagctcattttttactgttaagactttttgcatcatccattggttcattggttcatttcttctttctaggttacacattacctttaggtgcactggtggtggtggtctgcttctgctgctgcttttcagataaaatattaaaaggtcatctgatgacctaaaaatgattcgcaaatgagtgcaaagaatgatagtttgtattatcttccatatcttatttaaacagcctttatgaagaaaattatcattccattgtttatctctggttccctatcagtatgatcctccccccagaacatttgtcaatatctagaaatttctttagttgtcatgactgtgggaggtggtactggcatctagtggatagaggtcaggaatgctgctaaacatcctctaatgcataggacagctccctacagcagagaattatctggtcaaaatgtcagtagtgccagagttgagaaaccatggtttatctctgaaaaattttgtagttaggaacagtttgaagttttcactttaaagttaaagataggtctttgctcaacacatttagtgtttatgaaaatatgtgtcaccaaatactgatttcagcaattgacttctcatactgaaaagctctagtctaaaaccaattgttttatagcataaccatcataggggtaaaatgagccatttccacaccctttgcaggggttttcagaggtggagggattttatttagcttttaaaaaattattattattattattattattattattattattattatatattttttgagacggagtctttttctgtcgcccaggctggagtgcagtggtagaatctcggctcactgcaacctctgcctcccgggttcaagcagttctcctgccttagtctcctgagtagctgggattacaggcacgtgccaccacgccagctaatttttgtatttttagtagagacggggtttcaccatgttggtcaggctggtctcgaactcctgacctcgtgatctgcccgcctcaggctcccaaagtgccgggattacagtc

SEQ ID NO: 17659 - DNA, 1067 bp, Homo sapiens
tcttggactttagttttgtgaatattaagtggcctggaggttttctctaaggaacccaacctagtacttatgaatgaattgaaaagaccctcctttagaaaggagctgaactgtttttttttttttttttttgagatggagtttcactcttgtcactatctccgctcactgcaacctccgcctcctgggttcaagcgattttccagcctcagcctcccaagtagctgggattacaggtgcccgccaccacgcccagctaatttttgtattttttgtagagatggggtttcagcttattggccaggctgctcttgaactcctgacctcaggtgatcagcccgcctcggcctctcaaagtgctgggattacaggcgtgagccaccatgcctggccaggagctaaactgttttaaagaggtaaaagttaagactcattgtgagtatattttagtttcattttctgacttttatgcctttattgtcttggaaaagacatagtaattttggagtacttaaactttattttctaaatattaagccccattttacggcagtgtggctggtccattgcagtgccaagattagaagtcatagaacctaaccctgattatttgttcagatacaacctctagtgtaatatcagccatttcactgcttctgtctaccatcctgccttggtatatcagacaattctcgtactttctttttcctaatcaattattttaacattttccccctaagcacacctccatgcgagatcttggttgctcttcctgaccactaaaataaccactgttttctattcctattcttctagaataagggaagatgttcctagaaaaggtagtttagcctacacttctcagtgctggagggcctggcatcagcccttttatatctgattttgaaaaggccccttaggaacctaaccgagttagcttcttaagcgtttggttcactttttaaaatttttttagtaagagacagggtcttgttctgttgcccaggctgaagtgcagtggcttgatcctagctcgctgcagcctgaaactcctggtcccaagtggt

SEQ ID NO: 17660 - DNA, 1015 bp, Homo sapiens
ggagaaaatttttgcaatctacccatctgacaaagggctaatattcggaatctacaaagaacttaaacaaatttacaagaaaaaatcaaacaaccccatcaaaaagtgggtgaaggatatgaacagacgcttctcaaaagaagacatttatgcagccaacagacacatgaaaaaatgctcatcaccactggccatcagagaaatgcaaatcaaaaccacaatgagataccatctcacaccagttagaatggcgatcattaaaaagtcaggaaacaacagatgctggagaggatgtggagaaataggaactcttttacactgttggtgggagtataaactagttcaaccattgtggaagacagtgtggcaattcctcaaggatctagaactagaaatatgatttgacccagcgatcccattactgggtatatacccaaaggattatgaatcatgctactataaagacacgtgcacacatatgtttattgcggcactattcacaatagcaaagacttggaaccaacccaaatgtccattagtgatagactggattaagaaaatgtggcacatatacaccatggaatactatgcagccataaaaaaggatgagttcatgtcctttgtagggacatggatgaagctggaaaccatcattctcagcaaactatcgcaaggataggaaaccaaacaccgaatgttctcactcataggtgggaattgaacaatgagaacacttggacacagggtggggaacatcaaacagcggggctggtcatggggagggatagcattaggagatatacctaatgtaaatgacgagttaatgggtgcagcacaccaatatgacacatgtatacatatgtaacaaacctgcacattgtgcacatgtaccctagaacttaaagtataataataataaaaaaaattagccagatgtggtggtgcacacctgtaatcccagctactcgagaggctgaggcaggagaattgcttgaaacgagggggcagaggatgc

SEQ ID NO: 17661 - DNA, 1019 bp, Homo sapiens
tcgtccaactccctcatcttacagatggagaaactgaggtccggagaaactgaggcccagataggagcaagacttgcatgcctagatccttcttgtgtgcctcttcctactgcaagctgagacccaggtccctggtttggctgtcgtggctgcttgtaaagtgaaggtgcttctgtgactgaatgactccaacaaatgtccaaatccctaatcctttcctcaccaaagaagatggcccttggggacagcagcacttgctgagcaggagcatgagtcaggtgaccacctcattccagtttgctcaggactcgccctgttttagcactgaaagtctcacagcggctgggcatggtggctcacgcctataatcccagcacttgggaaggccgaggccggtggatcacttgaggtcaggagttcaagaccagcctggccaacatggcaaaacctcgtttctactaaaaatacaaaaattagctgggcgtattggcagatgcctgtaatcccagctactcgggaggctgaggcaggagaatcacttgaacttgggaggcagaggttgcagtgagccgagattgagccactgcactccagcctgggcaacagcacaagactctgtctcaaaaaaaaaaaacaaaaaacaaacctcacagccccagaggctccccagtcctcaacagtcttgtcagcctcagaacctgcagctaccttctctaggctcaacaagcacattttcctttgcccatcattcccttaaaaattctgccttggccgggcacagtggctcacacctgtaatcccagcactttgggaggtcgaggcagttggatcacctgaggtcaggagttcaagaccagcctcgccaacatggtgaaaccccggctctactaacaatacaaaaattagccaggcatggtggcacacgcctgtagtcccagctacttgggaagttgaggcaggagaatctcttgaacccgggaggcggaggttgcactgagctgagatcgcaccaccgcact

SEQ ID NO: 17662 - DNA, 1031 bp, Homo sapiens
agttcgagaccagcctagccaacatggcaaaaccccgtctctactaaaaatacaaaaattagctgggtgtggtggcaggcgcctgtaatcccagctacttgagaggctgaggcagggataattgcttgaacctgagaggcggaggttgcagtgagctgacatcgtgccattgcactccagcctgggcaagactctgtctcaaataataataataataaaataaaaaataaaaattagctgggcatggtggcatgtgcctgtagtcctagctactcaagaggattgcttgaggctggaaggttgaggctgcagtgagccttggtcgtaccactgcactccagcctgggcaacagtgtgagaccctatctcaaaaacaaaaacaaacaaaaaacataagtgtcaatcctttgctcaaaaccccgaagtatatgcctctcaacataaaagccaaagtcttttcaagggactacaagctctttaacctcttcctctcctccttgcccactctgctccagccaagatagctttcttactcttctgacatgccaggcacattcctgccttaaggcatttccactgtttcctcttcctgaaatgttctccccctagatatccacacatggcttaacccctataaaatatcaccttctcaataagacctactctggggctgggtgcagtggctcatgcctgtaatcccagcactttgggaggccaaagtgggtggatcacaaggtcaggagatggagaccatcctggctaacacggtgaaacctcgtctctactaaaaatacaaaaaattagccaggtgtggtggcaggtgcctgcagtcccagctactcaggaggctgaggcaggagaatagcttgaacccaggaggcggaggttgcagtgagccaagatcacaccactgcactccagcctgggcgagagagcaagactcgatctccaaaaaaaaaaaaagaaaaaatcaattagattaaaaaagcaaacaatctgtattagctttctgtttgttttagagacaggat

SEQ ID NO: 17663 - DNA, 1049 bp, Homo sapiens
ttttatatttatatccgatttaatggcattgtggacagagtacttggtccgttaagctatgcacttaatatctatctgtatactagctatctgttatacctcactgaataagttgaaagaaagaactaagaatgctggaatttggagattcattaaaatggaaagaaacctaggttgtcatcctgcttttgtacgttggatagatgcgtttttagtgtattttcaaaaagttaccaatgatagagaatggccaagtttgctggcaacccacaccaggtgtaaaaatgtgtatagtttcttcctaatatcagaatgtaaaagtagtaattgggagtagctgaaaccatgccacatgggttcatgatggatagcaaggtcaccacattgcacaacagcaggaggctctgtggcttggcaccctctttgcaacgtgaatgtgtattctggagttgctaaacaccctggaaggaagtgaagtaggggagtggggtagggaacaaaagggcgactgagaaaaaaggataaaaaaaatagtgactgcaggttcagtaacattgaatggcagatatatttaaaatcatattttataaaaataattgttttccaattatcttaggagcacacctctaatgtagccctgtaggctgtaatagcaatagctaagagtgataagctcattttccatcccacttcatactgttttctgtatttcctgtttctattatgacatctcaaccatcttgtcactgagaaaccccagacttatatttgactctttattgccctcttgtccagttgtcaaatcatatttctacctttgctgtatctctcatctctctagtcctttctgttcttactatcaatatactagctcagagtttcttaactccttgctttgtctatagaaatagtccctaaccaattttcccggaggctaattctcatcatctgtccagctaaaacaaaaaaaaccttcagtgacagccctcacacctatccatctaccactcatgaaataataccttactttttagcctagctctttcagc

SEQ ID NO: 17664 - DNA, 1031 bp, Homo sapiens
taaatttattcctaggtattttatgtttttgtagttattgtaaatggaattgtcttgattcctttttcagtttagttaatcatccatgtacagaaatactgctgatgtttatatgtcgatgtttgtattctgcaactttactgaattcatttattagttttaagagttttttggtagagtctttaggttttcctatatagaagatcatgtcatctgcaaacaggaacagtttgatttcctcctttctaatttggatgccctttatttctttctcttgtctaattgctgtacatagatagcacttccagtactatgttgaataacagtggtgagagtgggcatctttgtcttcttccagtccatctggtatgatgttagctgtgggtttattatatatggcctttattttgttaaggtattttccttctatacctaatttcatgagagtttttaattatgaagggatgttgaattttatcaaatgctcttttctgcacctgttgacatgatcgtatggtttttctccttcattctgttgattataatgtatcatattgattgatttgcatatgttgaaccatacttgcattcctgacataaatcccacttgatcaggtgtattatcttttttatgtattttggatttggcttgctagtattttgttgaggaattttacatctatgttcattggaggatttatcctgtagtttctctttctgttgtgttcttgtctggttttgctatcacagttatgtgggatatcacagttatgatgtgctatcacagttttttttttttttttttttttttggaggaggagtctcactctgccacccaggctggagtgcagtggcacatctcagttcactgcaacctaccttcccctcccgggttcaggcaattctcctgcctcagcctcccaagtagctgggattacaggtgcaggccatcgtgcctggctaatgtgtgtatttttaatagagaggggaattcactacattggccaggctggtctcaaactcctggcctt

SEQ ID NO: 17665 - DNA, 1052 bp, Homo sapiens
gcaatctccgcctcccaggttcaagcaattctcctgcctcagcctccctgagtagctgggattacaggcatgcgccagcacacccagctaattttgtattttttttttctttaagtagagatggggtttctccatgttggtcaggctggtctcgaactcctgacctgaggtgatctgcctgcctcggcctcccaaagggttgggattacaggcgtgagccactgcgcccggccgctaaatcgttttttttaaaaaaatcctgttgagatgactttagcaaataaatatgattagtaactagcgacattcatgtgcatgcagtctgtgtggatacaataccatggactcagtaggctctcaataaaaattaattgtaaagttttctcctaagtaggttaagaatacttaatgcagcaagcccatcttcaaagatagtacttagagcagattttaccttgaatggcataccaagagtggggcaataagaacagtagatcttgggtatggacaatagtaattctcattatctgtagagaatttaaactacagtaaacccactaaaagtctgttttttatttccagtaatttttatgtaccagtaattctaaactgtgtcaataataaaatagtcctccatgaaaaatctctcatggatctggattttaaacaatttctgtagtctctgttaagttttagtatatgaatttaaacttcaaatcagcacattttaattatttttttaataaacagtatattctacatggaaattaatttagagaactcccactcatacaattgtccttcaacaaacatggacccagctattgtatatatttccaagtaaactcataaaagttcagggtaattcaagatttaaggcacagttcatgttcgcaaccctggtggtccatattcctgcatttaaacagtagattctttgtaaacaatggtagcacagtgattttaaggatgaagagacagaacttgattacttaaacattgttctatgtgaccacttagagtttttgtttatgaaatttaagagtgaaaca

SEQ ID NO: 17666 - DNA, 1027 bp, Homo sapiens
cccaggatagcagtgggagccctgctgcctccagagcctgagcatgtctgctgggctggagggctggaaaccccagccctaggtgcactttctgctctctttctgaaagggagggtcagcctgattgcatttcacgctgtctttcactaagggtttttgtttgagtttacataaaagtgggctgaagaggctgggaaacccagagaacaccattgaatgtagcagatggatttggttagctgttgctgagctaaaggaggcttgactgataaccttgtgaaaagtccatgtaggatgatacactgccataatttcttacagctctggtgtttttaaaaaatctttgtggggagcaaatgaaggaagagttgcttttaatccttggcttataaagcactttcatgtatgtcaccccatcagttggggaaagagtagaaaacatgcaagaaatcagactctcaggagaggaggcagtttgccccaggtcacaacacatgtgatagaactggaacacaaacagaactttggacaaatactacttattaagaactccctgtgtgttgggtacattatatacccttctaatacaggctcctctaaagtgtatatcattacgcctaccttctggatgaagaaatgagcatagagatgaccagaggcagttggtgagatgtgggacctgaactggactccaggtctggaaaacttggcctgtccactagactgtggtcctcccattctctccaggactatatcctctggtttgcattgcttcaaaacagcaggcttgccattagaagcaaggaacaccgatggaattagggattttctgtgaagtaagctggcatttacttcctgtggcattgggactggtgagagggaggccctggggtggctttatctgcgtggcctttgccttcttcatctcctgcaactaactgggcatgtggttaaagacaggtgagtgctttctttttgtgtgctcacctccagctgtgtttccttcccagcgtgggctgcatagggg

SEQ ID NO: 17667 - DNA, 1034 bp, Homo sapiens
aggaggcagaagttgcagtgagccaagatcatgccactgcactccagcctgggcaaaagagaacccatctcagaaaaaaaacaaaaaacagaaacccattgcctaatctatagtgtagtgaacattggcctacaagtatctgctcaagcccctgctttcagttcttttgggtatataactaggagtagaattgctggatcatatgataattctgtgtttagctttttgaagaaccttcaaactgctttccatagaagttgcatgattttacgtttccaccagcagtacacaagggttccagtttttccacatcctcagtaacacttgttattttctgttttttaattctagtcatcctagtaggtgtgaagtggtgtctcattgtgactttgatttgcgttttcctaataactagtgatgttaagcacataagcatatgaaaagatgttcattggccactcgtatatctcttttagggaagtgtttatccacctcttttgcccattttcagttgggctgtttctctttttgttgacttgtgtgaattctttacatattctggatactaaacacttatcagagatatgatttccaaacgttttctctcattctgtaggttagcttttcaccttcttgagaatatcctttgatgtgcaagagttttagattttgatgaagtccaatttatctttttttttattttgttgcttgtgcttttggcatcatatctaagaatccattgccaaatattgggtcatgaagattcacccctgttttcttataagagttttatggttttagctcatatatttaggttgttgatccattttgagttaatttttgtatatggtgtgaggtaggagtccaacttcattctttggcatgtgattatccagttgtcccagcaccatctatctgttcaaagagactattctgttcccattgaatgaacttggcaaactacttatctttctaaaccttcttttgtttcctcttctcccctgtagtcactacaatctctttactatctctgg

SEQ ID NO: 17668 - DNA, 1858 bp, Homo sapiens
attttcccacaatggaaaatctctgaactggtatagaagcaaattaggtaaatgcaaagcatttaattataaaattgttaaatataaaaattatatttaatttattattattaatatttttagaggtggggtcttattctgttgctcaggctggagtatggcaacatgagaccatagttcactgcagcctcaaatttctggactcaagaaatcctcctgcctcagcttcccaagtagttgggattatagacgtgagccactgagcacagctgaagttatatttgaatgtgaaactattctcttaagaaaaaaaaaacttgtttcaggtcctatacatcttgcataattgaaatctacaattagaaaacattgaaaggccaagggttgaaatttcactttttttctgatttacatttaaatttttgaattgtgtttcacaatatagttaatgtccttgttttaaaaaaattcttttaactttgtagttgagcaactgggttattaaatttacattttgaacaaaaaatgtgacgtacataatgaagtgtgtgctagtgatatacatcccacctgctctggacatattagactagatgtgaagaagacatttgcttagttccctatatgtcctgggagaaaaggtaggctgattaaaagaatatggaggagcttatatctaagaatgaatttgaatttaagatttcaaagaatctttgactacatattctatcactaaaaagaaccaagtccatctactgagccatggaatctccattcatgtgaaaaatcttcagaggctagataagggcccctgcttttcttccaaatgcattttctggctttgcctctagacatttccctttagcagttatttggaaccagatattgacttcactgaaagccagatcaaaatctttagctggaaagtattaattttcagtgcaggttacataaattaaaagaaagaaacatcatcaacaacaacaacaaaaataatttcggagccttgcctcttttgtgagtcagtctccttgaagggcttccagctggtgcatgtgtgtggtgggtgtgcattagaggctttctaattgacatgcaagtggttgatagagcaataaatctaaacagtgtagcttgtcattattcatgataaggagacacagagctaatgtacaaactgatacttttagcaacatggagtaaaagctaatgttagctaaaattgacaatactttttttttttttttttaatatgtacaaacttcagttggctcttcaccaggtctcatcttgttttagggatctttctctaagataaatatactttgtggacttttaacagactggtgacttcagctaaagcatattaccaatacagtaataatattgagtcatatgtggtatagaaaaagtgctgaatttagaatcaacctaggttaagaagcctgccttttgagagtagaatggtggcttccaggggctgggaggtgggggaaatggggagatgttggtcaaaggatacaaaatttgttatgctggatgaataaattctggggatctattgtacagaatggtgactatagttaataagagtggattgtatacttaagatttgctaagagagtaaattttaagtgttctcaccacaaaaagtaattgtgatgtgatagatatgttaattagcctgattgtggtaattatttcataatgtttacctatatcaaaacatcacattgtatactttaaatatatataatttttatgtgtcaaatatacctcagtaaagctggggagggagaacctgccttttactaggtgtgtataattttggacaactcagcaagcctgcctgagactc

SEQ ID NO: 17669 - DNA, 1061 bp, Homo sapiens
acacttactggattttgttagcacattaatatttgttgaacttaatagagtctcagatttacgctacaactagcatttaatttctatggccttttaaaggttggcgtatttggtggtagtttccatttaatacttatttctagattgccttctattagcttttttgatggtgctgaccttaccttcctaaccacctgaacatataagcatattgcaattattaaagaatctgttttctaatgccagggaaatgtgttcttacgcttagtgcaacttcttagtgggagtagattattttgtgtatattttggtattttactaacagaccaactgtccattcataatggtgagactaagtgaatagaagtcagtttaaagttaccaggtgaataagcagtttttgaaaaatgtatcaagataataaattttgtttctgggttctcttttgaaaattcactattgttgaaaagtctgtgtaggaacaaactttatagacttacttgtatacagctaggactgaatttatgggctgcctttctaacttgctaaaaagctgaagattgacagctgctttcatagtgctttatctagcttggcttttaactccaagagaactgtgttcacaaattgatgctctgttcctttggggttggtatagaagcattaaattgtactaaaatattcatatgtgagtgcatttagctgaaagcaattgatgttttgttcccaagaggacagagagaaatgctgtatggacctgtactccagaaaaaaccctaagcatgcttcttaaaggtaattacatggcctggattatcaaagcccatacagtgaagtttaaaacgacaaagaagaagttgtagaatttataaactgtggtttgtatatataaattatttggttgtacaatagttaaaaacttaattgccaaaaaactaggagttttaattatatctttggtttgtcttctcagctaatttttactagactgattgctctaaacatttattccagaggtccaatatcagtgaagttctttatccattatcattttattatat

SEQ ID NO: 17670 - DNA, 1065 bp, Homo sapiens
aactgtgagtatgtggccatgaagaatgcagtgagtttggtgccactgacttgaaactaccactaaggcagtgttacccaccatcattttcacatcatcagtgcaaatgtcaatttggtttttccagaataaaccatgggattccaaaaagctatttaaccttttgagtatttcatcaccacttgtgttcattgccaaggattcatgtaaaaatattcttcagtgattccttgatatcaatactggacaatagaagtaaagcaggaaacacagtcatgtctacagacttgtcaggcaaaagtataattttgcagatgaaatattatcttcatattcatgtttacagctaaatattttattcagcaagttacgtaccactggaatgtgacagtgccatgatttgttttcctgatttttcaaagcaggaattcagcaatgtcacctttattagtctctcagcaactatacttctctaaccaatgaaatatgataacttaagattcttcagtgactttttcttttctagcttgaaaagctaaaataacagcttttggctcttaaactcatgtcatttatgttaaaataaaatccagtttagttttctctcaactctgaatgtttgttttgaaaatagtcatcacttcctttgcataagatagagtaaggtaaattattagcatctgtaaacctaagagaaagataactttttcatatatttatttcacacagtattttttagagtatatttctcttttccataagttagagaactctgttatcggtttcatctttttcagcatctttagacatggttgttgctgcagtgggttgagaaagttagtcttctctatttcagtataaatattatcaaaatagaatagttttagagaaatttaaaaatgaataaaagtttaaaaaaatgtaaatgttattgccatgtaagacaacagtgtatttcttgtgtttccttgcaggcacaaggaaacctttagtatttcaaacattggtttattgaacaataatgaaattatagaaattatagcagttttaactgtaagaacacac

SEQ ID NO: 17671 - DNA, 1073 bp, Homo sapiens
tggggcgggtcctaactgttagggacatttccaagctgttagttgctgtttaaaacaaataaaattgaagacttaaaaaagaaagtcacgttcgttaatataggcatgcatcacttaacaatagggatatattctgagaaatgtgtcattaggcgattttgttattgtgtaagcatcatagagtgtacttacacaaacctagatggcatagtctactaaacacctaggctatatggggtagcctattgctgctaggctacaaacctgtatagtatgttactgtactcaatactgtagacaattgtaaaatagtatttgtgtatctaaacataaaaagttaatatgttgtgctatgatgttacaatgtctatgacatcactgaggtgataggaatttttcagattcattataattttatgggaccacccttatatatgcagtgtaatgttgaccaaaaactgttgttatgtggtgcatcactcatcttgttcatcttgttagaagaatcttcaaagctcatagtcatcggtacaagtgttttagaattttgattttcacttaaaagttcaaattttgtccttgataagaaatactatcagttgttatctcagaattgatgaggtcactttattcacagtaagatatctgcgaaaaatgcaaatgcctgtcagattttctttgaagtaaaaattgtgtttcatgaaaaaagtacctggttcagcttgcaactcaaactattaaacaagtgctttccctcgagacaacccattgtactttggtatgaagtggaagtgctttctacattcttcacagtttgtcacacagaatattaaatatacatgtaatccaaggtcaagatttaataaggttaatatttttttttttttttttttttccttgagacggagtctcactcttattgcccaggctggagtgcagtggcaccatcttggctcactgcaacctccacctcccgggttcaagtgattctggtgcctcagcctcctgagtagctgggattacaggtgtgaaccactatgcctggctaatttttgtatttttagtggagataa

SEQ ID NO: 17672 - DNA, 1034 bp, Homo sapiens
ttgcccagtgattgcctttcttacaccagggacatacaccaggacttttctgttgatggatggtagtggtttttccttttgatttccatttctacattccttttttgtgtgtccaaattgcccacaattaaaccaagagcctgagaaacgggacatattctttcctactttcaatccagccatagccttagctaaaagagtagccttatgtaagttacctccaatgccatcacaagccttaatatattcagctaaatgagccttccctctcaggtgtctaatagcagtttgacactctgcattagcattatcatatgcaagaagctgtattataacatcctgagctgttttatcagttatggctttatatacagccacagcctcttggagccaagcaataaaatcaatatatggttctttaggtccttgtcagacaactgaaagaaggatatttttccccctgtaacatttaccctttcccatgcccataagcacacagagcacagctgaacaatggcaacaccctccattacttcttgattctctaatcgaccccaattagggccaactcccagtaactgttaaaaggaaacaagcacaggtgactgcacttgtgtgttttcccttgcctgagtttgagcttcctcagcccaccatgttttaaactgcaagtactgggacggagtgagaacagattttgttaaagtatcccaatcatatggtattaacctattatcaagagccacatttttcaacaaagttttcacaaaaggagagttcggttcatattgaataatggcttgcttaaattcctttaaaacttaaaaggaagagtggcccaattagctatattctgtccttcttgctgggtttgccatgcttcaaggtctccctcagctctagctttttgaatagaattttgtatagcaccaccaattgctccaggttttaatgttgcaactacaggaggagtaagtttttcagctgattcattttctcacccagtaagggggagagaggaggtggccattcac

SEQ ID NO: 17673 - DNA, 1027 bp, Homo sapiens
gacaacccatcggctgtcttgttgaaaataccagttgtagggagcaggttcaagtgagcctgagaggcttcaaaaacctgctattttagttttacaatatcaagggtgagattttcatctctgccctccagatggcatttaagagtaacataacacaactttgaatccaaaaggtcctctttttgtttttgaattaattgagcaaggcaattgcaggctgtgcagctcttaattgcctgttggtgatccagcttcatttttcttagcccttattcaaaatggagtcactctggtttgaatgcctcttacatatttcctctttcccttttacaagaggacccttaattctaagggttgcagaaggatggaggtctgtcttctgtaacttcttcatgctgaataggggtgatgatattcctgcctacctgttagggtctcttgtatttagggtagaagggtagagaggaattcagtcagaaaacattggtccattaagcatctgttgtagctctgaatcccagcaaaaggtaaaatcctggcactccagcagtttctcagcttcctgtgtggttttcttgatctgtcccatgttatgggggttgatgtcagcatgactctggttggtcctcgttccgtcttcgtattcagattgacctggctcatggcttgtactgggggaacccggtccatggttgggatccatgggtccctccagtctcccgctccatggtcatacacaccttgagggcacccacacagttttttcatctcctgcaaaagtacaaacataccctcacccctacattagtaaatctactgaaacagaagcaaaggctttttttttttttttttgctgtagctgggaggcatgccattgctgaagcatttgtaactcagcttctgcctctttggttaattactgcggggtaaaagttaccattggtaatgagaagcaggctttttctgattaacagaaggcatagagaaaccaaatcgaggcttatccttcttgtgcaatagtattgca

SEQ ID NO: 17674 - DNA, 1065 bp, Homo sapiens
tcaggttttgcctgttattccaaaaatgtcctttatagcaaaaggatatagtgcagagtcacatattacattttaactgtcatgtgtccttcaatcttaaatattaatagttccacagtcttaccttcacttcatgagggaattgtgaagattaccagacagctgttttatagaatgtccctcaatttggatttgtctaatgtcttcaatttagattatatatcttgaacaggaatatcacagaagtgatacctcatcctatcagatggtatacaatttcatttggtctttcatttaatgattttcactttaatcctttgattaaggcaatatgtgccaacttctccactgtaaagttacttttcccattgtaatacatattttatatggaggtactttgaaatgatgtaaatatcccagttttcctcaaactttttttttttttttttttttgagacatagtctcgctctgtcgctgaggctggagtgcagtggtgtgatctcggctcactggaacttctgccttcagggtgcaaatgattctcatgtctcagcctcctgagtagcttggattacaggcatgcaccaacccgcccaactaatttttgtatttttagtggagactgggttttgccatattggctaggctggtctggaacccctggcctcaagtgatccgcccaccttggtctcccaaagtgctgggattacaagcatgagccactatgcccggccaataaacttttgatttattcatttgtttatatcagtatggacttatggtacctattttattcaatgggtaaaaatctatggttgtcattattattgatgtacgaattgtcccatgtttggctagtgagaggcccctctgtgtctttttgatgtgttcccatcattctttgaatccttttttacttcctgacaagacaagatgttccaggctcattttgtatttttcctgtcccatctctggaaccagtcctttctccaaggaatcctggttccttttgctgaagaaaagtatttagaagccaatatctcaatgctagttatgttcattgc

SEQ ID NO: 17675 - DNA, 1050 bp, Homo sapiens
aatagagcttgaaaaaaatgacaaatattttttccccttagttggtgcttcccgtgctgctgttgatgctggctttgttcccaatgacatgcaagttggacagacgggaaaaatagtagcaccagtaagtattgcaataaaatatgctgtgtaaaatgttatggggataagtactgtatgtatttgttgaacagtgatctcagtgatttaccttactcagtgttcctgagcagttagccagtaccatggtgaatatgtcattttcacaaggtctgtgtagttcttgatcctagtaaaatgcccagcagttcttaaatccagcttattattcaagtattttaaagcagtggaacattttatcaaattaagtcatattacatcaaataaaacattgataaaagcagcattttatcaactcagatttataagttcacattgataagatttatttccataaagcctttagagagtataaaatcaatgagaacaatgaacctattttaatgaacagaattttgaaattgggagctgtgaatgacagttttagtcttatatcttcctgaacacctagtttctgtattttgtcttatagtatcaatttcagaaaattctgttctacatagataagtgatactagaatattcttcagttaagcctgtctaaaacttggaagagcaggaaattttggtctcaaagttgaatcacagttgataatgactgtttatatttcttaggtgatacagattttcagtgaataggagtctcagccagtttaaacttgtatagtatgcaggaaaacatgttttttatatatttcaaaacaatatgcagtcttgtccattaaaaaaaaatcttacatcccagtgctctattctatgagatattcattcacagttttaagatgctgtagtcaacattttcaaggcttattttttatttttgaagttttttttgttttgttttgttttgttttgttttgtttgagatgagtcttgctctgtcacccaggctggagtacagtggtgtaatctcggctcactgcaacctcca

SEQ ID NO: 17676 - DNA, 1026 bp, Homo sapiens
cccgtgtacatcatgttgggctatcaagaaaatattgcaagatatactaaaaggtaaaagacagtttgaagagacagagaaagcatcagaaccagactgagctggaataatcagactggaaatttaaaacaactgtgattagtatactaaggtctctaatgaataaaaagcaagcaagatgtgcaatataagcagagggctagaaatccacgaaagaaacagaaatgctagagataaaaaacattgtagcagaaatgaagtataccttttaaggacttcttagtagactggatatggccgaggaaagaatctctgagctttaggatatctcagtagaaacctccaaaactgaaaagcgaagagaaaaataaccagaaaaagaaaaaaacaacaacaacaaaaaaacctgaactgtaatataatatctaagaattgtggaacagcttctaagagtataacatgtaatgggaatactagaaggagaagagagaaaggaacagaagcaatatctgactgaggatttcccctcattaatgtcagataccaatccacagatctaggaagctgagagaacaccaaatatgagaaatgccagaagaacttcaactaggcctatcatttgcaaactacaggaaataaaaaataacaaatactgaagccagaggaaaaaatccaccatacctgtacaagagcaaagataataattagatctgatctcttttcagaaaccatgcaagcagaagagagtgtagtaaaatgtttaaagtgctgagagaaaacactcaccaatgtaggattttataccctgtgaaattatcctttaaaaatggaagagaaataaagactttctcagacaaaaattggcagaatatgtcatagacttaccttgcaagaaatgttaaaagttcttttagagagaaggaaatgatagaggtcaaaaactctggtgtatataaagcaagtgagagcattgaagagggaatgagtgaaggtaaaataagttttatttttcttaattgatctaat

SEQ ID NO: 17677 - DNA, 1084 bp, Homo sapiens
aaatttcatatctcatagttcaatatattgcattaaggtggcttaatactgtaaaactcatgaaactcttaatgtagttagagtaatggtaagtactcaatctcaaaggctatttaaaaagctgtgcttgaagttgtgtatccaaaggtgcacacgaaatataaaatatttgaattaaaatttctacagaatatgcatttagaatatgtcattactgatcatttatagtcttccatcactatgtatgtgtgttaactcactgcttattttgcttttagaaccttttgcccagagtagcagccaaacttgaggttgccccgatttctgacatcattgcaatcaagtcacctgacacatttgtgagaactatttatgcaggtgagtactcaaggaagataattaatcaacatgttaaattttagtgaaaagcataaattaatcttgaagatagaattttaaatcaaaccatacaattgctttaagtggaccatcttaaaggtttctgaggaaaattttagtctagaattgctggtggcccttgacatggcattctctctgatggatcgcaaacacagagatttcctgcctgtttattcagtttgcagggtgatattttcctagtgatcaataaaaattagattcacaatttaatatattttgtaagtggtacctggaaaagcaaaacttaaaaaaaaatagtattctcaatctttgctgcttctacttcatttccataggcattaagaaattcattttagccagctgcagtggctcgtgcctataatcccagcactttggcaggctgaggtgggaggattacttgaactcaggagtttgaggctatcctgggcaacataataagaccctatctcaaaaataaataaataaaataaattagctaggcatgttggcatatgcctgtagtcacagatacttgggaggctgaggtgggaggattgcttgagccagaaggtcgaggctatggtgagttgtgatcatgccacagcactccagcctgggcaacagagcaagaccctgtctcaagaaaaagaaaagaaattcatttcagtgtctcttcagttga

SEQ ID NO: 17678 - DNA, 1030 bp, Homo sapiens
aaaaattagccagtgtggtgatgcatgcctgtagtcccagctacttggaaggctgaggcacgagaaccacttgaaccttggtggcagagtttgcaataagcagatattgtaccactgcactccagcctgggtgacaaagtgagactgtgtctcaaaaaatatattaaaaataacaataattcagagcatgtgataatggaggttcatactgctggtgttgcttctgtctaattttttacatgaaattgataaaagaacatattctggtgggtttatgattagttatgtggatttctttacccaattcctgctaacaactgtaggatcttacatagttgatacagccacaatgtgtgatgtgtgatggctaagctatctatttgtatgtctgtattagccacagtatatgatggctaagctatctttttggtttccctgtttttggatatataggaatttgtgatttgttgtttgttttgctgtgatttaaaataattattgtaatattactttaaaaagactttgatactttatactactttgagaaaaatcaaaatagaaatcgtcttctgtactcagttacaatcctaacctgtcatgttctaattttaaagaaaacaaccagtacctgtatgaagagatcgtttaatagagttcggttttataccattttattcagctacttgtcataaacagcaagttattcttctgtataatgccagccgttttgccagtaaaaacaagatagtttcaatgggaaaattctgccccattttctatcccatgctgctatgcagctacattgcaattaactgagtttcttaattggaaattctcttaaagtttgagaagctaaatgcagctgcatccataataaagggcctctgtagtacaaatggtatgccggtgaacacttggtttagcagagaatgtattcttgcactgcatcctttcttcagtgaatattgttgcaagctaacagttcatatgagggtggcacaaggcacagccttttaatcctactcatcag

SEQ ID NO: 17679 - DNA, 1068 bp, Homo sapiens
tagctggagctctttctagatgtctgtagacattagacttttgtttgtttgtttgtttgtttgtttaagagacaaggtctggctctgtttcccatgctggagtggagtgcagtggcacgatatgggctcactgcaaccgtcgcctcccaggttcaagcgattctcccacctcagcttcccgagaagctgggatcacaggtgcgcatcatcacgcctggctaattttttttttttttttttttttttttttgtagagacggggtttccccatgttacccaggctggtctcgaactcttgtcctcaagtgatccacctgcctcggcctcccaaagtcctggaattacaggcctgagctaccgcacctggccttagacatcttttttcttgtgcgtattccttgtttaataaaaagttctgaccctcccctcccctaaagagttcaaacccatgtctttcaggttagtgtcctgtcttcccctcaggacatgttttctcccggttggggatctagacataaacaagtgaaaatcatgaatttggggaaattccaggaacctgagccagaagaatgctgctctatgcagcagttggaaaacagttttgtggacagattacaagtctggcctaagtgaaattataattgtggtgggggatggaatttaggactcagtaattttgtagagctaacagaaaaaaatggaatgattaagtaatttttactatccacatcgttggctaatgtgtatagacattacttccagatattcattgtggtttgccaaagactttgaccttgacttatttttaaaatttgaagtcaagctaagtagaatagctgttttttttgtttgtttgtttgtttgttttgagacggagtctcgctctgtcgcccaggctggagtgcagtggcgcgatctcagctcactgcaagctccgcctcccgggttcacgccattctcctgcctcagcctcctgagtagctgggactacaggtacccgccaccacgccccgctaatttttttgtatttttagtagagacgggggtttcactgtgttagccggtatg

SEQ ID NO: 17680 - DNA, 1124 bp, Homo sapiens
gcagagattgcacattgcactccagcctgggcaaaaacagtgaaactccctctaaaaaaaaaaaaaatgtgtttaacattaactttccagtcccttttacaatattatgatgtctccttccatcttaaaccagttatgctgaatgtattatgtattttttgatgccttcagaaatgagttcctactacgatgttaaggcacattactattattaggtatgtggaagcagatttttaaagtgtagcatactaagtaaggataattggttataattaataagatattttactacaatacagtaatgctctctcaagaccaactgaaaagggttgagatacttttacaccaaatgattctaggcaactttttgaattctcatgtctgcttaaaataattttaattctcacgccttcacttactaatgtcagctggtgcttcttcctcttgtcaatttatttaaaccagcagtgtcttttctaattgctgatttcagtctactctaggccagaaagcccacttttattagacttgcttctgaaatgtgacttggtagattgagttggagcttggaagactttcttgtaagtaactggtgtggattttgtggaaaaactgggcactcggtgaaggcaagaatgtctctgatttgttcagtattccattcccagtgcctaacaccatgcttggctagagtagatgctcagcaaatatttgatgaatggactcatctctctgctgaaaggcccgcttgcttcttttcacgttcttgactgaattccatgtggtcacagttggaggaaaggtccctctgggtgagggaatcaggctgttttacatttatacaacgtgatagactctccatgggccctcctagccactccttggaattttatggagtgaatttgacagttgtcattttacaaatgtgaaatctgcaaactctctccaggagaatttgcatttttaatccagattcgtgatcactcactatcccacctccactttcctttttttttttttttaatttaaattttgggtaacaccaagtattaatattacaaatatatttgacataatagcatttctttcaaaaatataagaccagttttgcaaggcactcaaaa

SEQ ID NO: 17681 - DNA, 1065 bp, Homo sapiens
caaagtgtggggattacaagcgtaagctactttacccagtcaaaacacttgatttttttttcttgagatggagtctcactttgttgcccaggctggagtacaatggcatgatcttggcttactgcaacttcgacttcccgggttcaagcgattctcctgcctcagcctcctaagtaactgggactacaggttccagccaccatgcctggctaatttttgtatttttagtagagacagggtttcaccatattggccaggctggtctggaactcctgacctcaagtgatccacctgcctcagcctcctaaagtcctgggattacaggtgtgatccaccgtgtctggctacagacaaaacactttctaaattgaagagttctgtgcaaatgtaaaagccagtttttaaaagtctaattttgttcaatcagattgtaataagattctcagtgtgtacatatatcagtctatcaatttcctttactagaagaggtctggtggtcgtcatttcatacttcccaattttaaaactgtaggagtgctcagtagcccaggtagatacatagtctaatgtaaaagatgaaaggaggcactattttgtaccttcaacatagtaaacttggaatggctccagacatgaattattcatcagtttatccttccttttacaaaaacctgtgttggtaaatgaatagtggggactgtagtgcacttacacaccaaaacctcaattcctttgtgtatatctctgaaagttaacatgttgatttgcagaactgctatatttgcagtcctacccttctcatacatgtcagtgcagtagcattgaatttctaggccaaggttgatttatctacaaggtcttttatagttttaaaatattcttttcaatgattgctgctctgtggattaataaaagagttactgttgtcagtccagtttacaaacagctctagaaaactgttttgtactgaaaagatggaaatgatttcttaaatgttgttgtcaaccctcaggactggtacttttcagtaaaagcaattagattctcactgtttgttatgctgtt

SEQ ID NO: 17682 - DNA, 1035 bp, Homo sapiens
caacctgagcttcccccccattaacaccatggcttgcaactaagaattctgactgttgttaaaacaactttataacattgaaaattggacagaatagtaagagattaattgaagtaaatttttatatccacaggatgagaaactatttagcttttaaagactatgcagtatttctcagtttaagtattttactcagagagggaacttagtataagacattaagtacttagaaaattcttggacggctaggtgtgttggctaacgcctataatcccaacactttgggaggcctaggtggtaggagggatcacttgaggccaggaagtcaagaccagcctgggcaacatagtgagactctgtctctacaaaaaaaaaaaaaaaaaaaaaaaaaaaattagctgggtgttgtggtgtgtacctgtagatccagctactctggaggctgaggtagaagcatcacttgagcctaggagtttcaggctgcattgagctatgatcatgccactgcactccagcctgggtgacagaacaacaccctgtaccctgtctcaaaaagaaagaaagaaaagaaaggaaaggaagggaaaggaaggaaaaagaaaattgttgtaagacttctagattgactcctgaaacaataccaaacaaattcacaggggtgctgctccttctgaggccagcacaagttaggaagtaaatgtgtggctaatgccacacaaacaactatctcttacacccaagaaaccacagaatgtgtacccgaagctacagacgagaaattagcacaacttatgccactgatttttgatgcccaggaagctggaaaatggaccccagaatgctgctgcaggaaagcctcatgtttccaaaccttgctaataacaaccaagagccacaggaagatgtctttgactcacattcaacctccaaatcttgtaggatactgtttgtgtaggggagaataaaaggctttccatgctcggattgtctctggaaggatatgtaaaccagtaaccatgatgatttctaagatga

SEQ ID NO: 17683 - DNA, 1035 bp, Homo sapiens
aaagatgccctggctgaggaactattgaaggccagctggggcttgagctgcagggagcccatcttgggccacctggagtcttttctaaccctggtcccacattttcccacatttcctgccaccttacccaaggcctgtttccctcctgctgtgtgcacatttcttcccatttcctggcaatctcaagaactgcaccactggttaaaagaactactcatatttcagtcccttagaatctagttagctctttcatttcctttttatttacttgtgatagtcaaacttaacattcctttatattctttgagtctggattatttcaaggatttttttttttagctgctagtgaatgctaatataagaaagctcgggatccctcctctaatcctaaaagtaactttacttatctttaaaatattattaagctaaatgcatgtggtattctatattcaatcctggaacagaaaaaggaggacatcaatagaaaaacagaaaatcaaaataaaggctgtaggttagttaaaagtatactaccaatataatttcttagttttgataaacataccatggttatataagatgttaatatgggctgggcacggtggcttacgcttgtaattccagcgctttgggaggccgaggcgggtggatcacttgaggtcaggagtttgagaccagcttggccaatatgtgaaaccccatctctactaaaaatacaaaaaaattagccgggtgtagtggcacatgcctgtagtcccagctacctgggaggctgaggcaggagaatggcttgaacccgggaggcagaggttgcagtgagtcaagatcacaccactgcactccagcctgggtgacagagcaagactccatctaaaaaaaaaaaaaaaagatgttaatataaaggaaagctcgactaaggcatataggaaatctctactatccttgcaacccttctataaatctaaaattacttgaaaataaaaagttttaaaaatatatttttaaaagtgtatgtatatatagtaaaatcttggg

SEQ ID NO: 17684 - DNA, 1032 bp, Homo sapiens
tttctgaataatgcattaacatccttatattcaagatcagtgataaacaaattggtaccctagtatctggggacacagggcgataagactgctgagttcatttgatagaagactttagagacttgtctactaactttgcatccattgccatagaaacaaatttaatagattttttaaacaaatttaatacatttatttaaagcagtgtgccacttttattaaagacattaatacttcatgagagttaagctgacctattttggaattatgggaggaatatgtagaagtcagtatttcaacaagttgtgttttttaattaggccattttgttaatattgttaacagctttgtatacgctttatataaggtatatcatttatgtattattgtgatacttaattgtaacatcagggacacaaatggataaccgaactacagctatgaagggctaactcttcttatcacttcagtttattaactaatgaaaattggtctcgaactcctggcctccagagatcctctctccccaccctcccaaagtgctgggattacagtcgtgagcctaattatttggggtttttttttctgaccttagatttggtcttctaaagcaccaactatacattccttatatattctaggtactagatagtttgctgaattgatatattaacaaagcctgtttatatatgaatccaagacagtgagttataaaatataccataaaaagctagtaagtatacagatacccaaaatgaccatcctaatatattccaaggcatatctttgtctcatctaatagtatttaattttcataaagaaatgagatgattttcacattccttgctaatctaaaattcctgaattctgtacttattttctgtcttttaccatttattcttagctacttgaataatgacccttttcaaagcttcagtaacttttctctcaggagtaacatagagctatctctaatctaaaagtttttagttcattatatctgtagtgctatcatctgtctaggaaaacttc

SEQ ID NO: 17685 - DNA, 1023 bp, Homo sapiens
agtcttatttcagtactgacagttatttcagtcttaggaaagtcaggaattcatggtgtgtatgaaaaaactaaggtaggagaggttaagtgaagtcaccaaagttacacacaacaattgggattggtggttgttgatttatgcacattttttactgactgggactttgaaatggaaagcatatcatcctctccaagcatacatggaaacatgctgcagtagttatttttcatatataaagtatgtattttcttcaaaaaaaagtaaaccgttattactcttctgtgctctctgagccctctgattgtactcatgttataatatgtactatgcaattatggttgtttaactgtcttcctaaagcagacccacctcagtatttggcattgggtggatgcccaaaaatgtttattgagtgaataaatgattccctggatgtaatttaattgcctttggaatttggatcctaaaagttatttatattattactcatttttccaaagcaaatagattctgaatctctttgttgattattagtcggttctatcagatttacataaaggacaatcagtgactgacctgggaaccatagctcagtacttctgtggtcacaatattggaaatgggttggctggtttgagaaacaaaaatgtggcatatccaaacttagtatcatggagttttgcctgatttcaagtcttcctcattttatgcaaatatatatttctcatctattatttaaaactttataactccaattagtttaactgagtgtgaacccctttataaggtaaaaaatatttttataaaattgtcttctaatttgaattttatatatcatgattggttaaagcaatataagcaatatgccacttttattaaagacatgaatacttcatgagagttaagctgacctattttggaattatgggaggaatatctagggaaccaacatttatatatattatatatgtatttatgtagtaacaatgcattttggatttttcagaatagaattcccca

SEQ ID NO: 17686 - DNA, 1050 bp, Homo sapiens
ttccatcatgctaactctctggctatattctactctaagctcaccttagtgattgattgcctcacgcagtgagtaaatacttactgtttttaaccacatttatgtaagtctgggttctcggaaataatgacactaaaaaaaaatgagagaaattgcccgtgtatggatcctgatgctagctgtcttcagttcagctcagttcttttaaattagtagactccatgacagataccctgtgtattaactaatgcaggtagaaaactcatttctccttaatataatacattattttctagttatgataaacatgggccatatggaaaaaattgagaagtcttgaaggtatttctttctagtgctaggtgtatatcccccagcactgcatccctgggaattcacttttctttgatactacaaagtcgtaaatggatacttggagaactgtactctagaataaattaaatcatttagcttattttctattccattcccaggaactatgaagaaacaggattgttgaaagtgatgatgtgggttggatttggatcatcattgggaaggtatttagggaagcagttaagagcagtgttaaaagcatggacctagaacttactgttttgttattgtgtgaccctggacaagttaattaatttctctgggtgtcagtttccttatcagtaaaatataaggttttggcacatcccgaagaattgtgtggctattaaatgaaatattgcaatcagtaggcagtcagcaagtgttgaaacaatataatgcacctgttaagagcacaggctttctagttacgggcctgaattcaaattccaaatagatcatgtagtagctgtgtgagttcaccaaggttttattaacctttgtaagtttcagtttcttcctttgaaaagtaggataggattactcccttcaacctccttcacaagggtactaattccatttccaagattagagacctcctaaattatttccccaaaggacccacacccaatgctatcacaccggggattaagtttctacatgtaaatttggaga

SEQ ID NO: 17687 - DNA, 1010 bp, Homo sapiens
taatgtataatatttaggtggtttctaattttctatttaaagtaatggctattttcatttattagctgtagtttttgggtttttgttttgttttgttttctgggtttaaaggttgtaatgtaatatttgatatgtacaaaagaaatattaataaaaaataatatgaatacagtgaacagctatgaactcaccacccaatttagagtaagattgttaccactacatttgtgtttcccaatatgatcctttcttaccacattcatgattcctttaaagggaatactgtacagaattaaaggtgtatcattgttttttagaaatagctttattgctttatcacataaatgttttgttaaataatgttacttggctttgacctttataaaatattgcacaatagacctctacaattattttttcagtcaaagttatggttctaagttttatttagccttataaatatagctgtttgtcactgcttttctctgctgtagagtaagtccttcattgtgttaatacaatttttaaatctattctgacagtggacatttctctgtgtgtgtgtgtgtgtgtgtgtgtgagagagagagagagagagagagagagagagtgcacgcaagcatgggcaaacagtgctgctcattcttgtatcaaagtaaataaacaagaacttctttaaagctgggagtctcaggctttcgtctacatcggaattgcctagagaacttgttaaaacacagattgctgcccccagctcctgccccggatttctgattaagtaggtttagggtgggtctggagaatttgtattcctaacaagttcctaagtcatattgatgctgctagtccaaggaccatattttgagaatcactgctctactctagggcatatgcctcaatggtggaattgtggggttctcaggcatatcagtgtccaactttgcaagatagtgctcaactacattttggcatcagacagtacagtcgtctggaggaatcgaaagcagcct

SEQ ID NO: 17688 - DNA, 1521 bp, Homo sapiens
cacaacaggcggattggttgagttcagttcaagaccatcctgggcaacatagcaaaaccctttctctactaaaaatacaaaaaaattagccagacatggtggctttcacctgtagttcagctactcgggaggctgaggtgggagaatcacctgagcctgggaggtccaggctgcagtgagccgaaattgcactactgcaccccagcctgggcaaccagagtgaaaccctgtctcaaaaaaaagcaaaaaagaagcagcagcagcagcagcagctttttgggctgagactgggattttctaaatacaggatcatgttatctgcaaacagggatagtttgattttctcctctattcctgtttgaataccgtttatttatttctcttgcctgattgccctagccagaacttccagtactatgttgaataggagtggtgagagagggcattcttgtcttgtgccggctttcaagggatatgcttccaggttttgcctgtttagtgcaatgttggctgtgggtttgttatagatggctcttattattttgaggtatattcctccaatacctagtttattgagagtttttaacatgaatggatgttaaattttatcaaaagccatttctgcacctattgagataatcatgtggtttttgtctttagttctgtttatgtgatgaataatatttattgatttgcttggttgaaccaaccttgcatcctggggttgaagcctacttaatcatggtagataagctttttgatgtgctactggatttggtttacccagtatttcattttggatttttccaaattgatgatgaacacatcagtgttcatcatggatgtttgcctgaagctttctttttttgttgtatctgccaggttttggcatcaagataatactggccttataggatctgttaaggtggagtccctcctcctcaattttttgcaatagttgcagtaggaatagtaccagctcttctttgtacatctgttagacttcagctgtgaatccttctggtcctgggcttttttttgggtggtaggctgttactgcctcaatttcagaactcattattggtttgttcagagattccgtttctttcttgtttagtcttgaaaaggtgtatgtgtccaggaatttatcaatttctttttcatttttttcttatgttttcttctaagacttttatagtttcgagtcttacattttttatctgttttgagtttttttctatattgtttgagactggtgttcgatttcatttttttgcataaggatactccattttcctaacaccatttgttgaagagactattctttctccattgcatgttcttggtgcccttgtcaaagatcaattgactgtgaatgtgtgggcttatttatggattctgtattctattctattggtctataggtctatttttatgccactatcttatgttttgattagttttataatataatttaaagtcaggaagtgtgatgccttcagttctgttctttttgctcaa

SEQ ID NO: 17689 - DNA, 1098 bp, Homo sapiens
aaacttcttctgcatctattgagatgatcatatggtctttgtttatcaatgtcactttttacaaaattatgaaaagctattctgaaatgcatatggagccataaaagagcctgaagagccaaagcaatcctaagcaaaaagagcaaaatgggaggcatcacattacccaatttcaaactatactataagtctacagtaaccaagagagcatggtactggtacaaaagcagacacgtaagaccaatggaacagaacagagaacccagaaataatgcagcacacctatagccatctgatccttggtaaagctgacaaaaataagcaatgaagaaaggactccccatttaataaatggtgctgagataactggctagccatatgcagaagaaataaattagacccctacatttcatcatatacaaaagttaactcaagatgaatgaaagatttaaaggtaagacctctaaactataaaattcctagaagaaagcctagggaataccattctagacaatggccttggcaatgaatttatgactaagtcctcaaaagcaattgtagtaaacacaaaaactgacaagtgggacctaattaaagagcttctgctcagcaaaagaaactgtcaatggagtgaacagataacctacagaatgggagaaagtatttcacaaactatgcatccaaaggtttaatatccagaatctataaggaacttagacaattgaataagcaaaaaccaaataaagccattaaaaggtgggcaaaggacatgaacagacacttctcaaaagaagacatacagtcagccaagagacataaaaaatgctcacggggtgaggtgccacactcttaaacaactggatgtcacatgcactcattattattcactcctatagggagggcacctggctgttaatgagagatccacccctgtgatccagccacctttcattgggcccgacttccaacattggggatcgcatttccacatgagatgtggaggggacaaatatctaaattatatcatagggataataccatattgaatttttagatacttgtgatattattgaatgtacagcagccagcacaatgctt

SEQ ID NO: 17690 - DNA, 1020 bp, Homo sapiens
tatatatatatataatcacatatatattgtagagatagggtttcactctgttagccaggctggtatgcagtgttgccatcatagttcactgtaatcttgaacaacttggcttaagcaatcctcctgcctcagcctcccaagaagctaggactacaggcacgcaccaccatacctggctaattaaaaaaaaaattttgtgtgtagagatgggggggtctcactgttttgcccaggctggtctcaaactcctgatcctcccttcttggctgcccaaagtgttacaggtggtgagccactgcacccagctggatgagtatatttaaaaagacggtaacaagaatgtagagaaattggaacctttatattttgatagtaggaatgtaaagtggtgcatctgcttgggaaaacagtttggcagttcctcaaaaagttaaacataggatttctatatgatccagtaattctgctcttagatatataccctcaagaattgaagacatattcaaacaaaaattttatagaggtagtagattagtggtgtgtagagatgggatcagaaggaatggagtcaggattgactgtaaatggctacagggttttattcaggaggagaaaaatgttctaaagttaggtggtggtggtggtggtggtggctgcatagccttatgtatatactcaaaaacattatattatacattttaaatggatggattatatagtgtatgaattttatctcaaagctgtttttttttaaaataaaatggcaggaataatgctaaagttatctttccttataattataaagatttctcatggaaaaaaacagaaatcctaaattatgtcagttaaaatggtatggtagggaaccaccaaagttcgtacctccacaatatagttaattggcaaaaactgtgagaaccaatttttttggaactctggaaagtaatcaaaaggccactgaaatcaagaaaatgcttaatcaagtaaatttaactgaatatcagtaggagagttttgtgg

SEQ ID NO: 17691 - DNA, 1050 bp, Homo sapiens
ttccaactttttcttagctcagacttacatgtatgctctgttttggttacttaacccttccccgatatgtagctatctggaaagtgccttcaggcacaaagggtgagacaatcataggacttatttcacttgctttctttttctgagggattccagtcctgtgctgacagttgtccatacatgaaaaaaaatcatatatttaagaatttctaagttgcttgtagtagaaaggacaatatgatactagttactcaatcatggctggaagcaaaaattgtcaaggccttaataaaataataacctccacttcaaccgtctcttttcccaacttaattttttaccaatgcacttaaccatcatctaaagtactgtgtatttcaactgtttatatatttacacattagctttctcctactaggatataaatttcaagaggatttttgtttttagttttctgcacatggtaggtgtccagtaaaaatttgtggaagaattagatgagattggattgtgagctttgtggttcttatcactaagatttctttggccttttaagaagggagaaacaaattgcatattactatcataaattggaattcaggctcaaggcatgatggtctgccccaggtttcatgatacaggtagtgaagataatgcttttaggacctgactcaagatgaattaaaactaaagatacttgatttttctccaagcagtgggatgagggaaatgttctacaggcaaagccagaactagcatatattttaaactggatatgtgttctaaaattaattagtagggacctatataacctatatgtgatgaagaactgtgagagtacatgtggttgcttgaaagttttgataggcagatttaatttggaaaaggagtcgctgtgagtcagaactttgctgctgcaatttaggttgaaagaattcatagtttggcaaagaggactaagaaaagcaagataggcaataaagttctaatcattggactgtgtttttgtacagaaggatgaagataaaggaactagatttgtgtaatata

SEQ ID NO: 17692 - DNA, 1052 bp, Homo sapiens
tcttttcatatcctctaaaactgttcagtattttcctttatgaagtgtcccaatttaaaaaaatgggctgtcattttattagtcatttatatattctgactgcaagttatcagacagatgtatgtattgagatgtcttttctctcattctggagcttacatatacattttctttataatagcttttgataagcaaattttttttattttaatgatatatgctttatcagtatttttcttttatgtctagtgctttctgggtgtgtctaagagatctttgcctgcccagaggtcaaaagatactctatcatatttttttctagaacatttgtaattttagcttttgcatttaggcttatagtccatttaaaataaattagtaggcatgatataaagtatgggtccaggtttatttttctatagatagcctgctctactaccatttttgaaaagatttttcttttccatatggcttagcaccttgatttaaaaaaatctatcatatatgtgtgattctgttctggactctattgcattccattgatgtctaagtttctattttgaaaccttgataaaaatgtaaatctgccctattagtttaaatatatttctggactctcagttcagttctatttcattgataaatttatctttaaactctcttgatttctatagctttgtagaaagtcttcaaataaagtagaagtccttcaatgttttcttttttgagcttgttttgcttatctcaggactgtgcaatttttatataaatagtaggatcagttttttactttcttttgttgttgttattgtaactgattttattttatttttattttattttactataagtcccaggatacacgtgcagaatgtgcaggtttgttacataggtaaacatgtgccatggtggtttgctgcaactatcaacccatcatctagatattaagtccagcatacattagctatttgtcctgatgctttctttcctctcgacccctgacagacccctgtatgtgttgttcccctccctgtgtccatgtgttctcattg

SEQ ID NO: 17693 - DNA, 1022 bp, Homo sapiens
tggataagcatatgctttacccgtaggttaacatttcccatggtgggttccaggaagtggttctcaaaaatgtgttattggcaaataatttgtaagttgatgcctactaaaagctaggtgcattgagtcatatatcacagtgacgtactggaggttctgtaaagttctacattaaaaacctgtttagttttagcttgctgttttccaaatttatttgaccatggaacctgttctgtaaaacacttgttaatatctcctggagcacactttaataaacattactgttcatgtgggtgatattaaagggctttgtgtaaagctttgtcttcagtgtgtaagttgtcatagaaacgacattctattatttttgaagttttaatggaaatattatttttccaatttctcaccataatttgaataatttttgaaattcttgcactttgacttcatctacagcatgatgaaagtattcgaaggcacatggaacagattgaacaaagaaaagaaaaagctgctgagctaagcagtgggcgacatgcaaatactgattatgcccccaaactgaccccttatgaaagaaagaagcagtgttctctctgcaatgtcctggtaggttgttatatcaatattgtaatgatatagtttactactaaagtttatgaaaccatggaaatatattcttgcagtcttttaaaactcacgctaaggcaggcgagatgtggcagctcacacctgtaatttcagcactttaggagactgaggtgggcggatcacttcaggccaagagtgcaaaaccagcctttccaacatggtgaaaccctgtctctactaaaaatacaaaaaattagctgggcatggtggtgcatgtctgtaatcccaggtactcgggaggctgaggcatgagaatcctttgaacccaggaggtggaggttgcagtgagccaagatcatgccactgcactccatcctgggtgacaaagcaagactctgtttcaaaaaataaaactcatgctaaggcatctg

SEQ ID NO: 17694 - DNA, 1061 bp, Homo sapiens
caaaacaagtataacacagtgtttgtataaaaaagcaagtctttactgaattatgtgtaacactggtaaatgactttcagaaaccagatatcattgctatttgatttttgtttaaactttaagaagcagagtacctagtggcaagcccatgtttctacttggcttgaacatgtaagtttggtgaaaggtatattactttgaatcatttttattttacacataattctaatattggaaacaaatatttctaacattaggaacgcaagagagctctagaggcagagcggcaggcccgtgtagaagaattgttaatgaagaggaaagaacaagaagcccgaattgaacaacagaggcaagaaaaggaaaaagcccgtgaggatgcagcccgggaaagagctaggtatctcatttgctatcttgatgaacattttgcactgagtgaatattcaagttgaggtcttaaagccatttactgtcatgtagagtttttttgagatgaggttttgcgatgttccccaggttgatcttgaactctctgactcaagtgatcctcccacctcaccctcctgagtagcttggactacaggtgtgtaccaccacactcaaatcaaaaaatatataatttgattctggatggcttcagcaaaagagacttttggggaagatactgagggcataattagtaaaaggttagaggaccaagtttggaaatgttctgtcagacatgaaagtctagatcacaagagtcacagcagtggatttttttttttttttttttgatggaaatagtctggtcagcatgttgccactctgattatgatgtatgaccttcaattatcccttagttttaatcacttgtttaagatttaaagacacaggaaaaaacatataattggccaagcctaagtcccttttattggtgtgaccttactgacgtgatattttgtgacttctgaattatagcgaagttggtagatgtgaaaagatagctctttgtggttttaatttgcttttctacttgtccctgattaataataaggctgaacaactttttcacatgt

SEQ ID NO: 17695 - DNA, 1059 bp, Homo sapiens
gtaagatgtattaatctttattttagttccattttaagggaaggagatgaaatggaagtgaaattgaggaaattcttgagtttatcgtgttaatcacaagaattcattctcataagaattttttgagataataaaatatgaaacgtattgagagtttggagttgtatttattcaatttcattttaatttctgaacatttttagggaacccttgctaaaaagagatgagaaaattagcactcgtatatcatcctaatctttccacaataattattcatagttttattatttttctcttgttaaagttgatcaaatttatgttttcctctgtaactttaaattcctcagtttagttttccttatatatgtaaatcgactcattgcttaccaattcttcatttatgagttgttttatcttttggtttgctggattttattaagaaaaaaacttttttctaggaaaagctcatatatgctctgtcccttgagttcttacatattttaggcctgtggcatttctacctgaattatatgttggtttgagatcatatttatgattcacaatatctctccttcagaacttcaagacattattccattatcttagttatttctgtggggaaggccgagtctacactgaattttctttcttgtaggtgacttacatttactgcatggaagcttgaaaaattattgttctttcttaatgttttatgatttaataaggatattcttgatggtgatgttctgagtcaattttttatgaagtaatgtaagctctcttaatctttaaacatttcctgtattttatgttggaatattttctgttgcctttcttagctacatagatactgtttatctttatctttatattaggtcattttgtcatgttctctgtattcaaggcttattatctattcatcttcactgtaaaaatctacaataactgtgattatcaaaagtttttcctctagaagtaatttaagtagagacagggtgtcactcttatcacccaggctgaagtgcagtggcatgatcatagttcactacagccttgaac

SEQ ID NO: 17696 - DNA, 1071 bp, Homo sapiens
tttttattctatgagtttccaaatatttttatcatctaaataaatcttgatttgttttttactttaattgcatagaacggaaagatgctgaaggatgggagaccgttcagagaggaaggcctattcgttctcgatcaacagcagtgatgccaaaagtttcattggcaacagaagccacaagatcaaaggatgacagtgataaagaaaatgtatgtcttttacctgatgaaagcatacagaaaggtcaatttgttggagatggaacttctaatactatagaatctcatcccaaagactcattacactcttgtgaccatcctcttgccgaaaaaacccaggtagtacattctgaaaatccttttactgtctttttcaaaggtgtatgtgtacatgtgtactggaatgtcttagttttgtacttcattttttaacttactgtgaaaattttcaggtctatagacctacagaaaagtggcaagaatagaacaacgaactcctcccatactgttcacctacattcacaaattaacatttgccacattttttcttttctcttgttacatattacacatacatgttaaatgcttaacatttgagagtaatgtgcaaacatcataagcattcacctttaaatcctagagcatggatctccaaagaacaaagacatttatttatataaccacattacaattataaaatttggagaatttgatatctatgtattatttaatttatagtctatatttaaagtgttttagttttcccaataatttttttaaatagaatttcctccaggatccagtgtggaattactcagttcatttggtatgtttctttaatatctttcattggatatagttcctccacctgtctttgtctttcatgacattaatagttttgaagaatacattgtagggttttttttttgtacattgtcctttgtccataattcaatttagcttatgcatttttggtaggaataaagtgattgtccttagtgtcacatctagaggcatatggtatcagtttggttaggtttgttattaactttgagtacttggttaaggtgat

SEQ ID NO: 17697 - DNA, 1057 bp, Homo sapiens
acatgtagtttacttgtttaaagtatatagttcattggtttttagtatattcacacataatgtacaactatcacaacagtcaattttataacattttcttcacctcataaagaaattccatacactttttgctatcccgtaaccccacattctccacggccgtgtggtgttttggtgttaccagagaattttgttttagctatttttatatgtgcattgtggttttaatttgcatttctttaatgactaatgatgttgaacatgatgggcttatttgcccattgtatatcttcttcagtgaaatgtttgctcatgtctttgcctattttctacttgaactgtttgtaataatacagttcagttttgagagttctctgtgtattctagacactcgtgttgtgttggatattttctaccagtctgtccttttcttcacagggtgttttgcacagcagaagtttcaattttgatgaagtatgattgattagtttttttttaatagatcatacttttgtcatcaagtctaagaattcattgtctacccatagattctgaaggtttttctcttacattgcctggaagttgatagtttaaaattttattactaaatctgtgatccattttaagttaatttttgtataaagtgtgcgttttaagtgaaggttcgttttttgcctatggatgtccatttactccaccagtttgttgaaaattcttggccaggcttggtggctcacctgtaatcccagcactatgggaggccaacccaggaggattgcttgagtctagaggttcacatccagcctgggcaacatagtgagaccttgcctttactaaaaataaaaaattagctgggcgtggtggcatgtgtttgtggtcccagctgctctggaggatcgccgcattccagccttggggagagagtgagaccttgtctaaaaataaataaataaaagaaaaattcttttctttctctgttgaattgcatttgcaattttataaaaaattagctggccatataagcgtgggtgtatttctgggttctatattgtgtttc

SEQ ID NO: 17698 - DNA, 1049 bp, Homo sapiens
gttttttaaatgcaattaaatgacagctttgactgttgtagtaatacatacacacagtcacatttgatatcaatttcttcttcctgaggagtggagtgattagattttagtggcctgtgctttaacagtcttttcttccataaaattttaatttccatttagatgcatcagtgatcagtaccaaaaatttatctttgccaagtgtgtagagtgtattgtcacaataatataattttgggttatttaaaggagacaattagaagacagcaatggtaatcattgtgaatggtgcagtaggcacagatgatctatatgtcctagttaagctgatttgaatatgattttctgtcagatccagacaatttaaaatttatctttggaagttcagtgtcagtggaaatgttgtatttggtaacagaaggcagataacccatcatatgattgaaaactggttttaagttgtgcagagttgcctttatttatttagctttgtattagctgcttaagaaatgttggtaaaactttgaacatttacttttttaaacatatttccttctttttctttcttttttttatgactttatttttttaagaccaattttaggttcacaacaaaattaagaggaaggtagagattttccatataacccctgcccccatacatgcatagcctcctccattatcaatatcatacacctgagtggtatatttgttacaattgatgagcctgtgttgacaaatcattatcattcccaagtccatagtttacatttatgtttgctcttggtcttatacgttctatgattttggaccaatgtatgatgacatgtatttgctattttaataatatgcagagtagtttcattgccctaaaaatcccctgtgctctgcctgttaattcttccccagtcccccacccctaaccccagcagccactgatctttttactctctctagttttgcttttttcagaatgttgtatagttggaatcatacagtatgtaacctctacttttatttcttacctttttttttagagatgaggtctt

SEQ ID NO: 17699 - DNA, 1029 bp, Homo sapiens
cagaatccattatatcattctttatgccattgcacagcctcatagcttagcttccacttgtaagtaagaacataaaatatttggttttccattcttgagttacttcacttagaataatggcctccaactccatccacagtgctgcaaaggtcattatttcattctgttttatggctgagtagtatttcatggtgtatatatacattttttttgtccacttgttggttgatggatatttaggttggtttcaaatttttgaaattgtgaattgtgctgctataaacatgcatgtgcatgatgtgtccttatcatacaaggacttcgtttcctttgggtaaatacccagtagtgggattgctggatcatttgatccagcctggcccttaaatgcttttcactgtgaattctgttttgtctgatattaatgttataatcttatcgttttgatttgcctgttatactttagctcaggaattgaaatttgttacagagaacatgagattcaggacaaggatagaaggctaagagttcacttctgcatttatgggagttggcttctgttacctcaccattgtcttacattaatagccatcgtttcttcatctgtatctgtatcttttcttcttagccttattctgcatattccctgttgtgtttcatgcattgtagtcttcacagtaaaattttactgtttgattggttaaataagtaatttctcctgtatatgtaacatttactaaagcattgttttatgagtgtttaagttgtagagatagatagctgtcattttttactctgtttaacatgacactttattgacaatttctgagttgacagatctttgttccttatatctagttttcatatacattatcatcaatatgatagagcattgatttttttccttttgggtatgttgaataatggaataacttgagactgtaattaccatatcataactactgttgggttagtcaaatttgacttgtctggttgtctcagtctgttttctattgcttataacagaat

SEQ ID NO: 17700 - DNA, 1099 bp, Homo sapiens
gatggacatttgggttggttccaagtctttgctattgtgaacagtgctgcagtaaacatacgtgtgcatgtgtctttatagtagcatgatttataatcctttgggtatataccctgtaatgggattgctgggtcaaatggtatttctagttctagatccttgaggaatcgccacactgttttccacaatggttgaactaattgacactcccaccaacagtgtaaaagcattcctatttctccacatcctctccagcatctgttgtttcctgaatttttaatgatggccattctaactggtgtgagatggtatctcatcgtggttttgatttgcgtttctctgatggccagtgatggtgagcatttcttcatgtgtctgttggctgtataaatgtcttctttagagaagtgtctgttcatatccttcgcccactttttgctggggttgttttttttcttgtaaatttgtttaagttctttgtagattctggatattagcccttagtcagatgggtagattgcaaaaattttctcccattctgtaggttgcctgttcactctgatggtagtttcttttgccatgcaggagctctttagtttaattagatcccatttgtctgttttggcttttgttgccattgcttttggtgttttagtcatgaagtctttgcccatgcctatgtcctgaaggtattgcctaggttttcttctagagtttttatggttttaggtcttacatttaaggctttaatccatcttgaattaatttttgtataaagtgtaaggaaggggtccactttcagctttctgcatgtggctagccagttttccctgcactattaaatagggaatcctttccccatttcttgtttttgtcaggtttgtcaaagatcagatggttgtagatgtgtggtgttatttctgaggcctctgttctgttccattggtctatgtatctgttttggtaccagtaccgtgctgttttggttactgtagccttgtagtatagtttgaagtcaggtagtatgaagtctccagcttcgttatttttgcttaggattgtcttggcaattcaggctcttttttggttccatatgaac

SEQ ID NO: 17701 - DNA, 1598 bp, Homo sapiens
gggtgagccgcgtccgggccctgccctgcgggctcatctggggtgtgagggacgtgagaccccgcacactacgcggtctgaggggtgagtggggggctgccgcgtcacctcacttgggggcagccccggccgcgggtgacgaggcttctggaatgtctaaatgcgaggggcccctggaggagcctcccttcgtttgacaggtgatcgtcttcgtcatctgtcattcccagcggggtttaccatgctttccctgtactctgatcttagctctgcccaggaaacggggcaggaatggcctctccgtcttccagatgcgtgcgctgaggcctggaggggcgaagagcctctcgcacctgggagtagtgggacccagcctcctgcctctgttgctgctcttttccaaaacagcacttccttggcgcctttcctctacaccgttttccaggcgcgttcgtgggaacggcaccagggaggaacgggattgttagaaagcaggcacaaaactggtcctgtaagcaacacctgctgctgttaagggggccccagctgagatgaggccgcctgtttgtgagcagcttcctgttgctggtggactgcatctcttattctagttgtgacaagttattttccatgaaaatagctattcattaatagtcattttaccgaacagatactaattccttatatgaattatagtttgtcttagtttatggattaatttcatcattaacttttcatcttcataaataatctggtagaaggatggatgggctaggagtaatacttattttatgaatggagaaacgggggctcaaaaggttattacttgccttagatcaccagctggtgagtggtaaatctggggttaagttttctgacctaaggttggtagtctgaccactgtcccactctggcctatactggtgctctttcccttctgttatttctgttaactatgacttttcctcaaagtttgttggttgcagatgatttatgccacttgaagaatgatatccactaaagaattaatatttttaatcaatcaaagagtcaagttttaatgtgatttggaaggttgtctgtgggagaagtaatctgatggctttgaaggcagactgttttgagtttgaatctcagccccaacccttgtttttggcaaattaatttttctgagcctttcttatctgtaaagtaggaataatatccacctcataattttgttgatagtaataaattaggtgtctgtaaagtattgagaactgttcctagcccatggtaagccctcaacaaatgctcttttccttctttctccacactcccttgagctgcattaaaaatatactctatgtgtctttggtccatttgggtctggtatagcaaaatacctcagactgagtggcttataaacaacagaaattcatttcttgcagttttggaggctgggaagtcctagatcaagatgtctgatgattcagtgtttggtgatagcctgctttctggttaatagatggcaccctctagctgtctccttacatggtgcaagggtgaaggggtctctctctggcctcttataagggaatttatcccattcattaagg

SEQ ID NO: 17702 - DNA, 2782 bp, Homo sapiens
ttgctcaatttaacattgcctgagaacataattgcatttgagtttatagctgttctaacaatgttttgatgtacagagaacagaaatgtatttctctaggaattaggtacttcatcggtctagaattgacttaaattgtttagtaaactttaaataatattcacctcttaagtgtgtttaaggtgctttgcaaatggtgaaatggtgcaaatggtgcaagtggtgaaatagtgaaactgatggatttgagcaggaaatatatatcccgaatgggcagaatataggttaatgtgagggtagaaattggagtgggtgactttataccatggagaattcagattgaggacatccttatgtgtatgtgtgtcttagtagtggttaatcttccacttcaaactttgagagtctgtttatggattgggtacattttgcggaaattagattgacccccaaatgtacagaggaccctgtcttttaaaatcaaataactgaggcttttcctcatcaatgagaagttagaacagcaaattatctcacaaaaaaattatattttgggagaaggtaggtcaaaaattctagaatcattttctctttaatccagcttaatccttttgcttatccaaaataacatggcatgactttattactattccaatatgctaccacagaaggtttaggacttattgaaataaaatgatgacggaagagtgacctttcaaaagtaatatgtatgtaataccacagaaccgtggatttcaaaaatagtgaatgtgaaggaaacaaaaaaccttccaactacattttttttggcatcagaatttgttttctaccatagggctattcacatactgaatttcgttttccaaaaaccaaaagacctgaaaagaccactattaaacacacacattcttgctcattctactccccaggcctttgctgtccagaatggtagccactagccacatgtgtctacatttaaattaatttaaataaaattaaaagtgcaactcagttgcagtaactatatttcaggtgctcagtagtcacatgaggccacatgacagtgcatatgtggtatgtctccatcgctgcagaaagttctttcggacagcactcgctagactagtagtggggatgccaaataagagagacttgattccctgctggctttacgaagagttcctgggagggaagctgaagcttaggacttagttccttaaaaaataatgtactcataagaaattccttctatcactgttgttactgcctttttgatgatttgaagtcattgaactttgaaacagctcttttaccaacaaagaaatacacacctgccatgagagggttttcagccttttttccccattgttgttttctttcaacagctgctgggcatgctgtgtgcttgcatcgtgttgtgcagaaggagtagagatcctgcttacgagctcctcatcactggcggaacctatgcatagttgacaactcaagcctgagctttttggtcttgttctgatttggaaggtgaattgagcaggtctgctgctgttggcctctggagttcatttagttaaagcacatgtacactggtgttggacagagcagcttggcttttcatgtgcccacctacttacctactacctgcgactttctttttccttgttctagctgactcttcatgcccctaagattttaagtacgatggtgaacgttctaatttcagaaccaattgcgagtcatgtagtgtggtagaattaaaggaggacacgagcctgcttctgttacctccaagtggtaacaggactgatgccgaaatgtcaccaggtcctttcagtcttcacagtggagaactcttggccaaaggtttttgcggggaggaggaggaaaccagctttctggttaaggttaacaccagatggtgcccctcattggtgtccttttaaaaaatatttactgtagtccaataagatagcagctgtacaaaatgactaaaatagattgtaggatcatatggcgtatatcttggttcatcttcaaaatcagagactgagctttgaaactagtggtttttaatcaaagttggctttataggaggagtataatgtatgcactactgttttaaaagaattagtgtgagtgtgtttttgtatgaatgagcccattcatggtaagtcttaagcttgttggaaataatgtacccatgtagactagcaaaatagtatgtagatgtgatctcagttgtaaatagaaaaatctaattcaataaactctgtatcagcccccaacatattatttttcattatttgggggatatttcagttccagagcagcagtatcatgttttctttgttggtgctgtctatagttcatcatggtttacgtgtgttttcgttatagctgttgccagattctaaagggcttgatattcaaaaaaccacagatgctttcagtccagtatatcctagaaatatagagctctactttgtgcaatgcactggggatacagtggcgatactgtccttgtcttcaaggagttcggagtcctagtataggagacatacataggagaagataattttcacactgcagtggttgtagtaatagaatgggagtccaaaggggagttccggagaggtcaggggtgacttcctggaggagatgcccaagcttggaggctggataggctttgttgaaagatggtacacaagagtgtgaaacaaaattgtgtgtgcagggagcttaaaatacaaggctggggaaagaagttggagaagcaggaaag

SEQ ID NO: 17703 - DNA, 1029 bp, Homo sapiens
agaattctgaactgtgcattcttaatgattttatgttcagtaataaagccacatgtactagcatgcagcaaaaaagttttggaactgtatggtacttgtggtcatgaaatatgcaacatgtatatagaagactgataaaaataatcactttagctatgtccctcatctagttaagcggcttagcctgccagacatttctttattaaatatttttcaataggggctaataaatattttaactagtctcttaatttaaatatgactgccatatgtgttttatacttaagtcaccctgacttaagtaaaagctgataaagcttgattttttcacttcagcaaggctgcttaagtttagggattcagagctttcacagactcaaaacctagtggttttgaaaattttaaaaacttgggttttaaggggagaaaatttatctgaattaataattttccctaattgtttttaagagtacctgtaaacattctaagcttctggtattcaaaatctgatagattggtgccctgggtgtggaaaacctgaacaaaggcagaaataactgaaagatcagtgagcttttgtgcttatacactgatcctaatatagacatttagagctggagaggatggttggagagtctccagtcttggccctctttgtttagccacaaaattttgggtgagcaaggatagtgtggcatgaccatcacacagagtgtcaactctagagacccctgcctttgtttgtactctgcctccaattacaagtataagatttgcagaagattaaattcctaaattttgtcaggaaacctgacagttaattgacactttagctggataaaatacagaggtaagatggcagagttgagtagttacaatattgattgatttttgtcttggtttggaaagcctaaaatatttatgatatggccctttaagaaaatgtttggtgactcttgctctagtccattaaataatctagatttgggtaggaccaaagtgaccaagaaagaaaaacctgaaaaatac

SEQ ID NO: 17704 - DNA, 1075 bp, Homo sapiens
agctattcaggtaagcacagcttgccaaggagttctatcggagtgagttggttctctgttgtcagccctgaatggttttaatccccatcacagtgaatctttgtgtatgtaggtaatgtggaagtgactgaggtactggcctccagtttcccatgttttccatttcttgtctatacacctagacccggaatggtctaaagaaaccagaaatctggatggggagggaccacgtgttgagggaactcctcgtcttactgtctttcttgattagtgagtgacctgttcaaaacataaacgaactgttgtcttagtgtattcttggaagatattttattagaatgtcacaaaatttttaaaaattgtacttctttctttcagtttgggaatacaaagctttattcagtttttttgtatgctagttctccctctagttcttgtttttctgtcctcacaggttttatatattcatatacgtaaatcaagaactggtactacagcactggtctcttgcactaaacacaacaacttttaaaaatagagacaaggtctcactctgtcacccaggcttgagtgcaatgacatgataatagctcactgtaactttgaactcctgggctcaagcgatcctcctgcttcagcctctccagtagctgggactacaagcacgggccaccacaccagactaatttttaattttttttttttttttccagaaatggggtctcattatgttgcccaggctggtctcaaactcctggcctcaagcaatcctctgtcttggcctcctaaagtgttgggatttacaggcgtgagccaccgcacccagcttatgctttcttttcttttcttttcttttttttttttttacgacagagttttgcttttgttgcccaggctagagtgcaatggtgtgatctcagctcactgcaacctctgcctcccaggttccagtgattcttctgcctcagcttcccaagtagctgggattacaggttcccgctaccatgcccagctaatttttgtatttttagtagagacaggtttttaccatgttggccaggttggtcttgaactc

SEQ ID NO: 17705 - DNA, 1348 bp, Homo sapiens
ccacttattgagggcaactgtagtgagcaaagatccccctaccaccatactgatccgtattggatgtggaattgagctacagtaagcctttagggatgtgtaggtgtgtgtcatcatcattgttattatttggttatggtttcttggtcctagctgaaccatcaattcgtgaaaagtaggtgaagtgtggataactttttaattttatctagtatagaaatgctcttaacaaggaatcatagaattttcagctttactgaaaaaagtctataacagttacggtaactctcattaaattataccatactaagcaataataggaaatttttaccagcagtgcttagagaccagtactgactttgttttctacagggggcagctggcattttatgctatgtgggagcctatgtcttcatcacttatgatgactatgaccacttctttgaagatgtgtacacgctcatccctgctgtagtgatcatagctgtaggagccctgcttttcatcattgggctaattggctgctgtgccacaatccgggaaagtcgctgtggacttgccacggtaagatgtgttgtgagaacatgcaggagtatttagtctatgctactctccttgaacatgagactccttggctcttatagttggaacagagttaacatttaaacttctagcaattatctctgataactttttttaaatcaagagtgtatttaaagttattttttcatttgtatataattttaaaccatgttttcttacagtttgtcatcatcctgctcttggtttttgtcacagaagttgttgtagtggttttgggatatgtttacagagcaaaggtatgttgtctactgtaattcacataatgccttaaaaggtggtttaagtgtttcaagtaaaatagaacacattcattttatcagagtaaacattttcttttgccttacttgtttaatctgtatttcaaatatctaaagttaattggcaaatatttacatgtcaagactccttacctcatttaatatagcagagtgttatatatgtattgttcttgattataggtatttatagctgcaaatgaataattagctgagaagtttgttcagatttcctcagcacacagattgcctatatgaggggaggcataattttctgatttctgctttagaagaaccaaactcagaattgcgttttccattgtctctttaaaaaatgctttggtcctaaacatagaaaaaggtgttgtgagttgtgatcccaccttccacccctgtcctgaggaacaaggggtcctgccaacttagaacaccaaggcagctggtgccagcactcctttcttgcccttcat

SEQ ID NO: 17706 - DNA, 2021 bp, Homo sapiens
taagcattgaactgaagagaaaccagatacaaaccaaatacaaatacaaaccaacgcaaatacaaaccaaagcttatgatagagttgggagggtgatttcaagggaaaggggtgagatgaggtgtactcaataaactttaactgatacctgctgtctgccaagtactgttctagatgatacaagggtgaaggacagatgggtacaattcgtgctctcaaggtgtgttgagacaggtatagctataattgcaaccgtttcgataaatattctgttagaaccatgcactgggagatgtttgtgtccaccaagggcagctaatccagcctgaaatggtcaagaatggcttccaaaaggaagaggtaacatttaagcttcatcttaatgagcgacaaggagttcccaggcatttgaagagagcattctagagagaacagcggaggcaaagaagtgagagaatatgtggtccatttgggtataacagttctatattgttcatagttcacaaggggtaatgagatctggggctgaaaaggaggaatagcttggttcatcggggactcacttgcctcatcctgattttaagtaaggctatggcttgatctggtttgtatttttaataaatataaccctggtagtataaagaatgtattaagatgcagggagagtcaataagtaagatttagggggataagataaggcccaaattaagacagaagcactgcagtggggttgaagaggagttgaggtattcgaataatgttttggaagtaaagttgaagttttgtgatttatgggttatagaggtggggcaaggaaagttaatcctcagatgtttgaccagaaaaattagatgtctggtaccttttgctatgataggaatgtaagggaagattagatgggctgggcaggaaggcagaaagggtttgagacaggttgaggatgacatgtctctggaacttgcagatggaaatgtgtagttctgagatgatagctcaggtagtgagctacaatgactaatgaagccatagctgctgtagcccacggagagcccagagaatgactaaagaataaggccgaagacagaatcctggagatcactaacatctcagagtccgtgaagagaatgaaaaagtgagcacctggggaagtaggaagaaaaccagcagtggggcctcttggaagccagaggaagagagttttaaaacaatgtttttaaaaattgccttcattattctagttgtcttctcactttaaaaagttcatgttacattttaaaaaatcaaattactttcccaaatttacataaatggagtctttttcttcctcatctgacagtgatcctaatggcctagtgtaaaaaaatatactgatgatccccaagcttactgaatttcataaacttaaatgatctgggttttcaggttcagagaagttaatgatatttccagtatcactgtggcagctgtttctagtttgaagatgatttatatgttaaattttaaaggatgatgaaatacttcttgtgaaagtttcaaagtactctacaaatgataactcattgttatccaagtgataaccaaatgttttaacacttactctgacactgcatttgcttgtttgtatatgagccagtggcattgggctgtcagcacagagctggtacccaaagatagcaaaattgacaatagcggagaaagtaagactctgcagctggagaatgatgcctggagcagcagctgaaataagacacacctatcacttgtctttgtgtgttcactttccctttaggtctttaataccttgttactcagagtgcgctccaagaagaagctgcaccagcatcacctgggaacttgttagaaatgcagactctcaggctcctcctcagacctcctgaatcaatctgcttgttattcagatcctcaggcaattcctattcacttcaaagtttgagaaccaccattctaaagaattgatagaggacttgcagtgttctttaatgactgagccctctagcttt

SEQ ID NO: 17707 - DNA, 1187 bp, Homo sapiens
gaaaattacccccccaaaaactagtttctaagctatggaaaaagcaatctcatataagaatgaaatctctttaagatatttcacatttgtgcatatgtagaggaagggtaaaagcataaaatgaagtatcatacttttggaactcatatacttgcaaaattttataacaagatggctttattttttagacagcttagtggaaaagcactggctctcctaaagttttaaaatgttgtgacttaatttagagtataggcttattaaaagataaagaataatggttttttaaaaattattctttctgtaatttcagacctcagccttttgcctaaatttcctttcacttctttgtaaaaaggatgaatatttttagtacactgtcctggcacaaatcctccttacaggctcagattttctcagtggtgactaaagcagttcagctgcttccaagttctacatttcatctccttttctgttgcacctccctcctccccagccccctcctttgcagctgctttattggcaaagctcagatcctttgatagatctcaatcccatcatggcccttcaaaagaagaatttaagctcaccttttatatagcttttctgatagccacaatttctgcattaaaaatctgagggatgacaaagtccctatgcatactagttaggaatttcttagaacctctcttccatttactatactgtttcccatgttcttttgggtgtttttcatattgatggttggatatcattacaacaattacttttggctgtttttaggtcttcagctgctactgggatacctcttctatattttcaaagtaaccagtgtcatttcataattgtttattatacagcttaagatataagcaccatatacagatttcagtaaaagcaaaatttgaagctgttttcaatttaggaaacacatcgtctatttataagcaatttgatgtgtatagtttcatatcagcaatccgtgcagttttctctttggtgtgtgcaactagtaagttcctttaactatatgttgccaaatagagctttgttatgttctcatcttgttgtgtgacttggatgttgactgcagcctgggaaaaaaaactgttgtagagtctatcagaaaagaagaggcagctttacaaatggcatctccccacagccctccattgcatttgttgtgc

SEQ ID NO: 17708 - DNA, 2677 bp, Homo sapiens
aataaaacttatcagccaggtgcggtggctcatgcctgtaatcccagcactttgggacgccaagggtggcagatcaccctcctgactaacacggtgaaaccccgtctctactaaaaatacaaaaaattagccagatgtggtggtgggcacttgtagtcccagctactcgggaggctgaggcaggagcatggcgtgaacccgggaggcggagcttgtagtgagcggcgatcgagccactgcactccagcctgggcgacagagcgagactccatctcaaaataaataaataaataaaacttatcacgcttatgtctgtgaatgtatataattaaggaaaatttgctttgttaaatataacactactatttgagcacctactttgtgcttatattgttgataaatgatgaaaagacagtgaaaaatccctattcttacagaacttactttccggtgaagcaagacacacaaaaataaacaagaaaaatgatcagagtgatgtgttatgcagagaattaaagggtgatgtgataaagtgattgggtcgtgctttatgttggcaaaaaaaatctggagtataagaagttgctgacttgggtgatttggaagagattgggagactggggggattcagaactgaaggaacaggctgtaggctgtaaggcaaaaatatacttgctatgttcaaattactaagaggtttataccgtcatgcttttgtttaaaaaataaaactttataatgaggtatttcaagtgtggttctcccttgtcacaaatcttgtacatactttgtgttttccagcacatcctacacattcgaggtggtaatatgatacttttaaaccggaacctgcatctgatatcctggaatttgtttctctacttcctgtatttctcctatcatgaatgactgctctgacaaagaatatgtcatgggacacaccttcagctaactttgctttttcatgcttgttttcaattcactagaagaaaatctaacttgtcaggaagcaagtacataataggaagtgtctgtcttagtttgtcttcaacagttaagaaaatgaatgtttccactcttactacattcttagtcacctgtccactgaccaagagccttgtggccctgagtaatcatttagaacttggaatcagcaggggcgctctctctagttgcagtttagggaatgggttattagctttctaggatatttatcatgctttgaaataatttaatgaattttattccataagatccaattcaggttaggcttgtttgattttttttttcagaaaatgtattccataaagtttgtacttagaccagacgggtgtactaagaatcattcatgagtaaatgtgtgttgaatatctacccttgacctttttttgagaaatagagtaaacacagtccctgtagtctgacagctaatggggagagagggtagacttttcatcgaattaaatttctacatgcacctttcccccagaaatcttactcatggctggtctcaagtaagtctttattgaaaaatattgacatatcttcttcctcttccttctcctcactgtcttccttttagtagttaggcagagttaataggtaagaaaaattatctgcatttatgtgtagtttgtaatctactaaaggggttctagaataaatgttgacattttgtaacttacattgttgttgctactgattaaacacataacccaagtgtggatgaactctagcattacaaagcttaagcacctcaggctcctatgatgttgtaatggactctttttacaattagagtagggtggggtaacagagggtctcaaagaaaatgcatatttaaatttcaggcttctcagataacctctggagccctactgtctggaaacagccagtttccatgctgttacaataatttggcaatggcaattggttaatctccagtttctttgccacctgaaattttgagttgttcagccagtagatattggattaaatagaacaactttgttaagctggtttaataatgattatgaaaaaccaaatagagaaaaggtgaaaataaggcagaattgaggagcatgacctttggcatatcatcagagtaatagcagtaaaaaggattaaaatatttctaatttaagaataatggcaataataatagtgatgttgatggcaaaagtggcttgtcagaactttaaactcttagccaggcttggtggcacatgcctgtaatcctagctacaagtaagactgagatgagaggatcccctgagggaaggagtctgaggccagcctgggcaacatagcaagaccctgtcttaaaaaaaaaaaatagaattttctcattagtatagtggtgagttaaaaaaacacacataaaactttacaccccaatttaagtaggactttaaaaaaaacttgtctccttgaaaagtaatatttatgagaaaaggaacataatgtacattgaaagaattgtgttagataatcagaaaacatgtacaggatgagtcaaagccacacagacctgagaaaagtggtaagtgggagagattggcagaggtgcctaaaatatttaggatggaagaggtgtctgtttttggttggttaaggacacatccaggaatgaattcattggtgagagaacattaaagcctcaatttcagacataatt

SEQ ID NO: 17709 - DNA, 1087 bp, Homo sapiens
aaatttcttaaattacccagtttcaggtattctgttctaagcaacagaaaacagactaagacagtttctcaccaaattctagaatattaagatttgtagcttgaaagataatcttggacaagtgaaaggatgtacagcttggatcatcttggatctctgtttttatggaatgatgaggctttaaatataagtgtattcatgctggacccatgaggatttattgaagaaggttagaagtgttttaggtaaatgactaaattttaaaggctttttttttttttttttttttttttttttgagacgaagtcttactctgtcgcccaggctggagtgcagtggtgcgatcttggctgactgcagcctctgtctcccgggttcaagcgatcttcctgcctcagcctcccgagtagctgggactacaggcgtgcgccaccatgcccagctaattttcgtatttttttaacagagacagggtttcaccatattggccaggctggtctcgaactcctgacctcttgatccatctgccttggtctcccaaagtgctaggattacaggcgtgagccaccgcgcccagcaaaggctattgtattaaataggcattagcctattctgtaaactgcacctttgtaccaaggtcagacaggatttttagtttggtaagtcatttaatctgaccaaagagggctcgtctaaaacaagtttaaatcagtacttcctaccattaagtttttattccggtaaattaattgattatttaatcaagtcctatgttatacaaattacctttactttttttttaaaccctattagaaaaactaattggctaatacttattttgctcatatttatcttaggcattacagggactggaacagaaagctttgtccatgcttatagaatttataatcttaaatatctatttaggttgttgtttttcatctgagaggtgatagtataaaactgagacacctgtagagtgggggaagtaccgcaaaaaagtcaaacgccttttaaataaatgcctttagaaatagctttggaacgtggcaccttcactaaccatcattcattcatatgaaatact

SEQ ID NO: 17710 - DNA, 1025 bp, Homo sapiens
aaggttatagtggaaagagcaggctttggcattaaacaaacttaggtttgcacacataaccccgggctttttttcttttttaaattcttagatcctcaatctactgtgaaaggttaatgtgaggactaaaaatggtacacttaaagtgctcaccacagcctggcatgtagacaaccatgagaaatggttaccaccattattattgccacttaacatggggcaagccttgcgaacaactttactatatgatcgtttgtccctaaccagtcaccttccagttaatcttccctgatacatcataaacctggttatgagagtgtgagttttgaattgttttattatctttcagatctgtaagagcaaagctaaagaatctcagcagtattatcacagcttggctgtccggcagagtctggctgtccattttaacattcagcaggactgtggtcatttccttgctgaagtccctaaccgtctgcttccctgggaggatccagatgaccctgaaaaggatgaggatgacatggaagagactgaagaagacgccaaaggagaaacggatgggaaaaacccaaagccctgttctgaagcagcatcatcccagaaagagaatcagggagtcatgagcaagaagcagaggagccacgttgtggtcatcaccagggaggttccatgtcttactgtggctgattttgtgcgagactctctggcccagcatgggaaaagccctgatttgtatgagaggcaggtgtgtctgctgctcttacagctatgctctggtcttgagcacctcaaaccctaccatgtcactcactgcgatctacgcctagagaacctgctacttgtccactaccagcctggggggactgcccaaggctttgggcctgcagagcccagccccacctcatcttatcccactaggcttatagtgagcaacttctctcaggccaagcagaagagccatctggtggaccccgagatcctccgggaccagtctcgccttgccccagagatcataacagcta

SEQ ID NO: 17711 - DNA, 1063 bp, Homo sapiens
gggaaactaaggccagagaggaacaatcacttctgcatggggacaccatcttcgtggcaggctacctcctgactcctaggtagaacctctcctattatttcatgcctgaagcagtaaactgaccttgctgtgtctcagtgttgtttcttgatggaaaaatgacagccttttgcttagaatcaggatggacagttggcaaaattatggcttagtatcactgagatattgttttttcattgcacttatgagatcattttataaaaagtactaccatgcgagaccacagaggaaatttggatgcagttactttgaagaggatgctaaaaatttcacataagcaaaaagtataaattttttagttattttccaacagttccagaattgggatagtaggtatctttaaagtagtcccagtctttgttctcaaggatagaacacacaaaactcagtaaagatgtacacttccctgttacaaaagcggggctgcttcctttcttccggctatgccagaatcttgttaaaagcttgtaataatgtagaggtgaactgtggagaccaacatcttttactgcatttttgactccagagtctccgtttatctcatttgggtggatgctgacaaaacaagatactaaatgaaaaagcattacaggaacaactatgattggtaggaatttacaactagttcagactatatatacagacaattaattactggcttagtggtgaggaaaaaactagaggggaaaccacttccactttcataattcaaaataaatatttttaacagtgaaactttacagaaagtgattgatcagcagccaactacacatactcatggccatcctagttttgtgtccgttttgtttcaggctcagtgcatacagaagcacctgagtctcaactgggaattgatttaggaaggagaggttttggatgtttgtgtaaacctggaatcaaaatgagttgtctggtgggaaaagggagcatggctttaattaatgaggtgagaggatatagttgagaatcacaagttggaattcaagttaattgaattcctaat

SEQ ID NO: 17712 - DNA, 1050 bp, Homo sapiens
attttttaaatgtcacatgaaagtagcagaatactaataacatgatcataactttaagaaaattgacctacaaaatggtaatactcaaataattcctatgtcaagctggtaacagttattttgattagttaaaaaatgatgtcctaatgtcttttcaattaaaaaacaagaatcagattttggatcattaaacactaagcttattgaaaacaggtatccttagttattcatctctgtagtcccatcctctagtaccaattataaacagcacctgtttaatgctactcggctttggcacactctggttcctctctctggactgctcttctcctgggaggcagtataatacaataaagaacttctgcattgtgatctgctgtgacctatttcagaatcacctgagggatcctcattaaaaatgtcatttcctacagaatcagaatgactggcagtaaggccttggaaactgcatttgtagcaagtaccccaagcggtgcctaggtacaaaatgtgaggactgttaacaaagtggctaagaatttaggcttttaagtcagacagacctgggtttaaatctgtgctttagctacatattagctgttacctttgccattacttgccttttctatatccagtgtctttatctgtaaaatggaaaaaatacttcaggtcttcttaaaaccattgtaaaaaatcacagaagttaatatgtatgtggtgatatatatacacacacacacacatacacacacacacacacacagtgctgagagcatcatttggcacaaagttaagcatttagtaaaagttggttattccttccttttcacatacttagaaagctcctatgtattcttaaagaatccagctctgaattttctactttaattttctgagcacatgttgcacgctatacctactggatttcttgatcattgcattatcatgagacagttgtataattaaacaaaaacatgcttcctctcccctctccccactattatacttgaccttttccatggcggggaccatggcttattaattcttata

SEQ ID NO: 17713 - DNA, 1050 bp, Homo sapiens
gccacagtattagagactactgtcgacacacacacaaatgtgttttgtggggtaatatccagattgcttgctatgatagttaaatcatgtggaaaaccttgaattttgatgaagacagctcttgcttacaaatgcattttatccccacaaaacatatcttggctctgattactctaaggtaaaactctactaaacatgtgctgctgctttgcttgtacttgggtggaagctatgagtgagtgagtgaaaggtgcaaatgaaactaagttcttaccaggtagaactgaaataatagaatactgacttccaagtttgcttcaaaagggctcttagcaagtgaattcacaatttacagtattaatcaaatgagggaaatgcattagaatatcttgtttctggaagctttgttggctataggctaatttctagctctttagaccagttttggccgtcatttagtcactagtgacttaattataattaaaattattgcttctcaaattttcatatacatactaaagcatggactgattctaaatctggagtggggcctgagacactgcatttctaacaagctcgcaggtattaccaatgctgctagttcgtggactgtattttgagtggcagaagtctaaagagttgtccttgttacctgtgtcacctgtcttcttactctgtttgactttttgcctgtaagattaaatctgtttgcgctttattttgccattttgaactatttcataatgctatgctttctatggcaaagaaaatagcctctggaagacatgcccttttattagtgggagctccatgctttctctggagttccagcaggctttgtctggagtttgtccagagggctatagtgaagggacccagaagagcctttcattgtttctgcttgcaagaaaaatcaatcaccaagaccagttgattaacagagattttcccacttaactatcattatgtgaaaggagtgtggattctgcagtagaacctgtgtgaccttggtcaagttacttaatttatttgactctcaattccttagtc

SEQ ID NO: 17714 - DNA, 1612 bp, Homo sapiens
caggaatgatggtagtataggcattcttgtcttgcacccttttcaggaggaagcagtcagtctcactattaaatacgatattagctgtagtttttttgtaggtgccctttaattatgttgaagttcccttctatttccagtttgctgagagttttcattatgaatggctgttggattttgtcagattttccgtatcaattgatatgatcatatggattttattttttgagctgttaatatagtagtttacatttatggatttttaaaaaaaattttggactttctgtatattccaggatgaaccgcacttggttgtgatgcattatgctttttacatacaacaggaacattttgttgagatgtttgtgtttatgagagatattggtgtatagtttttattgatttttttagtactgttttgcctcttttaaatttttttttctgccaaacaaattataccaaacattttgcctgattttagcatcatggtgaagcagatctcataaaatgaatgggaagtatatcttcctcttctggaatagactgttcagaattgagattttaatttgcatgtcactgaagaataatgacattgaatactcttccatgtgcttattggccacagaatttgtttttgaggattagtgtcagacttactatgttaatatatattgaattcagccagagttgggccctcttaaggtttagtttaggtctctaaatgaaggtggtgttgtcagttttactatgattacacccgtagatttacttttacaataaagtttttaaaactgaggccatattgtttaatgtatatgatcattaataatttataaacataagctttttttttttgagacagggtctcactctattgcccaggctcacggcaccctcaacctccagggctcaagcaggtcctcccacctcagcctcccaagtagctgagactaaagacacaagccactacaccaggctcatttttttttattttttgtagagacggacttcctgtgttgcccaggcttgtcttgaactcctgggctcaaatgatcctcccaccttggcctcccacagggcttggattacaggtgtgagccactacacccagccaaacaaaacatttgtaaagaaacaagagaaaataatttttctctaatgttgaaatagtgaagtattatagttgtatttggaaatgaattaaaacttttataagaattcaatgaatattacctattaagaagttgttttgccaagtggcatatgaatgtttctgaatgacacagatgataaagatatgagcatttacttgtcagcaaatgggcatcactgtgttttgctagtatctaagcattcctgaaaatggagctgtctccagctggttgtaattaggtttggataatttcctgcctggaagacactaaagtttctttaatttctgggatccacagctttctagttattcttatttcctgcaacttaaaagtgctcatctatttgtcatagtattttaaaaaatacaaacagaaacatataattaggttgccattattattgacagattttactctctcaaatttggaaatgtggaattgagcagttgtgtgatttc

SEQ ID NO: 17715 - DNA, 1064 bp, Homo sapiens
agcatttttgttaagtacagattagtttgttcagttctaggcttaaacattcctttcaggcatatctagagtggcctttattctagggcccctcactcagtgatttgtcccttctggggaccctgctgattgctttgtatatttgggtttctctcttcttgcggaagggagcttgttgaattcttggtcctatgtcagctctgagaatctttgtattgcaactatctggtaacattttttccttagatgtttttctctggtctcaaaaaaaattttacccttcttaatgtaacgtttttatctagctaaatgctcaggagaacccttattcagattactttagctgtctccctcttctctggaattctgctccataaattctagccttcttggcctccttgcacttttttctatctctccaagtaaacaagattgccaggctctgtgtaaattcttcctccctctactgaagtggtaaatttctttctggctgagagcctgagttgctggtaggactccccttatttctgttttcttagggatcataatactgcattgcctgtgtctgaaaatagtcctttccagtattttatgctgtattctaattgtttatggtgagaggatcatcctggaactgtttaatccctcatggtcagaagcagaagttgaattattgtagaataggttttaaggctaacacctttgcagaattcagaagctcccaagaaattgtttcctaacacttatccattgatgtactttttctcagtattgttataaatgaactgtgtctgctatgggaactattatttatttttcaaatcagagagcccattacaaactttaaatcagaaactgatcagaagaaaaggatatatcatacttaataaattttatgaatcaggaaaattgatttcttgagaatataaaaattgtctctattatgagatactaattttaaatataaaattattaacattcattagaaatatgaaggaatggcattaccagagtgtaaggactaaaataaaccatttgatctagtcatttaaaatatgaattct

SEQ ID NO: 17716 - DNA, 1055 bp, Homo sapiens
agataatgagtataatcagtatacacttatttttccttatatttgatattttcttcaacaattttgctcctttttaaagaaaggtgtttgtagatcactgaaaagatttaaagccttgagttttataagtggtgctagggcacgcttttttttttttttaaactacatttggggcaaattatttcttaccttccgtttgccagaatttcacctgttatagaccagaataatttatccaccttttctgtaagaatagtttaaaaggtaagagctagtaggacattagatcagagtagttactaaatttcaaagtattatatcatagtgattatgaatattgttatagctggagacagtcttctttggatcctattaggttgtcttcttggttctagtgcaaggtgtggcaaagctttacttttgaattagcattttatacttttgccatcttcagagagtttgtagaacattgaccacattgttaggtggttcgtggttcaggaaagcaaatactaactccgactgtagtagctacctgaagcacctgttcagaattaggaggtttataggggacatgtggtaaggaggggtgtcatctattagcatctgacatgattgcaagctggggagagagggagtgggttttgtgttacttataccgcatgtttgctaaattcataaaggagaattagaataggtatttattctaattaataaattataaattatattttataagttatacattaatttataatttatgactaataaattataacttataaattaatgagtcattcttaccatatccctcttcagaaaatcattctctctgttcacatacctccagtgagaagcttactgcctgcctgagatcccactctgtcgttggacagctctgttagaaattctcctctgtggtatttttcttcccacacatttactactgtgtgtttcaaacatttatgaaaccctaatataaggggtttctggcaagggttaattatgaggtttttgtgtcatttatcctttttgcccatttgaaaacttttaag

SEQ ID NO: 17717 - DNA, 1035 bp, Homo sapiens
aaggccagatcacaaagtacctacctgtaagctgtatcaaagggttttgattgggagctcttgaaggattctcaccaggagattaacatggctaatattttattttaagaagatggtttcaagagtagtatgaaagatattttggaatggagagaccacttagaaggctatatatagtccagataggagataacttgaagaggggcagatgccagaaagctttagcaggtggaattcatagaaattggtgactaattaaatattggtgttgggtgaggagaaggaagtgtagaaatcagagatgactctcaagttgggcaatttaatgggtgtggcactatttgtttcctttccagtgtgtattcaggtatagaaggaacttttggagtggaagataggattttgtaatatttagtttgatgtttctctgagatagttgagtggagatgtacagatctgtctgctgttcttagagggaggtggaggcttgaaagggagagagagtttttgaggttaatagattttagagagtgattgaagaaggaattgcccgggattgaggacaaaatcctcagggacatttagatttagtggacaagtgcagaaaaaggaactgggaagaagatcatgaagaagaaatcaggagagaaatgtaacaaaggatttcacagtaacacctttggctttcgtctctaccttgagatgagatttttcttttctgcatcctatgtttgatctttgtcctcagaccttttcttactttgagcattctctgctgggagacattgtggatgagaaatagttttatttttggacccagcaattgctgacttctttgtatttcccctaaattctgctggaaaagtactttcttctttaggtcatctctttttttaccttatattatacatataaaagaaaccagttgacagtttggacattctgctttgaaattaccttaggtagaagtagtagttcattaccaacattttctgtttttttaccttactgcaggcaacagttttgctaagtttt

SEQ ID NO: 17718 - DNA, 1063 bp, Homo sapiens
ttaaagacatttttattttcatcctttgccattttaaaattaggttatttgtatatatatgtttatttatattacatataatataaatgtatatttacattaaatagaaatacagttgtgccttggtatattcagggaattggtttcaggacccttgtgtataccaaaattcacacatagtcaagtcctgcatttggtcctactaacccacctataaagaagagtcagtcctctgtataggtgagtgtcacatcccatgaatgctgtctttttttatccatgtttggttgaaaaaaatgcatataagtggacctacacagttcaaacctatgttgtccaaggatcaacttatatgtgtatatatattggctggatacaaatctcttatgagaaatgatttacaaatattttctcctattctgtgggtcttttcacttcttgatattgtcctttgaagcacaaaagtatttatttacttatttatttttttggttgcttttggtgttgtatctaagaaacaattgtctaattcaaggtcctggggaatactcatgttttcttctaggagttttattgtttcacctcttatttttatgtctgtgatgcattctcacttaatttttataaatggtgtaatgtaggggttcaacttcattcatttgtatgtagatatccagttgtctctgactatcggattatcttggcacccttaaagaaaacaaattgcctataaatgtaggggtttatttctggactttcaattctgttccattgatttgtctatccttatgtcagtaccacattgtcctgattgctgtagttgtataataaagttttgaaattgggcagtgtaagttcttccaactttattcaagattgttttggctcttctggattgcttatattaccatatgaatttttggattagcttgtcaatttttacaaaaaaatccagctagattttgattgtgttgaatctgaggcaggaatctttaaatcagtttggggactttacagtcagtcatccaatctgtaaacactgaatgtttttccatttatttag

SEQ ID NO: 17719 - DNA, 1053 bp, Homo sapiens
tatccatagaataaaattacttagtaaaaaggtaaccaaaataatgaagtttttactttcagcccttttggtttgattaatgatatgaaaataacataattcagccttaaagtcacagaatttatatttgattttgtagatgtgttggatttttctttctttctttctttttttttttttttttgagacggagtcttgctctgttgccaggctggagtgcagtggcgcaatctcagctcactgcaacctccgcctcctgggttcaagcgattctcctacctcagcctcctgagtagctgggactacaggcgtgggccaccacacgtgattaattttttgtattttagtagagttgggatttcaccattttggccaggatggtctcgaactcctgacctcattatccgcctgcttcagcctcccaaagtgttgagattacaggcatgagtcaccgtgcctggctcgatgtgttggatttttatgttcacaaaagttatctgaagacatatgcagaaatagactgtctccattgaattttgattaactgatcagcacattaaatctgtgggttttggtaacattcaaaattatgggtaggcaagggactttagaaattgagggcattctctgtgtcatcacttggttagaggcaaatctagggaaacaaaaagatgagaatcactactataagaaattatcccttttatacctttgctcatttccactgcctggaacgtccctttttcttctctgctctttctcatatcttactcaaagactttcccaaggtggtacctaaacattttcccctgaggtgacattttgcttcttggaattttataacattttatttattacaactttcaagatttttaaaacttttttgtgtgtacctgagctctgtttcctattggattataagctttccaaaggtatcatggatgtcaaattgggccatgaaggatggaaggaatttggataggtggagaaaggaagtcatgtccataggagagaaaccacatagaccaaggtccataggacaaaacagatgct

SEQ ID NO: 17720 - DNA, 1051 bp, Homo sapiens
atatttctaagagaagaactcgagcctcacatagccacacagacaaggcgaaagagtatcagacaaggtgaaagaatgagccaaggtatggaagtattagacaacgttaaagactggggatctatagacattcagtagaaatgattggtgaatgaggaaatggaaagtagcatggtgaaggatgagattggaaaggactgttgggtgtcaaatattaggggccttgtgttaccaggctgtcaagtcagaactttgccctgatggtggcagggaatccctgaaggaagctctttgatttgttagctgtttctattaaccactcttgccccactaaagttaaagatagagatagagatagatagagaggagggagggagggtatgagtgagagtgagagagaaagagagagacatggatggagtctagcttgaaacttttctgtgaattttaattttacaaggatttttggtttttgatatattgtatccaaaggcagagaaaatatgaaggttatcttagaaccctgacattagaattttaaaaacttaactctggttttattccaaattttggcaaagcatctcatttcttttagtcccacttccagttcagatacaattaggttcttagattcttgtttttgccctatccctttttatcaaggtggctttgggggatactatggtgtgctttggggttggggtagaggtgaaagtgcctggagaaggcaagcaggcaagctaattgccatcaaagcagcaataatggctaaatgagtacttctgaaattgctccttctagaatgtttttggagaaaatgttgggagagtagagtgttgtaattgaaaaggatgattttctggtggttgaatttcagcactctgtaacctggatggataaaaatgactctatgccttacaagtgaacctttctgtttactcaatgaattgaatctgtaatggaaaagataaagtttgttggtaatgtcagattcagttcttctttactgttcttagagccattgccttattcttttaaagaaaaaattatt

SEQ ID NO: 17721 - DNA, 1037 bp, Homo sapiens
aatttattcaagtatctctggtaaacaattcatataaggcctgtttgatggagtatttttttttttttgtagtgtgaagttttaacttggagacccagaattcaaacttgaaactgtagaagagaggatgaagagaatattagcagttgaaaggaaaatgtagaaatagaaacattatgtatatttaacagaaaacaatgatcaacatgaaatgttgaagatatatgttctaagtgatagctatatgtagatatggttcagagaaggcaaattgcatgtattgtttgatacacggagagaagattcaggtaagcattctggagttaatatttcctgagttagttgacatagtattaaattatatttttctgtaaacgagatgccaatatgagtcgtcttttatttggagtgtttaagcaggggaaaaggaggcagacactgaatagcaactgcaactatctgagcaagtgttgtaatacactaaaagttctgatacagatttcattagctgcacgttagcatgtcatatctatcactctgaggctttaccttttacctatgaagcccacattggtaattaaacattttcatgtttaaacttctacaagaggctcaagttttgtaccttcagtttacgcgtgatccagttgcatatacttttcaagttgtttttatttttttgagacaggatcttgctctgttgcccaggctggagtgtagtgatgctatcatgacttactgcagcttttacctcttgggctcaagcgatcctcctgcctcaagccccacaagtagctgggaccacaggtgcacaccaccacgcccagctaatttcagctatatatacttagaacatgctaagtatacccacttgctaacattcacttcaacagggtaaaactggccctacctcccctccttactaaccaactctcctctgacttctgggtttgtcaagaaggctgccatccacatagttggccagataccaaaatgctgaagtcactttttattcattgagtgcttcatctttatat

SEQ ID NO: 17722 - DNA, 1046 bp, Homo sapiens
atgggagtggagatatgtctttgatatactgatttcctttgttatgggtatatacctgagaatgggattgctggatcatatggtagctctatttttgttttttttgaggaatgtccaaaaaccttctccatagtgatcgtactaattaatttacatttccccaaacaatgtgcatgggttcccttttctccacattcttgccggcagttattattgcctgtcttttggataaaagccattttaactggagtgagaggatatctgattgattttgcatttctctgatgatcagtgatattgaacaccttttcatagatctatttgccatttgcatgtcttttgagaaatatctatagagatcttttgcccattttaaaatcagattattagattttttcctatagagttgtttgagctccttctatattctggttgttaatcacttgtcaaatgggtagtttgcaaatattttctcccattctgtgggttatctcttcactttattgattgttttctttgctgtgcagaagctgttaaacttgatgtgatcccatttgtccacttttgctttggttgcctgtgcttatggagtattattcgagaaatgtttgcccagtccaatgccctggagagttttcccagtgtttccttgtagtagttttatagtttgaggtcttagatttaaatctctaattcattttgatttgactttttgtgtatggtgagagataggggtctagtttcattcttctgcctatggatagccagtctccccagcaccatttactgaagagactgtcctaatgtatgttcttgcacctttgttaaaaatgagttcactgtagatgtatgcatttgtttttgggttctccattttgttccattggtctgtgagtttatttttaatgctaataccatgctgttttagttactatagcattgtagtataatttgaagtaaggtaatgtgattcctccagttatgttctttttttctcagcatagctctggctattttgggtctttgtggttccatataaattttag

SEQ ID NO: 17723 - DNA, 1054 bp, Homo sapiens
attaattagaattcttctataaggaaggttttcccttctatctaatcatttatctcagttcaaattcatagatatttattttattcttagtgttagaattaaatgctatcattattttgttgctcaaattattccagttttggcccttgggatctcttttaggtctacttctgtgtctttttggcatatttctatcctttttttatgcgtatgtacatgcacacttctttattctctgacactaccacatgcttcaggttcatcttgtttttttttcctacctcagccctagaatcaattatttctctaaggaaccttggttcctttcattggaggatgatattttgaagccaagatctggatgctaagtgtgctcattgctgtggagtatcattgctcctagactttctcagtggaaagaactaggaaatgcatgtatgtatactaatccacgtatccatgtacaattatgtaaaaatctgtatttctgtatataaaaatataaatatactgattgtctgtgactctaactggatatgttttgatacagatagatttactgatggattggttgtagaatgtgaaaagaaaagagtaatggatcactccaaggtttttgacttgagcaactggaaggatagagttgtcattaatagaaatgaggaagacttgaggacggtgcagagcaggtttttggggagagtttaggagttctgttctagactggttaagtttttgagatgtctaatagacatgctaagtaatagagatattaagtcagcagttgaacatgggaatctagagttcagagaagaatggtccaggttacatttgggacttgtcagtatagattagatcacctgaggagtgagggtagctagagaagagaagaaatttaaggactggcccatggggcattccagtcagagagataaggaggagcagttccacataatgataagggctgaggtgtggttatagggtggatttcatatcattaataaacacttaatacctattatttgcaagataccaagttatgtttggggttaac

SEQ ID NO: 17724 - DNA, 1026 bp, Homo sapiens
caatgtatgtgaggccaagtgctgtggcatgtgcctgtagtcccatctactcagtaggctggggcaggaggatcgcttgaacccagaagttgaaggccagcctgggcaacataatgagaccctatctcttaaaaaacacacacacaaacaaaaaagccaggtaaaattaatccacccctgtgaaaggaatggaaaaaaagatagtctgtagtttatacatactctttgtaaacggcttccaagggaatggctaacagtggatggggtggaggtaagggagagagaggtaaacagacacatgactaggaaactgaagaaggattgttagttacatgactaggaaactgaagaaggattgttagttagcattgaggacctgtttatttcagattgtagacctcacatttgtagcagtaccaattttcgtggttgatttttctccagcagtgagtgatcagactatctgaagaaactatttaatactctcaagaaccttatgagttatgtattgttactgttactctccttgtttgtaagatgaacagcttgggtttaaattctgcccaggctgttatctgctgctttgtagatatctgtttggtagagatatctgaaggacagttggttgagggaattaatgatattgagtattgtagctctactgaagaactatggagtcctcctggattatgagctggaagcctgtaaggaggtgatccagttgggagaaaatgaggagcatgaaatgctagaagtcagtgtgaagctgtagagcaaatgaagagcaaataatactagcttctatttgtggagtacctcctatgtgctagacactttaatacctaattctgatcctaacactaactcaacaattttgttatttaccttatattatttcctttgttctccttcagatgaagaaactgaggattagaaaggttaaataacatattcagacacaccctgtcaagtgatggaaccaggattcaaagcccattctttcttgtccaaaccatgttcgtttca

SEQ ID NO: 17725 - DNA, 1024 bp, Homo sapiens
gggatccctggtgccggtgagggctcatgtgtggtgctgctcttcaggcgccttcagccgcagatatctggagaagcacaattggggttggggcgtgttcctgttgggagataaggcagtgcagtcattcgtgcagggtcccacggaggcatgaggcagcgtgtccagtggagggtaggggaagtggagccagggaagggtggggggcggtgggtagtaggtgtggtggtttcagagtcagggccttagcttgctggctggagtctcttgggctagctgtcctgtgtgtggcactctgtggaagtggccttccagccccacccacctccatggttagtctctggaggctttctgttctgtttccaccagttcctccacgtatccccccatcctcacctggcttggccccgcatcccctcacaaaaggtcctttcctctccttctcctgaccccctcctccaagaagcctctctgcctgcttcaagtcattgcccctccttctccagtcacccacagcatagaaccacacttgtttgcactgaatattgtaccagcccagtcacgcatgcatttgttctgcacatcctagccaagctgcctgctcggctctgggctaagcatgatctgccttgaacaccctgagcaatcctagtacccttccttttgccctcctgcctggcccctgggatgggacagacccttggaggtacaagggagtagctattggctagcggcaaggactatctgtgcatgaatgcacagagctagatgatgtcaaagatgccccaggcaggggttgagaagagacagacagggtactcagtagcccacacaggcactcagagaagggtgagatttctccctgggggttgaggttgtcagaggtgctttaggaagagagggagactggctgagtcctagggaagcagcagactgcagagacacagagagcaggggactccagaatcagggaaggttctttgtagaaagagtgtgagaaggcaggttcatttcccaatacatt

SEQ ID NO: 17726 - DNA, 1031 bp, Homo sapiens
catttcatagatatccaaactgagacccaaagagaggcctgcctctgggaggtcttccacagctgaataccctcagcgaggaggctctgcttgctgcctgaggcagagctgggagtagctcctctgggagggtgggcattgggggcagcttgtccccaggacttcccagccttccctgtttgttcccatgctgtccaagaacttcttctgcaagtctgaccacagtccctcctgctttaatttcatcccaccactcatgcgagatcttgtcaatccaaaggtctctctgtccctctgccttcttggtgtggggtgggtctgggggctcaggcactgtccctgcaacctggctggctcctgagggcaagggatgaagctaacccatcccagcctgcccacccaggccagtttgaaaatcggctcgcctttgcccagcattgcaattctcatcacagcctctgcccatctcatttctgttaaactcatttgccagctgaaggccttcattttccactctgtttgcccataatcaccccctgaccctgtcctgtctccccaaactctccctgcagtgcccagcactgtgatgagcaggcagccaggctcaggcacagccgcagccctccatccatccctcccgcctgtcttgggaagaggcctgtgctccaggcagggatctcatccctgcctctgtgcattcctctactcccaaaccagacactgggaaaactacagacagactctcagcccttgaaggctactcaccctccactctctgcctgtccacccaggccaggaaggcactgttctaaacactgtgcatgtatgaagtcccttaattcatccactagcccgaatgaatttctaattggtgggagtttaaggagaaatgttgacaaagggaaactgagggagcaagaggcaaacttctccctcctccagggctccatccctgctcccacttggtacagagaatagagcccagctgttgctgcaaaccatgtcaggcatctgctgaggtcgcctcggga

SEQ ID NO: 17727 - DNA, 1030 bp, Homo sapiens
agtttttttttttcatttaagtttatgggatgtatttaaccccttaaaagttttagattgtcctgtgttcaagtctatcactcctttcctttagagttcctggccttacccactgcagaattttaaaaatattggcctatactgttttctggttgtttatgatattcacaaatatttaaatctctagttcatctgaaatgtatttctgtgtgtggtttgaggtagggatctaagtggttttttcccaaatgacttgcagttgtttcggcactgtttgttgggtaagcgtcctttccctgctgctctgaagctccattcctgtcatctgctgaaatgtccccaaagtctcatgtctgtccagacctcgctgtttgattccattgatctttgcctggggagagatttaggaagttgagaaaatagacttggtgattgatcagagttggtgtgaggagggggaaggagtggaagctgacacagttaccttcagtgtgggaagaggcaaagggaagtcggggacaacaggagctctaagggctcctgtgtgctaggcacacggggccttacctgtcagcctgcactgcaattcttcagggtcggcgttctgtctcaccatttgcagatgagaaaactgaggttccaagaggtttcatctcatgtccagggtcatcgcctcacaggtgtggggctgacactgaaaggcagagctctgggttcccatgcctgccttctgtcctcagtgaagtgagaggtgaggaggggattctggaggctggaaggtctccaggcacagagcgccccctgacaccccactctgcatccctgcctgccatttggctgggtcttgaaggttttcccgttccaaaagcaacctgttaagaccaaaatactcctggcagggaatcacacgttaagtttacagctaacatcttaattatcagttaacacctctgcaggcattagctgacagccagctgaggacactgagtgggggctggtgtgatgtgtatctgggttgggaaaggccagg

SEQ ID NO: 17728 - DNA, 1043 bp, Homo sapiens
cctggccctgcaggccagcgggaggtgctggcaggagactgaagggtgacaggagggactgaaggggttttccctctccccatctcgggcactgcctctgaaggtggctttgtctcctctgtgcccagctcctgtccggtgggtcctctgtgccaacagctgaccccaccggctcccttcattgctcccctgcagggtggctttctgcccttgctataactctgggctgcctcactgtcagctgtttggcttctcagcttttctctcaccagtgtggccagcccctggatgacattcactctgtgacacatatttagagggatttctgttttcctggctggaccctgagcaagtgttctttgcattcgcatttctgcctttggagggagggtcctcattattgcctcctgttcccgcctgtgctcctcacatctctagctccccaggctggaaactcaagccatcctggactcctgcctccttcccctgtatccctgtcgtcaccatttctagtgctgccgcctgcctggaagcttacatctgtgtcccctttttgtccctttcaccacagtggggccaccggcctgtctccatcactgcagttgcctctctcctttcttcctgctgccactcacccacagctccagtttaacctctgtctcactcaggtattcagtctcatccctctgctgctgttgtctggggctcctcagggtaaagatgccttcgaacgctgccagggccctccttcctgcccgctgatggggcgtgtgttctctgggcatgcccatcctctgggtactctcctacataatccctctactggaacaacatcccatcgctcatctccctgggaagctcctgtgcagccttagcacacaggccatctcctttgtgagtggtccttcccgccccaaggcaggcacgggcccctgctgctgttcccgctgctcgggtgcaggcctccaggacagtggccacctgattggatcatccttgtgtgcctgcttgtcctccagctagtcagtggtacctgagggcca

SEQ ID NO: 17729 - DNA, 1048 bp, Homo sapiens
atcttataatgaaaacttttttttaatgaggctggctgatcattgggaaacaatttcatctttgaacaaaaaccaaatgaaagtggggaaaagtagctttgcttctcaaattttaggaaatgcaccccctccttttttttttttaatgagacaaggtcttgttctgttgcacaggctggagtgcagtagtgcgattatcattcactgtagcctccacctcctgggctcaagtgatcctcctgcctcagcctactgggtagctaggactacaggtgtgcgtcgctactcctggctgatttttggttttttgtttttttagagatggagtcttgctatgttgcccaggctggtcttaaactcctagcctcaagtgatcttcctgtcttggcctcccagagtgctagtataataggcgtgagccattaagccaggtccttattattctttattggagaactagaaataattttggccatgagagaaaaagtggcttaaagcagatggtctctgtggagactgtagtagcagctgtctgtgcctgggctctcatcttgtcctccctttgcttgtaggttggtggcagtggccctcctgtacctggaacaagaagatgctttctggtgtctcgttaccatagtggaagttttcatgcctcgagactattatacaaagactcttttaggatcccaggtagttctgaaaattctgtgttttagtcaccacttttagaattgcagctgaaatgtgacctgaattaaacctgcggtcagggtgaggggttgctttgtgtatgtgacttcagagactgattcctgaagacagcaggccacatctcagaggctgtccccagtcatggcctgctgtttgtgactgaggccgagttgggctcattcagccccctgcgaaccagcagagacagacccgtcctgcaggcctaacattgtgttcactgctctgcactgtcttccccggacacaggcctaccagtgggctgagtcataatccaggtgtgcttgggtgactggtgtgttagctcaggctctcaaga

SEQ ID NO: 17730 - DNA, 1111 bp, Homo sapiens
cttctctgggctagcccttaggctgggaggctattgcctgaacagaagtgaccctcctagtcatgcctggggtggtgaccagctgatgcggtaggaggaacacacagcatttgtgagaggtgggggcagcctgcatttctcttcttgcctgtagagaagcctaatgattcagaggggaggccacagggaggatcataacattcttgctgccaccggttcttgagactttgtgggagaggttttaggtggacaagtggcccccaggacatggggcatcaagtatagcctgtttgaccccagcagaccccagacatgtctgtagctactggtctcacctagccccaaggcgtccctcacctggccaccctcatcttgcaaataatgtgtctccgagggtgtttggctctggatggagcttgtccttggagggcagaggtttgctgctgtccaggttgttactgagtatttgcttcatgcctagcagtacctttcaggcgatgcattgagtgagggaatgataggcatgctagggaccctgaagataattccaaaacagaagtaaaaacaccggaatcatggcagcatggctggaatatgtacatggtccccatagtgaccacttctcactgacaacacccattggatatgtgaggcccagaggatttatgaatgagaaaatccaaaacaacaagaaaacctctggtctcaatactttacacttatatctactatttaaaaaaaaaaaagttggctgtgcatagtggctcacgcctgtgatagcagcactttgggtgactgaggtgggcacattgcttgagcccaggaatttgagaccagtgtaggcaacatagtgaaacccccgtctctatacaaaaaaaaaaatggccaggcatggtggcttgcacttgtggtcccaactactcaagaggctgaagtgggaggattgcttgagccctggaaagcagagcaaggctgcagtgagcggagatcctcacaccacactccagcctggatgacaaagtgagaccccgttgcaagaaaaaaaaaataggctttgtggtttttgtttgtttgtttttttaataagaggtcttggttagcattgccaatg

SEQ ID NO: 17731 - DNA, 1041 bp, Homo sapiens
ggttattgaaaataagtactgttggctgtgacttccagtagagactgagggtgaaatagaaggatgaatgtgagcaggactggggaggaagaatcgggagtgcttagtgagttgggacgggaggagaaactccctgcaccttggagactgttttcttgacggatgacagccttcttagccctctgcctaacccttcatcccctttgaggggagtttatgtgatagagagggagagacaaagatgtcactagactttgatcttactctcttcatgggtatttcctgaaatggctccgataatcagccctccaacttgtccatgttattcacagaaagtgaactacccttccttgtattttcccgtatctttaagtaaactttttattgatgtataacatacagaaaagtccccaaatcagaaatgtatagctcagtgaattgtcacaaattgaatacacccatgaaaccagcactcacttcaagaaggaggacgatgccagcaccctaggaaccagctgccatccccgtgccctttccagtcactaccccgccccagggaaccactgtactgattcctaacagtgcaggttggttctgcctgtttcctaactttatataaatcacacttatatgctcccttgtgtctcctctttataatgtgagtatatatatttcaatctatctacactaaaatttatttagatcccatagtattttttttttcttttttagtgatggagtatctgtgttgcctaggctggccttgaacttctaggcctaagctatcctcctgccttagcctccaatagctgggaccacaggtacataccactgtgcctggcctgacggtattcccgaatactcttttttttttttttttgagatggagattcgctcttgttgcctaggctggagtgcaatgacgtgatcttggctcactgcaaactttgcctcccgggttcaagtgattctcctgcctcagcctcctgagtagctgggattacaggcatgcaccaccacgcatatttagtagagacaggg

SEQ ID NO: 17732 - DNA, 1049 bp, Homo sapiens
ggcgggtgcctgtagtcccagttattcgggaggctgaggcaggagaatggcgtgaacccgggaggaagagcttgcagtgagcagagatcgcgccactgcactcagcctgggtgacagagtgagactccatctcaaaaaaaattaaaaaaaaaataataaataagaatctacataagcagggttacaaggcgcattgtcagaagtgtggctttaaacttcgatggacttgaacttgaagcaggagtctgctgctcacacatattggacaaattacaccagttccctgctccagtttcctctttggtctagtgggaatcataccttcctcattaggtggctgtgaggattctggagaatgttatggaaaatggctggcgcattttccatagtggtatggaaaatagtaggcactacatggcatatgaaacatcaagcagtgtctttggccaaatatgtagtgtattcatatagtggaatattatgcagtagtaaacaaaggtactagagctataggtgtcaacgtggattactctcacaaacaataaaattgaacaagaagtaagttacacactgattgtgttcagaatgataccacttatagaaaggttaggaagatcatgtgaaacagtactacagatcataaggatgtatgctctttcgcgaggggaagagctttatggggctgatgagctctggtttccaggtagtggttgcctgtgatgggaagagggaggatgtgattgggaatgggtgcctcagggcttctcctgttttgcagtgttttatttcttggactgggtcataggtatatcagtgtttgtcctattatgctatccatctttttgtaggttcagaatatttctttttttaaagaaaggaaatacattttcctttgggttactgacaatggaggaatattttgacatgtaaaattaaattggtcacagaataagatagtaccgagtgttggctgtatacaacaatgggaatggaaatcaggcaaggctttctggaagaagggaggagaaggccgggcgtggtggctcatg

SEQ ID NO: 17733 - DNA, 1031 bp, Homo sapiens
acgatacagcacttgagcaggccttgggaagataggtcgggttttgcccagtggggcccagaggaggcattccaggtggaggggacagcgtggataaaggcttgggagtgggcaggggcaagcaggcaagccatgctcagaagtgaggagtagcttcatgggggtggggagcccaggttcccactccaaccagcctggcattgggttactcatcggagccagtcccagtgttatgttctgattctttgccagagcctagctagaccctgccaggcggggtgggagaaatgagagctgtgaaacctgagagccccacatctcctaccctctggctctccagccagccattgccagcccgggctgagtgggggtgagcctgagttacagcaccctctcccctaagtgacacctagggtttcttgggacctcccagcctggtagtctaacctttcctgggcagggtgcaccctcttggttcccggtgccggtgattcccaacatttaagcttctgtccagaacactcctctgcattgtacggccatcccccagacccctcaaactccaaaacaggggtcacagcctctccaacacccactgctgctcctccagccatttcaactctctgctctccctcagcccatgttttcagttaagaacaaggcctgtgactcagcctcttttgtgggtcacctggaggtcccctcctccatcacgacagccagggccctgggctaggcctgctcagtctcctgcaaactggaggtctgactgctccctcctgcgcccctcctgcccatccccctccagccacccgccctcttagttctctcactcttccttcatctctttctttctcttccttttttttttttttgagacggagtctcgctcgccctgtcacccaggctggagtgcagtggtgtgatctcggctcactgcaacctccgcatcccagctccgcctcccaggttcaagcaattttccctgcctcagcctcccaagtagctgggattacaggcacccaccacca

SEQ ID NO: 17734 - DNA, 1051 bp, Homo sapiens
agtgttggtcaggcctgggatggccaagacagttggaaagcaggagatggacaacttgaaggcattgcacagtgctttagaggcctcctgcgagccttggttttgaagctttaacaggcctccctcccatctggaaataggtagctgtgtctgagactcctggagaacaattaatatgagggccaggcagatcacaatttcaggaaaatggctaccctgtgaggagagaaagccacccaatgatgctgatacctggccatttcctgtaccgaggcatggggttggggggtctgaagttagaagaatgtaagtcatcaaaggatttttggtcgaagtccttccaacttcaaaccgatactaatgttcactttttaaaatagttcgtctgacaaaagtgtaaaagtttgggatgttggaacgaggacttgtgttcacaccttctttgatcaccaggatcaggtatggcattattatttcatctttagatagtcggggttgtttgaccattgtaccaaagagattttcttttcctgaccttgttgcttgagctgtggataccagtagatgcctgggcctgagctgctctatctgctcagtcatccatgtagccagagttcctgtgcagagtctggggtgcagaggctgggatgtgctgtcagcctagcaactcacgaggcatatccccacataggctggaaaacatggtgttagccccacagcctttaaatgccgtctttggaaattgctgcagctggtgtctggggccctctcctgggggctgctgcgccatggcaggctcaccaaggaccttcctcttcaggagattccattgcttaaacacaatcatcgcttgtcatttttgggactgtccaaagaagagatgtgatttttttttttttaatatagtagaagctggaaattcatacaagttttttggctttagtgttattgataacttttcagtctttaaaaggaaactgttctcacaagcaactttatctttgccaaggtgaatatgtgaaatagcaaaggtgttctagtgcaatactgc

SEQ ID NO: 17735 - DNA, 1044 bp, Homo sapiens
atcttgcatgaatgggaatcaaggagcttgcgggatggccaggttgacagcagaggaagtaactaacactgtggtgactctgtctactcggggaggagtgctttctggaggcaatgtgagacatctgaaatctgaccatgggtttaatgtggcttctgttcttttttagtacggtattctcttcaaacaagagcaaggtaagtagcctgcctgtttaagcaattcatctgtgaaaaaaactgtgttgtccctggtttaagacttttgtcatgctgaccagacatgcagttttcaagtatactcactttgcagaagaattggcagctgaaaacaaatactcttaaaaaacagacaacaacaacaacaacaacaaaaacctgaacaaccagctaaaaaaaaaaagcagtcatcatgataggttggggaattctaggctgaggaaaatttttccacctgaggaagacatgatggagcttcccagctgctgaggtggaagaaggaaatgctttgaggctcaaaactctgttaatgccggctcatctggggaggtgaacgtgagcctttttctgaactcagaacttgctttggcccttaatgaaagtgaagcctataatagtgaaatgagtttctcttgaggccaccgagtgcatggggagggctgggagctgtgcagcagtggcagtggcagggatgggagagcaggtggcaggtcagagtgggctgggattgtaactgaccagtggtacagagctttgtacccaaaaaggagccatgtttgtgcatgggctactcacccatctcatttcttcactatagcctcgatgagtttgagaaggcctaaggaatttgtggaatgcctaataaaagctcttgctctctaagtaggtgacatggaggtagtttgacgtttaagccaaaagcatcattcaggttagctagtgtaagtaactagtaggctaattgggcatgccagtcaactaccttatatgtagctattgtcatccaggtggcaagttagcaggcttgagttaggtgaggtttgaa

SEQ ID NO: 17736 - DNA, 1061 bp, Homo sapiens
aggctacagagtgagcaaaggcccagcgggaggaaagtacagtgtgtccgcgggcagtcacaggtggtgtgggcagtgggggctcagctgagcaggacgggcctctgggacgtgcaagaagagcagctgagggccagccctccctgtgtgaccctggtgcttcttccccagaaaggtgtgttccagctctccaacgaggactacttcattgagcccctggacagtgccccggcccggcctggccacgcccagccccatgtggtgtacaagcgtcaggccccggagaggctggcacagcggggtgattccagtgctccaagcacctgtggagtgcaaggtatgctcttctgctcccagttctcgggtgggtgctgggcctggggacatgaaggggcctttctagaagccccccttaacatccccatgcccagtgccccttagaccagatgacacagacagacagatggatactttaccatagcctgtgcccttaattgtgccacaagactgtgtcctctgcctttcgggcctgccccagtcaatcccctagactgaccttcctcgctccatctcacctacttctcccacgttggggctcagcctccctctgctccctccccgccaacagcctatggtacctggctctgccagccgttcttcctccagtgcccaggccgggtgagctgtgcccagctccaacagggccactagccaggaacttccctcccaccaccaccctgctcccaccctagaataactaacctctattattgggacctggagtgtggtacccagtgcctcctctgcagagcagcagtagtgccggccagtccaggtgaggagctgcctgctaagggttgctggggtttggggaatgcttggctagcaagccaatctcaggctgcccacagctctggtactgcatttgctggagcacatatccacagaggcatgcttcttggcctcagtttcctcagcttcatagatgtgcttcctcttctgatctggagcagcctgggtcaggggagcaggcccagtagggcaagctgggctgggtcttg

SEQ ID NO: 17737 - DNA, 1037 bp, Homo sapiens
ctgtaagctgcatgacagcatgtctgagttcactcatcagtctgtcctcagtacctagcatagttgctgagtacatggtaaatgcccaacaaatgtttgtttggaagactgaaagacagacaaacggaaagaaggaagagaagaaagaaagagaggaaggcagaagaaagaatgataaataaataaataaataaataaaatttggagaagtcaaagaaaaacattgtgctgcatgtttgagggagaaacaaatggaatgggatgtgagtgaaacccagaagacacagggcatttgagtaaaggtgttcctacgagaatctagggctgaaggaattcacagaaatcttagagagggattggattccccatagagcccaaaagaggaagtttgagtcaattctatctgaattcaaaggacgaggtgacccttgcaggacgattatctgggtggccttgagctgatttagtttctcccctgcacctgtctcatttgtagttctcaaatataactgtagaatgtgctggcaatgcaacatcctgagataagggggaattgactggaacatcccaggctctattaagtcccccctggagaacaggaatgctcttcaacaccttagcccagtatgtcatgttacccagaggtatataatccgggacaggctgccatttggggttcctcagctgtggtacaagtgtgccatgtgaagataagactccatctaccccaggcagcttttctaagcttggggggaccaggtcacagtaaatgctaggtttctgtcatcccttgctgtctatctgtaagtaatgaacctgcttcttgtcacttgtatatgaatgtattctgtctcactgactcagacaagttgggaactagtgcatggtgaacctacttcacaaccatccaatgaggatacacatgccggtgaagttcttagtagggagcagcctcaaaataaatgttaatgccctttatcccttctttctccattgggtgaaggccttaagttgcactgtggtaccgttactctttt

SEQ ID NO: 17738 - DNA, 1037 bp, Homo sapiens; identical to SEQ ID NO: 17737

SEQ ID NO: 17739 - DNA, 1035 bp, Homo sapiens
tgctcatttggggttactttatatagggggataagtgtcccttcaggtggactgagagtcaccagaagatttagtggaaggaccctgcctctggggatgcatatgtagctggtactaatgagtactttctatgtatcagaaagccaccaaatatcactcttcctcccctgagttcagaaccacctgacagacacaggggtcatatggggctaggtcgaaagatcagcttgattaataatggattggtggatgtagcctgggtatacagcttcctagtactagactcctacatcagagacatccattctccaaccattcacgagaagaactggccagacaccgtaggctttctcattagggcaggagctcagcacatggcatgtccacactgaaagaatgagaggaaaaaatgaatggaaaatacaggtggtattgaagaaagagcactcttcctgtggggggtcagatccaaaataaagaaaccagatggggctgaatctaacatgctctgctccttctgtgtaactcaccacccagagtgaggaggagtgaggggaggaggagtgaaaggacaggtgtgtcgctctggccaaagtccttccatgtgctcacatggagctggggaagaggaagtgtggaacaactactttccatatatttacatatattagcatatctagtttcacaacactatgaagtatcactgtcctgattttatagaagatgaaactgaggccaaggccatcttccaaggatgtgctggcttgggatttgaaccaaggaactaagtgtcctctgatctgaaagcccatgttcttttcagtgccctttacctgctcctcatttggagtgcaggggaaggggaggactcctggctctcttctccagccctcacaggggtcctgaagcttccagctcacgttgggcctggttgcttgagttacctcatgtacctgagtctacaaaggcttctatgggaatgtgacagatttgaaggggcagtcactgggcccgtaccaggaaggctgggaatag

SEQ ID NO: 17740 - DNA, 1035 bp, Homo sapiens; identical to SEQ ID NO: 17739

SEQ ID NO: 17741 - DNA, 1027 bp, Homo sapiens
gcctaggctggagtcgaatggagcaatcttggctcactgcaacttccacctcccaggttcaagtaattctcctgcttcagcctccccagtagctgggattacagtcatgtgccaccacgcccagctaattttttgtatttttagtagagacagctttcaccatgttgaccaggctggtctcgacctcctcagttcaggtgatctgcctgctttggcctcccaaagtgctgggaatacaagcatgagccaccacgcccggccaatgtgctttttctttctagcttttgtcaacataaactggtgtttaaaattaatagtagtttaaagatgtgtatattctttaaagaatttttttcattgacattcgattattttcttactatattatagagtatagagaagagtcatttaaactgaactgtaaattttcctgggttcatgattccttgttcctactgttatagcatatcttctttattcttgatttatgtattttgatgaatttcttggtcagatggaatattcctttaagtagtttttttcagcatggtccgtgagtggtatgttttcagaatgcttttatttttgaggctgtctttgtacacatcagtgaattcttgaataggatagaattctagggtcacagttttttgtttttgtttcttttgtccacccagaattctagcccaggatttggcaattattttctgtcaagtgctagatagtaaatattttaggcttttcaggccatggaatctttgacagcagctcgattgtgccactgcaatatgaaagaaaccatagacggtaccaaaacagacagtgttccaatacaactctatttacaaaaacaggcaacagaccagatttagtcttagggctatagtttgtgacctgtgttctagacaactagtctgttgtcttgtggtgattagtattgtaggtgaggtctgatgtcattcatgttttcctttgtaagaaacttgttttttcattgcttgacttcttttaggaatttttgttattt

SEQ ID NO: 17742 - DNA, 1027 bp, Homo sapiens; identical to SEQ ID NO: 17741

SEQ ID NO: 17743 - DNA, 1027 bp, Homo sapiens; identical to SEQ ID NO: 17741

SEQ ID NO: 17744 - DNA, 1027 bp, Homo sapiens; identical to SEQ ID NO: 17741

SEQ ID NO: 17745 - DNA, 1027 bp, Homo sapiens; identical to SEQ ID NO: 17741

SEQ ID NO: 17746 - DNA, 1037 bp, Homo sapiens
gattggttcctgagcccgagtgctgtaacagctgctgggtcaatgtggtattctcaatccagtctctgggtttgttttttattttttgttgggggcaggcagtgcagcttaaataacagacatttattttctgacagtctgggtatttttaataatattctgtggagactctaacaccactggtcccaccagtgactgtcagcatgtctatgagaatgcttaatttttactaagccaagaaataagtagttataagatcctacatggtatgatattttaatatgagttacagcttatcttctcattgaaagtgtttccaaacctttaacacgtgtttctttagcttaacaaaaatcgttctcactaattgtatttgaacttttgaaataagttatgactaaaagtaaatgaaagcaattgtaattttggaatgtgcttttgcacatcgcacatgccattgtaggcattttgggtgacctccctctctggacaattgagaacattgcctcctgagttaggcactgtgggagggagagtgaacccttactgtccttgcttcatcttctttgttttcagataggataactgcaacccagggaggctgtcacttccccaaggacacacaggcagttaatgataatgcgaggtcacccagttctggtttccactccagtgccctttgaagtgccatttttcttcacacttcattcattaatattgctttactacctagattttctctctcttgacagcatactgcattaaaaccgttattcatggaacaggtacccttggtaactgtatgcatgggaacattgtcatattttcccaaggaagaacttggactgagtcacatgtatctaaaagtactctggtctcaaagttaagcttttttttttttttcagtcattttgtattcggctaaatacacaggaagaaccagctacagctttgatttataacagggcctttcatttgaatgagaagtgcacccatgataggcttccttggacctgttccagaattgtctattttat

SEQ ID NO: 17747 - DNA, 1037 bp, Homo sapiens; identical to SEQ ID NO: 17746

SEQ ID NO: 17748 - DNA, 1037 bp, Homo sapiens; identical to SEQ ID NO: 17746

SEQ ID NO: 17749 - DNA, 1037 bp, Homo sapiens; identical to SEQ ID NO: 17746

SEQ ID NO: 17750 - DNA, 1037 bp, Homo sapiens; identical to SEQ ID NO: 17746

SEQ ID NO: 17751 - DNA, 1073 bp, Homo sapiens
aacaggtaaagagatgaaagcaaaacaagctaagggtattattttttagtataatgcctgaaacccatcttagaggtgtatatttttgactaagacttaagtggttgcaaagaagccctagcacaactttatgcagtcttcgctcagtttctgccccttccaatataacaccatagcctataaagtcagtatgatggagtcagaggggagagggtcaaggactcgtaacagtagagggattatgtactttgctagtttaactttccctgtattgtccaatcttgggctttgctagatgttaggcaccaaaaatacattcagatctacctccttcatgtcctgcatcaataggccagatgaatgtcagcattttaaaactctttcatattttcaaggggaaagattgcaagcattttaaggcaatgagataataagggaatacagagtatcttggagagcagcctaggtttatcgagaagaaaagacaggaaattatagctactgactttgctcaaacttaatgcagctactccagactcgcaggcttaatggtggaacccaggatactgtcccaattccagttgactctgttaacagctccttcaatgcttgtatcatctctataatgtgcctgctaattggaattttacttggtttcctccagtaactaattcctctagaggcagctcattccttttagaacagctgtgctccttctagaacatcttctttgggttgagctaaagtgtgttactttgaacttttgtgcatttgttctggttctattcaagtacagtggtgaaaagagtaaggaagaagcattatttttccttttaacttatatttacacttcttggttaggataatctcaatccaaataagtgagtcaatcatttatgcaggtttttttttcttttcttttgagacagagtttcactctgtcacccgggctggagtgcaatggcgctatctcggctcactgcaacttccaccgcctgggttcaagtgattctcctgcctcagtagctagaattacaggcgtgcgccaccgtggctggctaattttgtatttt

SEQ ID NO: 17752 - DNA, 1073 bp, Homo sapiens; identical to SEQ ID NO: 17751

SEQ ID NO: 17753 - DNA, 1073 bp, Homo sapiens; identical to SEQ ID NO: 17751

SEQ ID NO: 17754 - DNA, 1073 bp, Homo sapiens; identical to SEQ ID NO: 17751

SEQ ID NO: 17755 - DNA, 1073 bp, Homo sapiens; identical to SEQ ID NO: 17751

SEQ ID NO: 17756 - DNA, 1032 bp, Homo sapiens
tttggagaatagggaggaacagaaaaggaagggaaaaaaagagagctggccaggtgcagtgcctcacacctgtaatcccagcactttgggaggtccaggtgggtggatcagttgagctcaggagtttgagaccagcctgagcaacatggtgaaaccctgtctccacaaaaaatacgaaaaatcagccggacatggtggtttgcacctgtggtcccagctactctggaggctgaggcaggaggactgcctgagcctaagaggcagtgattgcagattgaggcagtggttgcagattgcaccactgcactccagcctgggcaacagagggagaccctgtctcaaaaaaaaaaaaaaaaaaaaaaaaaaaaggaaaaaagagagcgaagggctaacttctgagtgtggataagttcctgagattgttgacatttctatgatgagcaaagctcatttaccttctcctgcctgatggatgattcaactgaatatggtttctttcaccaggatctgcccccaccccataattgtgaatattttaatattcatttgaacagatggattttaggaaatgggatggggatggtagaggcatgttctctgcctcagagaactcagttcatggaccggttagggataccacatttagggcacatgaaacaattagtgacccactcatgacagtacatcattattaaggtatatattaactctaaatgtagtaagggttcggcagaagttaggaaaagttagggcttgcgttgggctttaaatgggtagaatttgggaggagagagaagcctgacaatccaaggagtggagaagcttgtgggagccaagatacagaggtaaaataaagcatactctaggaaaagcatgtgaaatgaccgaagactactaaaatggataggtggggatcaagcctggaattctctggatagacagcttgtctccacagtgaccttttaatgagttttcacacctaccagagtgggtgtaccaggaagggataaaaggagcaggtaagtgctgggt

SEQ ID NO: 17757 - DNA, 1032 bp, Homo sapiens; identical to SEQ ID NO: 17756

SEQ ID NO: 17758 - DNA, 1032 bp, Homo sapiens; identical to SEQ ID NO: 17756

SEQ ID NO: 17759 - DNA, 1032 bp, Homo sapiens; identical to SEQ ID NO: 17756

SEQ ID NO: 17760 - DNA, 1028 bp, Homo sapiens
agatttgaactctggttttcttactcactagaggtataaccttgggtaagttactgaggtactctgagactcagattccttatataatgtatataataatatatgacatgataatttattatatataatatttaatgaaaatgatatgacatgattattttatataatatttaatgaaaatgatgacattattatatataatatttaatgaaaacaataatacctacctttaatggaaagttaaaggattataaaacttttttttaaaagtgctttgcaaactgtcaaatactgtgcaactatgagagtcatgtgggaaattccaggaagtttagataggtaattctttgcccttctgaaagtaggacgtacagtcagagttggtgctttccaagtaaccaccattttaaagcttgggtcatagagttaggccaagaggtctttcttttctttgtcatccccttaccctaaataatagtctggttaatttgaggccaaataaatgggcacacagagacatatagatgattgactaagcattcagtttggcaaaggcgtttccaaaacatataaacatctagcagtgaggtgctatgatctcaagtattcatatatatccttttattaaatacgttttggggcaaaatttttctatttcttttgaatttttacttgagattttaaagtcatttagtgaaaaataaaagaccctcaagacaggcagaaatgcatgatagtgacacaggagttagagaaaagcacctctcccgaggggcccctcagtcaagctctcttaagtgctagttctctaaccttgggagtcagcctggactcctgtctctcatagcccacatccatccatcagcaaatccccttggctgcccctttgaaatgctgtaatcacttgactctgtcagtagcctcctgccagactccatggttccatcctttatctgctataatttgttttccacatagtacccacagtgatatgttacagacttgaattagatctgatcttggcctaa

SEQ ID NO: 17761 - DNA, 1029 bp, Homo sapiens
attctgcttggtctaatatcctatagaacactagaagtctaaggtggactgcttccagaggtctttgtccttaaaaccatatatccatttcaccaaaagagttgttctttctagctgtcaacataaccagtgtaatcctatacagcttactattactattgcaacatctgaaaactcctccccttcattaagtcataatatgggaactgacatttcagaaaaggatcctaaaggaatttttaaaataagctttattgctccttcaacctctccatcaatcactcctcccaaacatagtgtcaaaaccaaagtctctgtagtagaagtaaaaaatctaaggcaaaccatagcaattaagacagggtatcaggatgtagatgcctagctaaaatgggttaaattttccctctgcactctaaataaaagccattattatgcttgtgcacacagtaggccagaggctcaggttgtctcctttccactcagatggtcctctaattaacaggacatggactgcatggtagctctttttcaaaatcctacagcctaggatagtaaactgtgccaaactctctctgctgtttcctaaagtgcagtaccccaagggccattcagcctccatcttccaagaccaattttatctcgtgtctccaatgacaaggggaaaatttggcattccttggagacttaacaggatgcagtaaggtcaggcacttccaaaagctgacccatcagtccacccttattcatccccaagcagatgtatggtggtattataaaggacctttgctgggcactctgccaaataattaaagcagtacttgctctctagttcgattggctatccctgttgccctcacatttcatcagccataaaaaccttttcttttaaaaactcaagcaaaacaattaagccaaaacacgtttaaacaaaaaaaaggtttaaagaaaaatacaaaatcaagaggagggaattgtagaaagtaaaaagtttcctcttaaaaatttcccttcttgttaaagaataaa

SEQ ID NO: 17762 - DNA, 1035 bp, Homo sapiens
aaatgccaggggagacagtaaaatacttccttggtggtcaggactaaggaaaaagaagccacagggcagtgaagcattctttggttgggacataccaaggtaaagcattccttaggactaaggaaagaaaagccgcggggagggggggcgggggtggtgaagtattccttagtcgaggtgtcttggaggttaaaaagaggtgaaaaatccccattagggggagattgaacctcacagaaacttccggtcataggaaaaatgttcaaaacttccctttcccctattcttgggggaagaaagaggcaagggaaagagcagcagagaagaaagagaaactaggaaaggaagtcagagaaagcaagagcagcgaacgtggctccacattgttgtggattgctggcacctggcagagcggcagtggctgagacactctcctcactcccggccgagccagccagagccagccagagccacccaggctgctggcccccgagccccgcaccttccgtgctgctcgggtgcatcctgccaccctcagaggctagctggccacggacacctgcaagttggagccgagtgggagacaatgagcgcaccggagccaggagcctgtgccacgcagccaggcagccaggcgcgccagagggtgggtccctctccccagcctggctctgtgtggaagagggcagggaccggtgccgggaggagagcaaaggaggcgaaggggcatgactcatgcaacttggggcaggcgtctatctgcctagccgctaggccggcggcggtggcccggactgtggccatgcagatcccacccagcccagaagactaagtgtaagagaaagaggaaacgggatgacagaaaaagagcccaaatgagagggagagaataagtgaaagactgaaagagacagagatcaaagaaagtcacagaaggtaaaacgggagagaaatagtgtaaaaggtagtcaaaaagttgaggcatgttaaagattgtgaaagtcgaaaaaaatgttataaaagggaatttatgca

SEQ ID NO: 17763 - DNA, 1033 bp, Homo sapiens
ccaagattttctagttattggcagatgagatcaacaacaatgaaggacaaatgtaaaatatgttgatttgaggttgatttactcttggcctgttggataactctgccccacttaccatctccctactcctccccgagcatggacccaaagcacccggccccaggaggaaggcatggggcaatgactgagtgggtttggaaacaatgatgggaccacgatgttacaggcataatcttgcgttctggctgtgtcttgtctcttgggagttgttctcttgcaaacagaaccctgtgtcctgaggcctgagcttctttgtgtgttgaagaacagcacatgcttgtgctggtgcttttgctgtgttctctggctgtctcaggggctagcagcatgtgggctggccttttctaccgcacagggctgtgacagcattgcactttagattctaaactgctctcggagcatggacttggaagccggacagtcccctgttcgaatctcagcaactctacttacctgctcagtgtgagttggacgccctgtgcctccatttcctcatccacgatctagcgatattaatagtacgatcttacagggttcttgtgagaattcaatgagttaatgtttgtagaaagcttagaacattatctggtatgtggttggtatagaatatttgttgatattattatcaaaggggtgaggtaagttcagcctcccatccctgaaatgagatgggacaaatttaattaaaatgaaaaagcaactgacaatttggaaaatagtataatgatgactgtctgtatcaaaagctagctgcagagaaaaattcacagctgcaaatacttgtttattaaatagaaatgaatggaaatatgtgaaattagcatttagctcagaaatctcagggtcaataagtgttttgtacctgaaaacaccccaactcacattagcttatgtagccatattattggtaaggtgctaaggatgcccaggtatcccaaaggaagggttaacaaccaaaactcagaagggcagg

SEQ ID NO: 17764 - DNA, 1070 bp, Homo sapiens
ttagtagagacggggtttctccatgttggtcaggctggtctcaaactcctgacctcaggtgatccatctgccttggcctcccaaagtgctgggattacaggcgtgagccactgcacccggttttttgtttatttgtttttgttttttgttttgtttttttttttttagatggagtctcgctttgtcaccaggctagagtgcaatggagtgatctcagctcactgcaacctccaactccctggttcaaccaattctcctgcctcagcctcccaagtagctgggattacaggtgcaccccccaccaaacactcccagctaatttttgtatttttagtagagatgggatttcaccatgttggccaggatggtcttgatcttctgacctcgtgatccgcccacctcggcctcccaaaatgctgggattacaggcgtgagccaccatgcctggctaattttatgttcttttaacttcactttaagatatgaagaaaccaggaatgaacgcatgggcttctgcagaaggagaggcatggtagggctgccatggatataaccacaggctttctctccatttatatgtctcctctcaacccttccttcctcctccattctttctaacttctctctctctctttgctggagataaaggctcatgggtctgtgttatccccactgctacctccttatctttatttctacacaggtgacaactgcccacggattgtctgtccaggcactacccccagcccccacccctgccttcttctctatcaagtctctcctttacaccaagaatcatggacttataacagatcaaatgtggatgagatgttagttttatacaaaaaggcataagcaccagcctttgaagcgaaagtgtggtgtaggtttttgctctgtcacttcatgaaacttctctaagtctcactttcctcacctggaaaatggggatgatgttacctactgtgctgagttttggtgaagatgacattgaaggaagtaatgtgtgtgctgtatacactttagagactttaaaatgtattgtgatagtattgcagagggaagaagaa

SEQ ID NO: 17765 - DNA, 1062 bp, Homo sapiens
aaagcaacacactcaaaataccaacttaattaatgtataacgtatactggactgaagatttcttaaggaaagtaaaagaggaggctctcttcactcactccacatcaaaaaaggtaaaactccatctcagatatttctgctacccagagtcccttctggatccttctccccacaggcagttcaatctctggtggcccataaatagcccataaatagcacttggcatcactgccccctatcccacgaggctcttttattctccaactttccacaccccttagaaggaagcaagttcctctccttggtgtttatgtatcagtttagcatttcagccaggacccatggctcattttgtctccaaatacagttctaatatcatccctaaaaaataaaatatgagtgaacatgactcttacgcacacacacatttaaccatacaaatttgttgacaagttttactttcttactctgctgttgtgttctgcccatttttctaaatgttactcggctgatatctttaaaactggatcttgctcaagcttcctacttcttgcactggtccattgcaataaaagacaggcgacacgtggacaactgctagacacttcccaagtctggagtcggccgtgctgtggtttttggtacgtaataaatacgtttagattttcacaaaggagacatttcatcttctcccccagtcagtgtatttcagaggtagaaaggaccttcgacatcatccaattctgcccctggagtttgcagataaggaaactgaggctcagggtagccaacgtcatgcagcttaatagccagacaagacttagaactgggctacgcacaatactgggatttggtggctggagttggggagcggttagggtgtaggggaagaaatagagaaatgggcaactcgccttctctctcgtctctcagtattaaataggttaaatgctcagaaacactgattgtggatgaaagccccccacttaagtaaacaatctgaaatggagtggttagtcattgttgaatactgagtggcatttacacaacacagtggtcttg

SEQ ID NO: 17766 - DNA, 1057 bp, Homo sapiens
tcttccgccactcgctgtgctcccacaactctggtggcctttccatcgtttgagaatgtcatgccctttcatacctccggccttctgcacttgctgtctgtcttgaacactctttccctgacatatcctcacccttcatttctcagctcaaatgttgcatccttacactgcctttccctgaccaccctatccaaagtggtcttccctagttacactctagcatctcactctgtcttttttcccccttactaccaattatcacaatctgaaactacgttgtatgtacatatgtgtgcatgcttgctcctcttcaattcagcatcattaggccaatgcctggggaaggacagaactccttgaaggcagggattcccatctgtttcattcactgctgttctcccagcacctagagcggcacctggccagggagcacactcaataagtgtactttgaatgaatgagtatacgtttaagtgaaggcaaaccttaccggtcagaatggatgactgtgcctgatttggggtcgatgacatgaacaataactccacggtggccccagctcctttcaaaaaaatagcctccttctgccatgccacctgggtgaagggtcttgttcagaaatgtccaggagagctttttctgtccatgcaactcaagagcgcctcctttaccaaccccaatgtacttcagaccatagtaaggatccggctgaataccttcatcagccctgcaagagaaaacagctccccagagttggctgacacatctctttactggatactgaacccagagggaacctaggagtcacagctcagctccctgaccccccaccacggccaccatagagccagtcacacttttatcacctgaggtcagtaaaaataacactagcggctgggcttgtggctcatgcctgtaatcccagcactttgagaggccgagacaggcagatcacttgaggtcaggagttcaagaccagcctggccaacgtggtgaaactccatctctactaaagatacaagaatcagccaggcgtggtggaacatgcctgtagttt

SEQ ID NO: 17767 - DNA, 1009 bp, Homo sapiens
cctgccaagagtccagggggacatctgacctcccagaggcttcttcacaattgtccctgggtgacacatagtcattcagtgaagacccaagggtttaacaatcattaggaacttgcttttcttggctccctcctataaacacaaatctagacggtctttccctgccaggggatatccagtaggcttctgcccttcaatgacttccctgtgcactcagaataaagcccttaactgcaccatggcccctccctctctctcgagccccatgcagccctcccattctctacttcagctactccggcctcttggtagctggaacgcctcatgcacccctcaactttatgttcccctgtggcagtacttctccctaggtagcttctattctgtctcagctcagtcactcattcctctgggaagactcacatgcccatctgtctttgccaaatctcccttttctatactcccagcacctcccatattccactttgatagcagttgtcatcattctatattggaattctattttgattggaacaatactttggtggatatctatcttcactgctggactgcaggctccctgaggacagggaatgcatctatcttgctcaccatggcatatacaagcctggcacattgcctggcacattgtatgtgttttctttctctctttctttcttttttttttttttttgagacagagtattactctgtcacccaggctggagtgcagtggcatgatcttggctcactgcaacctccgcctcccaggttcaagtgattctcctgcctcagcctcctgagtagctgggattacaggcacgcgccactacacccggctaatttttgtatttttagtagagacggggtttcatcatgttggccaggctggtctcgaactcttgaccttgtgatccatctgcctcagcatcccaaagtcctggaattacagacgtgagccaccgcgcccggcctgtatgtgctttctaatggcttgttgaatacatga

SEQ ID NO: 17768 - DNA, 1050 bp, Homo sapiens
ctggcaggtcaccttgaactagtgccttttctgagcacttcttagctacaaaacggagtgcactatcatgttaccagtgttacccacttttgatggagaccaagcaacttgtctctttaaaggagattggttttgctaattaccttgaggtttaaaagttgcccctggccttcagctgaacagtaggcttatttataggcatgacttgcatgttctttcccattaaactgatggtaaaattcttcccttctgttctcttcatcttttcatcctggcccaacctactgtggccctgctcatttctgctgacttaccagctattcactttgctgagggatctagaaacctctgggaatttctatcttcctttggctgctggagccagaatcctaattcagactttaccctgctcaggttttcaccattgtacccccagcaactagctcaaagcccagcacaaagcaagggctcaacagatgctcagggaatgaatgagtgattgaaggagggggaggcaggagctggactgcaaggtcaccgtggactgtgtcttcccaatggctgattacctggcagagatgattgagaggaacggccgcttgtccttggcagaggcctcggtggttttgactccgttgtctatgatcatgccagcctgcagggaagagatattcagggacacattagtttctactgtgggctacaggcatcgtctcacagtcagcctcactgcatacttctgaatgctccgggaaaaccagctctgttctcaggctgcatcaacagaagtagaggatctacagtaagggaggtgaagatgctgccttattctgcattgctcagaccaaatctggaatatttgacctctttgaggagcagatttggaaactgaggtctagagaggttatgtatgttgtccaaggccacatagcaaagtccatgtgcagacccacactgctttagatagttattagcccaggccccaagtcaggaacaacaggtatatactcttaggaaatttatctgctgtgatttaaaggaaatgctgaa

SEQ ID NO: 17769 - DNA, 1035 bp, Homo sapiens
gggttggaagttttaggtcaatgtgtattttgtgtcctgactctagtagtagaaattatatcttcctagagaaagagtagaaagctcagacagacaagaagggctgatcttatcaccaggagcacagggactaccatgctgctcacaggctcagagccttgctctctggcttgaattcacacctgagcagaaacaccagcagaagaaaggagatttcctcaccactgacccagcctgtggttttccaaggaattgactgagtccattatccctgtttgctcatcacccttccaagtcacccattcattctccacccacctgcttatcgtctgaccttcatttgaactcccccagccgcagaaaccaggactcctcaggacagtcctgctattctgttgttgagcatatctgacattaaaaagatccatccttcttgcactaaaccaaccctaacccacggtgcccgtgtagaatgagtctcatcccctatgtgcacagcagctctgagaacatgtaacaatatcccccatgttgtccccaaagtgatgatcctgtcttctggttgaagaccccaacctgcatgtgacatagcttcggcttttgtcaccctcctggttattctcctttaagtgtgcttcggcctgactctattgctctgccatcctcaggagtggatgctacactccaagtgagagtgctgtcagagaaaaggactcacagtccctgatcccagacacactaaattcccattaacatagcccaggaatgcattacgcattttgatggccacgtcaccctgttgactcatattcaacaccactttttgacttctctctccccattccagatttcatcccttaattgttagtctcagtcacctcagtgattcctctggctggtagaagaattcatagtcaacaggtagaaactacccattaactttttcccttccatcacagccacttaggttaagccactcagaataaggagctacatggttgcaaacctactggcctatagggagggtccttccgc

SEQ ID NO: 17770 - DNA, 1068 bp, Homo sapiens
cttactcctcacagtttgctatcgacgttgctgtggagctgggttggcattcttaagacattagacgaaatttctttttaagagaggggatcaaagaactcccagaaacagatactctgttttcattatatctctattgaatagaacctagtgcaggttagcaaaagggtgagggctttgaagacagacagatctaggttcaaatccagctgggtcagctttatgctatgatctcaggaagtctctcctattttccctgtgccttctttgcccatctctcactctctctgtcacccaggctggaatgcaatggcagtatcttggctcactgcaacctccgcctcccaggttcaagcaattctcctgcctcagcctcctgagtagctgggattacaggcacgcgccaccatgcccagctaatttttgtatttttagtagagacggggtttcaccatgttggccaggctggtctcgaactcctgaccttgtgatccacccacctcggcctcccaaagtgctgggaagcgtgagtcaccacacccagctgcccatctcttaatcctctgctccaagcaggttgttgtgaggatttgagataatgtaccatgttttctggattctaagatttactgccttcacttttttttttctgaaatatgtaaattccctacaattcacatgtatatttaatagggtgtttattttacttttaaagcttaatagctttaaaaatgtcgttaatgtatgggacagtcagccttagagtcaaaatgcctagaaaggtgtcttacattaattggcattaactacatggctgttcttagacttattggaaaggccaaggggacaagatgaggttgagccactttcctgcagccaagtgggcgcctgctcaccctgagtcctcgtcccagtagtagtggctcctgccagggtagctctgctccactttgtccatctgcaaggtcctcacgaagacgcccgtcttggacgtttgcttcagcaggcgattgtgaacatccgagaggatggagaatgtggtgcctcgcgggtagcagagccccactc

SEQ ID NO: 17771 - DNA, 1628 bp, Homo sapiens
ctgcccaaggttcattgtgggatcagaccgtgctatcttcatgcttcgcgatgggagctacgcctgggagatcaaggactttttggtcggtcaagacaggtgtgctgatgtaactctggagggccaggtgtaccccggcaaaggaggaggaagcaaagagaaaaataaaacaaagcaagacaagggcaaaaaaaagaaggaaggagatctgaaatctcggtcttccaaggaagaaaatcgagctgggaataaaagagaagacctgtgatggggcagcagtgacgcgctgtggggggacaggtggacgtggagagctctttgcccagctcctggggtgggagtggtctcaggcaactgcacaccggatgacattctagtgtcttctagaaagggtctgccacatgaccagtttgtggtcaaagaattactgcttaataggcttcaagtaagaagacagatgttttctaattaatactggacactgacaaattcatgtttactataaaatctccttacatggaaatgtgactgtgttgctttttcccatttacacttggtgagtcatcaactctactgagattccactcccctccaagcacctgctgtgattgggtggcctgctctgatcagatagcaaattctgatcagagaagactttaaaactcttgacttaattgagtaaactcttcatgccatatacatcattttcattatgttaaaggtaaaatatgctttgtgaactcagatgtctgtagccaggaagccagggtgtgtaaatccaaaatctatgcaggaaatgcggagaatagaaaatatgtcacttgaaatcctaagtagttttgaatttctttgacttgaatcttactcatcagtaagagaactcttggtgtctgtcaggttttatgtggtctgtaaagttaggggttctgttttgtttccttatttaggaaagagtactgctggtgtcgaggggttatatgttccatttaatgtgacagttttaaaggatttaagtagggaatcagagtcctttgcagagtgtgacagacgactcaataacctcatttgtttctaaacatttttctttgataaagtgcctaaatctgtgctttcgtatagagtaacatgatgtgctactgttgatgtctgattttgccgttcatgttagagcctactgtgaataagagttagaacatttatatacagatgtcatttctaagaactaaaattctttgggaaaaaccctcaattgtgattttaataaattaaaagtagcacattacatggttagaaaatgtcagtgttaaagaatggtacaaagtgaaaagtgtatccctctcttgccgccggtggtagcttgtcccagtggaagctgctgttaacaatttgtgcccccacatccccctccctgcccatccaccaaaaaaaagtacatttacttatgtaaatgtacttatggtgatgtatgtttgttttggcctcacagcatctgtttccccttaatttggtagctgctcacatttccctcgaaagaaccacaccctctgcattctcagttctctgctttggatgggacatttgccctgcagtccccccaccctccaggccatgccctctccagggtgagg

SEQ ID NO: 17772 - DNA, 1063 bp, Homo sapiens
gcaacttccaaggcaaaggtataaacaagatgcagcttctacatggctcttgcgatcctgggatgctcatcctgggaatccagacaccatgttgtgaggaggcccaggccacaaggagaggccacctataagcattcaggccagcagccccaggtgagttcccagccaacatcaacggccagatgtatgagtgaatgatctcacgtggtcccagcctttgcatgactttgcatgacgccagctgatgccaagtgggacagagatgagctgcccattccaatctctgcccacattgcagattcatgagaaaaataaatgtcactgtttgggggtgaatcatgacacagttacagtacttgaaacattttgcgaagccaggcatgaatgtcatatgaaattctaataaatccattttatttgtggcaccacaatattatcattaagctctctttttacacagtctgcaatttgtatcagctgcccccgtgtgactctgcccttattttaggaacaaccttttgctgggtggcgtcctagaaggtctgggcctgggcagcagccactgggaagcccacctgtgctttcccccatctgggtggggcggcagcagagaccctgagaatcagcggttatgggagctgtgtgttagctgtgtgttattggctttggcttcagcatgtcctgcctaggagtctccagcagctgtggtttccttggactggaggctttttctcctgatgacaatcgtgacaggtccatcaggcagtgccttgatgatgttccaggcttcaaaccgtgtgaggccctgcatggcagtgccacccagctgtaagatttcatctccaggctggactgtctcactttgttctgaggctgctcctgaaatgagggagaaggtaatgggttccacagatgatggggaacaaggaaagttgcctcctctccttgatctccaaagagccaggatagcttggtagagaacagggcaccatcccttgggagcttgcttgttggtggttctaaaatgaggcatctcttaagatggtgactcagaggttagggc

SEQ ID NO: 17773 - DNA, 1044 bp, Homo sapiens
ctgagctattacatatgaaaacgtatatgtctagtatccctggaaaaaatcagatgcaacattgggtttttggtggatgctaaataacagccactgccttatgatggggcaggaactcttccattttgttccagtcctcacctggccactgcgttgtgtcacctgtttggttcggttcttgaaggcacttccggtttgcaatccttagaacaagctccctacttttctgcctcccttttgtgttaaataacagatatgaatattgaaacctgggatgggaagtgacttgtacacagtggcaaggcgggtactcaagtcaagactcctgactcccagttccccacaaggagttagtcagcctagagaaaataacgtctccactgcctgaaacacagtgtaatttacatcacacttataaattcaagggaaaattatctgatcactgcagaacattgagacactagaaactgaaaattgaatttcgagctcagaaataagggaaatgagaaaaaaaaacaaaaagaatgaaagagaacaaagaatcagatatcttttaaattttagaagctttaattaaaactctcgaaattcttattcttagagaaagataagaaatcattttttaagggagaagattgttacacagattgctaaataaatataccatgtaccttggaaagctgcaataattagatttggctgaattaaactaacctgaaagttgaggaatggaacaaacagagctattaaaactatgatgtgaaataaccagaactcatgtttcatcttggctttatctgcaaaataatatttcttcaactgtcttcaagtgtagatggttgaatggattaacactctgctttcttcctttgccataagataaaagttggtttactgtaagttgaccgttagtatacctttgagttgggggattgcatcagatctttgaaaagtaggcacccccctgatctggtctataccatagtgatttgcacaaagcagtcattcacaaaatataaatactgagatctgaatttattatag

SEQ ID NO: 17774 - DNA, 1050 bp, Homo sapiens
attaaagggtttcattgttttaatcttttatattatttgaaagatatatatgtaatctttattttgattattaactacattgaaaaattttaaagatttagcctatgtttccccaattatcagactcaagagggaagtaatatcatttgatttcagaaatagaaattttaaaactgtgtctcattcaattcccacttcatagtctgtttatctgaaagatatctgaaatttcttgattgctgttatttatttatttaatattattattgttttatttttgttttttttgagatggagtctcattctgtcacccaggttggagtgcagtggcgccattttagctcactgcaacctccaccttctgggttcaagtgattctcctgcttcagcctcctgagtagctgggactacaggtgggcgccaccacacccagctaatttttgtattttttagtatggggtttcaccatattggccaggttggtcttgaactcctgaccttgtgatccatccgccttggcctcccaaagtgctgggattaaggtgtgagccaccatgccctgccaactgctattattaagctgttactttttatatactatttccttttgatatggtttggctgtttccccacacaaatctcattttgaattctagttcccataatccccatttgtcatgggagggacctggtgggaggtaattgaatcatgggggtggttaccctcatgctgttctagagatagtgagtgagttctcatgagatctgatggttgggtttttcccccttttgcttggcacttctgcttcctgctgccacgtgaagaagaacatgcttatttccctttcagccatgattgttagtttcctgaggcttccccagctgtgagtcaattaaacctttttcctttatgaattacctagtctcaggtacatctttattagcagcatgagaacagagtattacacctttgcaaaaataatttttgttatttgccttccattttatgctcagatatatgacaaataaatatttagcattattttagtt

SEQ ID NO: 17775 - DNA, 1010 bp, Homo sapiens
aagtttacagcccacggtcccatttttcattccgtcatacctcttggcaagctctgctgtagtgcatcacacaaggattcccatgattattgcctgatacatgttaggatcagagaagttatcagtagatgctgaatattcactatggtagaggaggacttgggggcatctttatttctattctgccttgaacttaggtaaagctaccagtgtccaaggtacaaaatcattatctggactgactcagttttattgaccagtaagtttagaaaaataatggaattcagaaattaggttaacctttgtacttggagctgagaatagggacctagatgtaaaagatctcttttattctaccttagaacagccaaataaggctcagagctatggtgagcttgtcccaggagtcaaagcccttcaggtgaacagattatcaaatctgggaattagaaggtcttctgttgtcaagtagtcaaactcttcctttcttattaaggcaaagaacattatacactttctgagctagaaaaaaattcattaaaataaaaacaagaatttatttatttatttatttatttattgagacaaggtctctgttgcccaggcttattaaggcaaagaacattatacacttgctgagctagaaaaaaaattcattaaaataaagacaagaatttgtttgtttgtttgtttgtttattgagacaaggtctcactctgtcgcccaggctagagggcagtggtgccatcacagcttactgcagcctcgacctcccaggctcaagtgatcctctcatctcagcctccctagtagctgggactacaggcgtatgccaccatgcccggctaacttttatattacttgcagagacagggttttgccatgtttcccaggctggtctcaaatgcctgagctcaagtgatccgcccacctcagcttcccaaagtgctgagattacgggcatgagccaccacacctggccaaagacagtaatttagatcaggttttaa

SEQ ID NO: 17776 - DNA, 1022 bp, Homo sapiens
agacaaactcatggatcatgctagccttgctataagcctcattatcaaagccaaatacattgtgaagatttgactagctatcctgaggttctgtgattctatgtctatttagagttttaatcattgagcttttcttctccacactcttagatgggcaaatactgttttaaagcattcatatttcatatattaaaacatttattttctgctcaaaacattcttatctaaatgggtggtttatatatcttgaaaatgaaaaaaaaaaaagtgaaattccagtacatgcaaggatttccctggaggtatattcccattagaagtagtcttttcaatcagaaagaaagcagtttttgaatgttatataatgtaaattgcagatctttcatagtaagataatttttatgttcctatgtttttacagaatctccactgtgtagtaatttctacacaggagctttgatgctattttgattttaaccttctgttatttctcttgaatttgtctgtaggtttgcaaagattcatatcagtgtatctgaacctattattccattcagagaaacaatcacaaaacccccaaaagttgacatggtcaatgaagaaataggcaaacagcaaaaagttgcagtcatacaccaaatgaaagaagatcaaagcaaaatccctgaaggaatccaagttgactctgacgggctaatcaccataacaactcccaataaacttgccacgctcagtgttcgagccatgccccttccagaagaagtcacccagattctggaagaaaatagtgatttgattcgttctatggagcagttgacatcctctttgaatgagggtgaaaatactcacatgattcatcagaagacccaagagaaaatttgggaattcaaaggaaaactggagcaacacctaacagggagaagatggaggaacattgttgaccaaatctggtcatttggcccaagaaaatgtgggcccaacatactagtcaataaaagtgaagattttcagaactcagtatg

SEQ ID NO: 17777 - DNA, 1064 bp, Homo sapiens
taagtggtgtcatgaaaccagatctggaggaggcaaggatttccccccaaaataaggagattaacatcccaaaggagggagtgagaaagctgcctgctaaaaaacaaactttgctgccaagtttatttttatctcatgtgtttgaagattaagcagatgtaccctgaaatatgcaatgctttgtttgagttactcaagaacacaaagtttactttaaggacaaaattattatatgattatcaacttttctttctccctacatttgagacattggtactttttgccgctgagtatatagccagagggcttctgtggtaaaattctctggacaaatccctggttttgccatctcctcagcaaacctcggtatcaggtgggctgtcacctcccagttccccttcctccttgctggcctttttcacctgcagacttccttgttgtctttccacctcagaccctctaaaaatgccccagtaccagagcagctccaatgctggcataaggttggatgcctaattttcctcacgattgttcgtacgctggtgccttcactggctgactgttctgacttcataccacattttggctccatgtccttcatacctgtaaaatatgattcttttttttttttgagacggagtctggctctgtcgcccaggctggagtacagtggcgcgatctcggttcactgcaagctctgcctcccaggttcatgccattctcctgcctcagactcccgagtagctgggactacaggcgcccaccaccacgcccggctaatttttttgtattttttagtagagatggggtttcaccgtgttagccaggatggtctcgatctcctgatctcgtgatccacccgcctcggcctcccaaagtgctgggattacaggcatgagccaccgcgcccagcctgtaagatatgatttacaggcatcttgccatcctctttggcccaacctgtcgtttctaacagaataatacttcagatataggtgaccattaaaggaacctgttactttataaactgtccctgtgcttcatgaaggaaaacctaagattga

SEQ ID NO: 17778 - DNA, 1034 bp, Homo sapiens
agaataatgatagaataatatgactgagattaagtcaaagtagattaagtaggtaaaaaagagtaaaatataaaaatttaacaaatattccctcctctagacattttagatactgtgcatataaagcaaaacattaaaataaaaattagaatttacagaatagaaattgtattagaagacttggacatgccttccagaatttgacatgtaaattaggtagaggataaatatggaaatagaatatttaaataatacaaacaataagcttcgtttaataggtagatataaaattttgtactctaagtagaaattaaatttaaaaattgaatttactaggtcacaagaaaagttttaataaaatctccaaaatataatgtgcacaagctattattttctgaccaaaataaactaaaactcaaagttaataataaaaaattgttcaaaataattctaatcagctagatattaaaatacaatctcctaagtcactcttagagcaaagtagaaattaaatttgcagttacagagtagagcaatcctttggtttaaaacatttgcatttcactttaaccaaacagcttaaggataaattacgcctattttacaatatttgttttcgctattagaaagaagtgaaactgaagctccaggcatatgtcacaatgttggcctctttgctcattgacaagtgccgcctctgtaggaaagcactacagtagcactagtgcttatcatcccctgcaaacttcctttgtaagatgatgtataataaagaacattttttcaattactctttaaaatggataaaaatagcttctgtaagaaggtataacaaaatatccaaagggcatggtaatgtctactcagagttcaaggaaatgacaaacaacatacctctagaaattagtctaaaatcactacaggctgaggttccagtgagggagtgctcaaaaggctacctaagaagcgcctgaattattgaggcgctgagatgtcagttccaggggacctgcaatttagagcaaaacaagcct

SEQ ID NO: 17779 - DNA, 1032 bp, Homo sapiens
tgaaaaatccagatttcacatttgaactcagctataagtcacttagagaacttatgtgtgccgataagtgtagaatagattttgtggtctggaaatagttgatttaaagtttaaagttatttaattctaacctgatgtttataaagttggtatagatgggaccagagagacctcaccatgtttagcacacaatagcgttttgttcttttccctactgagaatatctctaaaaataaatatttgctgcaggctcctattaaaatgtgaggggaaattgaattaggattccaaatctttagccttttcatatactcctttagatctcttccatatggttaaatctttaaaagttcaaggacatattctgagaggaaacatgatattcttcttttcacagcatgaggaaaataaatattaattagcctttttctgaactggttttaggtctgccatggttggttgctgggtcaataggaagtcagtgttgataatctgtgtgtgtgtgtgtgtgtgtgtgtgtgtgtgtgtgtctgtgtctgtgtgtgaatccttagtcatgtggggtaacctaggcgtcagaaacctttgaagggttttactagcaaatttgatttaatttatttcaagggaaagctcagtagaatttggttcttaagactttgtgatacttttataatgttttaaattcacttactagtgaatttcttttaaatgtactttattatcagcatttccatttgaagataatctattttaatgagtgaaaacctaatagtcatttcttagttttaagagtttcaactgattttaatggcttttcttttacagatagtaatgattttattctcttttttcctagtagttatgtgtcatatttctttttattttcatattgcttataagaatatggtacataataataattacagttgctattttgtctagttccttccagactttaatgggaatacttctggtgttttagtttcaggtttgctgatgcctgtcgattcatggtgtctcttatttatt

SEQ ID NO: 17780 - DNA, 1059 bp, Homo sapiens
aagaatggaaaacaccctacttttgttcataagccttccttgagattactgtattgctcaaattaaatggaacatgaggtataagatctccagcatgatgctcaagggaaagaaaaggcattctgctgagtgaatggtttttatacgatcttctctaattaaggcctggtgcttgtgttctttccctagtagaggatgagactgtggcatgcattagtttctggttttctttctgttgctgaatttctagatgccttccaggattgaggttaagtggtgtataaggagagataccatttctctctcttctgcttcccaaggcagccttggctctgccatatggtacggggagacaaacctactataagctaaaatttttcatttattcttggagaagagatataccttgatgtcttttactgaccttttaaaaaagtgagatggtagcacaacatggggtaaggatgaaggtgactaaatctttgtttaccaaatttacttatataagactaagcctgatggacaaccaaccacttcgggaaaaaatggattgaagaggaaaagccagatttatttcctataagagttaagattgtatttagctgcaagtaaccagaaaaccaactgcatagtcttaaacttcactcagtagaaagcccaagggtggacagtccagggctggtgtcatgactcttctgtgtcatcagggagccagtggctcagcatgtggcttttgtccccgtagaagcaagatggccttatatctctgagaatcatacccacattcctcgcaggaagagagcacaagggtcaagaccttctaacaggattaatgtttttatttggaaagaaatgcctctctagtgacttctgtatatatgctcatttttgtaattttgtcatatatcctctctagctgccagggagccctgggattgagtgttttactcttccagcctctgtagttaaggcaaaagatattggggttgtgaatggcttttgaatagccagtccacactcttggctgcattcgccttccattcacctggtgatgcctga

SEQ ID NO: 17781 - DNA, 1066 bp, Homo sapiens
tacattttctttataactcttttaatgtgtttattggtcaatcttgtgttctcgtgtgaagatattaatagttcttggagtcatttccctgtttttctattatggtactttattgttttaaatactgcttttcagatgtcctttgtatattctggatactaattccttgtcagttttgaattttgcaaatttcttctccagtgtagaacttgtttttactttccatttggtaccttttaataggcagaagttattaatgtaaatgtactcgaattatcattattttatgggttttgctttttgtatcctaagaaaattgaaattaagtctatgttgaagtcacaaaactctcttatgttttcttctaaattttaatattttacttttcatgtttaaatatttaattcattgtttgcaaagaaggcatccaggttcattttttcctcatttaaatgtccagctgttccaacattattgaatagtccatctttatccactgattagctttgtccactctgtcagaaatcagattattacctatgtacataggtctgtttctggactaattttatttttttctggttgtctctaactatctctattcagtgctgtcttcatttttaaatgttttgacatcaaaaagaccaaatccctttaccgtgtttttctttgttagtgtcttgtttgttcctatttgctcctatatatcaagtttatggtcagcttgtcagcttctatgaaaagccctgttgaggcttcgattggaattactttatgtccatacacctatttggcatgaatcagcattttataatacagcatctttccatccatgaatgtattaggtttatttatctatttatttaggtcattttaaatgtttttcatgaagttttatagttttatttataaagagttttgatcacttgttagattttgttgctattctaaaaatcattttaaatacacatattttctatttattgctattctatttatgcattttctattcctaattatagaagtataattaacttttgtatattgatcttgcatttttgccacc

SEQ ID NO: 17782 - DNA, 1032 bp, Homo sapiens
ataactgcacctaggggtgctgggatgtcacagctgcatgttggtaacatggtgggcactccagggcacagacctgccatctgtcagcactttctcttcaacctaacatgtccctctgtttcttctgagctaatgttccatctgtccagacttacacagcagtgggagttgcctctgaaaccccttccttgtacacttctctctaaacctgaacccaagcagcacctttcctctcaaaataaggcgtttgaaaagctttcccttgcctgcctgtcctgcccagttacgttgttgcctgacctaattctgaagtccctttggagttggcaggaatgaggaccaagcatctgattcctcactggtctgaaatgagatcccttccctgtagaaaggagcaggtgctattttcaccctgccccatcttcattgaactgaactaatggtttaagtaggtgtttaaagcaatacctgccatctttcctgccaccaggaaagcctggctctgctgacctgaacatgctctgtgttcttgcatagagagctgtggtaatggtgggatcctctgtctcagcttgccagtcctttccttcaccagggtgggagggaggcccacaacccagggcatctgcatagcaaatgcttccactcaacacgacttttcaggagtaaaacaaaaatgtatcttatacacaagaccttctttcttggaagaaacgccctgctgcaaagccaaggctgaggagtggccacctaagggatattaatgcgatttttcctctcattgggaatagggtatgtgtatctggtcttcgaactagagaagtctgtccgatccttgcttcaggcttgctctcatgacccgctgagcccagatggcctgagtgaatattatttcaagatgtccagccgaaggatgcgctgcaaggaggtgagttagcgtgatgtcctttctggatcgagggtcttggaatattgaggcactggattttcttgtggtaggtggataggcaggctgcaggcaaggagtattcc

SEQ ID NO: 17783 - DNA, 1111 bp, Homo sapiens
atagaagggtgaaagtagagaaaattaacaatcagtctaaaaatatcactgctgatttggtctcttataccctctgaggtagcattaatgaactggaaccctctgccaggtcctctcctccccatgacttccctgagagatgtctgtagctgatttcctgccagcatgtgaatggggatgggtacgtctgttctaggaagagcacaatgtcttacccatttttagaagataggaatttgctggacacttggacaccagagctggaggcacttggtaaacctcagactttccatgatcccttgtgttctggaggccaggaaagaacagagcaaagaggtcagggccttggccgttattggagattgactctaggacttctcaccacccctccccctcctctaatccatctaggttaatacttgacatttggaattatgaagttgtgtgccccatgatggggagtggactttgagatgagacactggcctgcattataagggacctgtcatttccactggattttagtttgtgtggcttaaagagaatgcctttccagttaggtatgctcgtggctttgaatataaatgggaacagtctaacgctagctattttgctcctttccttctgattcccagctggtggaaatcggtgctgcgtactcagcaaccttacatagggcaggtatggtctcatgagctgggagcaagacaggttttctttcttgaaatgaggtccccccacttccctttgtctttgctgctttgctgctttctttccattgtctttgctgctttccttcctttgatctgtagacactcagagaactgcctggccagaccctatagaggtacaattaggtcactctagggcatctgaccatgggtggcagtttccacaaaattcacttgttctgtgggttgaaggaaatatcaaaccagctggcaagttctaggcctcttgtcttcttggtatcttctagtcaaatttacagtatatcccttctgatttaatatttgcaggaaactgatgcatggagatgctgacatcccacgtgttaattctggggcaccctgatcctattctctaggatggcattgcccctttctgagcc

SEQ ID NO: 17784 - DNA, 1025 bp, Homo sapiens
taggttcccagatggtagctaaaagacaccagtcagacctgttactttaaatcttttctgtacacccttgagcaggaatatggataaatacatatatccacatctattaatatgtagcacagtgataaaaaccactgttctatactttaatgtgtagacatgtcagatactaagttaagtggggaaaaaaaaaaagccagacccaaaagaatacccacatgattgcatttataagaggttcaaaaatgggcaaaactaactggtaacaacagaagcctgaatagtaaactctttgggggatagtgtgggaaagggcacaggggaaccttatagagtgttggaaatgttctgtgtcttgctgtgtgtggtggttgctccggtatgtacagataagtgaatgttgatcaagatacacacttataactattgtccttttattgagagggaacacacaacagaataaagtaggaatagaccaggagggacttaacttggccactaagctgaaggcggaccatgaagggttttatatgctattgataaggaacttggcctttactctgtggcagcagttctccaagctaggtccatgcctgcctagtggtcaccaaaaccctttaagaggctataaagtcagaagtatttttataattctaagacgtggttgatttctgctcccccaccccactgtgttgacatttgtaccgatagtgcaaaagcaatgggggtgagtaaaacagctggcacttacttagcaggaatcagggcaatgccattaaactgtagtagcagtcattgtattcttcatggtacacattcccagaaaagccagtgtcacttacaaatgtccttgaggaagcagtaaaattaatttcattacatctcagcccttgaatatatgcctttaatattctgtgtgacaaatgagaagtcagtataaagtacttttgcttcatatccaagtatgatgattgtctcaaggaaatgtgactgagtttcaagaataagcctctttttttcctttg

SEQ ID NO: 17785 - DNA, 1050 bp, Homo sapiens
tcatgatgctagctatcaaggaagccgcctcggacatgtcaccctatgtgcggaaaacagctgcccacgccatccctaaactctacaggtatgccccagccctgtcccacgctccccaggaggctggttcctaagttctcaacccacccctggcctttcctaagtcttgcctgctgcttctcagagggtttgaggagggtagtttgggggactgacagagatggaggagaacaataaggctggggtgcaggaggtgagcatggcttggacagatattgggaaggctggggctgagagtggcaaattcccctcaccgatttctccctcagtttggactctgaccagaaggatcagctgatagaagtcattgagaagcttctggctgacaagaccacggtgcgtgtataggggcgctccgggaggggtggtgaccggcagccggccttccacccttcgcgttcaccctctcgtctttgttctttccccagctggtggcgggcagtgtggtgatggcctttgaggaggtctgcccggagcgcatcgacctgattcacaaaaactaccggaaactctgtaacctgctgatcgacgtggaggagtggggccaggtggtcatcatcagcatgctcacccgctacgcccgcacgcagttcctgagccccacccagaacgtaagtgggcccagcccaggcagagcgggccgaagtgtgtcccggggaggcgcccacagacccgtcggtctccccgtccaggaatccctactagaggagaacgcggaaaaagccttctacggctcagaggaggacgaggccaagggcgcggggtctgaggagacggccgccgcggccgccccctcccgaaagccctatgtcatggaccccgaccaccggctgctgctgcgcaacaccaaacccctgctgcagagccgcagcgccgcggtggtgatggcggtggcgcagctctacttccacctggcgcccaaggcggaagtgggcgtcatcgccaaggcgctggtgcgcctgctgcgcagccacaggtgcgctccgcccc

SEQ ID NO: 17786 - DNA, 1048 bp, Homo sapiens
gttcactgattaaattatggtctattcatacagtagaatactagacattcatttaaaatgatgcaagcaggctgggcgcggaggcttacacctgtaatcccagcactttgggaggccgaggcaggtggatcaccagaggtcaggagttcgagaccagcctgaccaacatggagaaacgccatctctattaaaaatacaaaattagccaggggtggtgacgcatgcctgtaatcccagctactcgggaggctgaggcaggagaattgcttgaacccaagaggcagaggttgcggtgagccgagattgtgccattgcactccagcctgggcaacaaaagtgaaactctgtctcaaaaaaataaataaaataaataaaatgatgcaagcagctgggcacagtggctcacacctgtaatcctagcactttgggaggccaaggcaggtggattgcctgagctcagaagttcgagaccaccctagggaacatggtgaaacccggtctctattaaaaatacaaaaaattagccgggtgtggcgttgtgcatctgtaatcctagctacttaggaggctgagacaggagactcgcttgaacccgggaggcagaggttgcagtgagccgagatcacgccattgcactccagcctgggtgacagagcaagactccctctcaaaaaaaaaaaaaaaaaaggccacgcacggtggctcacacctgtaatcccagcactttgggaggccaaggtgggcagatcacttgaggtcgggagtttgagaccagcctggccaacatggagaaaccccatccctagtaaaaatacagaaaattagccaggcatggtggcgcacgcctgtaatcccagctacttgggaggctgaggcaggaaaattgcttgaacccaggaggcagaggttgcggtgagctgagatcacaccattgcactccagcctgggcaacaagagtgagactccatctcaaaaataaaaaagatggaagcatgtatttgtattttgagcatcaataactaggtaagagaagtgcatttttaaaacc

SEQ ID NO: 17787 - DNA, 1127 bp, Homo sapiens
ttgtcagagcaagaatacacctgtgttgtggctaacacgacagatacctgtgtattatgcagcccccaagctatttcctggcagtcttggcttgagaacacttcttgaaggtgatagcagataattatgagaatgactatccaaatgcttttaatgtttttcctacatgtatgttttttggaatgtatttggaagagaaaatagctccacagagcacattagggagatgctggccccgagttaaagactgatgtccttagcctggtgctcaggctccatggctgtctggttttggccctccctgagacctcatctcctgccacccgcttcctgtgccacacagtggcccttgctgatctcttgagtgcacctctggtgcctgaatagctgtttcctcccttatctgctaaacctagcagatttgctgggctctggactgaggtggagggagatatatgtgtggaggtgggagaggggtttctgtgcaggggttcaggggtgctgtttgaacataggatggcattgctatgttgctagtgagttttattttctcttctgtccctgtcctagacttccccttcacttcactcatccctgccgccgtaatgtttacctatcctgcgtcctcagagaagccttacctcctcctctgcacccctttgcctgtatttgttttccatctcagctttgcttctccacaactctgcctgtctccctcctggctgtccaggtcctcacccactgccctgggcccatccagcccttttggagaatcgggacccttttccaaagcacatgagaatggatctgatggcttttctgggtagccctctgcctgtgacccagccccagaacttagtcaaactcacatctcaggagggccaataggagaatgtatgttcaaagctccttaaaaactgtcagacactctaggaaataaggtagtgtcattaataaagcctgtcagcattcatcagcggcacttgcctcatccattccctggtgtaaatgtgacccaaaaagggaattcctagtcagaggactaggaggatttgtgacaagtatttcttctatcagatcactaatttatcaggtttgttaattgggcagtttgggggcaggaagaa

SEQ ID NO: 17788 - DNA, 1068 bp, Homo sapiens
agcaggctacttcttcccaggacaagtgacatctttgtacaaattagaaaaaaacgcttctttaagacaccttctggaaatctgtgatctgccaggcagttgatgtaatgagtctgcgtgtctttcatgattgacactcagagttgtgccctgcacagccatttacggggccgagttcaacacacctgtggcccattggaggacactactaggtaggaggctgacagcctgggctgctgaggagaggacagcgagggagatgttcctgctgtgtgctgggtgtgagattcccaggtttctgccatagtgacagatccagtggtgtgagtcactgaaataggggtgcagggagaacagcagcagggaggtaaggtgcaagcatggggttcaggagagacacctgggctggaggtacacattcaggtgtcatcacatagacatgtcctcaaagctgtggaggtgagtgtggaggggaaaccccatggagaagaactaagggaatgagcccccaccagaccacccagcctcacctgctgaggtggggcctgatactcaagtaggacacggaaatgaggccctggtaggagagaaatctgagcactgtggtatcctgtcccgtgggcactgtcccaacatgatcacactgtcctgagaatagcatctgcctgctctagaggatccctggcaaagacctctggctgtgacacctgaaccccagagcaccgtggcctgagtatctgtaccctcaggtgctggagtttctgcacccagtactcatcctgagtcactgccagtgagtgctgtccgggagggatggcgtctatatatctctgtgtccctagggtcaagcgttagatttttgaaggattcttatgagagtagacactgggactttgatgagtgtgtaatgcggctcgggcaatgctgcctgcttttagtccctagttagctctgggccatttgctgcccaggtgttctccatgatcctgctccgagctgctcctcggagtagatggtccagctgaggagcaggctgacccagtcctgcagggctctagtctcagcagc

SEQ ID NO: 17789 - DNA, 1032 bp, Homo sapiens
tgccctcacttctctgagttgccagtcattgttctgttgttaattcttccagaccctttctgaaaaatgcattaaaattctcaccagcatgacctctttgagtaatgagatctgtaagtttattaacctctgtgagaagtggattttcttgctccatgggagcggataatgtcttggagggaacgaacattaatgtgctgacctggagggcagaggcagtgtgagggcagcttatctgtgtccctcccaactctctgacttaacgtgtgtctcatggaactcagggaatatgggctgattgcttctgcacatcactgtccctcagcccactcagtccagcagcagcccagagtcagagaaaccaaaccataacaaaatccaagtttctgtcactgagtctcattcactaagtttgagaaggggaaagctgaaggtgagagcatgaagtcttatgcagagaagaatgtctagactgtatgtcattcacagtggcctgggaacccattggcgttgggaggggcagcaggatatttgctgtatgactatgttgaaacacatcctctgtcatcccagtgttggccttcaaatgtgcacatgtcatggatatttgacatgagctaagtagtgatgattcatgacttcatcctcattacttggatatttcaagcctgctataacctaacccaacctaatagtcttgtgtgtaccctgaatatttttggtccaggcccctctatattgtttagcacataaaacatttaattataatatgaagttataatctgttataatctgtgactcccccacccttgccttccagaccagctctgtctaatagaaataggagagctggccaggcatggtggctcacacctcacacactttgggaggcagaggcaggcagatcacttgagctcaggagttcatggagaaaccccatctcaaaaaaaaaaaaatacaaaaattagctaggcatggtggcatgcacctacagtcccagctacttgtgaggttgaggtgggaggatcgctt

SEQ ID NO: 17790 - DNA, 1034 bp, Homo sapiens
ttagttgctctcatcttaaaaaggagatctccctccctcctacatccctctcctgtttcacttctttgctcttcttcacctgaaaacacctcagaagatacatccaaacccactggctccattcactttctcctgccatttgttcactctccatactctacagtcttgcttctgcctcacctctgcaccaaaactgccagggtcttgggtgaccagggggttgccagatctcagcctcacctcacttcacctctctcagcagcattcctaacaaatgaccactccctctcctcaaaacaacacccctctcagctcctctggccccactgtttcctgcttttcttcttactcctaatcatggggttgcccagggactggtcctggttccttttctctgtccacactgtcttcctaggtaatactgtcccacctgcaactcctccccaccctcccatggcttcaaatgccatcgatatgcccatgatgcccacactttaatttctagctcagatctttcttggagcttctgactctcgtcaatacatggagctcttgatatgccttccagctctcacctgccttccgtcttccccatccaagtcagtggccctaccatgcactcatttgccaagagtcatgtttgagtcctcttcccaacctctcacatgcaggctatcagtttgtcctgtgcattctacttccgggatatatctggagtgcattcacctcaccccatagccatagttcccactctagccaccatcacctctttcctaacaggccccccagtatccactctgggttgtctgcagtccatttttcacacagaagcctaagtgaccagcttttaaaatcataaatcagatcatgtcattcccctttttaaatacctcccactgaccaggcgctgggcgcagctccccctgccatgctgctgtgcccctcactgtgttctgctaacatagatctcctttccttttcttgccttacctgagatccttgcacttgctgtttcccctgcctggaattctctt

SEQ ID NO: 17791 - DNA, 1045 bp, Homo sapiens
gtgatcaaaaacaagtactgaaactctgtggttgagatcaaatagttctgtggaaatgaaaatgtttactcactcataaaaccttaaagaaaatgtcaaaaaataatttttgtttgtggagaagcagggaggagacgcttggggattttgtttaaacacagaatatgtctttcatgtaattttaacatcattcgataaatgtatatattactcacttctcgtagataaaggctggtttgtaactcctacctacctctgccatttttaatagatccatgtcttctattatttatgtgaaaatacaagccatggtcgtaaattgagatgcagctaagggctggggaagcaattcagacaggagggtggagggagccgttttaactgaaaatagaaccaatgtcatcctttctgagagttgtgtaggatggagggggaagaactttttgaaagggcagctagtagaaaaccttgctgcgatcctacagcttcgtcatggctctgctgtgtagacaggactaggatttaagggaaaaaaaaacaaactatctgagtttacctccccccaacttgagatgcttctcctccctcaaatgttcactaccattttccacttctcttctgcgaagtgttctgtgttaagtgtggcctctccagtgagtttgtgttcttactccctaaggcaactatttcatacctattcccctttccagacctctccccttcctaggcacaccccgtggcttccctttcaattgacaagataggcacctttgaccaagggaatgtcttcattttgccaccacctagtctagtatgcagctgctgctaccttctcctacctgcctgctgtgctggatgacctgtccctcatctcttcctactaggggccccttcttctggggtagcctccattccatcccttcctcctcccatcttttcagagattgtctctccttcctaaccacctttctctccggggtcttctccatcagtataggagcatacatctgaccaacagaactttctgcactgctggaaatgttct

SEQ ID NO: 17792 - DNA, 1039 bp, Homo sapiens
ctcctgtacatccttgaggacccaactcacacatcccctttttgaagtcttctgcaggaactaccttattcatacctcggttacattatatttagcttattgtttaaggacacagactggctcaaaataggtgctcagttaagattaaataaatgggtaggccgggctcggtggctcacgcctataattccagcactttgggaggccgaggcaggcggatcatgaggtcaggagttcgagaccagcctggccaacatggtgaaaccccgtctctactaaaaatacaaaaaagtagccgggcatggtggcgcatgcctctaatccgagctacttgggaggctgaggcagaagaatcgcttgaacccgggaggcagaggttgcagtgagtggaggtcgcgccactgcactccagcctgggtgacagtgtgagactccgtcttaaataaataaataaagaaaaatgggtagatgctatcaaaatctctggaggcatccaggacacatagacttaggagagccctggatgggagaggcagaggacagatgggactgttggaaatcgtttatagctcaccttcctaagggcaggcccttggcctgattggaaacagcaggggctagggctggtggtcccatactgatctggtgtcatcttaaagagacagcccatagtcttctctgatccttaggtgccctgtagaggggtcctgaatctatggagggctctggatacagattggcaaagtgttatctggcaggaagtacacaagctgtttccatggtgggggcagattgagaatcctcaaactgtactaaattttaaaatgttgattatataagaaccattttgacaatattaattcagtcacaataaatgaaaatttcaccctagttccaccattatagccagtaataataataataatacctgtaatgtattgaagatgtactatactagggactgagctaagcactttacagatatgatctcattcactctgtttttttttttttttgagacggagtctcacttctgttg

SEQ ID NO: 17793 - DNA, 1071 bp, Homo sapiens
aatctttttggatttttagtagagacggggtttcaccatgttgtccaggctggtctcgaactactgacctcaagtgatccacctgcttcagccttccaaagtgctggggttacaggggtgagccaccacgcccagctgttacatgatttttgtttggatcaccactgccagtgggctgagttctagaccttaattgatcaaacgttatttttacaggcttagggctacaattaataaatgtaaccttactatgtttagtgtgagttttttctttgcatagatgttgcagggaaagtatctcagtatacatttataaaagccttgagaaaaaaatcaagaatcttgaaaaatgcatgcgtataatcctgttgaagaaattgtctttgctgtactgtgtttctttaggttgaatgtcaaaatagaatcagtgccggttttcacaaaacatgacttttggattttcatttatttaatagcacttcagtataaaactggaaattaacaagtttgttaaaacagaaaaatctggttggatgtgggactattataaatcttaagttaacatggaaattaaaaatgtacttgtagactatttaataataattcacaataactatatgcaaaaattatgggatgaggccaaagctgcacacaaagaaaaagtaataattaactacttgtagtaaatagagtagaaataaatgatttaagcattcagcccaagtagctagaaaacaaatagcaaaagaactataagaaaagagaaagtaaatagataaatgtagaaattaatgaattagaaatagtagaattcataaatccataagctggttcctttaaaagaccaataaaataaataaacctctggcaaaggtaataaacattcacatttagaagcaaaaatgggaatataattatatgctgacatttttattttaattctgggtttattctgtgctaataaattgaacatgttgatggaatggatcattttataggcaaatataaattatcaaaattgactgaagaagaaaagcctgaatagaccaattaccatggaaggaattaaaa

SEQ ID NO: 17794 - DNA, 1045 bp, Homo sapiens
gactttgtcataaattctctcccaaggccagtgtccagaaaagtatttcctaggtttttttctaggattcttatagtttgaggtcttactttaaatctttaatccatcttgagttaatttttatgtatggtgaaaggtaggggtccagtttcattcttcagcatatggctagccaactttcccagcaccctttactgaatagagggatctttccccattttgtcaaagatgaggtgctgtaggtctgcagctttatttctgggttctcttttctgttccattggtgtatgtgtctgtttttgtaccagtaacatgctgttttggttactgtagccttatagtatagtttgaaatccagtggtaatgtgatgcctccaattttgttctttctgcttaggattgctttggctatttaggctttttttttgttccatgcatattttagaatatttttctagttctgtgaaaaatgatgttggtagtttgatagaaatagcattaaatctgtagattgctttgggcaatatggtcatttgaacgatattgagtcttccaatccacgagcatataatgtttttccatttgtttgtgtcatctgtgatttcctccagcagtgttttatagttctccttgtagagatcttttacttggtaaaaatatatctaaccaagatgtatggatgtaaaaatacctggtagaaatacatcttagttagatgtatttctaggtattttattttttgtgtggacatggtaaatgggattgcattcatgatttggctctcagcttgaacgttactggcgtatagaaatgctgctgacttttgtacattaattttatattctgaggctttattgaagttctttatcagttccaggcgcctttggtggaactttttttatttttttgagatggagttttcttgtttgttgcctaggctggagtgcactggcacgagctcagctcactgcaacctctgcctcccgggttcaagagattctcctgcctcagcctcccgagtagctgggattacaggtgcctgcca

SEQ ID NO: 17795 - DNA, 1002 bp, Homo sapiens
ctgggattataggcatgagccactgtgcctagctctcatgattttttaaaaaataatttcaacttttattttaaattcggggtaacgtgcagatttgtttcatgtgtatattgtgtgatgctgaagtttgaggtacagttgattgcatcacttaggcagtgagcatagtgtccagtagttagttttttaactcttttcccccttctgtcccttcctcttttcccctttttaacagtcctcagtgcttattgtttccatctttatgtccatgtgtatccaatgtttagcttccacaagtgagaacatacggtatttggtttactgtttctgcattaactcacttaagataatggcttctagctgcatccatgttgctgcgaaaggcatgattttgttcttttttatggctttatagtattctgtggtgtgtgtgtgtccgtgtgtgtgtgtgtgtgtgtgtgtgtgtgtgtcacattctctacccagtctaccactgatgggcacccaggttgagtcagtgtcgttgctgtgatgaacatatgagtgcatgtgtcttttggtggaacattttcttttcttttggatatataaccagtaatgggattgctgggttgactggtagttctatgttttttggtttttttgggaggttgtttgtggtttttttttttttttttgagacagagcctcactctgtcacccaggctggagtacagtggtacaatcttagctcactgcaacttccacctcctgggttcaggcaattctcccacctcagcctcctgagtaactgggactacatacgcccgcccgccaccaagcttagctaatttttgtattttttggtagagatggggtttcaccatgttgtgcaggctggtcttgaactgttgacctgaagtgatccacctgcctcagcctcccagagtgctgggattacagacatgagccactgtgcccaaccttggtagttctgagttctttaaaaaatctccaaactgc

SEQ ID NO: 17796 - DNA, 1031 bp, Homo sapiens
ttaacacatctgccagtagaagacctatgtgtttgtctttctaccccatagactagtttgtttcaaatgtacttgttaaaaattggtaattaattaaaaaacattttttatcagttattattattatttttgttttttttggtagagacggggtttcgccatgttgcctaggtaggtctcgaactcctgtgctcaagccatctgcccgcctcagcctcccaaagtgctgggattacaggtgtgaactattatgcctagccccaaaaattggtaattcaagagaagactgggagctgaaagaaagggctggcttcaggagctttttatagctgtcttatattctcaggatgttttttctcctccgggatttgaatatgtgttctggaggaagagatactgtttcttacagccttttgctaaaggaagaagataatttatcatgttgatagaacaaaatgaatttacaccaagggtagtatgatgtgcttttttttttagtaataaagtttatgtgtttatctctgcggaagttattagcataccaagtggagacatgtaggttcaaagtcttctggttttccatcaaatggttgtgtcatattgattgcatttaatttacttatgaaagggcttcgtggtgccatagtttatactcatctgctcagctacaataagagatactaaagtttgatttttaaaaaaaattatgtgtaaccagtttatttttaacatggtattaagcctctcctgtgttcttgggactatgatacctttgctaggatattacttatgtttgatattaagcaaatatttggctcttagcatgtgtagaccattgcagaaaagtttttttttgtttgtttgtttgtttttttgaggcagagttttgctcttgtcacccaggctggagtgcagtggcgtgatcttgactcactgcagcctccgcctcccgggttcaagcgattctcctgaccccagcatcccgagtagctgggattacacaggcacctgccaccacgccctgctaactt

SEQ ID NO: 17797 - DNA, 1050 bp, Homo sapiens
atgttttcttttctcccccataaaacacatgataattgtttagatatttatcagttgttcagtagtatctgaattattgaatactttaaaatgaattttactttaaaattaaatgaagagtcatcatcatgccaaataattagtgtcatttatgatatggttaactaattggcagtattctcagaaagtttctgcccaagccaacataatacctttgggcatttagtgtttgcccatcctctaaaatgtgaagagaactaaccccaggccagaatgaaaggttggtcattggcatgcctatcatcatacctcctttttcagtgtttcagctttttaaaaatcttgcttgagtttaacttggactccccctgcttataaactgttttttttttttttgtgggggagggttataacatatgtattgataaagcacatattgtaagcttgacttctaacatcttaaagccaaaattagttcttctggaattctacagtacatattcttgctcattatatattctggcttttttgctcatcattaggtttgtgtggttcatttatattggtttgtgtagttgtagattgttcattctcattgttgtataatattccgtcatgtgaattttatgtatttgttcttgtgttgttagacctaattttgcttaggtttccagagctgtcatgctctaaaattctagtaccctattctctcctcaaaatcaaaacaggcaatggaagagaaaatctgatatttgcactgttgtgcttgacaattgatattataattagtgaaaagactataagatttaagtactagctgtgcaacatacttaactagatgatcttaggcaagtcactgtacctctccaaacctctgaaaatgggataataatgtaagccttatctaacataaagggttcattaaggatcagaataagtaatgtataagaatataggctgtacacacacacacacacacacacacacacacacacaagcacataaaaataacaggattggtattggtaatgtcaatttgttcttagcagg

SEQ ID NO: 17798 - DNA, 1402 bp, Homo sapiens
gatgcacaaatctgataattagatgagtttttaaaaaaatcctgatgagatcccctcatacagaagacattgctgtaatgaagtgtcttcagtctgtgtcttcagatacatacttgttttaaaaaatgttccttgatagaaagcaaaagtatattactgaagtataatttgataaaagcaatttgaatgggagatctcacacaaaataatctacaaacttgattctctcttgttcctggagtgtacttcccaccgtccttttaatctttagatctaatctcaagcagaaatttctctacaaaccttttccacatcttcctaagtcaaagcccgcatttatagattctcatagaaccatgtataggtttgcggcacttgtcctgttaagtgtgaatctaatcaagggcaaatggtgataaaggcctcacattgctgctctgttttacaactctagtaatttttacctgacaaaaatacatcaaggcaggcatgtaaagacttctagactgctaccttgtccttcaaacaaaaatttctttttttttttaattaaaaaaaaatttttttaagtctcactttgttggccgggctagagtgcagtgttgcgatctccgctccctgcagcctccacctcccagattcaagtgagtctcctgcctcaacctcccagatagctgggatgacaggcatgagccaccgtgcctggcctaaaacaaaaatttcatagttttctagtttaagaagggaattgagcatgctgttagcattctctctctctcaattaaaatgactattaagaaatttttaaaaaatagtaagtccattacaatgaagagaaaaagagaggttggaagggccaacagagtagaaagggacagagaagttggaagctgattgatggatgaactagagtagatgaatctggagcccagaatccagagctttcaaagccgcagcggagctggagcgcctttcctggcagaaccccaacaaagttcttggctagcagttggaagtaaggagggtggaaatgagaaggtagtgctaaaacatggaaattaatttaaagcctgtgtatagaccatccccttagccagctgtccatgacaatggacaggctttttgagataaattgaacaaactgcctgagaagaactgggactgctgggtatggctttgggaccccagggttaagctctcttccaatggctttgaggggtccctgccctagggctggcttcccactctaatgccaggtgccagtcagcaagcctcccacatacacagagctcccagccaacatttctgttttggagatagtattatcttgaaaacagaccagctgcttagaatagtgaagttggagacggagtttaatcatctgacatataaggaaaagcag

SEQ ID NO: 17799 - DNA, 1228 bp, Homo sapiens
catgaacttaagtttgaagcccttaaagaaactgtgcactttgaactgcctgacctttaaatgatgttcttcagttgtttgacaaatactatatgcctcccttttggggcgcttgtgaaacagcgaatggctgttgtaggtgtttgggacacagcaataaacaagaaaaagtccttgccctcatgaagcacataatctagtaaagggaaactaaagatacaatgtcaagtactgatgaatgttttgaagaaaaataatcaagttatgagagaaggaacattctcagcaagggaacgcattgttttcggcactaagtatctcctgttggaggaacacaagagtgaaccagtgtgccttaagcacagtagagggaagtggtagaaaatgaggtcaaaaagataggccagacaggatggtgcagggctttagagactgagcgaagactttttcagctggtatttgatggaaagcctttggagagttttgaatgagattggggaggcggaggtggtggcaggaggttgtgatctgatttacattttaaaaaaacaaactctttctggcagtggttggagtaaaataggcagcaaggtgatagatgaagaggcttttgcagtagtccaggcaagaggcgatggtgaattgtaccttgtaccagggaggtagcaaaggacatgatgagacatggtcaaattctggatatatttttgaaggtacaaccaagaggacttccaagacatccaagtagtgtcatagagtagacagaaatatgaatttggaggtgagggaacagcttgctgaacataaatttgcaagttaagagtgaatggtatttaaatcgagagatcaagtgagattacctaggaaggcatgtagactgtgaagagaggtacaaggatgagctctggaatcttcaaatatgtagagatgtagcagagaaaaagcataaaatgaaactgagaagcagctgtcagtggaattagaagagaaagaaggagcattatattctgaaagtcaagtcaaaacatttcaagaaagaagaagtgggaaatgtcaactatggaaagtggaaagtggtcagttatgctcaatgctattgagagtcaggtataatgaagactttgagttgatttttaatcttgacaaggtggaagctatcgataaccctgccaagagtgatttcagctgattagagtaggttaggcagaaaatgggaagtgaggagctg

SEQ ID NO: 17800 - DNA, 1091 bp, Homo sapiens
agcagtgtgaactggttcacagcgtcctctcatgctcttagctccaggagaggagggaagaatgaagggaaactagggcagcagattgtctctgactcttggcactgtccccagagaccctcctacaacagccaagtgcaggacctgctcaccacaggaagaaacaggtcctgcagggactcagggacaggtaagggctgcgactaaccccaggatgagaaagttgctagtcttggggggtgggaagggctgctgatgcccttctatgaacagacacctactgagaggggacatgcaaggatgagtgtgagcagtgtgtctctctcagtgagagagggagacagaacacgctcaatcctttcctgacctctcaatctaattttctttttctggttttcagagttgcataaaaggtttggtgggaaggaaactcgattcaacaaagtcaaacatacctgagtgcctacgatgcacacggcgctggcctgggcaggacagtacagaggggtgagctatagccggggcaggtaagttcttaccacaggaaagtaactctcgggagaaaggtgcaaacaagggactgagggagctcaaaggagagagagggagggtctgcagaaggtagaagtggccataaagtccaggtgcggcttcaacagtctgcgataggaggaaggcagcatccctgtcagggagcagcaggagtccgggctagaggctggagaggaggaggaatggtcaaggagcaaaggcaggctggtgcggcaggagcactagtgcgtgggctgggactggggggccgaggccgagaaacacgcagcggggctgggcagcgagacttgcaccggagcctttgccacagtccaggtcagaaagggccagtgccagggagaactgaaaggagggaacagacactagagccccaggacttatggggaagcagacagtaggaggaagggagtggagaaagaagagaggaatcaaaggccacgggggttttaacctgcaagaggacaggaagaatggctgacactaattattcaaaatgctgtagtgcttgccagtgcgctccatcatgcacagcaatacat

SEQ ID NO: 17801 - DNA, 1056 bp, Homo sapiens
ttaaattggggtttttttcccagagctattacaaaagatattattatgtgtccattgtgctgtttattctgaggcaggcaggaagaccacagtcaccagcctcccctcagttgacctggtgccaggcctggaccttgaaaatatcccacatgatctttgcataaaaaagaattaaaattttaattgtgttaagctactctgagtatttgttacagcagcagagcacatagcctatccttagacaaataggtaagtaaaacttttaacgtggtttgcctggcatgaagtaaggtaatgagagctcagactagtgtaggggcagcggagctggaaaaaaaaaatgggttggagaatcactggagtaaaactaactggacctggttgggtgtggtggctcacacctgtaatcctaccactttgggaggctgaggcaggaggattacttgaagcaggcatttgagaataagctgggcaacaaaataagatcccatctctttaaaaaatttaaaaattagctgtgtgcggtggtgtatgtctgtagtcccagctactctggagacagaggcaggaggattgcttgagcctaggagtccgaggctgcggtgagctatgactgtgccatcacactccagcctgggagatggagcaagaccctgtctctttaaaagaaaaaaaaaaggacttagtggtggtctagatgtagaggatgaggagtgtaaataattactccaagtttctggcttgagttgctggatgcaattggactatttaaacagataatgaaaaaatggaagagaggttgtggggaggatcaggtcctattttatatattaaatctgaggtgctagtgaggcatgcaagtaaaaagactgagtttggaatgaaatacaggagtctgggaacggtgtgggccgaaggtagaaaactggaagttatcagcttatagttggtattgaaagatacaaagataaagacctaaaatacagaaataaaccccaaggactgaggaatcaggtatttagaggtctgcaaaggaaaaacaaccagcaaagagca

SEQ ID NO: 17802 - DNA, 1045 bp, Homo sapiens
ttttaaacactctctgggttttagattatttgaaaacactgtaggggatgatggggagatgactacatgatttgcttacacttacatatttaccagcccagtggaccctagattttgtaatttgatattatccatgcattgatttgtatcccattttcttttggttttcttgatgagagctaataaaaacatgagaaaatgtgagcagacctaaaagcctagggccgttaataatgatgatggtgatgatggcagctaagggtatgaaagcaccagtccatttatcattccagggcacagtgaggaggtggctgtttgtatttttggtgtgtttctttcatttagtgaatactgattttctctagtatactcaacatacaatcccaaacatgaaaagttcataaaaagatagtagggatgtcgatctaatacttcttccttaaaaggtcctttttaattttgaatatttgaatgtattttttaattaatgaaatttaattcatcaaaagacctcttcattgctcacactgaaacataaggggaatgtagatggcattttgaattggaatatacaactcacaaattttctttaaaagcgttttatgtgtatatatgaaatgtttcaaatttaataagatttgtctttataagaggccaaaaataattttattaaaaatatacacagaaatacaatagaaatatttccagccaccaataaaacaaatgttcattaaggatagagataaagttactgatccctatttagctgtttaaattcacacaaaaaaatttagtaaaagtaattttcttgaaacagcagcaaataataaactttccttgggaaaacatttttcaaacaacatttaaaaatattctgatgatttgccttttatattgagtttaataatgaagcatattcatcttatttgcaaaagttactcctccagtctgcattcactgttttgaattttttaatatgcacaggccatattctcttttgaatagtttcatttcatgctcactactgttggcactaaattgtaat

SEQ ID NO: 17803 - DNA, 1027 bp, Homo sapiens
tatacctgcctgtcaatttggatctctatgaacaggtttatttttctttatactaactttagagtctttttaaagtacaatgtgaaatactgaaattatgaaatgccaccccaaaattcaacagttgtatttctgttatcacaaaatcaatggcatgttcaaaatagagtattacatactgctgcttctttcccagaagcagtgtgtaattcattgtacccatgaggactttaaatatgcaagcaatgtttgaatattgatatttaaagtacccctagggacaaatttgtctatgatgactcttcataacttttgttaacctttgttaacttcaaagcacaggtaagtccacctttgtaaaaaacttgatgaaggcaaattttgcccccatgcattttccatgagtctttcctctatgaagactagttagacaatgtcaaatcatttaaaaataatgacctaagaaatttatctggtttcagcagagttcttgcctgttcatgtcagtcctgtttacctctcaactcttttcttccttcatcccagttatctataattactcccaaagtattatgattctgattgttctcttattcctctcacccagctcagccctactctatcctctgcttatcttcatcctcttgacttttctttaataagtagtcctctatcattacttttgccagcagccttcccagggacatatacctgctaacagtcactgagaacttgaacacctggctcacttgattttctttctattcgacctgctacctttatgtcaggtcgcttcaatatgcaagtagcaacaactccaacaatttctcttccctttactaccaaacttatttctagatgcacttctcatgacaaaggaagagttgtcctacccccttaatactcagaatgtggtcagtgaaccagtagcatcaacattaggtaggagcttgttagaaatggagaatctcagacctgcccgaaactccagattctgaatcggaatctgcattttaactcaacccca

SEQ ID NO: 17804 - DNA, 1056 bp, Homo sapiens
agctgggaccacgggcgtacatcaccacacgctgcttttttgcttttttatttttgctttttttttttttccagtagagaccggattttatcatgttgcccaggctggtctcaaactcctgagctcaaacagtctgcccgcctcaacctcccagagtgctgggattacaggtgtgagccactgtgcccggcctgtttttatgtctatttcttaagagttgaatggtcttcctttgcatggaaaattagtggctcacaaacttttttttactacattccagttgggtagaggaaaaggccccacacctgtctcctctacctcacctaatttcagttttctaaggaaaacgctcagtaatcacaatgaaaagtcatgctatagtagatttgagggagattatatgtcttctctctttagcagtaaggctatggattattcatatttgagtcatagcagatactggaaaatcataggtcaaaaatattttgcatacaaattatttactatttacaataggactaatgagagcctcacaacaaactaaactgatgttgataaaccaccagtaattttagtttaaaaaaacaaagatagcaaaaatcaaacacataaccaatttaggaccacactgataaaactgagtccttctccaaaattacaggagtttcagtaatctgaaaagcttttcaagattaccaaatagagcttggcaaccagatttcttcatagaataccaaatgttgtgactcattaataaaacactagtaatgccctaattctattctgtatatcccaaatacatgccaaattgtaatacttataaactaatttataaggttactcataaagatcctttatgagcattagaaattttagggagttgttcattattatgagaactgccaggggccaggcatggtggctcacgcctgtaatcccagcactttgggaggccgaggcgggcagatcatgaggtcaggagatcgagaccatcctggctaacgagaccatcctggctaacacagtgaaaccccatctctactaaaaatacaaaaa

SEQ ID NO: 17805 - DNA, 1061 bp, Homo sapiens
atagagagttaaaatcttttttttattctagcatttatatttttactgtgaatttcacaaaacccttacctgtggtaagattaacatagataaatcttagtttaagatgatgatttaagtggccaaagtagacatatttaattctacttatgtaactaaaaatcagtttttaaatgaagatattgataatttaaaagtaaaatcaaagtagcacaatccaggtggctggcttgtatgctcagctatccattttttctgccttgaagtatgtgtctgaaacacctcgtaatatgtgcctaacttgaagggtttatatgtactttagatttgtttgctatagtatgctctgacatcttcactgatactgatatttaaaatatcttacctttgaaggtcagtgtgtcaattctatttctaatatgtctctgcagtgcatttctaggtcccaaagacctttttccatataaggagtacaaagacaagtttggaaagtcaaacaaacggaaaggatttaacgaaggattgtgggaaatagaaaataacccaggagtaaagtttactggctaccaggtaatggtttacttccttgtcacttgctatatctcatttctttggttttaacgctttttcaaatctttcttatatgtcctttctactaatagttaccttgaagtcacaattctttttgactccagtagcattttggattaaatgtaattcttaatcagaagggttcaaatcaagtgtccattggaaaattcagtttgacagccctttgtttttgaaaatcttccgagtaagcggaaccctttcaaatgaaaacagagtagttcttttcagtgtttgttctttgctattttttcaaaaatgtaatcagctaatattttattatttcttaggcaattcagcaacagagctcttcagaaactgagggagaaggtggaaatactgcagatgcaagcagtgaggaagaaggtgatagagtagaagaagatggaaaaggcaaaagaaagaatgaaaaagcaggctcaaaacggaaaaagtcatatacttcaaaggtt

SEQ ID NO: 17806 - DNA, 1026 bp, Homo sapiens
ttcagggtcatcacttatgttcatttgaacgttagtagagcctagcatgaactttcttagcttgttgtctctgccacccaacatcttcctcattcttgtcttgaaagagagttaggagaagcctctcaagacagactttttttcgtgagagaaataattgtaatttctctcaggaagttttatttacttttgtattatttttatgtaatagacattatggactatgcaactgatcatgttttcctccttaagagaggttgctagaaagcttagaaataagttttacctataataaatgtatagggctttatgatgcatatttttgcattttccttattcccgcccccattttatttttgtaccattggtttgatttttttagaacccatctccaaatgatctggttgtacagtagtctatatgtgatttttttgctggtttgatcatccagaggcagatttaaaaatacctgggggagaattaacttcaaaaaacctgtcataacattgattctactgaacttagttactaagtattgggtgtccctgaacctgagattatacttgccctggcaagtatgaatgttcaccctctctgaaggcagaaattatgtcagtgtttcttactctacttacacagtgcttaacacagtgcctggcccatggtaggtgtttaaaaaatagctatcaattaaattaaaattagttaaatgatgcaggggaggtatgtgaaaagtgaggtgagcttaacaagaaggctacgtttggttcagctaaaggagtaccctaggcacgaccagaattttcctcagaacatgactttgaatctgttctaattctgatgtaggtgactggagcctcaagttcttctgcttctaacataaacccagtagttttagtctagacaattttcaaggaacccttaacatggaaaaatatatcatcctcagtgcatttagctttgaaaaaatgtattttcttttctatgcttaaaaaattttaaaacatatagcaattaaccaattga

SEQ ID NO: 17807 - DNA, 1052 bp, Homo sapiens
tgcaggacaggtgagcccccaaattggggcttagcttgggagggttcttggctttgcccaggaaagaattcatgggtggggtggtggtggtgtgagtcagcaactcttattaacgtggcagcgtatagcagcagcagcacaggtactgccccatgcagagtgcagctacactataggctaccctgtaggcagtgtacccagagtagcagttcaggggcagttctgcagtcatgtttatatccacttttaattacatggaaattaagggacagattatgcagaaattcctagaaaaaggattgtaacttctgggtcattgtgtccttgccatggaaaggggcaataacttccagatgttgtgctggcaacggtaaattgacatggcactggtaggtgtgtcctacggagagttgctttcatatttttcctgtttctgctagtcttcaatctggtccagggtctaagccctgccttctacttcaatatggtaattgtatttgtaatattttgaggaaacaccgtactgttttccatagggactgcaccattttacattctcaccaacaatgcacaagggttccaatttctttacttcctcgccgatgcttattttctgttttttttcaaagtaggaatcctaatgggtgtgaggtggtatcttatggttttgacttgcacttccttaatgagcagtaatgttgggcatcttttcgtgtgcttattggccatttgtatgtcttctttggaataatgtctattgtccttcacccattttttaatcagcaaaaaatggtggttgttgttgagttgtaggacttaatcatatgttctggttgttagcttcttaggagatctatgatttgcaaataattttctcccattgcacggattgcttttttttactcttgatttttgtgcttattgtaatttattcaaataagcagagaacgggactctggaagagatgtcccatgacagtgagtttttatggaagtccatatgtggtaaaggcaggagcaatgaagtaaggtcctgtggtgacatggcgttac

SEQ ID NO: 17808 - DNA, 1021 bp, Homo sapiens
ttcaaggtaagttgcacacatcgccataatttactcctagacacatgcatgccattaacctagtggttaatactttgaatggatccttttctcttttgaggtaaaatttacatggaatggaatgtacttaccttaactgtaccattcggtgagtttgacaaatgtatacattggtataatataaatatagctctctatatgatatatgtctgatatatataagtatatgtgatacatatatataatataaatacataaatacattgacataatacctaccaaggtatagaacagtgcctacgaaagtactctcatgcctctttctggtagattcctgtcctcctccttccttctcccccattgttcagatgtattattctaacattaaatagcagctggctgtttctcatctagtatgcctaattttgtgtggctttaaaaattagaagttcatctatgttatggattagctagcttaatgttaaaaagtactgaggctaaaacgagtctctgatcgcttttgtttgtgtaccctgttggtaaaataatttgagcatacatcactaatatatctaaattttctttatatatacatgtgctttctgttactactatatacagcataaaataaacacaaaaagaaactaaaagggatgacatgatgaaaacaatatgttttaaaattttcattgcacaatatcgttaacagtaataatacttattattacttataggttaagttcatattttttaaagtcttaatttttggaatattttctgcctgcttcttgtgagatttgactagatggatggtcattgttcttaacttccgaagagattttctagaatagaagtgtcagcttagacatttaccttgttgtttgcttgcatctacattactaatattatttttgtgtaggaatctttcttttttttagccacctgttcatttggtgagagctagttcagttagaagtagatattccataatcctgctcaaccgggcacacaccaaatggca

SEQ ID NO: 17809 - DNA, 1064 bp, Homo sapiens
gaaacctcattttgatttgtaccctgaataattgttttgagatgttcatttgtaactttagtttcaaccctgtgtttacagaaacacgtgttgtatagaattaaggtttaagggatctagggctgtgtagaatgtgtcttgttaataatatgtttacgggcagtatttttggtaaaaattattgtcatttttcatttttgattaaccaggggcacaatacactgcggaaagccgcagggacctctgcccaagaaagtctgggtattgtccaaggcttttccccactgagacggtctgagatacggcctcatgggaagggaaagacctgaccgtcttccagtccgacacccataaagggtctgtgttgaggaggattagtaagaggaaggcctccatctcttgtatgcccctgggaacggagtgtctcggtgtaaaacccgattgtacattcgttttattttgagataggagaaaaccgccctgtggctggaggcgagatatgttggcggcaatgttgttctgttactttttactacactgagatgtttgggtggagagaagtataaatctggcctatgcatacatttacgcatagtaaaaaaaaaattttttttaattttatttttatggatagggtgattttaagtttttataaatttggtttagttttttagttaaattattattataggctggattaatgggccagatggatggggcctgcgaacacgagtgagtttggcccatagaattacaatataattggttttgaggggcctagtttataatagttttgaatttattgttttgtagtattattgtagtattagttatacatttttttaaactaagacttttggatcttttgattttttaggggcaaggtttttttttaggtttagattttaatgatttttgaaaagaagagttttgtaaattatttgtggtttgagtgacattttacttactatgtgacaagtaaatttattggtattgatagtaggtacttttactaattttgggttgtaggtattaaatattttggtgtcttttttaggcaaata

SEQ ID NO: 17810 - DNA, 1045 bp, Homo sapiens
tagtatcttgaattttttttggtgggggtggggggagttaaacttacttagacctggtaaagggcagtatttgataaatgtcagctagtttagggttagggaattgagttgaatggagatagtcactgccaaatgtaaagcatgactggagagccacagtgatgaagccagggtccctttctccagatcctttgtaacagtgttatgtgatctcttctagaagattgttctgaaagataatgccaactcggaacctaggaaaccatccagtgggtttctgcagcttaggtggttcaaatcctcatcagcacgtttgttttctctgcctcagtttgcttacagtgatgttctcagtagctgtaattgctgtctttgaatacttaagcatttttttttagctcacaggggtatgtgtgcatttttcttttaccaagtgttagaactttgactctgcttttgtgggctctggtttagcaacttggttgtttagttgtaaaatgattagtagggaaaaccgtgtgtgtgtgtgtgtgtgtgtgtgtgtattttaagtttcttttgttctcagagcacttagaattttatatggaaattctatcagtttacttgattctccaccccacatttcttaaacagcaaagtatgaaggtaatgtgtcccataaccagccttcagaagaattacagctgctgtgtctctgaactttcaagaagtttgtgcatcaattttcaaaaaattatgaaatccttgaagatagctgtgttctacatttggaaagatacaaaaactgaaccttctagcaggcagttttgcttgctggtgcttgagatagagccacacattggtctcagtggatttatggagaaaaataggtacagaaagttatttctaaataagaccaaaaatccttttcttaagcagtgacaggtaaagaggttgtcttggctaatattgaattgtgttgcccttgattgagacagttttatggtggggatggtagtggtgataaacttgtttgaaatttgtccacctatagtaacctttg

SEQ ID NO: 17811 - DNA, 1071 bp, Homo sapiens
gaactgtaggccgtgtggtttagagtcatacatcctcacaggtctgttagcgtgaagaagcgtaccagtacctctcactttcatatcaatgtgtcctcatggcagaaggcagcttttctgttaaatctgggaatttatcagaaagaggacaacccaagcctcattttagagagaagtctgctatacacttggaaatctatgtgtctatcatccctaaggacattaatgtttattaaactctcaataaacagtaatgttcttagggatgatagacacagaagtttccaagcgtataccagacttctctctgaaatgaggcaaaagcaatggcaacaaaagccaaaattgacaaatgggatctaattaaactaaagagcttctgcacagcaaaagaaactaccatcagagtgaacaggcaacctacaaaatgggagaaaattttcgcaacctactcatctgacaaagggctaatatccagaatctacaatgaactcaaacaaatttacaagaaaaaaacaaccccatcaaaaaatgggtgaaggacatgaacagacacttctcaaaagaagacatttatgcagccagaaaacacatgaaaaaatgctcaccatcactggccgtcagggaaatgcaaatcaaaaccacaatgagataccatctcataccagttagaatgccaatcattaaaaagtcaggaaacaacaggtgctggagaggatgtggagaaataggaacacttttacactgttggtgggactgtaaactagttcaaccattgtggaagtcagtgtggcgattcctcagggatctagaactagaaataccatttgacccagccatcccattactgggtatatacccaaaggactataaatcatgctgctataaagacacatgcaacaagtatgtttactgcagcactattcacaatagcaaagacttggaaccaatccaaatgtccaacaatgatagactggattgagacaatgtggcacatatacaccatggaatactatgcagccataaaaaaggatgagttcatgtcctttgtagggacatggatgaaattgg

SEQ ID NO: 17812 - DNA, 1422 bp, Homo sapiens
ctcctgttcctgcagcctctcctcctgtctcctgttcaggagactcaacatctgattgttttccacctcagcctggagctgtcttcccacactctccagctccttccttaggtggttggtctcatcttggagctgctccaccttagagggccgtgctgggggctctggggccaggggttcagctgagaaaggaagcagacaataagggcctctggataaaaaaaaaaaaaaaaaaaaaatcctcccttcggtgcacagctcctcctctcaggcttcccaaacttggcctcactgctaatgactcctcacacccggatggtagccaatcttccaagtcactttcagatagcactgtgggtggctgacaacgggcactcctccctctttactgagagggacactgaggctcatggagatgacaagacttgccatctcctggcacagacctctttccctctgcctcaaagcccttccatctacccacctccccggggcattctaagtcaccctcacagccctctgatgccagtcctgctcctaggtcatggcagccccatcttacccgtctggtttttgagtttgaacaagttcctcccaagcttctgtacctgatgtatctcatgcttctcctctttcaatgtgtgaacctgcctaaagcagaggggaaagggccctgcagagaggggctgctgaacctctagagacagagtttgagaaaggcccaccccccttctgccagcttacgattgagaaaggtgcattcactcaacaaacatttactgagcacgtacaggccaggtacagttcttcatagcagagatataagacagcaaaggacagacaggagcccttggtcctgaggtttccattctaggagcctttaaatctctgagctaacagtgacctttgatactctctacctcctccagaaacacgagcctaaggaggagagatggcttgtccagactcaaaaagcaaattagggactgaggcagggcagaaatacgggcccctgaaaaccagtcaggctagtgctttcctgagaggtgacaaccccagggcatgtgtggcaaggactagagcaggggtgtctggagaagagagagtcagcaaagagggcagtgcagaagagccatgctgcatgttctgtgctctggggtccctccaggtgagacctgggtgcccagctccccatttgcccttggcatcaggggctcctagcccctttcttcagggccccaagaggaaactggagtccaggattcacaggctggaatcaggggaccccactggactcttaccagtgaattgatgttttcagtgagttgactgattattgtggagcttgaatccagggccactgctagttcttggtactggctctgaggtgcatgcagagaggaggagttggaggaagattgt

SEQ ID NO: 17813 - DNA, 1030 bp, Homo sapiens
gatgggagtgactgcaggagggaatgtgccctggtcagcaacttggtaaatccaacttgctgtacttttaaggaagtcgttttctgatgttacaggcaacatcagaattaccgaattgaattctgaggtagcactttaagaaaggtctacttagataaggttaggttcatttagagaataatagccaggattgggaagagattcttttccatgtcctaggatagctggtgaaattgtggatttggagaggaaaacatgggggttctggttcatgatagattgtcttcaactatttgaaagagtatgtatatggaagcattagtttttattttttttggtgaaggcagggcataaaactagaactaataagtcaaattacaaagaggtgattttcaactcaatgtaaggaagtgacttgtaactatttagacccatctggtgatgtagtctttgaaaactagaatgttcttcatctttaagaataacttagaaggctgagatgtcaaatgggaaatcagataacttcatgagatccttgtagagcctgagagtctggttctgagttaaaatatactaaggtaactcaaacttaattttaccagtcaccctcaacctttattttcccctccctgaagaactctttttatttctgtaaaatcttgattcctgagttccagggtacagagcttatggaatagagtccccaggttttgatgtagaggatcctctttctcctgtctgaaaatatcctttagtatttcctttagtgtgagtctgcagatagaaaaaatccttgctttttatttcatcattgaagagtatcttcattgagcgtaagtctctagatgggcagtttccttctttcagcacttggcagatatcattctcttatgccagcttccattgtttctcttgaagtgtttatggtggttaaatcttgtgaagtctttgatcagttttgggaaattctccacaaccatatcttcagctcttgcttctgtcccattcttgtttttcttccagtgctcta

SEQ ID NO: 17814 - DNA, 1019 bp, Homo sapiens
tactaaaagtacaaaaattagctgggcatggtggtgcatgcctgtaatcccagctacttgggaggctgaggcaggagaatcgcttgaacccaggagacagaggttgcagtgagctgagatcacgccactgcactccagcctgggcaacaagagtgaaattccacctcaaaaaaaaaaaaaaaaaaaaaaagacatgtattgaaattatgtaaaacataagcttagtgtaacatatagttagagcgagtacttgggaactaatacctagccagcaccaaggtgaagagaaggcacattgcttgcactacagaaaccttctgcaggctgcttcctgatcaccatgcctctgtacgctcatcttgccttatgtttctctagtgttatcactcatatatgcatccttcaacaatacagtgtagtgttgcctattatttgggcttttgaaaatcatagtatatgtattttttcatatctttgttgtgctcaacgttgtgtgtgaaatttgttcctattgtgtgtagctatagttcttttgcattgctgtatttactccattgtttgaatacaccataccatttatccccttgactagatacagacatgtgggtggtttccagtgttattaggaacagcgattgctgctatggtcattcttgtctgtatttcatggtacccttgtgccagcatttctctggggctcatacttaggagttggatgactgaggcatgaggatcaatttcttcttttacccaagagttatctagaacaaaaaaatttaaaaagcattttcaggtggcttttgaggtatttttagtgcatcaatatggtcagagaatatggcctgtgacctttcagtgagattttcagcaatcatttagacttcactattggtgttactgttgcctttgcttattgctcttcttgtattatgtctcctgctccctgcccctcaagtatatccctgaataatatcctgggttttttttttcctagaaagggtttgtggggatgtgtatgg

SEQ ID NO: 17815 - DNA, 1028 bp, Homo sapiens
ttacttaggggaacaggctttcctgggtgccacctgcttctcaagtcctgtgctttccacaccacagaatagtaaactgggtgcactgagtgcctggttcccctcagcccttaaccagtgctggcttgtccgagtttagaatcccagggctgactttgttggtggaatgctagctcccattcatttcccacctgcactggacgttttctgaatctccttgaagtccgggagatcttcattccaaagctcttcacttttctgcagcattgtgaccccatctggctggggaactggaagtcctgctcagagaaaagcaggaggggacatggagttctgaaattcactttctgctcccatgtctggaagtgacaggtgaaatgagaatgatagtgcctctcaagaaggtctagttcccagaagagaaagtttaatgactcattttcccccttttactcctttgagggtacaggataatgcccttatctattttcataataattataatgatgatgataatgaaaactaacgtttgccaagtgctaatactgtgtcaggatcctcataacagcccagggaggtagaaaccatcacaatgtccactgtccagatgagaaaatggaggctaagggtatttaaagaggttgcccaagaacaacaaaccttttaaatggcagactggtgtgtataatctacgcagggttcacatctatggaacactttattttaaattcttttaataatattattatttttcagctgagtctgggtctcactctgtcgcccaggctggaatgcagtggcatgatcacagctcactgcggcctccaactcctgggctcaagtgattctcctgccccagcctcccgagtagctgggactacaggcttgcgccaccatgcccggcttatagggcactttagatggaaacaaatgactggatctttaactcctacctttctctcctctcttcctgtaatgttgttactgaaggcaggaagggagactccttggctaaagagcagagcaag

SEQ ID NO: 17816 - DNA, 1032 bp, Homo sapiens
acacaggatgggatgggatggctgcaaatgcctgggggtattctgcctcctcatctccattcccaccccctcagcacacaggcacatgtgagtgcacaagtgtgtgcacacagatacacacagatttagaatacaaagaaaccactgctgtggcttcatagccccccagagcccttggactaatgtaagtaacagttctaccggagttgctccagggaatagatacgggacagaaagatgctcttctattgctcttgggtgataattgctcagttgggagaggccaagagtctctgggtcaggttgtgtttggccccatacttgtgtcctctgtaggtgaccatcatgacacatggaagcttgggctcagtctccctaaagttgattgagcctgctccttatctgtgaaatgagggtggttggccttgatgatcttgcagtaagatgtcctgatatgggaagtggagtcccaagctaagtgtgctggaaaggggaagggacctgtgtggataagctccccatggtctggactgattttgtcttttctgaatagattgctggttaccagtggccttccaggttgttatctgcaggtgtggcaggttgcagaggacagtggtgagtgaatttgacttgatggggtttggggttctaggaaagtgtgactcatacacccctgtcccctaatctgagccagttaagaaggagactcaggctggggacagtctcatgcctgtaattgtagcactttgggaggctgagctgggtggatcacttgaattcaggagttgaagaccaccttgtacaacatggtgaaacctgtctctattaaaaatacaaaaaattagccgggcatggtggtaggcacctgtaatccctgctactggggagactgaggcaggagaattgcttgaacctgggaggcggaggttacagtgagccgagatcatgccactgcactccagcctgggcaacaagagcaaaactccgtctccaaaaaaaaaagtagtagtagactcagagccaggtggg

SEQ ID NO: 17817 - DNA, 1033 bp, Homo sapiens
gaccataaattttgtgttcatactaccctttccctacattgaattcaaactttgaattccaccaacagtaagcatccttatgagtgcaaacatccttgtacttatgtcctcatctatccaatccctcctccttatacacttattgggaggaagacattaatactttactcactcgggctgggcgtggtgggtcatgcctgtaatcccagcgctttgggaggccgaggtgggtggatcacttgatgtcaggagtttgagaccagcctggccaacatggtgaaaccctgtctctactaaaaatacaaaaattagctggccctgatggcatgtgcctgtaatcccagctacttgggaggtggaggcaggggaatggcttgaacctggaaggcagaggttgcagattgtgccactgcattccaccctgggtgacagagactctatctcagaaaaaaaaaaaaaaaaaaatttcattcacaaccagttgtgtaaaagtattatttttcctcctttgctgagtgtttccacttgtattatgtcatcttatttctgtttatctgagtcttaccgtcttcacaagttctgctgtcactcagcatttgcaccctcacactgtttgtttaaatttgtggatatggcctcgaggtccttggcagattgtaagctcctccaggacaggagccccatttcatagacactgttctgtctttcctcagtagcctgaaacagcatctattaaatgttcagtacgatcatgcattgtagtcagaggcagtagcttcagttagcattgttgttgagctgttatttggaggcagagcatatgaatcattaaagtgatctgtactttcctgttatttagtaagtacattttcttggtcttgccaaatttgaatctgaaaactttctctctccatggttccatttaaacagcatgtacccttcccagatttttaactgttaatcctgcttccttcttttttgtgtgtgtccttaggcttaggctgttgtgtcttctttcttgatgggagaagta

SEQ ID NO: 17818 - DNA, 1071 bp, Homo sapiens
ctcactctggcccattggttgggtaaaagatgcatcatcctacgaaaggttaggggagctttcactcaacttgtcttctggacaatttttgaaaaaattctgggctgggtgcggtggctaacgcctgcaatcccagcactttgggcggctgaggcgggcggatcacaaggtcaggagatcgagaccatcctggctaacacagtgaaactccgtctctactaaaaatacaaaaaaattagctgggcgtggtggcgggtgcctgtagtcccagtgactctggaggctgaggcaggagaatggcatgaacccgggaggtggagcttgcagtgagccgagatcacgccactgcactccagcctgagtgacagagcggcactctgtctaaaaaaaaaaaaaaaagaaaaagaaaagaaaaaattccacactatttaatgctatttttaaaatcccaacatagaaactatagaccattttgagctgttacttaaaaaaatgtaatagtctagtactctctgcattaaggaagtttctgtagaaaaaaaaaacctaagacatgaacagcagaagcacagaatcttaactatataaatttactttccattgattgtacctctactgagcttgacacgtaatggaacataacactttcttttgtggaaattgtgtttataaaacactaaactggtatttcaaagtcaggatgtacacaaatcttaagaatagagcttttccacaggcaagtctgttactgtagtacatacgtcttcatgcttttttttttcttgagacagagtctcactctatcacccaggctggagtgcagtggcagaatcatggctcactgcaacctccacctcccaggcccaagcaatcctcccacctcagccttctcagtagctaggatcacaggtgcatgctatcacacctggctaatttttttaatttttgtagagattggctctccttgtgttgcccaggctggtcttgaactcctgggctcaagcagtcctccaccttggcctcccaaagtcctggggttacaggtgtgagccactgtgcctggcttccttt

SEQ ID NO: 17819 - DNA, 1037 bp, Homo sapiens
aactggaagtgaaagtccgattgtagtggtgctcaggtaacagtttttcctttcaaggcatggaattgcatggcattacttgggagaaaaattgagatatgaaataactggcatatcattctcttagaaactactcttttccagaaaagggcctggaagaaaattagtcactacttatcagttgtaagaaattctcaggctgggcacggtggcttatgcctgtaatcccaccaatttgggatgctgaggccggtggattacttgagctatggaatttgagactagcttgggcaacgtggtgaaaccctgtctccacaaaaaatacaaaaattagcgggtgtggtggcatggacctgtagtctcagctactcgggaggctgaggtgggaggatcacctaagccctagaggttgaggcctgcagtgagttgtgattgcaccactgcacttcagcctgggtgacagagcgagaccctgtctccaaaaaaaaaaaaaaaaagagagaaaagaaattcttactttgttaggcatttccattcagaactccaaagggctcatgacctttctacaaaaaagttaccatgttaaggtttgtttttgtcacatcccttaataaagtgtctcgttgtactttattttcctgaaattcttctgtctttttatattcctcattttgatacaccaggcctgatatttagttgttagttcattagatgttatagtacttccacaaattaagagtttttctgtagcatgttctcaatgtcaggatagaatcatcactaattatttccaagtttcctgctgacctttaaatatcacttctaaactagactccaggaattttgaaggcattaataccatctcttatggtgacaaatagtactgaattttttttctccactctgcttccttccctatctttgcactcatactcttagtgaatattttttttaaagatggggtctcgctctgttacccaggatagagtgcagtggcgccgtcataactcactgcagactccacctaccggtctcaa

SEQ ID NO: 17820 - DNA, 1027 bp, Homo sapiens
ctcccactgaggcaggggagcaaatggaaaccgtacgcgcttgaagtgggagttggggttgcttattgttttagtcattttaaggcggcggactcttgatttctccagtcggagcgactccaggtggtttcgggagagacgaggtttagccggtttctggggcgctcaggaaggcgattggaggccccacaaaaaccgttttgctgctttcagctccttgcaaccctttagtagagctgaaccgtagcgggctgcaccgactttgacttggaccactctgggctccgagttggaacagttacactacttgcccttgcgtccgcttagcactaaggcggcagccctcggaatctatggttttacagtccaatatcagtgccacggggatctggaaatgtaggtctcctgattttgtccttacactttactttgatcttctagatcgtatgccaaatagtactgagaatattgttgtaattatttagtccttagaaaaggttgttctgttttatcttttgcgcctagtgtgtctgtagagcctagttttgctgcatcggactttttttttgttttaaacagtattttactgttatgattatcctgatgtcaccattaaggattttttttccttggacttgcattttttgtacttataactgccacttagggaagtagatacacaacctttccttactccccttcaggccttagctagctcagtgtcaattctgtcagtcagaattgagcattctataaaaattgcgcaaacgttactttatgtctttatgacaacacttcaaatttttacttgtatagtgttgtctttttttaatccatatttggatttctagatgccacagatatttctctgaggaaagtatttattttgagtctgatatttattgtactctatgctaggtacaatgagagaaatgcaaagatagttaagaaagactcggccttcaaggagcctaaatgtgtagaaaaggactaaggcaaaacaataacttttttgagctcttgccat

SEQ ID NO: 17821 - DNA, 1029 bp, Homo sapiens
gtgcatgtatatttctcctggaagcagggaaatggtatctttaagtagcttttaaaagtatttttaagaaaggtgttttttaaaagatatttatggggttcgaaagaaaaaaatattagggctgggcatgatggctcatgcctgtaattccagctacttgggaggccgaggctggtggatcacctgaggtcaggagtatgggaccagcctggccaacatggtgaaaccccatctctactaaaagtacaggcgtggtggcacgcctgtagtcccagctacttgggtggctgaagcatgagaatcacttgaacccaggaggtggaggttgcagtgagctgagattgcaccactgcactccagtctgggcaacagagtgagaatctgtctcaaaagaaaaagaaaaatatattaggactctggaaaggaatttggaaatgaatctttgaagtgtagatgggactttagcaaatagagatgggctgagtaaggagactgtcccaggcagaaggaacagtacaaccaagaacccacagtgggaaatagatggagtgttcagaggggagcaccaagaaatccatttggctggagcacaggactggtgtagaagaaaagtaggggaatcaatgtggaaaggtaaggtaggaaatggggtttcatggactaaaataaaaggaaaaataatgactatatcaaaaatggtcctgaatgccaagctgaaccctgtgtcttttgcatgtcaggaagaaccactgaggcttgaacagtgcaggtaataaatttgcaaataaattgtcctgtaacttcttactcaatgaggtttgaggtctcaacccatcagtcctaatatttggacatctaattgactcagagcaatgagttaggggcagcagtctttgcattacagctgtttacagactgaaagttgggccttgcttctctggctattaatgactacaatttctattcaccagcacagtttcagagcgagaacaaattagcaaagagtaaaatggaaaggaaaaagaaatg

SEQ ID NO: 17822 - DNA, 1058 bp, Homo sapiens
gtagctgggcaagtcctggataggtcctttctctaaggtgaactttctcagtcctgattccctatctgatcacagaggctgctccctactaggaccagtgacccataggagagaagtgggtaccatggggcctgggagcttaatcctcttcgggatccctctgtcctggttgcacagaagctggtggagaaggactgcttaaggggtagacggagaggacagtgtcctggtgctgggacctgctggtggacacagggctgaggccccacagacctctcttctgtcccctttggtgctcagcaaagagagggatggcctggatttgaacgccgccccttccccagtcttgggtcagtgagctcacatagtgtagttgtgggaacagactcagcaagacagagccctgggctctgcccccactccttgcgtagctttgggcaaattgcctaacacctccctgcccagtttcctaagctgtgaaatgcagacgatggttatacctaaggctgagtagggatgaggtgagttaacacgtgaagtgctgagacggtgcccagcatatgatactaagcaactgtgattagcactgttgttgccattatcattaacctgcaagcttctattttcttatcggtaaattttttacagaaatagtgtggcatatggcaggattggactttctggctctctggtgggtgagtgaaggcgtgtagctggatttggccagtgagatgtgaatagaagtgctgtgtgtctttccaggccaagcatttaattgtcagtgctatgctttccagagctctctctccgccctttggcatagtgactggtgacatggtggcagctctgtcatctgggttcctaggagtgggattgatgagaacactcattaccgcctgaaccatgatgcatgtattaatagtatgagcaagaaataaaatctttctcctgtacagctgctgcgatttgggggttgttccttgctgcggcagaacctcatccgtcctgattaagacagaaagtcataaccatgttgagcttggttgtgaggattaaat

SEQ ID NO: 17823 - DNA, 1051 bp, Homo sapiens
gaaacgagttacttcaccagatgggtgaacctgagtgctgagttctttgtcccctctgtggtgacagcagtggagtccactttattggcattactcccgtctggtgcagcagctgggcttgcagatgactcccagctctggggtccagagaaagcctgggcagcacccccaacctgagggggttggcatgtggcaggtagaagccaggcggcaccttccatctgccttgacagtttagaggggctgccacccctccttgagctgaaagaagcctcttcgttgcagggtggtttaagtgtggcttgcgggtggcctacctggtaaatagaacttttaggacggtatgacataaaaacattttttctcaaaaggatttatctcaagagaatacagtgaaccaacagaagcaaaaggcattagtttttccttgcataaaaattcagaaaattatgggtgaatggatttgtaaaccatagtgatgtgtttccacagacattacaatttacagttgacaaccacaaagacactagactaaggttcctgagggctccagaaggctgggtccccagtgcctgcacttggcaggcctttaatcagtctttgttcagtagtgagggcagaataggaaaatggcaactctgtgaaaagttgaggtaaaaccagtgtaaaatagtattctgtaactgcaataatttaaaagtgtttgttttgggataaaagctgaaaataataagccatagtgaaaatagtagttgtgtttgcagtgtttctcaatcttgttggcacctccctacccctaagccattttagatgttttttcctaattgcacccaccctcctcattgcattttaataccacatgtgtatctatgccttatacatacgatgaagaagagtttttcattccccaagaactaagctgtgtgtccccatccactgcctcctccctgctcactttggtcaggcagtgtggttctagggcattagtgtcttttctgtcttgctcctcactgttaatgtcagtaaaagacaacacagtggagctcctggg

SEQ ID NO: 17824 - DNA, 1034 bp, Homo sapiens
caaagatgacacagaacaatgtccttgagctgccagtacagagaagggcacaatacgcagtgacctgaggagtgaacagtgctgtccagcagtagaagaaaggctaccgtgctgcagcaaaggcacagagggcagaagaacgttcattctaggagacaagacaaaattatgttatttactgcatgccatatgccctgtgtgtcgcatggggcaccacattgtaggtgctcagatttcagtgtacttactgcattcattttctgagcatgtactgtggacaaggccatccacatacccgacaaatgtaaaatccagagtggggtgtagctatgaaaggagagattggggaggtgagggtgtggggctgagcagggagaatgagaggaagggagggggagagctaaagccgagagagggaggaagaggggctgggggtgggacaaagctggaaagggaaccgattgaacacagcttggatgtgaaagcctccttgaaggcttttgagcaggagcgctcacaatttggcactgggttggtaggtgtgggaagaaagggttcaggggcctgaccataacctggcctgcagtggtgacgcaagactgggaaggaaaaccccaatgcaaggtcccaggaaggatgatgcagtggaacttggtggctaaaccatatgctaaaaatgtgtatatgaatgactggctatttatgggcacccatgtttttgctataaataaacgtacatatgtaatttcaagagaccgagaattatcaactgcaaagcccaagtgtagcagtctactcacggcccctgtactttgctactggagggcctgtcctctgcaaacccaaggtctttttttttttggagaaggatgaggtggtcctgtgggtgagagaaggcttttgataatgaagggaggagcaggcagggccaggtcattagagggaggcagccagcagtgggtgagagggtactgggtccagctgcctccggtgacagcaggctctagtgcatcacagtacaaacgggatggaga

SEQ ID NO: 17825 - DNA, 1034 bp, Homo sapiens
tatattaaaacacatatttatgtttaatagatgcatataaaatagtgtattgacttattacaaatttactaaactgacaaataatataaaatggcaaagaaaaactcaagcaatgtaagagtatatactgtatatttaaaaagtgaaagtgcgctcctttcctcccctctggctccacactgccagtatttctgcaagatggaatttctagcggtagaattaatgggtcaaagatgtgcacacttcagtttttggtaagtgcagcccagttgccctccagaatgtatataacaattgacgttttccaggagtggtgtctgagagtgcctctttgtctaaacctcactgacacatgaaatagttgcttttaaaattttgctcgtctagtgagtcagatgatctctttcagattagcattttcctgtttgctagtgagattcagtatcttcatgtgtttattggctgtttgtacttcttcttttgtgaactgcctatttagatcgttcgctcatctttgtaataagctgttttttctttttaatttgtttatatttttaatccatcttttccagattatagaaaagtaacatgcatttatgggattaagtttagaaaattcaggaaagtgtaaagaaatatgccaatacaattccaccactcacagatacccactgctaacgttttttactttatgtgagctcacactatctataaatttttcatctaatgctaggtagtgttttttttttttagtatgagaaaagccattcacgtatgtggtaaaaaaattatcggtgtctcgtaaatgtagtgtaagatgtaattttcctttttcagaagcaacctctattaatagtgtttttctgtatctcttcagaaattctctatgcatatacagatgcataaatgttttgttttctttttttgcatataacgggaacatgtttatacactgttgtgtgccttccttttttctcatatacgcttttaaacatcttttcaggtcagcctattaagacctatcttaagctttt

SEQ ID NO: 17826 - DNA, 1023 bp, Homo sapiens
gtgaggggatcagtcagtaaccaaataatcatacaactaaatgcagaccctgataagtgttgttaaggaaaacacaaggcactataagagtgtttaacaaatacatcacattttgattttatggtgagtgtcaaggaatgcctcagactttctgaatacaggtttttctctttatgagaaatgtctctctgagacagtcatatttaaattgaaatcagaaagatgagtaggactctcccagaagaaagaatgtgaggaaaaacattctaggaagaaggaacaacctcttgaaagtccctgaacaggaaagtccttggtgagtgagattctgatcaaagactgacatgactggattgtggtgagtcagcaggcattgcccaacccagctctctgtttttgtagcactcttgacccccagtgacattgtaacatttttggcaaatgtaactcaagcccaaagttcagaggacctttttttccctccatttcctttctgcatggtgttttgactgtgtatctggttatgttgggtgataaacttctgagcttgccaagtgtgccatgtctctgttttattcttcctgttttttttttccttttaattttgccagattaaggtagttttttgccctttgaattttcccagattgagatagagagaagcctgtattcagaccacgagcttcgtgctctggatgaaaaccagcgactggcaaagaagaaagctgaccttcatgatgaagaagatgaacaggatatattgctggcgcaagatttggaagatatgtgggagcagaaatttctacagttcaaacttggagctcgcataacaggttgtgatccttttaggccagccagaaggaagggaaaaggggtatttggattcccaaataaaagacagttgcttggcccctgctttgtgttttaagtaacaaataatttcatattcttttctttgttgctcacatctaccataatacgacttaaaaagtctgtcttattttcgggtgagaggtaagggta

SEQ ID NO: 17827 - DNA, 1039 bp, Homo sapiens
aaggaggcaaaactctcccttactgcctgaaggatctccaacaagcatattctggagagctctgacagggagcattttacaaggtcccactggagctgaggcttgaggtcaggtccaagtgcaggcctccttcccatcacagcttccgagccttcctggggcggcagccgttgtgtgggattggggtgttgtctgtgattgagatcacttccaggccgcccatgatcagtccgtgcatggcagactggaaggaacagaaggaaaagtagaatgacatggtcccagaaatgatgatccagtgtctccaggcagggttcggagagggacagggtggcgtagagaagggaacggaggggtgagatgctcactggctttgatacctataatcccaatcctattctactctcacaaaggtctccacccaaaccctttaaccaggttttcacactgttcccctctcaaactgtacccaccactttccactttgcactttacgatctgcgaacaaagacttcttgtagaccttggcacaccttgggtatcatacttctgtagcttactcaggcagttttctctgcctgcaatgtccccccgtacctgctgtgcctccacctccctgatacctcattattcctgcaaagtcagagagatgtcacctctttgaagaagctaaagattatctgtgctaatgatcatcaggaaagattatccctgctaggttcgggatcccctgatgggctcccagcgatctgggcacatgctttaccacagcgctcaccagtctgtcctaagggatttgtttgtgacagttcccccaggaaccaccttcccattcccagtgcgtggcacgcagcaggcactcagtgtctgatgaattatactaagtgatctaggcttgctctgaggggcttggtcaattatagaaacaacagacgggaacttcaagcaaacatggaaatccactaaaaggtgttttctactctccctgtactctgctctcaagccccaaattctcacacttactaggaggcaagtacac

SEQ ID NO: 17828 - DNA, 1028 bp, Homo sapiens
tgcttcctctgcccactttgttcctgcttctcccaccctcactagcttcttataactggcagctggacttgataatatcagcggaggcttggcacagtgctggcacagtcagtgctcaatcagggacagctattgttggacaacctggctggcagagatctcagcttccgtccaagctgctgcctctcagacggagctctcagtgtgctgggcactatcgcacgtggcctgtcccagcctagggtaccgtcccctctacacctgaccaggcctcagtgccctgtgccccagggtggatggtcaggagtgctggtgggttggcagtggtcaagggatggggaggatgcgatggatgggcatgatatagagagtgagcagttgtacacgggcgaccaagggaaggacaaagtcagggatgagtcagcaggtgggggaagatggtgcccagccaagactggggagccacgaagaggccagttgggaaggagagatgccggacacggtttgtggtgctcatgagaagatagccagtgggaacatgcatgggagaggcaggtaatgaacctggagagccagaccttgagactggagatcaagcttgaggagccagaggcagagcatgcaactggtatcatgagagccaccgagtcacccaggggagtgttttgagcagtaactgtgtgccaagcatggtgttctcactgtattaactgctgaaatcctcacagcaaccccatgaagtaaatcaagaggtgtttccggaccgctcagttaccagccctcagttactgagtggaagagttaggatttgagcttgcgtggtctctgcttccgaagcttctgttgagaactgtcacgtgcctgcattgctgccctctctgggcacctgtcctagggagtcgtcagacatttccgtcaatctaaacgacagctctgtgaaggagacaataatattcctgttttcagatgagaacattgaggctcagagacttgccctaaataacacacatggtggatgtaaaatcagg

SEQ ID NO: 17829 - DNA, 1057 bp, Homo sapiens
agtactaattaaagctcttgatacaataagtgcccagtaaatgcaccctgccttctcccctctctgtaaatctcttggcctgtgtgggagggtctcccgcctctttagtgtcacagtctgctcccagcccaggttgtacctcttcatttcctagtgaccacctgacataagcttgccgcttctctaggcccaacccctgcccacccatgtcagttgaggtggtgccattcttttgccatgcatcacctatgcatacctaaggctgaggagaccagaacacctctaacctgctttgccaccaaacacattggttaaagggagctttgtttgctgaaggtttgttattggtgtgttgttgatggctaacatttattaaaagcttacttactatgggccagatgctatgccaagcaccttatataggaaagtatttgcatttcatgaattttgagatgcagtttttgaaactggagtgtatcttaaagttggtgtcttctcagtgtcagcaaggcagcagttgcaacattgctgttctcgtcgcctgtggatgtgcaaactgggtgtgctcttcccattgtcatcatttttgttgagtaatgtgcattgttgataaccacatgtgttcagtgtaagcgctttttaagatgccttcaaaaacattatactgtgatttggtattataataaaaggtggttttatactcagaaaggcagagcagtggggttaatttgatattagtaaagcacagatttgccattggaggaatgaacatgattttttacaaagcaggaggtgtttttttggaactaagaaagaaagatacccactagtaaatgaagttttactgacatgctgagattcatgcgaaaggattgcctatcaaacagcaaacaaggcgcaactaaaggagaagttgacccatcctttggaataaatggaagaagttttaatgtagtgagagacaccaattcatgcagagcacaggactaatcattgagatgtgaatcgatttgttagatgcttcctgctgactttgaacaggagctgattaatttcc

SEQ ID NO: 17830 - DNA, 1032 bp, Homo sapiens
gtcaactgagtttggtatctcttattgacctgtagctgattctaccattaacagattctgtacagggtatcgtgtcctaaaacctcaccagctacctgtggtaaaatatcttctaacattttccttctgaattgtagtttatgtgttctaaaaagaagtaggggagtaatatggttagagatcatttgttgtggattttttttcttccctatcaatgatgaagtcacccattgagcaatcatgggtgagcatctggttcatcttatgcatcatgggatcctgcagtcaagtccttgacttctctactctcctgttctttatttcccagtctgccttggagggaaggctagtaaatgtttgagtaattctatatccatgtaattatgagagattctggtgaaaccctgataggatcaaagtgttgtccagggccatagaaaggacatgaatcaatcttttgtttaggtttgagctataattacctttttattttggagggaataagttgtctgtgactgctgcctttgagattatccttttcttctttgctaaaaggtggcctagttttttctggtaggtacaataagttgtagctaatgacataactgggttctatgctttgcttacacagtttgtaactctaaacccaatctttctgccccagttgtcctttgctctcctcctccagtttaatttgataggttccaataagattaataagtaaaaagtacatccaaacacaaggcctcggtaatattatgagtactattctcaggttaccctctagcctctttaatttacagccaaatttaatttgcaggtgactgcaaaagccatgtaatataagctctgagaaggactaattactagtaaaacaggtgggtcgaatggctccagaaattggtaatggagatttaaactcaatcataggaggctggagtactaatcctagtggtctgagaacttctagagtcctgtcagaagtagttgattcacactgctacattcactgtaacaaaaattaggggttct

SEQ ID NO: 17831 - DNA, 1021 bp, Homo sapiens
taaatgccgttgacttttatggcctgtgatttaactttgatttgaatcaaggtataataaaacaattagaagactttgccatataatagatgccccataaatattaaaacatatttttattgtgattttaaaatagcctaacatttaccgtcttaactgattgtaagtgtacagttcagtagtattaagtatattcacattgtgaaattgatctcgagaagtttttcatcttgaaaatctgaaaagtctaacccattcaacagcaccttctctttcccctcctgctagtccctggtgaccaccattcttctttgtttctgtgaatttgattcctttttctttttttaatgataagtattttacattaattttttttttttttttttttttttagagattgggtcttgctctgttgcccaagctagactcaaactcctgggctcaagtggtccacctcagcctcccaagtagctgggattacaggtgtgtgctatggcacctggctgttaaatttgattacgtttgatacttcatttaagtggaatcatacagtatttgtctgtttgtgattggcttatttgacttcacataatgtcctcaagtttcagtgatgtagcatatgtcagaattttcttccttttgaaggccgagtaatattcctttgtgtgtatataccatattttgtttatccactcatccatcagtgaacttttgggttgcttccatctcttgactactatgaatagcgctgatatgaacatgggtgtgcaaatatctcttagaaatcctgctttcagttattttggatttatacccagaagtagaattgttggatcttatggtagttctaattttcttcaaggaaccttcatactgttttccttagtagctgtactatttttcagttccaccaacaatgcacaagggttcaacttcctctatgtcctcaatgaaacttgtcattttctttttttaaaaaaagcagtcgttctaatgggtgtgaggtgatatcccattgtag

SEQ ID NO: 17832 - DNA, 1047 bp, Homo sapiens
gtaatcccagcactttgggaggccgaggcgagcggatcacctgaggtcaggagatcaagaccagcttggccaacatggcgaagccccgtctctactaaaaaaatacaaaaattagccaggcgtggtggcaggtgcctgtaatcccagctactagggaggctgaggcaggataattgcctgaacccggtcagaaggtggaggttgcagtgagccgagatcatgccactgcactccagcctgggtgacagagcgagactgtgtctcaaacaaacaaacaaaaaaacaaaaaaaaagaaatacagactgaaagccccagcctagacttgctgaaacataagctttttttttttatatcaagatccccaggtgatctgtgagaattactcccctagtatctcattttatagatggggagactgagagccagagagaggaagggacttcctagagtgctggagctgacagtcctgtccctgccctggtgccccttccaactgcattttaccagaaaggctgtctgacttcctggggaggctgagagtgaggagggtatgaaccactagaagcagatgatctgtagaggggtctgcgttgagcacattgtgcagaattggtgtcctctgcaaagctgcccaggttttagcctgcctcaggcctctcctcttctggggccaagggacaaccagctctcagcccgggagcctctctttgagggggaaggtggtggttccctggtgcatcaccatcaggagatgatggtaccatcagcaggcattgtcaacacaccctggaggcaaatgtcttgagtggtgagagtacaggtgggcagtgatataacttagctggctcccagtactcttgagtggtgagagtattggagggcagtgatataacttagctggctcccagagggcagggggctctccagtcccaccgtccactcctgcctccctcaattccccagagggatagacacttgtggagtgaggattcttccaggtgggagacacccccatcattctcttgggagttgtatctcttgcccat

SEQ ID NO: 17833 - DNA, 1680 bp, Homo sapiens
aggaagatgaggtaaccccagggagggggactgctcagatggacccccttctccagtcttgtcccttccctgctaggagtttgtgggtaactggaacaaaaacgcggtgcatgtcaacctgtttgagacccctgtggaggctcagtacgtgagattgtaccccacgagctgccacacggcctgcactctgcgctttgagctactgggctgtgagctgaacggtgagtgctgggggtgcgggtaggggggcactgttggccaatcctaggaggtggccctccctgctgcctcttttctcagccaaactgagctaggtagggcagcaacaaggcacggggaccaggcttcactcgggcaacgcactctagggggtcacctggccatagcagccccacccaggtgtttgctgtctgccaacccatgacccagggcattctgattgatagagaaaaagacatcagttttcaaagtattttcccttcttctggttggctcctctcctgtagcttctagaacatgtagcgttaggtgtgtttggcagatgtcagctttacgagggcagagaatctgtctgttttgtttgcttcggtattcccagggcctagaatggtgtctggtttataggtactcaataaatatttgatgaatgagcgaatgaatgaatgaggggcgtggggccccgatgaatgatttattaagggtacacatctggtaggtattaagacttggtctagatctctgggctcccgaccacacccatccagagctttccctgccaaactcttaagagtctgcactccagagaaacacaggggcttcttggaccacagggcttggagctggtgcttcctgctgccttttccaaagagattcccagatgaagagctggggagaccataaagggacagatttctgcagagccaggggacagcctgggcgaggtcagagtgccgggtttgggctgacagacattaattgtctcagcccagctcaacccagctttcctgaggtctgggtatttctctctctttgcagccacaatgccacctgctggccatcagtggaactgtagggctcgctaagcagagctgcagagtggaggttcttatcttacccgctggccttttgatcttacctgccctcctgtgccccgcctttcccctctgtgacacctcttcctgttgtctcatttcagacaccacccaaatacccctcagagctgagttcagtgcctggctgggttcagtgtttttagtatgaacttgagtaggtatgcttcctccaccaggggcccttttgagccgtattgtttcagtggggagtataagactttgccttctgctagaaggaaatgtaggctactgggaaaggacagagccaggtctgtgtgcctctccctggagtccctgacacttgctgttttggcttgaagcctttggccattaaagttgcctgtatccaggcatgactggcccctgctcagggccaagagagggtgagtcttgcaaaccaaggaagcccaggtaccctgtctgcttccttcagggtctggaccactcctttccctataggccttccagtcggctggagagtgttggtgcatgtgtgcatgtgtgcacgtgtgcatgtgtgtgggtggggctgaggtctgggggtacctgggattccacaagggattcc

SEQ ID NO: 17834 - DNA, 1088 bp, Homo sapiens
cagaaacacgaaaatcaaaaccttccaacattttacatgtcaacaagtaccaggtatgactctagagcaatggttgactgactatagcccatagtataaatctggcccactgcctgtttttgataagaaaatttcattggaacatagccatgctcgtttatttgtaagttatctatggctgcttttatgttctaatagtagagttgagtaggtgtgatagagactgtatgacccacatttactatctggccctttacagaaaaagtgtgccaattcctgctatcgagtctaactagctgggttcaagtctcagatctgccttttactcatggtctgttcttgggcattctgattaacctttctcatcatgcatatggggataactactaatcataacctatagctaggatgaatgagatgatgtatgaaaagagcttaacacatcagacacaaggtagaggttctctaagcattacctgttctaataaaattattagacaatgtgacttttgaatcataacaagggtagtaaatagcatttaacagcagtatttcccaaactgtactctatggaacattattctgccaaatagtaacatttgttatttttttaaaaatgttcttgaataggtctgaaaactactaatgaacatactgttggaactctcagcactgtttttatttttcttgagacagggtctcacgctgttgccttggagtacagtggcatgatcatggctcactgcagccttcaagtcctaggctcaagtgatcttcctgcctcagcctcccaagtaactgggactataggcaaacacctggcttaaattttaaattttttgtagagacggggtctcactatgttgcccaggctggtcttgaactcctggcctcaagtgatcttcttacctcagcctccattaaccaccatgactggtctcagcacctttaatatgcaaatggacaccacgaatctctaaggtgagagatatacggtatgagcatctctccctgaattccttttttttttgaggactgtctcagtctatatagcatattttgtgaaatgtgtctttataggtatcatt

SEQ ID NO: 17835 - DNA, 1069 bp, Homo sapiens
actgcaaggaagtaagaaccttctttgtgttaaggatggagggaggggtctgggcttgccccagaagagcttggatgctttgttttttagctttgagatgctgaaagacaaagtctgccctctgtttctggtcccttaggtcacagtggaagaagtgggaggtggttgctgaacgggcatggaaggggggcacagagtcagaaatgttcaataagcttgagagcattgctacgtctgacataccacgtaccccggtgctgggctgctgcatcagccgagccctggagccctcggctgtccaggaagaggtatcttgctacctttggagcatgggcagaggggccccagggagggcagggcagagctccctgtggaccttaccaatgtttgtaggtagggccagagtgaagcttctcttggggcttctaccctggagttaattggtatgtagcatagcccctttcacctctgcccaccttcccttcccagtttatgaccagccgtgtgaattgggtggtacagagctctgctgttgactacttacacctcatgcttgtggccatgaagtggctgtttgaagagtttgccatagatgggcgcttctgcatcagcatccatgacgaggttcgctacctggtgcgggaggaggaccgctaccgcgctgccctggccttgcagatcaccaacctcttgaccaggtatgcggggcccatggcctctagcctggccatgtgctcctatgtggggctttgggtgagcgttccttgggccagactggtcagttttgacttttcatccccctagaagtgaatgtttcagcttatttatttatttctaatttttaaaaagttgtagaagtcctaaaaagactagcctcaattcgtaaaaaaagagttattgggtttgaaaatgtgaaataccaagactgatcattgagggaagcagtgaggttaggggaattgttccgaagggtggtactcacgcttttctatttggaaaatcaaatgacagaagccttttctcatttcatagaaaattgagatgtttgtttttctttctcccataaatg

SEQ ID NO: 17836 - DNA, 1146 bp, Homo sapiens
tgacaattctgattatgctgcataatcaataatacaggggttgcaaactcagatgcctacagggaatgagagcaaatggagtgggtggaagacaggagttgacaggagggcgctgtggcaaactggagcatgtaggctgatgttgatactggagaaagcattaccaggcctccaggttacttagcctagctctccaatttgtttcctctgatcgtactgcatactgtgtgctcagggccttagcagactctctgcagggttccaaaaacattgagggaagagaggtacaacttcctgaggtacagtacactgtccacatttaattagctggctcattgtggaaacttcactttctcgtcaacaactaaaagttaagtatgtgataaatgatatagtggttgatgactataaatgcagggaaggggagctgagtatcgtccagtggataaagtgaggtcgggtaaggctcataccgtgagcagcgtgtgctggtggaggcgagaaaggtggtggggctttagttgtggacacctttgaaagtgtcacaggagtttggactgtgggtgcaggtggtggggaagccatttatgcgagtgacgtgtctctggagccttcaggcgacaagccttgtgaggtctgcaggttagatggaagctgggagttgtctagggttgtggcagttgagaggggtaagccaggcctggctgttgtgttttctgcttcaacaaatgccccctccccttcagggagtagcctattcttacccctatccccccaaatctagagtgatggcccttgctgcctcctgaataaaaggcccgtgttggtcattgggcaattcagtgtctaaagaaacaggacagtaggaatagtggtgcctcctgtgctggagtctttgtcctttattgggctaccatggggtggcccaggctttggggctacaaaagcctgggctgcatctctttctagctccatgatcctaggcaaggcacttagcctctctgagccgtttcttcctctgaataaaagcctttaggggactggcatgatgtcagtgtttttaaaagttgaagtgatatgtgaacattccttgccaaggcactagcgtggcacaggaagcactcccgtggaatgatggtgataaca

SEQ ID NO: 17837 - DNA, 1172 bp, Homo sapiens
cactggcgagcagagtgggtgttgggatggtgaagtctgcctgtgtgtaggaagaggcattggtggaaggagcgcctcatggatgccccccggagaggagcggaagctcgctcggaggcctggccggttcccagatggtttatgctcttgattggtgtatcatagggccccagttcttggctgagccagggctcaccttgagtccagttagtgaggctgggtaatggagtatagcagtcctggaggtgggcaggtgagggccatggtgggatgtgggatagattctgcttcccatggctgtgctgagcctcacgttgtctgtccccacagctcccagatggtggtgtggctgcccaggtcagctctgccccgtgctgtgatcaggtatggtctgctgagtggttgtagggataggagaactgaggtgaggtggtaggtcctaaggccaaagcaccctgctaagacccatttccttcccctgcaccccaccaggcaccccgactatgatgaggaaggcctctatggggccatcctgccccaagtggtgactgccggcaccatcactcgccgggctgtggagcccacatggctcaccgccagcaatgcccgggtatgtgacctctgtacctctggcccctgctcttcctctcccaggtctgtagaaactgggctctgagggcctttaggtatttagtgaggatcatgaaaaggaccctgtgatctgggtcaggcaggactctagtcaaatctggcttcatgatttctgtccactccttcagtaaatatgttctgggcacctgctcctggccagaccgtgacaggcgtaatagctacagctctcatggaatttagataggaccgtgtaggtgaggggtctggcatagcgctaggcatagagtagattctttacctgtcacaccaattgctgataggtggccatctctggaactgtggaatttcagcagtgctgtctggcattctctaaagccatcccctcaggaaaggctctagctctttctcagtcaactctggctccaggaatggggtaggaagagtctcatttgggtatctcactcttcccacagcctgaccgagtaggcagtgagttgaaagccatggtgcaggccccacctggctacacccttgtgggtgctgatgtggactcccaagag

SEQ ID NO: 17838 - DNA, 1165 bp, Homo sapiens
ctgatggcagaagtcactgttaaggcctgggctcatgctgggaccttcctcctgggagtctgactggtgggtgggggtgggtgccacatggtgccctaatagcggtccactttgaacctgggcatgcccctgccccttagctgagtaacattaggtacctgaccagcccacaatttacaatgggaggagaagcggtagtcagctatgagcctcccacagggcagcttcttcccaaagggtgttggtaagggcttcggccatcaggctagagggacgtctctctggccatcagcatttttctaagattcacagtaaaactagtattaatggcatggatccctactcatcttaaatttggcttgtttctttttaatcactagtttataatatggcttcatgcacagctgcagagctgcatcttgacaccagtgtggctttttactgtaaccaaagttcctgttaccaccatggcctcaaagatttggcattctttagcctttttgtctgcgttgttttaagggctttgacatgctgaattaaaatgtgggggggtggggatttctttcagtcccttggcttattttcaccatttggagtatgagttcgattttgtcaggtttaaaactaggaacctctttttgctttctctttgaaagaagttagttttatgtgtgttgaatctgttgaggcagatactccctttttcccttccataaaggttgcaaggagctccttcgcagctgtgttgtccacacgtggcctcgtcactcactttgatgctgagtgggccttgattgtttagaataatctgtggcttgcaacaggcatttcctcagtggccattcccctacacctagccttgtggatcttgagcaaactgcagccttttcctgaatcagtgtcgggcccccaacaggcagcactcatcccctatccctcccaccccaaccctgtcacatacacatacattttctcattctggcactttccctggttctcactgagggtggttgcttctccaaggtgtgtgatttgctctttgtcccccagaatcttttcagccgtgagatgattcatcctgtacatgtgtgcagcagcatttgtcattttttttttttttgccaattcaattaaatctccaccttgggttctgttattgtctatc

SEQ ID NO: 17839 - DNA, 1035 bp, Homo sapiens
tggcaaaaaccgtcactaaggaagccaagacattggaattactagtcaaagatgttaaatcaacttctctaaatatgcacaatgagctcacttaaaccatatataagaaactaatggaaatcaggaaaataatatatgaacaaaatgagaatatcaataaagcaatagaaatgataaaaaagaatccagtagaaattctggagctgaaatgaaaaaactaactagaagggtcaaccacagatttgagctggcagaagaatcagtgaacgtgaagataaggtaattgaaattatccagcctgagcagaaagaaaaaataattaaaaaaaaaatgaacaaagtctgagggacctgtaggacaccatcaagtgtaccaacacatatatcatgggagtctaaggaggaaatgagaccaaaagtggcagaaaattttttgaagaaataatggttaaaaccttccaaaaatctgatgaaagacatgaacatatacatccaagaagttccacgaactccaagctgaataaactctaagagattcacactgagacacgttgtagtcaaagtgttgaaacccaaggacaaagagagaatctggaaagcagcaatagagaagcagcttaataagattaatagttgatttctcatcagaaatttgggagaccagaaggcagtggatgtcacatttgaagtcctgaagggggaaaaaaaaattgtcaaccaaaaattctatgtccttcacaaataaagtagaaagtaagacatttccaaatagataaaagctgagggagttcataatcagtagacttaccctgtaagaaaagctaaaatgaaaggtagtagacaataactcaaagccatgagaagaaataaaaaacaacggtaaaggtaactagacagataaatataaaagccagcattatggtaattttgttttttttttaaaccctatataatttaagtctgtattaacaggtacacaatgtataaagatgcagtctacaacaatataaagaagaagagacagaaatacatagta

SEQ ID NO: 17840 - DNA, 1026 bp, Homo sapiens
cctcatctagaagaaggtagaaaggcttagcatgcaggagtcacagaggaccgaactgaaaaaaattggcttaaattgcagagggttacacacaaaaacagactttaagaaaatcagcactgcttggaggttcgcttatcctacagaaatggtacctacactttttagaaggaccctgcccttaacagctatgcaccgtgctggcagcaagaagcagctctgaaaatgcaaagtacctgtggtttgaattccctcaggttaatatcctgtattctttctaggtctcagatctctggggttatgctgttttgcatgatttatatcatggtcttgagggaactgaaccaccaaaggccccctcctcctgcactccccctttgattctagcagcagaaggcaacattgctaaccagggcagttaacaggccaaatccttgtcttttgggaataggatttggaaggggaaggggaatcctagagcctgcaggctgattataactacagtcagtactgtgtcccaccgaatatacagaacatgcggataaacccgctgtggggaactagctctaaacaggcctatcactcgtgctgctcagaacgccttcctgttcagattcttagactgcagatgagcagcatgttgcggcaagcccacgactgtcaacattttcaggaggaccgaggaattttagcaggattttgaggggcttctgttcacatgcacacaagttctaatgtggagtttctctgggaagggcacacatgacgctgtaggcgcgaagtcacctatcccacacttggcactccctggggctcctctagaatcgagctgcctggcaaccctggtgaattcagacagtctgtcacaggaaagggtcctagaccttcaacaaacattacctctggggtctttgctctgagaggaaggtgttttcccctggaacagcagcggagactgggtcagagcctggagggcactggcagagaggcagctccgcacggcacagctgggaggtggggtggagc

SEQ ID NO: 17841 - DNA, 1033 bp, Homo sapiens
ttaatattgttatgtgtgaatttgatcctgtcattatgatgttagctggttattttgctcgttagttcatgcagtttcttcctagtctcgatggtctttacattttggcatgattttgcagcggctggtaccggttgttcctttccatgtttagcgcttccttcaggagctcttttagggcaggcctgggtgtgacaaaatctctcaacatttgcttgtctgtaaagtattttatttctccttcacttatgaagcttagtttggctggatatgaaattctgggttgaaaattcttttctttaagaatgttgaatattgacccccactctcttctggcttgtagagtttctgccgagagatccgctgttagtctgatgggcttccctttgtgggtaacccgacctttctctctggctgcccttaacattttttccttcatttcaactttggtgaatctgacaattatgtgtcttggagttgctcttcttgaggagtatctttgtggcgttctctgttatttcctgaatctgaatgttggcctgccttgctagattggggaagttctcctggataatatcctgcagagtgttttccaacttggttccattctccccgtcactttcaggtacaccagtcaaatgtagatttggtcttttcacatagtcccatatttcttggaggctttgctcatttctttttattcttttttctctaaacttcccttctcgcttcatttcattcacttcatattccatcactgataccctttcttccagttgatcgcatcagctcctgaggcttctgcattcttcacgtagttctcgagccttggttttcagctccatcagctcctttaagcactcctctgtattggttattctagttatacattcttctaaacttttttcaaagtttttaacttctttgcctttggtttgaatttcctcccatagctcggaataatttgatcatctgaagccttcttctctcagctcgtcaaagtcattctccatccagctttgttccgttgctg

SEQ ID NO: 17842 - DNA, 1062 bp, Homo sapiens
gggaggcagggcctgatttaaggcttgtcttttttttttttccccttaatattttgaatcccaggccgggcacggtgacttacgcctggaatcccagcactttgggaggccgaggcgggcagatcacgaggtcaggagatcgagaccatcctggctaacacggtgaaaccctgtctctatgaaaaatacaaaaaattagccgggcgtggtggcgggcgcctgtagtcccagctacttgggaggctgaggcaggagaatggtgtgaacccaggaggcagagcttgcagtgagcggagatcgggccactgcagtccagcctgggcaacagagcaagactccgtctcaaataaaaaacaaaacaaaacaaaaacaaaaacaaaaatattttgaatcccaagggcagtggagagcctttttttgggggagttggggttaggcagggagtgaaataattgcatttgcattttgagagatgcctctgaggcgcagtggctgatgcctgtagtcactgcactttggaaggatcccttgagcccaggagttcaagaccagcctgggcaacatagccagactgtctctacaaaatactaatactaatactaatactaatactaatactaatactaataataaaattagccaggtacatgtctgtggtcccggctactctgaaggctgaggtgggaggatcacttgaacctgggaagccttggctacagtaagcagtgatcatgccactgtactccagtctgggtgaaagagagagaccctgtctcaagaagaaaaagaaagatgtccctggttgccctgcgggaggggacagggagactgatgccagggggaaggctgctcaaagtcatcctggcacgatgtcagtggccaggaccagggctttagcaacagaatgggaagcagcaggtgaacttgagagatatttaggagatggaattggcaggatttggtggtgagagcttggtcttgaaggatctgttgacttttttgaagaaggtggggcaggggatgtgagtgacttgacacaaagactgtggtaaacccagtggg

SEQ ID NO: 17843 - DNA, 1046 bp, Homo sapiens
aaaacctagtgtttgtcaaggttgtagtcagtaaacaaagcttattacccatggtattacttggatatgttgcagataaaacgaattgtattttgctttggttgctgatttataggcaccctgaaaggctggaattgagattcaattttattgttcttgctattattccttatattgcagaagaggattagcctactctaagataagaagtagagtttctctttctttctttctttctttctttctttctttctttctctctctctctctctctctctctctctctctttctttctttctttctttctttctttctttctttctttttctttctttttttgagatggagtttcgctcttgttgcccaggttggagtgcaatgacgtgatctcggctcactgcaacctccacctcctgggttcaagcaattctcctgcatcagcctcctgcctagctgggattataggcgtgcgccaccacacccggctagttttgtatttttttttagtagagacggagtttctctatgttgatcaggctggtctcaaactcccaacctcaggtgatccgcctgtctcagcctcccaaagtgctgggattgcaggtgtgagccaccacacccagcaaagcagaatctcttgattcctaactaagaacccttttccaggcttgatttttgtatcaatcaaggtaggctaggtaatgcattactccaaaatcccaatggcttatgagagcaaggtttattttttcactcgtgctatgtggccattgtggtgtgtctgctgactgtagttcctctgaggtccaggctgatggaaatctcctcaacatatgcttctacctgggcatgtgtgtgttccggctcttgaagtgacacatcctcgtacactcacatttcagtgatcaaaatcagtcacatgctcccacccaagggatggggaaatgatcctattatgtgcccaagagggaggagaacctgaactagttgaatattaccaatgatgaccatggttttttcatggattttcttagaggaaaagtta

SEQ ID NO: 17844 - DNA, 1046 bp, Homo sapiens; identical to SEQ ID NO: 17843

SEQ ID NO: 17845 - DNA, 1046 bp, Homo sapiens; identical to SEQ ID NO: 17843

SEQ ID NO: 17846 - DNA, 1046 bp, Homo sapiens; identical to SEQ ID NO: 17843

SEQ ID NO: 17847 - DNA, 1028 bp, Homo sapiens
aaggcctctggactgtagaccatagtatctgccactttgttagataatgccagagtgattgtatccatttatacttctaccaatcgggggtgagtgttcccagtgctctgtatgctcaccaaaggtttatattctcagtgtggtaatcattagaactgttaactaaatatttacagttctttccccttcgagaaacatggtaaaattatactaatatgccttcctgaagttaggtgtagccatgtgacttgctttagctaatgaagtgtgagtggaagtgccatgtgtcacttctaggcaaaacttaggagccagtgctaatatatataataatggaatatatatatatatattccatttgtggaagcatggacacacagccttccagggcctgggtccctaactgaggatgaggtagagcagtgctccccagtggacgcacagtggatgtgtgcatagtatgagagaaataaacttgttactttaagccatgaaatgttaaaattgttactgtgacttaaccaagcctgtcctgactgatggatatagaacttaatttttatccagctagtaggtatgtactggcatttcattgtcattccaattgcatttcttatgaagatgagcatcttttcttgtttattgcctattaggaggtcctctctagtgaaatgtttattcagggcctttgttctttcttctgtgaggttgtctgcctgtgatttaaaaacgtatttgtaaggaccgggcacagtggctaatgcctataatcccagcactttgggaggctgaggcgagtgggtcaacttaggtcaggagtttgagaacagcctggacaacatggtgaaaccttgtctctactaaaaatacaaaaattagctgggcgtggtggtgtgcctgtagtcccagctacttgagaggctgaggcaggagaatcacttgaacccggcagccgagatcacaccactgccctccaacctgggtgacagagcgagactccgtctcaaaaaaaaaaaatgtgttggtag

SEQ ID NO: 17848 - DNA, 1028 bp, Homo sapiens; identical to SEQ ID NO: 17847

SEQ ID NO: 17849 - DNA, 1028 bp, Homo sapiens; identical to SEQ ID NO: 17847

SEQ ID NO: 17850 - DNA, 1028 bp, Homo sapiens; identical to SEQ ID NO: 17847

SEQ ID NO: 17851 - DNA, 1035 bp, Homo sapiens
tcttataaagggggaaagagccacatgtgtctgctggttgtgttgctatgctgaaaacaaggttttcctgtcctagattattccctctaaatcgagataagtagggtgatcagctaatgctggagacaaaaggtaggtgttttaatttttgagatttatcataaagtaaatagtattgtgacagccccttttactttcagatgtgacattgataaagctgtgaatgtgttcctatttctcttctttatctatttctccttgttttctaggtttttgtggaaactctggataagtgtttcgaaaatgtgtgtgaattggatttgatcttccatatggataaggtatattctcttgcagttctcttccaaactagggttactagaaaaccaagagccttgggcatctgtagccacctctacatcttcatattgtttcttgtttttttttactcttaagatagtcctagaacatgttttatttaatagatttaatagtttgggttttgttttgtttttgctaagatctactaacagttttaacgtgcataagattattactaggcctatatcgtggttcatctgttcacagactgatttcttgatataggagaatgatgtcactggctacttggccaaaggtgagataaatagttttatgctgattataaaattagtttcctagtcataggccagtgacaatgaaactttggaataatcatgacgcaggggctttgacttagatagtaaaatttatatctttcctaaagagtaatatagtgactaagagatctgtaatgtaattcaaggtcaggtgatattctataggaaggtagactatcagaggcagaattaaaatggccccaagtaggtgttctcagatttgttttgctaggataactgtgacatggcctatgtcctcatatgccaaattaaacttgggcaatagccagcaagggaataggaattgccatgtttattttattcaacttaccacatgctgtcccctgtgcagtttactggtgcgtctttggtttgc

SEQ ID NO: 17852 - DNA, 1142 bp, Homo sapiens
tccccttatcacctagtttactttccttgaagcaatcaattttagtttcaaaaccaagagccaagaaccagagccaatgttatctcaagggtgaaatctgtaggcatttatgaatgctcttgttgggtgtttcgtccaggtgcagtggctcatacctatagtcccaaccctttgggagcctgaggcaggaggatcacttgagctcaggagttcaagaccagcctgggcaacatagtgagacctagtctctataaaaaatcaggtggtgtgcccctgtggtcccagctactcatgtggctaaagcaggaggactgcttgagcccaaggggttgaggtttcagtgagccatattcatgccactacactccagcttgagtgacagagcgagattctgtctcaaaaaaaaaaaaggagtatcttttattgtttactctaattttaacaaacatttgtagtgagtgatacaaaaacaaatgaagaagtgacatagtaaagaaagaaagagaggtaagttatcaatgtaaggtggccggattatggacatagaaaatatttttaaagaattataagtaaggaaatgatatgagcaaaatgacagaatatgagataaagccaacaaaattaaatttcctatttctgagaaaacagctagaaaattcataattaaagaagtctcatttacagtaataataaaggatagttagtgcttgggaattaacttggtatggaatacttgacattgattccaataaaattataaaatcttaaagaaaaaacaaaggaatagttggaacaaatggagctacaaactctcccgttgttgggaagagtcaagcaaagatgacagtagtcccaaaggtggtgagcaatacatcaaatggaaaaccaagtataattccgtcaggagagtttatagaactcagtaaaggcaaaatttatcagggaaaaggagtggccaagaaatgcagaagtatatttctagggaaaaaggacagtgatgggagatttgctttactagttttcagaatgtataatagttacagatgaattgattatctagaaaatccaaatcagttggaaacaattggaactaataatagagttctgtaaggtgactaaatacaagtttaacatatggaaat

SEQ ID NO: 17853 - DNA, 1142 bp, Homo sapiens; identical to SEQ ID NO: 17852

SEQ ID NO: 17854 - DNA, 1142 bp, Homo sapiens; identical to SEQ ID NO: 17852

SEQ ID NO: 17855 - DNA, 1142 bp, Homo sapiens; identical to SEQ ID NO: 17852

SEQ ID NO: 17856 - DNA, 1054 bp, Homo sapiens
ttgtaggataattaaaaatttcatacgtcgtattcacttatacataaaaatataaataaagatgaacccatctaaaacagatgcatctcggagataatttttaaatactttcttaaaacctgagtcagattggacattgataatcagcataatagaaagagctcaaggcggggtgcagtggctcacacctgtaatcccagcactttgggaggccaaggtgggtggatcacttgaggccaggaatttgagaccaacgtggtcagcatggtaaaaccatgtctctactaaaaatacaaaaaattagctgggcctggtggcatatgcctgtactcccagctacttgggaggttgaggtgggagaatcgcatgaacccaggaggcggaggttgcagtgagccaagattgtgccactccactccagcctgggcaacagagtgagaccctgtctcaaaaaaagaaaaaaagctcaagatctagcatcagaaaatctgggtttgggtcatgaatctaccatctgaaaagtgatattaggttgtagaattcaaatgtgagaatgtgctttatagtactgttaactgtatgtagcaggctatagaaatgtgtacataatacgagtttatttgaaaattaaggaaatatagtgataatgtattttaaaaattgggatggagtgcttgcctcagcagcatatattctaaaagtgtaccagtgcagaaaagattagcattgccactatgcaaggatgacatgcaaattggtgaagcattccatattataaaaaataaagaaaattttttaaaagagaaaaaaaaattgggccacagttattagagaaaatggaccttggagatttgtattaacaatacaaaaagactaactttataactttttttacttttttatttatttattttttttgagatggagtcttgctctgttgccagtctagagtgcagtggcacgatctcagctcaccacaacctccgactccctggttcaagcgattctcctgccttactcagcctctcgagtagctgggattacaggcacatgc

SEQ ID NO: 17857 - DNA, 1054 bp, Homo sapiens; identical to SEQ ID NO: 17856

SEQ ID NO: 17858 - DNA, 1054 bp, Homo sapiens; identical to SEQ ID NO: 17856

SEQ ID NO: 17859 - DNA, 1054 bp, Homo sapiens; identical to SEQ ID NO: 17856

SEQ ID NO: 17860 - DNA, 1029 bp, Homo sapiens
gtggaaggtaaactgtcagcttcatttttctccccatatatccacttgtgagtggccttcattattgcatcttctgacagtactcaagtgtcaggtgggtacttgatgcaactttagctggtctcaccatgatctgctcagggagagacacaattctctttggggcgcagttcaattattgtgcttctgatattgctcatttagatgattgatccccgggaggataggcaggagaagaggtgaggtaaggtggctttaggtacctctgccaaacttggttgccattcacctagtaagaatggcctgcttctagcgtttggccttctcctttccagtgggtcctttctcattctttggcacaaggtttctttttgatgtgtttaattaagctgtgggcatttaaatgtttcccatcttctgcagtttgattggtggctctgactacaaactgatctaccggcactatgctaccctctactttgtattttgtgtggattcctcagagagtgaacttggaatcttggacctcatccaggtatgtgtagtcagctaatgatggcagcagctttagagagtttccacgggatttttgagtaaccagcctgtagaaccttgtgtccatctccttattgatactagtaaaagttgccagatgtccaccagatggtgctctgggagagctcctgagaaaccctcagcacttttagatttattggtttctatctagcccttgcactgcccttggttttcatttacaaatttatactttggccgggtgtggtggcccacagtctgcttacagattgtctttattaccttcatgaaaactgagatgtgtagggaccctagcttgggaactatttatttagcattatttcatcgttttatatgtgagattctagatgagcttcttttaagtacttgaataagcccataggtagaaagcactcaaatagatgctacattgaaaacttaagtaacaacaattgtggaaaagaaaattctatagctataaaatgtaaactttaa

SEQ ID NO: 17861 - DNA, 1035 bp, Homo sapiens
taagaagaaacgtggactgctggctctagcaggcccagcccctgggaggaagctcaaggcttcctgcctcttcttgcctgtcaccagcacggggctggcagctctgcagaacgcagcctctgaagcccagcctggcatcgggagctggcttctttcctgaagccatgtgggtgggtagggaggggaagcagcttttctctgcaagtggtgggaatacaggggccgtggcccacaccactctcttgggcccggggcagctggctataggcgcctggccctgcagggggccattccagtgcagaggatggtctcagcctcccccgggccctgggagagtgcagccctgctgtgtggggctgggaagttttgctgggagttcctgctgggagtgagggccaggtccccaagagctggggaaagaagcatttgcagtcacctcactaaagaatattcatttatttataattattgctaagtaaacttctcttttaaacaggaacataaaaacacagtagggctttgcacaagtggaatctctaaacagttggtttgtatacatgtcaaaataagttagaatggaatttgtccaggagtttccaagtcacccgagaggctgtgcacctcttttgagaaggttagggaggggtacagacaggagccttgccaagaccaccccccagctcaaactgtgagttgtgctgtttcctcctcctagctttgcccaggtccaaggcacagggcagggggcgttcaagtatcgaacctcacagagggccagtgctgacggcggggctgggggagggaaaggagagccccaccctgggggccagaccttctcccttcagtttccaagaccaaggccactgcactggcaggagggaggaggaggaggagaggtacagggttctttttggtaccaggggagaaagacgtgggaagaggtagttgcaggggatgatgccttctgctcagcaggagaaaatgtcttatacagtgacggggtcactgccacctgagggtcatcatggcgggcac

SEQ ID NO: 17862 - DNA, 1065 bp, Homo sapiens
ctgacgaagcaggagatcctcctgtaagtgctgccttgaaccctgcctccgaccccgggatcctctagagacagcttcgggggcgctgtcccgagggaggggcgggggctggcctgaggtctgcagaggagcgggagctggaggccgggagacctagcccgggctgcgccctcctcccggcacgccctccccgccctcgcctgaggccccagcgtggcaccgcggagccaccttacagcctccaggaaaagttaggcgctctttgaccctgggctccactagcttcagcactgccgaacttcctgccccagtccggcaggggccgaccttgcccagtggctaaaccacagaagccttggggagcccggctccttctcccaactttacctgaataatacagtaaccgttatcgctttctgagcactcaccatgtgccagggactgtgctaaatggttgcctgcgttacctaatttaatctttaggagagaggtactggacaatgaaacaggttcagaaaggtttggtaactgcttaagacaacactctgagtaagtagatttgaacttgggctggaagcccttttgccggatttatgcaggccaggttcctgtggcaaagataagctcatgggaaggaggtggaggccgaggaggacagttcagtgtggttgctaaaaaggaggctttgagggtaagagatccctggagtgaaggtgagaatgagatttttggttttgctcttttctccgtttttttttttttgagacagcgtctcgctctgtcgcccaggctggagtgctggggcacgatcttggctcactgcaggctctgcctccgggttcaagtgattctcctgcctccgggttcaagtgattctcctgcctcagcctcctgagtagctgggattataggcacccgccaccatgcccggctaatttttgtatttttagtagagaaggggttcaccatgttgctcagactggtctcagacgcctgacctccaaagctccgcccgccttggcctcccaaagtgctgggattacaggtgtgagccaccgtgcctgg

SEQ ID NO: 17863 - DNA, 1075 bp, Homo sapiens
ttacaggcatgagccaccgtgcccggccacaatttgcatttctatagacaagaagtgtctatagtttgtatagttgttctgtagctcaaagacagtgaaaggtttagagtcttcatagaatcagacatcctagaaaagtaagctggacagctgggcaccttgtttttcaatgacacccagtaatcatttttttgttgtttgtcttagatggagtcttgctctgtcacccagactggagtacagtggtgtgatctcagctcactgcaacctccacttcccaggttcaagcgattttcctgccccagcttcccgagcagctgggactacaggtacgtgccaccacgcctggctaatttattgtatttttagtagagatggggtttcaccatgtggtccaggctggtcatgaacttctgacctcaggtgatctgcctgccttggcctcccaaagtactgggattacaggcttgagccaccatgcctggccccagtaatctgttttagaccatttcaaagcttttctcagtttttttctgtattacaaagtaataggaggatgaactactggtacatacaatatagatgaagctcagacactatgctgagcacaaaaagaggtagataaaagagtatatagggccgggcgcagtggctcacgcctgtaatcccagcactttgggaggccgaggtgggtggatcacgaggtcaggagatttgagaccatcctggctaacacggtgaaaccctgtctctactaaaaaatacaaaaaaatcagtcaggcatggtggcggacgcctgtagtcccagctactcaggaggctgaggcaggagaatggtgtgaacctgggaggcggagcttgcagtgagccgagatcacgccactgcactccagcctgggcgacagagcaagactccatctcaaaaaaaaaagagaaaaagagtatatagtgcataccaggttacccctggaggcagaggtagatgaggaagctcccaaggaaatcttatggagtgctggaaattacatatctgtcttatatagacatttaatatagataaagtaatatataaatc

SEQ ID NO: 17864 - DNA, 1434 bp, Homo sapiens
tcccttttactgggcatctaggttgtttacagtttttcagtgtaatccatactgcaatgaacatctccatgaattccacatttttgttctttttaagttatatataacattatctgaatgtgaccccccaaattcatgttcaaatcctaatccctcaaggtgatgatggtattaggagatgggcctttgggggtgaacagagtttgaagggagagctctcatgaatgggattagtgccggtatcaaatgaccccgagagtcggccccttcaaccacgtgagaacacagctagaaggcactatctgtgcaccacaggcaggccctcacccgacactgaatccgcttatgccttatcatggactttccagcctccagaactgtgagaaaatacatttctgttgttgataaactacctactttatggtattttgtcctaacagcccgaacagattaagacgttattttatgatgaatttgcaacagtgaagttacccgggcaaaagataaggacagagatgactgatgacactatcgctcccccaaaagactgtaccagtttacaccatcaataacaaactgctggatattgcttaaacaatgttttagctgattaatgagatatataatgccatctcatttttaaaaattttcctttaagttctgggatacatgtgcagaacatgcagatttgttacataggtatacatgtgccatggtggtttgctgcacccatcaacccatcatctaggttttaagccccacatacattaggtgctctccctcaccttgcccccaacccccgacaggccccggtgtgtgatgttcccctctctgtgtccatgtgttttcattgttaactcccacttattagtgagaacatgcggtgtttggttttctgttcctgtgttagtttgctgagaatgatcaatgctatctcttatttaacgaccatttcttttttttgagacaatatctcactgtttcccaggctggagtgcagtggcaccatctcagctcactgcatctttgaccttccagactcaagccatcctcccacttcagcctcctgagtagctgagccttacaggtatgtgccactacacccagctaatttttttattttttaatttttttatttttattttttgagacggagtttcgttcttgttgcccaggctggagtgcaatggcgcgatcttggctcactgcaacctccgcctcccaggttcaagcgattctcctgcctcagcctcccaaatagctgggactacaggcacgtgccaccatacctggctaattttgtgtttttagtagagatggggttttaccatgttgtccaggctggtctcgaactcctgacctcaggtgatccacctgcctcagcctcccaaagtgctgggattacaggcgtgagtcactgtgcccggccctaat

SEQ ID NO: 17865 - DNA, 1378 bp, Homo sapiens
tgggattacaggcacacaccaccacgcccggctcatttttgtatttttttggtagagatggggtttcgccatgttgtccaggctggtctccaactcctgagctcaggtggtccacccaccttggcctcccaaggtgctgggattacagtcatgagccaccgtgcccggactgccttaagtcattttaaaggcttaagtaaatagaattcagcattcgtttctgtcagacaaataatttcattgcacatctaagacttccaaagataatatcctttattctgctcattttctaggcgttcacagattcccctcctattgtttgattacaaattctactagcaaatgacacctgccacagtggaactgcttagcatcctttactagtaggattatagctcacatttgtggagctctcgtatataccaggcaccatgctaagcagttcacattgataatcctatttcttctgctatgatataaatggggttccactgtgtggcctaatacgggcagcaacaactctgatgacctggaagaactcagccctctcactcttgtctttaggtggcagcttggcaggccccagtgactttctctaaggaccctgaagcaagcttttctcctaaagtaattgtactcgttgatttttttatgtgctgcaaatattttcttccatatctgtcatttgtgttttaaccttgatgttttccatcacacagagactttcgatattttttggttgcgaaatctgcttatcttttcccttattatatcttttaagtctcatgttaaagtttagaaaagaccgtcccacaccagaggtataaaaatttttgagtaattttgtggtatatcttccctctggaactaatttgtatggacactgtgaggtagagatctaacttagtggttttttttttggctgtgtcacccaggctggagtgcagtggcatggtggcatgatctaagctcactgcaacctccgcctcccaggttgatgtgattctcctgcctcagcctcctaagtaactgggattacaggcgcgcgccaccattcctggctagtttttgtatttttagtagacacagggtttcgccatcttggccaggctggtctcgaactcctgacctcaagtgatccacccaccttggcctcccaaagtgccgggattacaggcgtgagccatcgcacccagctgagatctagctttgatagctagttgtctaaaagtgctgtttattaaataatccacctttttccccacttaaaacatccctcttaccatatactaaattcctgtagccctgggtctgtttctggactctcccgtctgtctgaccccctccaggtcacactgagtgaggtaatggtggcgtg

SEQ ID NO: 17866 - DNA, 1095 bp, Homo sapiens
gagatcgcgccactgcactccagcttgggtgacacagcgagactccgtctcaaaaatgaaaaaagaaaagacgtatcggaagggagtgccgcccgcttactgacaaccactgctgggcaccggagagaccccagcagcaacatgattgggccggtgggggattccggttccccagtacctcaagccgcgcgggaaactcggtgactcgcaatcccctcgcccttccgcattgcgggttacttcggttgttaagtgacagggacttccgggaaggcccggaagtggcccggggctgtccgaccccgggagcccggcggtcggcgtaggggaggcggtggaactttgctcggtggccatggggagggattgcccggtggtggtttttcagtcgttgctgagcagctgaggtttatttttatgtattttattctgcatccagtcatccattaaagccaaagtttattaagttgtctggaaaagcgatcatcttgggtacgaggaaattgttaggtcaaagctgttcgactacgatagttgtttgcccaagtgaaggccccagcggagggctctgcgaaaaagtaggtgaaaggcaaccaaaaaagccgaattaaaagaaaacaaatgaacaaagttcagagtaatccccagggtatggtacattttggagaactttgaacttaatttttttaaatagttttgcgggagtaagataacgagatttttttaagaaaagatgactttgttgtagtccactttatatattttgttgcctgtgtttttagtgtcatatctaagaaatcgttgccaaatctaatgccatgaagcttttcctgttttcttctaggagctttcgttttagcttttttttttgagacggagtttcactcttgttgcccaggctggagtgcaatggtgccatctctgctcaccataacctccgcttcccgggttcaagctattctcctgcctcagtctcccgagtagctgggataacaggcgtgcgccaccacgcatggctaattgttgtatttttagtagtgacgggatttatccttgctgcccaggctggtctttaactcctgacttcaggtgatc

SEQ ID NO: 17867 - DNA, 1160 bp, Homo sapiens
atgtgaatgagtgttacagttgaaagcccatcataggtttagtggtcctaggagacttggttttgacttatatacatgaaaagtttatggcaagaagtgcaaattttagcatatggggcctgacttctctaccacataattctacttgctgaagcatgatcaaagcttgttttatttcaccactgtaggaaaatgattgactatgcccatccctgggggtaattttggcatgtatacctgtaactagtaattaacatcttttttgtttaggcatgttcaattaatgctgtagctatcatagctttgctcttacctgaagccttgtccccaccacacaggacagccttcctcctgaagagaatgtctttgtgtgtccgaagttgagatggcctgccctactgccaaagaggtgacaggaaggctgggagcagctttgttaaattgtgttcagttctgttacacagtgcattgccctttgttgggggtatgcatgtatgaacacacatgcttgtcggaacgctttctcggcgtttgtcccttggctctcatctcccccattcctgtgcctactttgcctgagttcttctacccccgcagttgccagccacattgggagtctgtttgttccaatgggttgagctgtctttgtcgtggagatctggaactttgcacatgtcactactggggaggtgttcctgctctagcttccacgatgaggcgccctctttacctatcctctcaatcactactcttcttgaagcactattatttattcttccgctgtctgcctgcagcagtactactgtcaacatagtgtaaatggttctcaaaagcttaccagtgtggacttggtgttagccacgctgtttactcatacagtacgtgtcctgtttttaaaatatacaattattcttaaaaataaattaaaatctgtatacttacatttcaaaaagatatagtgtggtgtttcctttttttccccagtcactttttagttggttggtctgtgtgtgaaaaacaaacacaaaaaactaaaaggacctcctggaaatttttagtcaggagtgtgatttttttttttgagtctcactctgtcgcccaggctggagtacagtggcactatcttggttcagtgcaacttccacctcccaggttcaagc

SEQ ID NO: 17868 - DNA, 1607 bp, Homo sapiens
aagggagccccagctgtgtgctgcctacaatgaggctcttggcctgtgtgctgattatttcctggagtatatgccttcctaacccctcagggcttaaccgccagctctattctcagctagctaatgctgatttcctcacctttgcctctttccatacattgagctactgaagcatagatgaagcactggaagcaagtttttccagaatgctcttcacttcctagtatcctactctatatttgctaacacctaactacactgccttttacttaatctgtgatttcttctctcaatattttactagcaagaggagaggatgttcctcacccttgaggggatattgagttaaacccctagcctgcctcccctcttaattgctgcagggatagagaatggaacagttggccaaggctgcagctagttttgatcactgaaactggcttcctactccagcatgtttttcaaattacgtggctggtggtgcttctacctttaaaagtgggtgtgtgtcactctggctgattgctggacagaggtccagctttctctttttcgcttgttcaaccaaggcccattttatctgaggcttaaatgtacctgcctatctgtgtggctagtcctaggtaggttcgtctggtttgggttgctatggctgatagactccaccaggcagcaccaaagccggtaaactaacctctgctaatatctgtctttctcaatagccattcatgctttatcttttgctgctctaccatgtgctccagcatgagatcaaatcaccagcaggttacaaggcctcagccccagggattggtagatatatgttctggcccattgttttataaagggctcaagagaccaaagcttgttgcctacttaccttgacaactctaaagtagctctgtgaagtagagtcatgcctcgcttaatgacagggatatgttctgagaatgtggggcaatttcattgtgcacatatcagagtgtacttaacagtcctagacagaacagcctacacacctaaactatatggtatggcgttttcctcctaggctacaaacctgggcagcatgttacagaaagaatactgtaggcaattgtgggtttttttgattcaggctattcctgggatactgtaggcaattgtaacgcaatggtaagtatttgtgtatctaaacatagaaaaggtacagtaaaaatatggtataatcttatgggaccaccatagtgtatgtggcctgtcgttaactgaaacatcattatgcagtgcatgactgtatgaaggatttctcttctgtgaggtgtaacagaatggactggctgaggaaaaaggggtcacgggcatgcgtgcacatgcactctgtctgtgactaatagaatggtgctcagagttcctcaccttttactcctaacgcagcctattgcaggctagggatctcagagaaactaccttcaagggaccttttgctgacacttaaccaaacttagaagggtgggccatgtgtaagagaggcagtatggccactgatgttatttatttttcaacagcgagaactttcaaaggcttccaaatctgatgctacttctggaatcctcaattcaaccaac

SEQ ID NO: 17869 - DNA, 1051 bp, Homo sapiens
agtgtagattcatctctgttgctgtatgtatcaaaaggtcactcctttttattgtagatcaatattcattccactgtatgaatttaccacagtttgcttgtccacttacctgctgatgggtatttggctgttgccagcttttggctgctgcagggagctgttgtgaacatttacgtctaagtctttgtatggatctatgctttcatttcgtttgggtagaaacatctaagagtggaatggctgggtcatatgctagatgtcttgtgccacagtggttgtaccattgtacacttccatttgctggatagcaataggctttgaaaatttttcacaagttacttcaaatctatgcagtattagacacagcaggcccttcaccatgtaaacccgtcttccctagactgcctcctcccatagtcatttctctgtagggtagacaggttgctagaaatgctgaggatgttactgcacatcagttacccacgtgctcttctccctagctgaacactaccaccatgtccaatgctacggccaatagtagcattcggcctatctttggagggacagtctaccactcccccgtgtctcgacttcctccttctggcagcaaggttagtatgccctgtgtctaagcacatcctcacatgcgtccctagcctgttcacccagaggccccacctacttgttctagattctaagatccctggatttggttcttattgagatgctgagagttgacagatataagctagctcaccattaaataatggtccaaaactaacgtgcaaaaaaagagaacagtcactctgagccccactggtaccatgggaagcactgggatgtgtctgggaaactgaagatcaggcagggtcgctgtagactcaattccaagcccagtcctcagctggtatggagataggtcccctacatgtgggttctagcccagtgaaaccagatcactagacatgccaggtactcagtagagatgtggaaagtatgtggcaaaacacattcagtctttcaaatattttattagactatgctcaagata

SEQ ID NO: 17870 - DNA, 1538 bp, Homo sapiens
agatcgtgccactgcactctagcctgggcgacagagtgagactgtctcaaaaaaaatgtaaatttgctcactgcttcacagccagtaaagagggtgattccagattgaaccccattaagtctgatttcagagtcctgctcctaatgttcaccgcctatttcatattgctgatcttccctgtgctgcctccaacttcaggcaccaaaaccttagtggtcaaactttgggttcttgccattttccactcttgtgtgttgtgtgaatgaaatgtctccgggctttgatttctggtcactctgacctgtacccatgtgggcccagctacctgaaatgaggctaatgatgctctggggaggaggagtcactctctagggaaatcatttcatttgggctttgcactaaagagttgaagtaattaacatgtccttgtttctggtctcagctggaagaagagttgaaggcacgaattgaattgtgggaacaggaacattcaaaggcatttatggtgaatgggcagaaattcatggagtatgtggcagaacaatgggagatgcatcgattggagaaagagagagccaagcaggaaagagtaagtgtgaacgtgaacgcaaattgggaaaagacgaagaaagtaatctgagcagcccatagtctctgccggggaccagggtttgtggaacagggagccggggaccggggcttgtggaacgggaagccggggaccggggcttgtggaacggggagccggggaccggggcttgtggaacggggagccggggaccggggcttgtggaacggggagcccgcggcagctctttagctctggctgtagagacacgggcctagattcccggccctgctgctgttgccatcccagacccgctctcttcctgagatttatcactgttgcttctgactttcacacagcaactgaagaacaaaaaacagacagagacagagatgctgtatggcagcgctcctcgaacacctagcaagcggcgaggactggctcccaatacaccgggcaaagcacgtaaggtaaacacaaggcttagggaaacactgatttcaagggagtgggtgagggtagtcccagccacctctttgaagggggccagcccctccacacctgtgggtatttctcatcaggtgggacaagagacagagaaaagaaataagacacaaagtatagagaaagaacagtgggcccaggggaccagcactcagcatacagaggacctgcaccagcaccggtctcttgagttccctcagtatttattgattactattttcactatcttggcaaggggaatgcggcaggaggacagggtgatagtggggagaaggtcagcaggaaaacgtgagcaaaggaatctgtgtcacaaataagttcaagggaaggtactgtgcctagatgtgcacgtaggccagatttatgcttctccccacccaaacatctcagtgtagtaaagagtaacagagcagcattgccgccagcgtatctcgcctccagccacagggcagttttctcctatcta

SEQ ID NO: 17871 - DNA, 1012 bp, Homo sapiens
tttttgttttcgtttttgagatagggtgttgctttggagtgcagtgatcatagctcactgcagcctcatcctctcaggctcaagcaatcctcccacctcagcctcctgagtagctgggactataggcatacgtcaccgtgcccggctaattttttttttttttttttttttaagacgcagagtctcactatgttgcccagaatgatctgaaactcctgggctcaaacagttttcctgcctcggccttgcaaggtgctaggaatacaggcgtgaactaccgtgcctggccagttttgcctgtttttgaactctctgtcaacggaatcacatagtgatacacatttgcatatctagtggcatttgctcagcctaaagtgttttttttttccttcctcttccccttacaactattttttagttgtttattttacttcattaaaaaaatgaaaagatttgaggtataattcatacacagtaaaacagactcgctttacaggtagtttcaattgtatactgttgtataatcgccatcaagatctagaactatttcatcaccccaaaaaagtaaaataaataaataaataaaatagaaatataataatttgagctttatccatatcatgtgtagtgtgttcattttcttttttgacagtttcgctctgtcgcccaagctggagtacagtggtacaatcttggctcactgcaaccttggctcactgcaaaccctgcctcccgggttcaagcgattctcctgcctcagccgccccagtagctgggattacaggcgcaccaccacacccagctaattttttgtgtttttagtagagacagggtttccccatgttggccaggctggtctcctgacctcaagtgatctgctcccctcggcctcccagagtcctggaattacaggtgtgagccactgcacccagccagtttgttcattttcattgctgcattagtgcattgtaggaatgtactattcattctgttgatagacatctaggctgtt

SEQ ID NO: 17872 - DNA, 1059 bp, Homo sapiens
tgtgttttcatttcttttgggcaaatacccagtaataaaattgctgagttgtatgaactctgttaaactgaggggccgggtgcagtggctcatgtctgttatcccaacactttgggaggccgaggtgggaggattgcttgggcccaggagttcaagaccagcctgagcaacatggcaaaccttaaaaaaaaaaaaaaaaaaaaaaattagccaagcacgatggcacgtctatggtcccagctacttgggagactaaggtaggagaattgcttgagcccagggcgttgaggctgcgttgagctatgatcacaccactgcactccagcccaggtgacagtgaggccctgtctcaaaaaacaaaaaatcaattgaggaactaccagactattttccaaagaggctgtaccgtcttgcatgcccacaagcagtgtctgagggttctagttcctctagattctcaccaatactttttgctatatatttttttttattataccatcctgttggctatgaagtggttttgatttgcatttccctaatgactaatattgagcatcttttcatgtgcttattggccatttttatatcttctttggagaaatgtctattcagattctttgcccattgtgctagatttttttactcagaaaaacgatcactttaccttctagatgtgttacagagataggcagccctgcttgtaaaccttcgtcaggatccagagtgcataatacctctattaggttaggtaggttaggagcataggaccctttgggaggaattcagggccattcattttatatctattgaacaactactgtgagttagggtgtggtaaaatgaagatgaataagatgtggtggtccttgcccttgagtttatggtctactagggggcttggggggaatggtgagtgacaagtccacagctctccagaggaggtggtggcatatagacggaactgaatgtacaaagcgcggtggcatcagaaaatgagagttgcatgtggtttattgaggggcattgttcaggaaatgcccgggaagttcagctggccag

SEQ ID NO: 17873 - DNA, 1047 bp, Homo sapiens
cgggttcaagtgattctcctgcctcagcctcctgagtatctgggattacaggcacccactaccacgcccagctaatttttgtatttctagtagagatggggtttcaccatgttggccaggctggtctcgagctcctgatctcaggtgatccgcccgccttggcctcccaaagtgctgggattgcacacgagccaccgcgcccggccatagtaaaaatctgtaagtttttcaattaagtcacaaatcaaaaacatttcagattatgggccgggcacagtggctcacgcctgtaatcccagcactttgggaggccgaggcggtcggatcacgaggtcaggagtttgagaccagcctgaccaacatggtgaaaccccgtctctactaaaaatacaaaaattagccgggcgtggtgccgtgtgcctgtagtcccagctactcaggaggctgaggcaggagaatcgcttgatcccagaaggcagaggttgcagtgagctgagatcacaccattgcactccggcctgggtgccagactgagactctgtctcaaaaaaagaaaaaaaaaagaaaccaaaaatgttttagattatgtgccaagatgtttttaataacagctttgaggtataatccacataccatacaatgtacttaaattgtatattataattcagtgatttttagaatattcagagttgtgcaatcatcactgcaatcaattttagaacatttttatcacccctttaaaatcccattagcagtcaatcccctttcaccccatggtccaaattctccccagccgcaactacaaatctacttttcggctaggcaaggtggcgcacacctataattccagcactttgggagcccaaggtgggaggactacttgagcccaggagttcaagaacagcttgggcaacatagagagactctacctcttaaaaaaaaaaaaaaaattatttatttatttatttatttattttattttttattttattttattttattttttgagatggagtctcactctgtcacccaggctggagtgcagtg

SEQ ID NO: 17874 - DNA, 1066 bp, Homo sapiens
tagtttttggtggaactgattgttctaaggctttgtaagattcttcatttcatgatcactaattctgatcagtctttttaaaatgcttgccctcagaataatgagaattgagtgccaacatggtaaaaccttgtcttaactaaaaatacaaaaattatctggccctggtggcgcgcctgtacccccagcttttcaggaggctgaggcaggagaatcgcttcagcctaggaggcagaggttgcatgagccgacatctcgacactgcactccagcctaggcgacagagtgagactacgtctcaaaaaaaaaaaaaaaagtccattaacagtttatgaattatgtaggcatctcctctatcaagggattgaatgaagcaggagaaaacttaccctttaatgttggttccaggctaatggatataattaacttttttttttttttttttttttttttttttgagacggggtctcactctgtcgcccaggctggagtgtagtggcgagattgctcactgcagctttgacctctgaggctcaaacgaaactctggccagaattaattatggttatcgatccccgaaacaggttgaactggagatcaacaaagctccttctctggaatgctaagaaaaaatagggcagtggatcagtgaaggctgcctgaaggtagaaaataatttaaggaccactgtgagataccttccagtccagtgatttatgttcaagactggaaaaactgactcattttacaacctttttgtccttgagtggtagtctttgtatgcactcttgatttttttcagtgaatctaaaaaaaaaactcagacttgctgcttttaggggattatctgaaacaatttagccagggagtatttaagtgtatcatgataattgttcataatgattgctctgaagcatcttaagatcatacaacttttttgaaatgtcacgttattcattcaaaaagacttcttgggcctggcacagtggctcacacctgtaatcccagcactttgggaggccaaggtgggaggatgacttgagcccaggagttcaagaccagcctg

SEQ ID NO: 17875 - DNA, 1021 bp, Homo sapiens
ggcagatggcatatgaattgtggaggaacctggaggaggaggaggatggcgaaaccaagggccgaaggccagagattggacatatctttctcttggacagaggtaaattatgcccagcgttcctgtcatctttcagccctagaagacacgggaatatggaaggcgtggtggcaaagttaaaatcctaaagttagggctgtgaatcccagctttgaggagcgtgggtccttggccctatggaaagtatcaaagctgcccttggacatgctgtgtagaaggctgggtcagggagaaccttcatggtcagggatctctgtttcagatgtggactttgtgacagcactttgctcccaagtggtttatgagggcctagtagatgacaccttccgcatcaagtgtggtaagtgctatggtcctctgcatcttggcaagatggacgggtcatcagccttggcacctcccacgtggggcagggtttgtgggagagacccagaccctgaatgaactgctggcttccaaatagtttgaggacctttatggcagttcagggaatggtaggagaagtcctcattggagatcctaatagctgtccctctgctctcaaagggagtgtcgactttggcccagaagtcacatcctctgacaagagcctgaaggtgctactcaatgccgaggacaaggtgagggtgtgggtgctagcaatgggcccacctagggccactgcttataccaggctgtgggccccctgcttataccaggctgtgggccccagctctgagaggggaggctgagtctatgggagagagggtttccccaccagttcagagcatctcctagaacacggtgtaggcatttgatatggacttacagatcccagctcagctttctttgtatttctgccagaacacctgagtacccttcctgtactgtcattctactgctaagttatggttctgacagagtaagctgttcttgtcttactgtcctcacaggtgtttaatgagattcggaacgagcactt

SEQ ID NO: 17876 - DNA, 1017 bp, Homo sapiens
gggctgcattccttctctctgtaggtcttgtcaatgctgacaaattggctggccgaactcgcaaatacaaagtgatcttcagccctcaaaaggtgagtttggatcctggaggaagtgggataaggtagaacaggactgaggaccgggcaggggtaaggggccaacagcactacctccctgtctccgttcgttttctgttgctgtaacagaatacctgagactaggtaatttataatgaacagaaatttatttagctcatggtctggggaggttgtgaaatccaagactgtggggctggcatctggcgagggtcatcccatggcagaagggtggaaggtggaagccagcacatgagaccaagagacacccaggggctggactcgccttatagcaacccactcctgccataaggacattaatccattcatgaggactcctccctcataacccaatcacctgttattaggctgcacctcccaacactgttgcactgcagattcagtttccaacagatgaacttttgggagacacattcaaaccatagcactccctcaaagcaaattatgtgtgattgaacctaatacctgtcactaacgcatcctcaattcattaacatatcctcatttgtttagcagagggtctgtcatcatactgtcccaaataaagtattgtggaattgtgcgaagaggcctctacgtagatttttttaaatgaaaagcttcacgcttgcgaggtagaacctgctctgtatccctaacacaaactctagtatagtaatggtgcacaatgttacggctttccagtgactttctccctgtatccctttaagaataaatacgataaatcatcaccctccctcttcccatccgctatgcttataaggatgtggctgggctgcccctgggttactagaaccatgccaccatatattggaaaagccttttcttgcacaggaaaggaaccttagagactgttttactccaccccaactttgagcagctgagggaactgaagccc

SEQ ID NO: 17877 - DNA, 1086 bp, Homo sapiens
ggcgtaagccaccaagcctggccacagatttagtttttaaacttatgcttatttttttgagacggagtcttgctctgttgcccaggctggagtgcagtggtgcgatctctgctcactgcgagctctgcctcccgggttcacaccattgtcctgcctcagcctcctgagtagccgggactacaggcacccaccaccactcccggctaattttttgtatttttagtagagatggggtttcaccatgttagccaggatggtcgcgatctcctgaccttgtgatccatccgcctcggcctcccaaagtgctgggattaccgtgcctggcctaaacttatttcttgtacttcttatgttttctgacactgtggtgtgggcccggggtttaaaggtaaggaagcttagatgtggcttttgtctcaagctcccagtctaagcaagagaccaacactactcagatacataaaccaggagtcagcaaactatggcccatgggccaaatccagcccactgtctgtttttgtacagctcaggagccaagaatgattttcacattttaatggttgaaaaagaaccaaaggaagaatactattttatgacatgagaaagtaacatgcaattcaaatttcagtgtctataaataacattgtactggaacacagccatggccaagcatttcttgctgtggctgctgttccaccccaacagcagggttgaggagttatcaccgtgattgtgggatctgcagagtttacaatatttcctctctggactgtcacagaagaagttttccaacccctagtgtaaacaccctggaagtgctggcaaggagagggatataaggagaaagaggttgtgttctagggagtctgtgtggggagctgggggagggatccttagttgggaactgtggggagggagggggtttgctggaagagtggattgcgccttccagacagcacgctcaaaggtcctgtggctggggactgtggccttttcactggctgagagggtgagggatagagatgttcaggaggggtcagaatgggtgcgaggctctgccagaaggggcttactcttgtccttccc

SEQ ID NO: 17878 - DNA, 1035 bp, Homo sapiens
gtccagcccctgggcctgtacatccttatggagtgaagactgacagttttcccttaggtcagtggagctacagtggcgtgttggagtcagctgctcagaatgatgatgcacttttctttccaactttggtttcaatgacatcatgttggtagcttgaaactggccatagcaggggtatttacaccacaggaataggtaaacactacatattaaggcttttccccttggagatgccttgttaaatatttaccaacactccactgcctgttacaacacagcaaaagcccctctgagagaaggccagagaatgtacctaactcctcccaggttgtccagtgtttcattgtccctggactgaagagtccctcagtggcctttgctgagatatttcaacaccctagtctcttaaactgtaaacaaaggagagtcatgagttatttctgggtgagtcagtccaatattgcacaagcatttctgggggtagtagaggggaggcaagagggaaactgggtaggctggggagctatctaactgcccaagacacttgaatcctaaacaaacgggaactaaatgagaggtgggagggacatagtcttttctgacgggaactgtctgtgactcattctctttcaggagtcagaaactccaaaacctgtgggagtggggaggggcgagcagtgcggtttttagagaggtgtggagttattatagggactcttaaaattcttctcccttgctcagtgtggtgactcataccggtaatcccagcactttggaaggcagaggcaggaggtttgcttgagcctagaagttcaagaccagcctgggcaatgtagcaagaccccaactgtataaaaaataaaaataattagccagacatagtggtgcatgcctgtagtcccagctacttgggaagcttaaaaatctacctccatttaacctggtagatttggggatgtgtgtggtgggctgaataatggtctcccagtgatatcccaatatgtggaaactgaatgttactttatctggcaaaaa

SEQ ID NO: 17879 - DNA, 1063 bp, Homo sapiens
gcggtggctcacgcctgtaatcccagcactttgggaggccgaggcgggcggattacgaggtcaggagatcgagaccatcctggctaacacggcgaaaccctgtctttactaaaaatacaaaaaattagccgggagtggtggcgggtgcttgtagtcctggaggctgaggcaggagaatggcgtgaacctgggaggcggagactgcagtgagccgagatcgcgcaactgcactccagcctgggcaacagagcgagactccgtctgaataaaaaaaaaaagaaattgagatcatcctggccaacatggtgaaaccccgtctctactaaaaatacaaaaattagctgggcgtggtggcacgcgcctgtagtcccagcagctcgggaggctgaggcaggagaatctcttgaacccgggaggtggaggttgcagtgagccgagatggcgccactgcactctagcctgggcaacagagcgagactccctctcaataaaaaaaaaaaatttagtaacttatgaatttggaccatgtgaacctattacttgttccaggtaaaactgaacagttgaaaagtatgctgggctaggcgtagtggctcaagcctgtaattccagcgctttgagaggccgaggtgggaggatcgcttgatttcaggagtttgagaccagcgtgggcaacgtagacccctatctctatttttaaaatatactctaaaggccgggtgcggtggctcaagcctgtgagggccgggcaccgtggctcccagcacttcggaaggctgaggcgggcggattgccagaggtcaggagtttcagaccagcctggctaacgtggtgaaaccgcctctctactaaaaataccaaaaaaaaaaaaaaaaaaaaaaaaaaaaagaaaattagccaggcatggtggcgcatgcttgtagtcccagctactcgggaggctgaggcaggagaaccacttgaacgggaggcagaggttgcagtgagccgagattgcgccactgcactgcagcctgggcaacagagggagactccgtctcaaaaaaaataaaaattatctatc

SEQ ID NO: 17880 - DNA, 1039 bp, Homo sapiens
agtttactcaatagaaatacatcagtatgtcttctaagggccatgatgctaccggcattattcatagcagtccctgaatgaacgaatcccagtatctaccaacagtgaaatagatgaaacatggtatgttcatgcagcaattaaaaataataaaagaagaacaaacttctgcatgcaatagcatggaagaatctctaaacataatactgagtacaagaagccagacctgcagaaagtagataacatgaatccttttatagaaagttcaataacatagcaaaactaaggcatggttaatcaaaaagtggctacttttgaagaggtaatgaccagagtagattaataaaggagatttctagagagttggtcatgttctatatctgtacttctcaaaattcagtctacatatagatctccttcgagatctttttgaaatgcagattctgattcaataggtctgggtgggagctaagattctgcatttttaacaagctcctaggcaatgccaaggctactggtaaatgaatcacactctgagaaacgaagtttgataccttctgaatggtgtatatgcaagtttatttgtaaaatatcatcaaactatatgtttatatttatgcactttctttgtatatgttttacttcaataaaagatctatttaaaaccaatgcctttggattgaaagtttgaaatgaaatttttagctatatttttgtgagtagcagaaatagaacttgaacactggatttgtttttgattgaaagcaacattaactttgaaaaacttaagtcagtaggatttttactggaaatgtatggagagtcttacagaacagaaagaaaaacctaaggatcacacttgcaaagtagcagactggagcagcaccagaggattttggtaccagaaactcaacagatttgcaaccgtgctgcaataaatgacctcaaatattctcagtcttgtttccctgtttacagtttttaaggaaagactgctcaattggcctaacttagaaagggcacctgcctgtccctaagg

SEQ ID NO: 17881 - DNA, 1049 bp, Homo sapiens
gctgcctgctatctcactctaacatagtgtttctctttctgcttgtcccatgttcctttcctctcatgtgttgcatagcatttccttgaagagaaatcacgtgtaaagagtttggtttaaaatgccatctaaataatactcttccccccatgaagtcatggaaaaagttaaaaatgaaccctagcattgacaaacttttgccaaattgggaacaatttccactaactggagtattgatgaaagcagccagaagagataaatcaatccatcatctgtgctgtgccatcagagtttaaattaaaagatgctttctgtgctcttccagccccctctcaactctccaccctgactgcctcccatgagaatcaccctttaggctgattaagaacatactatgtacctgcaggttctttgaggctctcagaatttagtttctcccttctatttcctcttgattaatagttaactttttaacattgctaggaattgtgtatttccaaaaaaagataagcagacacaggtgttgtcgagtacatgtaatgggataactgtgtggcattggtggggaatcgccttagcaaatgtcactgtgggagatgcggtccctacaagaagagtccttcaggacaggtaaattctatggggcgtagtttttatgtataaatttaatttatcacatactaggcagtagccttaggataacatccaatttttgtctagcagatcactggtattaaatacttggaattgggctagggtaattgacatgaaactgatagcagctgagactctgagaagagattttagtcagcacccaagtggagagtgagtggtgctccagagtgctctactcaatactagttctggatggagggcactttggttaagcaagagtacagagggaacaacagcaactgtaacttggaggacaaagaaaagtatatggcaattgtgataaatggcatgtgctctgttgtcagaaccagagaaaaagtcagaacagtttggctcaatcagtaaaatacaagaagacttggtgtttatgaaat

SEQ ID NO: 17882 - DNA, 1080 bp, Homo sapiens
tgaattgtgtattagtaggaatttctcggttcaacacacagagaaataacaagttttctgttgtaaactattccttactaattaaaaacaaagtggttatattcttgacctgactctgaatttaattttttaagaatgtaatcataagtgaagcaactttaaatatagcattatagggcacagtattgataaatgagaggaaaactttttcttaaagagtgtaccactcacttaccatgccctgaaattaactgagaactcatttgtcaagagagcacctaccctatagagaattcttccaattaacatcaaaagcgatcattcttaacctctcatgcattaagaaaatcttgtctgcacccaatgttctgttcataatcaatgaagccccttatgtatgttattgcaaatttatcaccttgtatattactaaaatggatgaattaataaatgaatctgctgtaggtccagaagccagatttatctgttgtctcctggttctcatgggattttcctttggtctccaagacatttcactctgcactttctcatagtttgggatatttattgatagctactgacagtatgagttggtactcatagactcaccatggctatatcagaaaagtggttttgagggggattagttaaattctaaaaatgtcagccaagtgactctcaggctatgctaaaaaggcagtgcaagtgttgtgctatatcagttctaacagtatcatattgctataaaaagcatacatcaagataaatgatgcttaacattggtgaggtcatggtaagcttgacacattcataaacattagttaaagagtaaaatagtgcaacattcctggaggccaatctcatgatatgaaattagaatagattaggatatattcttaggatctgagccttctttccacctgtaaggatctaggcaaggctgggtgtagaaggatggccattgaagtattacataaactgcagaatacccatgagctagaacactatgtactaatcaaaattggtgctttctgataattttgattacatggaaaagtgcccactatgttcaacgaataa

SEQ ID NO: 17883 - DNA, 1066 bp, Homo sapiens
tgggtaggctctaagactaagcaggactggacatggggatgccaatgataataacagctcctaattatggaacaggtactcagtgatcataaatgctagcctaggtgattccctacacccattttacagatgagaaaggtaaataagatgtagcaaggtcaggtagtgttcacagggtaaattaggaagccagataactgaaaggggaactgggaaatcccaggctattccttatgctctgaacatacacacctctgatttatctgaagaaagataatacttccatgatcaaaatacaatggaatagcacttacagagctagtgaagcctagaaagagtccaggccttgctgcagttttcttccagtggcactcagaggggtttgtgttttcagtttctgtattattttttggcctatgcagtatttcgttcttagcattttgcaataaattggtggtctctcaatatttctatgtatctggttttaccatgtcccagttgtgtgatcttggaaaatttacttctgtgttcctctgtttcctctgctgtgaatgtggggatggagggttgtcttcaggagtgaccattctaatatttgccaagatcctagaatggtgcttagcacgttctgagtgggcagcaaacattagatgttctgatttacggttctagctgtccctgtctcttctctcttctgcttgccactgtccccacctacctgagcttccctcttgtggctgtgctgcccacaagcgtgttgggtgctgggaactttgggtggcgcatttgctgcatctgtcagcctgggattaggggccagtggtccacgctcatcctctctgagaggcagccgcttctgcaggggctgccatggattgtggcttgtctgtaagtggcctgcttctctggccttcgccccctttccatctatcaaaatctctctctgtctccctgcctctctctctccctcctctcaaaggcctcgagcttctcccctcttcctccctgctggcattatctcctcccacagcttgagctttggggaaacaaaagccaggtgtcttgg

SEQ ID NO: 17884 - DNA, 1046 bp, Homo sapiens
agagaaagaggattctgtcttttcctagcctcagaaaggcagctggaggggttcccccaaaactagggaagagcacacattgctgttgcaaacaaggaacttgagatgggcaaacttaaaaaccaccctgatttcacttgaagagactggtttaaacaaacactttttttttttttttttttttgagacgaagttttgctcttgttgcccaggctgaagtacgatggcgcgatctcggctcaccacaacctccacctcccaggttcaagcgattctcctgcctcagccttcccaagcagctgggattacaggcatgcgccaccatgcccggctaattttgtatttttagtaaagacggggtttctccatgttggtcagactggtcttgaacgtctgacctcagttgatccacccaccttggcctcccaaagtgctgggattacaggcgtgaaccaccgcgcccagccttaaacaaacacttataagagaaacctgaagcctcagtataagggtagaactcatcatagctattcctgctactaaaaacacacccagatatcctgattttttatagattgattatcttatgagaggacgaagaaaactagccaatgggattgccaatgcaccttactagtctttgaggaattgtaaaaaatggaagaattagtggaaatttagagacatgcaaatgaggtttttactttaaaaaaatattctgaaggtgaattttggaaatgaaacacttgatggcccatgaattagttgttgagcttcaacagaatttaggatacatttttaattggatatttggtaaacctttatcagacgatgatggaaatctagaacattagactgagaaggaagttggaaatagaaacagttcgcttagatccctcatggattcactaaaaacagctcaagtcatgctgacttatttttttttttttctgataaggtgaatgtgtggtaggaagggatgccataagccagcaaactgtagtctcttcaaactgtaaagtcaagaggaaatcaccaggggatct

SEQ ID NO: 17885 - DNA, 1050 bp, Homo sapiens
tcctcccagccgcgacccgatgcaccctcgaactttctcccggagaaatctctacccatcctgtcttttaatatttttcaagaggtctcaatggcccatccccgccagctgcctcttcctcccacccactcggtgtcaggggcggccgccgggtggcggaacccgctggggactgccgggagagtgggttccaggttccctgctcgtgggcaggtgggacgacatctgaggccgaggaggaaggcagggggctgggtgacaggcaccgaggaagccccaggacgtcagcgtcctctcctaggcgggaactcagctttgggggtaccaggccacccccagcgatggaaacccgcccggggcccttggctgggtactgcgaacccaagtggccaaggagtaaaggctggcagggcttgacgaagttagcaaggctttgaggggagtttgctgggagggagagcaaaacccccaaactcaagcagcgaagccctggcgcgaaaatggcttttcacttctccaagcgcaagtctctctcgctactgtgaacaaaccttgaggttcgaaacagctgcaaataatcaagtaggcgcaaatttcgggaggggaaaggaggggcaaaaggtaagaaaaggggagaatctttttcgtttcttcttccttttcccgctcctggccttttcctaaatatctgcgctccctaaagcaactgatagctacctacgtttgtttatttatttagaaaggttcaccccccccccaccaccaccccccaattgctcgattttcttggcagcttgagggatccaatccaggctgccctgcttggctcttcggtgcaacaggaaatgtagctgcagatccaattaaccattttccagaagagaatttcttttttttttttttttaaatgaatcccagtggattgaagcgaccgtgttcaggtgtgaggctatcgggtacctcgcattccttccccggtaatcctccaattcctgcgttggaagttcgcaagccaagctgacctggaaggtgtcaggagccgggtgtcca

SEQ ID NO: 17886 - DNA, 1100 bp, Homo sapiens
aaatcccatccacagttcagcagcctcaaatattgaaattagacaaactcgtggagatgagaaagaatcaacaaaaagaaagcactgaaaacccaactggccagagtgcctcttctcctccaaatgatcgcaacacctctccagcaagggcgcagaactggacagaggatgagatggacgaattgacagaagtaggcttcagcagatggataataacaaacaccactgagctaaaggagtatgttctaacccaatacaaagaagctaagaaccttgataaaaggttagaggagcagctaactagaataaccagtttagagaggaccataaacgacctgatgcagctgaaaaacacagcatgagaactttgtgaagcatacacaattatcaatagccaaatcgaccaagcagaagaaaggatatcagagattgaagaccaccttactggagtaaggcattcagacaagattagagaaaaaagaatgaaaaggaatgaacaaagcctctgaaaaatatgggactgcgtagaaagactgaatctacaattgattagagtacctgaaggagatggggaaaatggaaaaagctggaaaatacacttcaggatattatccaggagaacttccctaacctagcaagagaggccaacattcaaattcaggaaatacagagaaaaccaccaagaaactccacgagaagatcaacctgaagacacataatcatgagattctccaaggtcgaaattaaggaaaaaatgttaaaagcagacagagagaaaggttgggttacccacaaaaggaagcccatcagacaaacagcagaccactcaacagaaaccctgaaagccagaagacagtagggggcaatattcagcattcttaaagaaaataattttcaacccagaatttcatatccagccaaactaaacttcgtaagtgaaggagaaataaaatcccttccagacaaccaaatgctgagggattttgtcaccactaggcctgccttgcaagagctcctaaaggaagcactaaatatggaaaggaaaaaccagtaacagttactgcaaaaacacaccaaaatataaacaccaataacactat

SEQ ID NO: 17887 - DNA, 1030 bp, Homo sapiens
tatgcttttctcaattttctattatggagtcacgtagccttgtaacttaaatgaccctctagttgcagtccttgctgcactgtctccatgaataaataggatgtgttccatcagtaccttcatcatctgaaattcctcaatagatgttatgatgcaattctgggaccttaggcaggaggttaagggaggaagggagacaccaccaatctacttctgcaggatgctgctatgaaaatggccctgagtaacagctgcacattttcacagatccccctgaaacagaaaatattcttcctgagtttgggtattgaattactgtgggtttttaaatgagagtataccgagtcacctaaccctgatcccatagctgccactgagccacccctctgtccacactgggaagggtgttagcgcaaagccaccacagctaggaggatggctaactgacggcacctatcccaggtttcttggctcctgggctccttagactcctagctttcaaacctcaaggtcatgtcaaaaagaattctgaaagtttgcatcaaatgcttaagattgtctctcaactaccccagctttccgaatgagtcctaagagtaagcagcaaatagtgaacggcagtctttctcctgttgaaggctggactggaatttcgagggcttttcacaccacacacccagtggaacttccctagcagaggttttagtaactgatgagccactggagccctagggtccaactgtgtcttaaggagtctacaggctccatgtaagaatctccccagcttacatgtttgtcctatttaatcactcacttagcaactgctgcatcggcttgtgtgccaggggttgtgcaaggccctggaacacagtggtgagcaagacaaacatggccccatttagggacagcctgcaggctggtataaaagcagacattcccttttgtcttcctgcaagggaaagaaaagctccctgtttggtatttaaggaatagtagaaacacaagtgacttctcacaaccctgcatataa

SEQ ID NO: 17888 - DNA, 1047 bp, Homo sapiens
ctctccctcctcacccccagcccctacacccttctcttcctccctcccttccttttttccctgccctgctccagtctaaaatgcttcaacaggttgagtttatgatgaaagcctcaaaggagaaagatcttaaacacatctgaatccatgatcacgaaaggattgttctttgttcctcaccttactccatactcaccaaataaactcagctggaagagacacgaagagaaggttgtgcatagttagtacttttatctttctccaaagagcaacctaagccaattcctcagagtattggggtgacagagtttgtccacactctttggaaagatggacttgtgcagaggaaaaggtggagaaaggtctgtgttggaagaggcagagtatcccagttgacctacatggctgcccttagccaaagccggaagaattcagtttaccttcctaactagattgtatgtgtaggttgattgccaagacgactcagagaacccacggaatcattttaagaaaggtgctaggaaagggccccaggagaacacacctaatgcttccatgtgaatggaaagtgggaagaaccaactttgactcatgcagttaaagatcttcttttgtgatcacaattccctttgttcttttgtttttcttgggtggtttttgaactgcaagtgcagagctcactcatctgtgcaaatcctctggtatggatttttaaattaatttttcccttcatctccgatcttttctctcattctcctacacacacatcatagataaatactttaatgatggcttacgtttttgagtatgtatctctgaataacaaacaatattgttttatatatttatgtgtttaaaatttgtataaatttggccgggcacagtggctcatgcctgtaatcccagcactttgggaggctgaggcaggtggatcatgaggtcaggagttcaagaccagcctgacaaacatggtgaaaccccatctctacttaaaaatacaaaaattagccaggcgtggtggcgcatgcctataatcccagctactca

SEQ ID NO: 17889 - DNA, 1030 bp, Homo sapiens
tggagcaggggatccatcctgggcagtctgacttcagagccaatgttcttgaacttcaccctatgctgcctccagtaaattgagttcaggttccttcagggactcgacacagttgaaaatacagtccaacatgctttgtgtaacatcacaagcacaggtggcactaatacatgtctgtgctttttaaaaatatgtaataagacaatcttgtgtaagaattcccacatgaaacacatacccttgattttctccattagaaaatatattcttcctgttttatagacataggaacagaattaacttcatattttgacagatttttttagagatctaagatacaattttgtgtaactaagaacataagatgggggctgtgtgtatgtgagtggaagtggttgtcggtgtaggggaggaggatgggaatacagggacgtgcaaagccctgaagccgtgctagcgatctcagtcctcccttcccacagattaacaagcccgtggaggaacactggaacacactggggaattctttcttagtagtgatttttttttgctccactttgtttcatattagtctcttaccacataggaagatgaaattgtcacacattaatctgttacctcactggaattgtgtttgtaagtttttgtagatatcagatatgtattatgttaaaaaaataactctctgacattatgattataggtgggtgagctgaagattcagaatttttagtatttcattaagattgcagttacacagccaggattaaaattcatgaatattttatttcctgctcagaatgctatagttcttgtattcagtttgtttcttataattatatgtaacatattttgcttctgctattggtgaggtttcaaagctgttcaattccagctcattttgtttatttctaaaaaggccatttgggggaaaatttatcttgggtacttggtataaaacacttctttggttgttacagtcatggcagtgtttcatgctgcccagatacgtctccatgtgtcatttgac

SEQ ID NO: 17890 - DNA, 1053 bp, Homo sapiens
tctcattgcttgtcttgtttcttgaaaccgttgttttatcctttgttctgtgggctgcttatctgtttgttttgggttatttcaggcaagaggataaatgtagttactagacttcatcttggccagaagcaaaagttgtaacaacaattatttattttctacctcagggtcaattgggcttcagctgatttaatctggggtcattgagagctgtttgggctaagctaatttctactggactttagatatatatatatatatgtacatgcaaatacatatgtatgtgctaggctaatttctactggactttatatatatatgtacatacaaatacatatgtatgtgctaggctaatttctactggactttacgtatgtatgtatgtgtgtaatacatacacatatacatgtatgtatgtgtgtttatatacatgtgtatgtatgtgtgtatatgtatgtaggcatatatatatgtatgtctatatacataaagaaagaaggtttaatttagttgaaagtagaaatcagcaggtcagtagtagccaccataatcttttgggatataatgctactaatttcaaagaaattatgggtatagtgttgaaatgtatatttctaaaagtaactatggaaattatcatttaacatctttgttttttattttaaaattagaagacaatgtatataaaaatatgcaagaatcacaggaaacccacatatccaaccacctagatgaagttgttgctgctgttagcatcactcatagaaagaagttccaaaacaagctgcttcagacagcactattccagcctcctcgagagaaactccacctctgtgaagagaaagcaaagtcctattccaacagtcatgaggtaaggagacttttgtttctgtatttctactctgagaattgagctatatggtataatcaagagaagtagaatgttttggattacattcctaatctcagcagtttgatacaagaaagtatataagacagtgcctttgttataacatgaatgaatgcagtacctctaggctccaagcacagcag

SEQ ID NO: 17891 - DNA, 1050 bp, Homo sapiens
taagaaaatatagttaaatctattgaagatgttgcattcctgtttataaaaatgtatgatcactttttaaaatgcaggcttaggtttccaaagcaacagcatttgcttcccactgctgtagactgtggtcagtgaaaggcaggatgatgtcatgggaaacccccaaattatgagaagaccagggtgctaattctggctgtgtgatgtgcaactgatttaggttcatttcatcgtctttatttataaaatggggatgataatagctaccctctgtaccttacatggttgtaagggccacatgagataaaacatgtgaaagtataaagtgttatgtatatattagttggtattgcccaaatcacatgggtagttgggacagcacaggttcttgaatctcagattctccatctctggctactgctctttccctagactgcagcacctgttgaaatggtcatcttatcagccagtggggttgaacagatgaggaagcataaggcaagaagttattagaaaaaagttagccaacatcttaggatctcaaatagcactgtgtctctgtacaacagggtgtaggcaaagctttcctgttaaatctgaagtattgacctttaacgtttttatttatttatttttatttgtttattttttatttatttttattttttttgagacagagtctcactctatcacccaggctggagtgcaatggtgtggtctcggctcactgcaacctccacctccctggttcaagtgattctcctgcctcagcctccagagtagctgggactacaggcacatgccaccacactgggctaatttttgtatttttagtagagatgggttttcactgtgttggccagggtggtcttgaactcctgaccttgtgatctgcatgcctcgacctcccacagtgctgctgggattacgggcgtgagccaccatgcccagccgacctttaacatttttaggaggtacccaggaatgagaacaccacctacattgtagatcagcctctctagcattctcacagtttgacctttggctgat

SEQ ID NO: 17892 - DNA, 1035 bp, Homo sapiens
agaaaatttagaaaattttcatcatcctagaaaatttagaaaattttcatcatcctaaaaaaatactttgtgcccatttgcaggcaagtcctggtttcctatccccagccccaatcactaaaaaactttctgtctataaatttaccttttctgggcatgtaagtggaattacacattatgcgatcctttgcatctagtttcttttacttagcataatgtttttgaggttcatccatgttgtagtatgtctcattacttcattcctttttattgctaagtaataatccacattttatttaacagtaccaattaacagacatttggatttcttctagtatttaaatatagtgtttaattgtactaattgtaattgtattacagtaaatacagtacagtatttagcattatgaataatgctgctatgaagatgggtacaagtttttgtatgaacgtgtgttttcagttttcttgggtgtatatctacgagtggaattactgtcatatggtaactctgggtgtaacttttcaaggtgttgcacaactgctttccaaggtgaatttcccattttacatttccaccagagtgtatgagggttccaatttgtccacatcctcaccaacactccttatgatctgtcttattcattgtagtcattcagctggattttaagtggtatcttattacagctttcatttgcattttcctgatgactgacgatatgaagcatcttttcatgtgcttgttgactatccatatatcttcttttgtaaaatgtctttcaaatattttgcctatttttttaattgagttgtcatcttgttactgattgttttttggtttttttggtttttgtttgtttgtttgtttgtttgagactgggtctcgctttgtcgctcaggctggagtgcagagtgccacgatctcggcccactgcaatgtccaccttccgggttcaagcaattcttctgcctcagcctcccgagtagctaggattacaggtgcccacgaccacgcccagctaattttttgtattt

SEQ ID NO: 17893 - DNA, 1008 bp, Homo sapiens
aaaaagttcactattatatttattgtataatgaagaaaaacaacacattcagggaaaaattgagattaacttatttttcttaaaaggttcatctcaaggatggcaacaaagtccagcttgtgccgccaaacggttttacatgatcaaaccgtgtacagcttcttgtgtgaactgttgactacaaacatttaccaaatacataaatctcttttaaaaaagccattttaaatatagcaaagcagtgtcttcttgcacagcaaagtgaagaaagtttctacagagaaatagaagttttacatttgtaaaatctttttcacattctaatcatctagcttaagatccaatgccaggagttttcagcttccttatttactatgtatttcttgtgcgcatgatggttaatacagaaattatgttgatgcattactagttatccttctagttaaaggaaagggtaaaacatgtattgttcttgtagaacaaacccctgatttagtctataacaaaatggacataattgggctcaaaagatggagttttgattgggaccacctgtgtacacacaacagtgacttccactcgcggtggagtggccattagagtactgaggaaggacagctgttggaaactgtactttaaccagtgcaatttaagctttttttgcttttgttctttagtaataaaatacttctggagggataaaattttcttgcaatggtgtctcatacaaaacacgagtctaaaagggtaagaaaagacggttctaaagcaacaccattagcgtcgtcccctctctaggctggtttccacccagagatgtggatgtgggtgtgttcacacgtgggcgtctgggtgagagatgtctgtcaagtccatatgctccatgccacactggacgtatgggaaaaaggttaacagtcaaatattcagttcctgaaatggaatacattgttacttggtcagtgtaatttaaatacaaactccgagccttgagtagtagtattttag

SEQ ID NO: 17894 - DNA, 1204 bp, Homo sapiens
tggcccacttggggtactggcctcacaataagaaaagttagatccattgcctgaatcgcagtaactgtagaatcagcatttacctgcccattttcttggtggagaatcaactggatttagcctctgagccagtgaaccaggccccttgtgttggggtgatcagacccaacaccaggttgtgggggccacgaagtccagcagagtcaaaggattgagaaaaagacagtttgagaagtaaagtgggactagggggccatcgcgatcgtggaggccgcaaaggctccgagctttgggaacccatgctatttattggtaatccaacaaagaaacaggtggtgagaatgtggaggtcaaaagggcagacacatgatctatagctgttatggtttagcatttacaaggaacatgttctgctacttgagataatggaaatacaattgatctaggagcctaggagggctagaagtaaggagccaggaagtctagacacattctagaggacattatgtcgcacatgcaagcactgcctcagctttcttcccaacaccttgcctttgagtaacagagaccgtcaggaaaggagcctcccttacctgcttccttcccggcacttaaggccttgggacaggtcttccaagcttatttccagagacaggttatggctggtctcaggccaggcgggggaacagggctcggagagtgtggatagcatccaacttgcctgttctccaagtctggtgcagtggagctgctgtgaggaagggcagcctccttgctcctgcaccgccagtcacaccccactgcccctggaaggaccagtgtggtgatgaagtgcagctccaacctgtgacctgtaccccttcccatgcctgctcaaaacttgcacagagactgccaccacagtgccagtgaggaggcagggagtccttaccacacctgggggagactttctcacacctttggaaaacactgggttgttgtacatcaccatttcactatcctgaataaggaacatgggctactttccatctattcatccataacctgccagaacaccaattatataccaagaggtgatgggataacatgacatggcccctgtcctcaaggtgcttataacctaatgggatatgacctatgccagggctgggcgcagtggctcacgcctgtaatcccagcactttggaaggctgaggtgggcaga

SEQ ID NO: 17895 - DNA, 1039 bp, Homo sapiens
gagacccctaatagcttgaacacaactgtcatccccaatggctcgatggcaatgggtacagttccagggcaagcccccagactagcagttgcagtgccagccgtcacttctgcagacagccagttcagtcagaccacccaagcggggagctaagctttgtttttaaagactaggcccagctttagcaattggctgttgatgtgcctcagctgtcactggcgatgtcctaggggtgctgcattttgcttccggggaaggatggacacttttcagaagtcactgcagtattcccaattgcactggccctgggcatggccttacccagtctaagctggcaggatctaaaacagcagcgacctcggcccctatccagagaggtgcagcaagagagccatttccctgtgacatttagtggactggccagttcatagcagcactgtgaggacccccaagttggacgtgctcggagggaaagatttatggcctctgtcgagggacctgcagcgtgagagccagtggcatctgcgcggcttgcctggctcttgctgtatcctcacttcctgtggagcggggattggctctgagaaggagtgttctctgtctgcctggcaaaggtgctgtggaataggcttggcatgccaccctgttttagagagtgacagttacagttgtaacaagcctacttcatattggccccctcagttagcctttttgaggcaatgccatttctagagttgaaaaagccctggacccaaactgcggcactgttgaataaagggcagtcctactcctgtccttttagagtggcttagtgtgacacacaggcatctcccaggccaagcacacacaggctgcgcccagttccgcaggagccgtcccacagcgtggctctctggattctcccacttgtcctccttggaaggagctcttgctggccagtgtttggaggggaggatgagtgcctgtcactgaggcctcactatggttggcgtctgaagctgggcggtcgtcaggcctgtgctgagagccgcagcccctg

SEQ ID NO: 17896 - DNA, 1421 bp, Homo sapiens
gagctcggacgcgaaggctggccccgtccccgggctgccgccgtggtcctgcaggtgaccctcaaccccccgaggaccgccggccgcctcccgcctccgggcaggctcaggagcgcgcggagcggggtgtgggcctgtgaccctcgaaggcgtgggcggggagtagggggtcgagctggggccgcaggctgtccccgtacgggctgctcccctgtggctccgaagccacctttttctgaagttgtcagcccgcgtgtttgagatttcgtttctggaatctcacgcgaacaatctggagagaggaacaggggtcttgcggctttggctgttgactcaaggggaaaataaaaaccagacaatggggatgtaatgaatgcaaagtgacccgtgagcaaactggacgcttttctccggctgacaggcatgagttctccccgtagcttgccccacatactgtgagttaaactgtgtcaaagtaagagcagtttagccccacagttctgagcaagagtccttagcgctgaccttcttagtgaagatactttgcaatgtgtaaaatattgaatacaaaattattgtgcaaagcttctgagttgaagattctgagtgcgcggaggctggcggcagcccttacttgccattgcaaggatctcaacttactactctgagagcaaaagtagttgtttctttacagatgtgggtttaggggagacagctatggatgaggaacaggggcggggttcgttttctgcacaaaacgtatgcgattagaaaaaacaaagggtttttattctgcctatcttcttccatctcagccagcataagcacattcttttttttctgttgatgatgtatgctgagtatttgcagcgattaggaaaaggaatactctctaacaagacacttctctttaaacgaggcggtggagggatgattatgtcttctgtggaattaaccctccggcttgattttcagtgaagaaaatgaggcacgaggaattgttaaccaagaccttccaaggcccagctgttgtgtgtgggactccgaccagccacgtatacatgtttaagaatggcagtggggactcgggggactcttctgaagaagagtctcaccgtgtggttttgcggccccggggcaaggagcgccacaagagcggtgtccaccagcctccccaggcgggagcaggtgacgtggtgctgctgcagcgggagctggcccaggaggacagcctcaacaagctggcgctgcagtatggctgcaaagtaagacacccctcaggggccctgccccgctccgtttcaaggaacacggggaactcactgcagggtgggtgcccttgccgcccttcttaaccctgccaggccgtcaggagaggcctgctgtagcagccaaggactcccctatttagccagaattgg

SEQ ID NO: 17897 - DNA, 1050 bp, Homo sapiens
tttgggttttaattgcctggctcttgatcgaagtaagacttgtgctttgatcagatcaaaaccataaattttccactcagtggtaaaatcctgtctctactaaatacaaaaaattagccgggcatggtggcgcatgcctgtaatcccagctacttgggcggttgaggcaggagaattgcttgaacctgggaggtagaggttgcagtgagccgagattgcgccattgcacttcagcctgggcaacaagagcgaaactctgtctcaaaaaaaaaaaaaaaaatccactcagactctttttatgggggaaaacaatgcttccccaccaagtctgacatcatcaattatcattacagccctgaagatctctacgtttggaaaatgtgagacaatgggagcaagatttaaagaaatttctctgtgtctgtatctatgtgcatacctaatcctaatcccgaacgagcaccacaccagtcagcctaactctggcttagcccaggcttgagcaaaatgcttccttctgaacatttaacctggaatcaaatcattccccatgggaagctcgcgaagctggtacttctgccgcttcccacgtgctgaagtcccaaagtgagactgtcttccgctggaagcagatgggtttcagtttcttaagggagagtttttattgacgtggtcgcttttatccaaccagctgtgttgattgctctcactacctactccccagcttcttcccgactttattagaagaaggatcaaatatccagaaggaaggaaaaggtagtgcgtttctcctgtcctcagcttgcaggccccgcccctgatgggaagcaaagagagagaccgaagggcaccctcctaggcccctttggagctggagccgtcctcagcagcctgcagcactgctcagacaaaggcttcaggagaatgggttgctggtcagagtttggttaagaaataggctggacattcagagcttgaaattcaaggggaggaggtgagcaatgcaaaatagaggccaggcaagagtgaacttaggcagaaatggtgcat

SEQ ID NO: 17898 - DNA, 1044 bp, Homo sapiens
ccgtagtcaccaaaacagcatggtactggtataaaaataggcacatagatcaatggaacagaatagagaacccagaataaacccaaatacttacagccaactgatcttcgacaaagcaaacaaaaacataaagtggggaaaggacacccttttcagcaaatggtgctgggataattggctagacacatgtaggagaatgaaactggatcttcatctctcacctaataacagaaatcaactcaagacggattaaggacttaaatctaagacctgaaactataaaaattctagaagataacgttggaaaaacccttctagaaattggcttaggcaaggatttcataaccaagaactaaaaagcaaccataataaaaacaaagataaatagttgggacttaattaaactaaagagcttctgcatggtgaaaggaacagcagagtaaacagacaacccacagagtgggagaaaatcttcacgatgtatacatttgacaaaggactaatatccaaaatctacaatgaactcaaaacaataagaataaaaacaattgcatcaaacagtggtcaaaggacatgaatagacagttctcaaaagaagatatacaaaaggccaacaaacatatgaaaacaatgctcagcatcactaatgatcagggaaatgcaaatcaaaaccacaatgcgataccccattactactgcaagaatgaccataaccaaaaaatcaaaaaacagtagatgttgacatggatgccgtgatcagggaacacttctacactgctgatgggactgtaaactagtacagccactatggaaaacagtgtataggttccttaaagaactgaaagtagaactaccatttggcccagcaatcccaccactgggtatgtacccacaggaaaagaagtcattatacaagaaagatacttgcatgtttgtagcagcacaattcacaattgcaaaatcttggaacctacccaaatgcccatcagtcaacaagtggataaagagactgtggtatatttatatgatggaatactacttggc

SEQ ID NO: 17899 - DNA, 1024 bp, Homo sapiens
gaccccatctcaacaacaacaacaaaaaaaaatcaacctttagaaaagatttttgattgcataggaattgcttcgctatcaatagcgatgcacagtatacaaagatttgtggtatgacatcaacatcaaaggaagatgtttaggaagaaagactaggatcatgtgtgtcctttggttctctcgctattttttgtactttccagattttctacaatgtgcatgaattaaatttataagttctactaagcagaaaatacggcaatagaagagataaactaaagtgagtgagaatagcccaagatgccctggagatcagcgcaaagatcatttttgtaagctccaggtcacttgtcagttttcttcatagagaaccatggaatttaattaaatttagaagacattcatgaggtccttaagaagcacgaggctctgtgctagagtctgactttcagaagagatagggagaaggcaaggacttggacaaggaccatccacagcaagatgtgaccaggcttttgtggatgaagagaggaaatctggactctgagtggccccaaatacagttatttcaccagggagtgggatattctctacaattctgtgaataaaattttcttggccaggcaaagtggctcacccctgtaatcccaccactttgggaggccgaggcaggcagatcacctaaggtcaggaggttcgagaccagcctgaccaacgtgaaacgccgtctctactaaaaatacaaaaaaaaaaattagccctgcgtggtggcaggcacctgtaatcccaacgactcaggaggctgaagcaagagaatcacttgaacccaggagacagaggttgcagtgagccaagatcacaccactgcactttatcctgggcaacaaaagtgaaactccgtctcaaaaaaaaaaaaaatttttttattttgttcacctaaaaacaaaagttgacaagggaaaacatcacacaacttggttcaacaagacttgatggaagagtctcttttctcagggtcttgaag

SEQ ID NO: 17900 - DNA, 1441 bp, Homo sapiens
aatttattggtaggggacaggatgaagaaatccaactaaatagtatacagctccactgttttctcatttaatgaaccaaatgggggtaggaaagtacaaatatgtaaaataatagagaatagggaaataaagtatagaggaaattaataagtcataagagattacattgctcggttctgtaaataagtttaaaacctgtttgaaatgaatgattgaaaaaatttcccaatcgtgcctctatataaaatcaacacagataagttattatagaagcatagaaatactcctaattaaagcaagaataatactgataccaaaaccgaatccaacaaaggaagcataagaacaattacagagcattcttaggaataattttgcaaaagttctaaatataatattagcaaacaattcagcagcatattaaaataatatgctatcaccaagtgaggtttattctgagatgggaagatggttttatattagaaaatatattaatataattatactgttaatagaacaaggtgtgagagcaagaggaaactatgcccttagatgctgaaagagcatgcagtaaaattcaacctttattcctaacaaaactcttcatatgagaataatgtatatgtctttaatatgattatattatgcataaaatatgttatatatgagatgttattatacactctatataaccgtaagcccgcattatattcaacagcaaaacactgtaagcattcttgttgtaataaaaaacaaaacaaaggtgtacattctctccaggaatatttgacatttttctgatggtgctcaccaatgcatttagaaaagaaaaatgactacggccgcaccgccccaaatgtgtctgatcttgtctgatctcagaagctaagcaaggtcaggtctggttagtacttggatgggtgagaaatatatatgtttataccataaacagttcaaaagagtaaaactattactgtggtagatattattgtgatattattatttatcttgaaaacctaagagaattaaccttgaaaatatgacatattataaaaggattcaggaagttgggtacaaaattaatacatagaaatcagttgcctttttttaattatactttaagttttagggtacatgtgcacaacgtgcaggtttgttacatatgtatacatgtgccatgttggtgtgctgcacccatcaactcgttatttaacattaggtatatctcctaatgctatccctccccccctccccccaccccacaacagtccccagtgtgtgatgttccccttcctgtatccatgtgttctcattgttcaattcccacctatgagtgagaacatgcggtgtttggttttttgtccttgtgatagtttgttgagaatgatggtttccagcttcatccatgtccctacaaaggacatgaactcatcatttttta

SEQ ID NO: 17901 - DNA, 1051 bp, Homo sapiens
cctgtattccatgcatactcttccttacctcctttgtggagtagtagactgatttcatcttgatagtccaggtcagtcaccccagtcaacactgtaactcccttcttggcctgttgacttaaaggtgggaggagcccaaagtgtccaggtgggtaccaatcttccagtttaatggaatcattgtgtctcctggtggcagcatttctccctctggaactaagatctccaggccagcagaatgtaatgtcgggggaacaggaagcaaaaattttgctaggggatcactaggggtgatggtgagtggtgtcagttcagtttcaccccttgattcctggaccgtgaatcctggctatgggagaaacagtaccgtatattggatgctaattcagaacatatacggcctgctggagaactttgcctcagccctgcaaagtgttgtcacctagttggcattgtaattgtgacttcaaaaggccattccaccgttctttgcagcctcttcaggatgatggagaacatggtaagaccagtgaattccatgagcataagcccactgccacacctctttagctgtaaagtgagtgccttggtcagaggcagtgctgtgtggaataccatgatggtggataaggcattccgagactccacggatggtagtcttggcagaagcatttcgtgcaggataggcaaacccatatccggagtaagtgtctattccagtgaggacaaaccactgccgtttccatgatggaaaaggtacaatataatcaacttgccaccaggttgctggctgatcaccccaaggaatggtgccatatcaccacagtcattcccaaaagaaaccccatgcttggtagcagtcattccccatctccctcttaagccctaggtaaccactcatctaatgtctgtatctacaaatttgcctatctggacatttcatgtaaatggagtagtataatacgtggtccttcctgacaggcttttttcccttagcatagtattttcaagtcatgcatgttgtcacatacatcaatgtttctttttattg

SEQ ID NO: 17902 - DNA, 1083 bp, Homo sapiens
tagtttgcaacttaggaaagatgataataagcacaggtcccattttctttccaagagctttctcctgaatcaagaggctctgccccatcgggccactgcaagcatttccagtagctgatgaagttctaggtggtgtgtcatgtatacatttgtaatgtctgcttaattaatgtccttaatagatgaggacaccccaggacccgcttcagggttgttgggttttttttttttttttttttttttttacctaaaactgttcttctttaggaaacaagactttgtgctataatgatgacatatgaacccgtttatcggtatgtcatgtacaagacacaagttagctctacatacatcgtctcatttaatacgcaaaacaagctgtgcagaagatgagagggaataaggttacaggacacctctaagcacctgcagctgacaagaggccagggcgggagctgacctcacttccagagcagttgactcacagaaaataagcagctattgcctggctgccaacacttgaagaagacagaccgcatgacttcatgggtgtggagtgagggagcttgaagaagaactcaggaaactgggcctgatttttagacagcctcaaaagtgttttgcagaagaatgaagttctgatgccaggtcttatgtttcttccctgtgatgggaagagcctttgaaatctgcatttggccttctgctgtcgcaagttcaggtgtgcgtagctgtgtgaaggtgggcccgggcatctctggaatagcagcctcagatctgcagcttttagtctaacagcctgacccatcctctttgagctgactcgtagagcaacatgtgatgctctaaattgtagcagataacaccagcccactcagatgaggactcatttgaaagtattggggagccccatcattgtccttttttaaaaagaacaccacctttggggaccgtgtaatgtagctgcgccatcagctcgccagcagaattcaagagaaacacggcctttgcaccctgaattttccctgcagttgagggagaggggagacctgccctcctagaaggaacgtgtgcggctggagc

SEQ ID NO: 17903 - DNA, 1040 bp, Homo sapiens
tatagtataaaacacatataacctacaaaacatgttaattatgtgatcagcaagacttccatttgataataggctattaatagttaattttgggggtgttaaaagttatatgtggattttctactacatgtgaggggtcagcatttctaacccccacattgttcagaggtcagctgcacatgcaggaggcccgcattgatgttactgtagaggccctgtgttatagagacagtcataaaaaatgaaggaccacatgtggggtcctgccgcatagcaattggggattatttaggtagcaaattgtgtacctagtggattacttctctcctttctcatgtcgttcaaaataatgacttaaaactgaagaaaatcagttcctgtggtcatatttttaaatcagggaaagttcaaggaaatattagctataacaggtggttggagtaatgggaacttactaagaggtaaagagaactctaaagaatacaggaagagcagaagcaggtagcatcctgtgtctttaggtctgaggcagagcacccaaggaaggaacaaatcttgatgacagtgactcacacacagctactgtgaaggacagacagtagctgctaccacagttttgtccagggatgaaattccttggaccttgttagagagggtgcaactggggcccactgaatgagggagaggcttgtagaggttctgtactggtggaactctctgggaagccacacttaagatgtcagggaaaggttccaagggaagaaactgcatctccaaccaggataggaatctatccaaaaagttggtgtgcttggaagctacccactggagtacaggagaatgctgtccacagggaggtggaatgcatcacaggccactgaagaagcatgctgagagaagccacataccaggaccagggagaaaagcctgttcctcctgcattcaggttacatctagtatcctttcatttgaacttgaaggactccctttagcatttattgtaatgcaggtctagtggtaacaaactttctccatttttt

SEQ ID NO: 17904 - DNA, 1108 bp, Homo sapiens
ttttaaaaattgaaaaaatacatcatgaaaacattcattgtgggaaaaaaacaggaatcgctatattaatatcagaaaaagtagacttcagaggaaagaagattgatgactggggcaaagagggacattgtataatgataaaaaggtcaacccaccagaaaagatacaacaacctttaacgtatatgtaccaaaataaagagattcaaaatacatgaaacaaaaactaacctgagagaaaaagtagatgaatccacaattatagctagatgaatccacaattttaaaaggctattttcaaaacctccctctcagcaattgataaaaatattagacagaaaattagcaaggatatagaaccaaacatcaaccaacaggatccgacggacatttatagaacacttcatccaacaacagcaaaatacacattcttttcaagctgtcatggaacattcagcattatagactatatcctgaggcacaaagcaaactgtaacaagtttaaaagaattgagatcgtgtaaggtatattctctgaccttataatggaatcaaactgaaaatcaataacaaaaagacaacaggaaaatctccgaacacttgaaaattaaataacacatttctggataaaccataagagaagaaacttcattggaaataaaaaatacatagaacggaatgaaaatgaaaacccattttatcaaaatttgtgggatatagctagagcagtgctgagagggaatgtatagctgttaagtgcttacattagaaaagacgaaagattgcgaatgaataattgctaagttcctacttcaagaaattagaaaggcacgcgtaaaatggtacagccgctctggaaaagttccttttaaaacttaacgtatggcccagcaattgcactgttgtgcatttatcccagagaattggaaagtcattttcatgcaaaaacttgcacatgaatattcataacaactctattcttcttaatagctcaaaacttgaaactacctaaatgtgctccaatgggtgagcagttaatctgtggtacagtcatatcatgcaataccacctagcaataaaaatgaatgaattatgggcacacacagcaa

SEQ ID NO: 17905 - DNA, 1064 bp, Homo sapiens
cacggaatggacccaggacagatctaggcaagcaggcaacccaccagcagacagtcatgggtggtggctgctcttgcctcaaatgtttggcctgagtgctccacctagtaggcacagcacagacatcagatgggccggcattgaaaggaaggtatgcagagagagaatttctgagaatgtcataactgtttagaaatcctggagggagagggagcattcttttgttctagctgggattagggcagttgtgttcacataggggttggccttcctggaggaacagaaaagggggtgcctccccccaggaagggatggagccttggacaggctccagacaggtttcccagcaggttcctgcctgggcctcatccccagttcctgcttagcaatcatggcctcaggcagtcttcccttctctactgaagggtaattggttggtggtgcttgaagcattgaagggttctcacgtttccctcagcggagcttggagtgattcctgaatacgtttcctctgcacttggcccctgcatcaaagtccgtgtgtgagcgtccactgggcacggcagtcttacccaaattccagagttgttcaaaacgtgcaggccttatttccttttatttatgtatttatatttatttttaatttttatgggtatatagtaggtatatatatttataggttacatgagatactttgatacaggcatgcaatgcgtaagtcacatcagggtgttttgctggtgagacttgcagggttcttcaccttgacaagccacaaacctcctggtgccttggctgtgatagaatgagcttgcgactgtggaggacccacggggcagctgttgctctgccccactcagcattgcctgatttcttgcttcctcccctctccctttctctcacacaaataaaagcagaatttccttctggcccctccccagcagagaatcttggatgggaggtgcccccgcagtgaccagagcagcaaggagcatttgtgactgtgggctctgtctaaatggccctactgctgtctgcagcaattctcacagtcctgcattcac

SEQ ID NO: 17906 - DNA, 2598 bp, Homo sapiens
ggagttgtctatagtgcacaagctcagataatgaaggagaatcggtcatactgaaatcaaggctagcagtgaggttccttctgccatgacaatgggacagttacaaggctggagctatcagaagaacgccagacattcgggccctaatccatctggtagatgttccagacgagatccagacatgaaatctaacaaagagtccaggaaaatcgtcagctcatctcacaagcagctgatcttccacatcaacatcttgcttcactttgggaagtttgcttcaccaacttctggtttaattgctggcctcgccagtctgtctgatttagtattgctactgcgttccaaacgcaggcatgagggctgcctctggctgtagccggaacctgccaggcacagtgcaggggtcaggaaacagcagtccacattcttgggttgttatgtttttggatgggagattctgtattgagagggttggaattagtctttatttcatgataccaaatggaggtgtaaaagatctatgggacaatagagcagaatgggcagttgtttcctcctaaaagagagttgtctctgcagggcagtaatgaacttgtcacgggacagtgcaacagcaaagctttactctttcatggtgtcgttgtgctcatagtgataatcgaggaccgtctcaggaagtgtgccgtgtcgcttgtgcgtatttggaattgggatgactagctaaggaactaatacagataccattaagaaatgatttcagcctcctgcgtggatggtgggccgagcaagtgaacctagaacattctgtgatttccagtgcccggaagaatagagcatggccaggtcagcagtaccattaagaagtggccaataaaagtgcgtatgcaatcccatgctcctccagaagatagtcttgaaggatggatcccattttattcctttaaaaaatttattttgccttttcaagttttttattattatacttttttaattaaaaaaacataattaccacaattacataattactacaaattacaaaggactacagcaagactagaataatgaatgaatcacttcagcctggaaagcagatactcccaataatattaatgttataatacaagctcattcaagtattttacatttcttttgtccctttttttggccttttaaatatgatatcttagcacatagcaaagataatgtgcgatgagcataaggtagaaccttcttcacaaagccagatgacaagttttcctctccagtgagaaatgggttctaagttcctatcttccctgtcgacatggctgaagggggagacggtggggttggggaaaatccagggactcttccacatgggagctactccggggttccattcaggagggcgccagataactgagataactctatccaggcttttttggcaaaacaaacaaacaaaaaacaaaaacaaccctcactctccgtaactagtcatctttcttgcccctcctcactttcagggccttctcagcagcttgctttcttttgtaaattcatcagaaaggagaaaaaaagagctaccatggaacaaaacaaaaacatttaataactttgacataggggctcagcacctctatctgaccctcaggggtcccggctgggacggggccagatggcccttctctactggtagtgcgtgtgctcccaggtgcaggagagggcaaaggagaaacctgccccttgacagggctgaggcacacagaccttctgatgtttgatactcaaaggttatgttggcatggatcagccttggaagggataggatgaatagaaggatctaggcaggcttttgctttgcgtctcaggtcttggatcccattttaaaatgattctcctgccttgtcttcaagttttgtttggtgagttgtttatgttagaccgagagagagtgatttaggaaaataacacagctcttttctgttcccatgctgacgggcactggcatgggatgttcccggggtgtgtgtggtgtgtgtgctgtggacggggaggaagccgtaaatgcttctttggtcttagaccctgacagagtggatgttgacatcgattttctgagcaatcatggtgatttgtcagtatccatcaaatggagaacaccatcaacaaatggcttttatatcatgtttttcctcttatcaacccaaaacaaatccagtttttagaaatactaattttcagaaaacagagagagcttgttacatttgtaagcatatactctgctgtgccaagtccatctccatggatgttcaattcatgttcaattcagttaaacataccaagatacaataaaggccctgcagttgggaccagggaacaggtattggccttgtccaaacagaatagagtggtatatataaaatttgtattttatatatacacactcaagattatacctttgtaaatcatatatatgttaaactacggatatgtgcatatccctcagctgtttttcttctttttttatattatttacaattacaggctaatttaaattggatgcttaactcagggtgctttctaaattaaatgcgtgcacctgattgacaaaaaggt

SEQ ID NO: 17907 - DNA, 1032 bp, Homo sapiens
catttggtcagggagagggaactttgcagttagttctcctgaggctctgtgggtgttttgttgtgggaggaggcgtgtcagcatcttcaacggatcatgtgacctttgagtggttgcctctgggacatcatatgattctttgaggtcaacagagggtggatcctttggactgcagccaggagactgggtcctttttagtttagcgggaccagccttgctgtggttctcagtccagagagaagacttcctgaatgtgaagtgagcatccaggtcaacaggcagaaccactgtgcgtcatagaacagaagccactgaaataagagtgattgtcccatggaccaagacatcagcagagatttgtaaggcaggaatttgcaagggaaggcatcagcaacactcatgtttcacgtcagagttgcagggcaggatattagataagaggcctgggagtccagtcaatggtcacttctgtcaatgtggggagggggtggggagagctacctaggagggagagtgattcatagcctgaaaccatctttgcgtcctatttgcaagctgttgggttgtgcaggacttaaagctgtgctggctcctcagcacctgcagtgtcagtggtgagctactctgttggggtcttcagggatactccataagaaccatcttcccctcccaggcttggaaccagtggtagtcacagtgtctgtgagcattactaccaaggaagctgattggagaagggggcccaaatgtcactgaatgtttcaccttagaatgatccaatttgctccctgaaatttaacggaagcactatccaacttctcttctgcaactgtcacagacaggaccgcagggcaatggccccctcgtagaggcaggtgacactgtgggtggtgagcccaccacagggccccatcctcccacaggtaggcagggagagctggggttggggggctagtgagcaggccagctccttcccccagaccattggacagacaagtcacctgcccttgccaggcagagcattgctgtggc

SEQ ID NO: 17908 - DNA, 1308 bp, Homo sapiens
ttgtctcctctaccccgtggttacaaaatcaaacaggacaaaacagctgtgcataggctgtggagggggcgccttgggagaagctgggatggccccttcctttccaccctggctcagctgctgatggaatggaaggtttcccggagaggcagcagtcagaggagtggtcggggagtccctggggctgccttacgggctggttgcagcgtttcctctgccacagagctgcgaatgccaaggtaaacatatgttttgagataaagtggaaaccccaggaggttttcatcctagaagaggaagcaataagacagtcacgtgttggaccaaggagtcgttttcccccaaacccagctttgcgcaccctgtgtgggaaagttggagggaattggaaaagcagggattatggatggggccaatgagacaggtcacagagtgcaagaaggggcttgaagaggcagctggctctgctccttcccagtacatgactgtgggcccgtatccttcatcttccttactggtagcatcaggactggactaccatatgccaggcggtgtcctggggatcaaatgtggaacgaacgtaaagcatttggcacagtgcctgtctgcctcgtggaaaacggtggctgcgagttttattagctctttctagtagtcgactggctgttgtactgtctttgtttctgaaggtgcccgatacacacttctaatccatctgcaatgcctgtccactccaccttcaaaatatattcccgatcagacctctttgaaccacaccggccattcctcccacggtccaggcctgtgctgcccttgcctgctgggtctcctccctgccacggagcttcctcttcaacagttttttcttacatgacaggcagagggttacttttaagccccaaaccagatcctgtgggttccctgctcagaatcttctaacagcttctgaagacacttaagatagaactgacagaacagtagggcgcccaggacatgtggcccagggttctcctgccaacctctcttcctggtgctcactcccgggaagccacctctgcctcagcctcctccttcccttgccaggctcgcctccatctccagcttggcacccataatcttcctgggcccggcacactctccccctgacatctccataactcgctctcttcccaccgttaggtctctgttcaagagcatctcctcagagagacagaagcggcctctccatttagttttcagttattgctggacattgcgtgtttctctgtcctttgcctgtgtgatgggaacacagacccagcatcttca

SEQ ID NO: 17909 - DNA, 1035 bp, Homo sapiens
agaacaaccagacagaagaaaaggaaatagaagacttaacacaataagtcaactggatctagcagacatacacagaacactctacccaacaacaatggaagacttttttttcctcaagggaacatgggacattctgcaggatagaccatgtgttaggtcacaaattaagtctcaacagattgaaaaggttgatattatacaaagtaccatcactgacaacaatggggtgaagttagaaatcagtaacagaaggaaaactggaaaattcacaaatttgtagaaattaaaccacatactattaaataaccaaagagtcaaagaagaaatcacaagtgacattggaaaatacttagagataaatgaaaacaaaaacacatgtcaaaacttatgggacaaggacaaagcactgcttagggggaaatgtatagcatgtatagcggtaaacacttaaaaagaaaaatctcaaacaatctgactttacaacttaaggaactagaagaagaacaagctattttattccttctgctagctttgaatttagctttggattgctatggattaaagcagagagaaaaggacagaaaaacaatagagccaatgaaaccaagagttagttctttggaaagattaagaaaattgacaaaccttagctagatcgactgataaaaaagcctcaaattactaataacacaaatgaaaacagggacattacgacccattctacagaaataaaaaggattataagagagtactatggaccattgcatgttaacaaatggataacctagatgaagtggacaaattcctagacacacaaaatctaccaacacttaatcacaaagaaatagaaaatttgaagagtcataattagtaaggtaactgaatcagtaatcaaaaacctcctaataaagaatagccctggacattatgacttcattggtaaactataccaaacatttaaaggagagctaacactagtcctcctcaaattcttccaaaaaagctgaagaggagagaacacttcctaactcattc

SEQ ID NO: 17910 - DNA, 1033 bp, Homo sapiens
atcgcttgaaccccagaggcagaggctgcagtgagctgagatcgctccattgcactccagcttgggcaacaagagcaaaactccatctcaaaaaaaagttaagtacccacatttcagctattattagtaacaaaatactttgactcctcataattctctgacacgcctgatatgctagaacagtgagattagcaaacactggtcaaacaataaattgtatggtaaacaggttatgcagggccttgtgcaactggccccaacctgcttctccaggctgtctgtggttttctccccatccactgttccttgcacaactcttggctcttacatattcattcatcaagccccatcttcagtgttagattgtgaagccttcccccatccgttcttcaccattcaattctgcatgctctattctctgtgctttgctctttcctgtgttgtatcatttgtcacattatatttgaaccataagtcgacagtctttccatttgctaagctctttttacatcgttacatcataggcacagcacaaatgttgaataaatgagaagtgatccttctccaggaacttgataatctactggaggagacagatgtgcagagaattataatcattatccttaccttgcacttcctacttgctagccactgttaagtgctcttctaatccttgtaacaatgttagaaagtaggtcctattatcattattattattattattattattattattcttgttttgcagacatggagattaagtagcttgcccaagatcacccagccagtaaagtggcagagctgaagtaatggattcaggtagttgggttccaacctcttctcagactccctacataatttattcctgccttcaagatagaagatgagggatgtacactattaaaactaaaattgttgcagatttggatatgtgtggtaggtggtataagtcacactataaacttatactggagtcaggtcatccaagacctagggtgatgtgctatggagtattgacttttctatacacagt

SEQ ID NO: 17911 - DNA, 1031 bp, Homo sapiens
ctcacagtccagatatttccaagctgttcctgcgtccctggctatccttcagtgacctcagccaggatggaagataaaccagccactgaacacgcatccctgggaccacagcacctggccagcctgaaccacacagcgatgggtcttgggccttcattcctgggacccctcacctggtcaaaaaggaggtggctcctcaaagttaggggccctccaggctgtggtgaaaggctgcttcatgaattgtgcacgaggccatatagagaggggataattccgtggtggtagagataggggcctcgcattagagggcctcgcttttcaagatatttagaaacgcaacggcttatttttgggaaagaaattttcaaaagtcctgggtgtaaataagtaaataaataaagctaaaaatggtctccaagccttggagtggcccgatgggccttccctgagattgtccacatgtgggtgggctctttgtgctagttaacaaagcagtcagttccctcgttgttaccatctgtgttagtccgttttgcattgctataaaaggatacctccgaatggataattcactaagaaaagaagtttattttggctcatggctccgtagactgtataagcagggcaccagcatctactcagcttctggtgaggcctctggaagcttacagtcacggtggaaggcaaagggggagcaggtgtgtcacatggggagagaggagcaagagagatgccaggctgttttaaacaaccccttatcaaatgaatgaatccaatgagtgagtgagaactcacttgtcaccaatgggtggtgctcagccattcatgagggatccatccccgtgaccccaacacctcccaccaggctccaacgctgggaatccaacaccagggaccacattccaacatggaatttggaggggacacacatctaaacacattaccatcagtactatttttgtggactacatgcactcatgccttgactcctgacttccgtgggctgaaagtacagcagcatttttttt

SEQ ID NO: 17912 - DNA, 1029 bp, Homo sapiens
cagatcaacagccctgccaactctgcagtttatgaaataaccacacttcagaaatgtcactattgttccttgcctttctttggctaagtgaggtctgagataacgcagacactgtgcagcagctggtgactctgcaattctgcgctgcccacagaggatgtcctgaagccaaggtccccaagtcctggtgttaaagcaagtcagaacaacactatgctacgaaaccattcacacatgcacatacatgcacctgcatacaagacacatgcaacacatgcatgcaacacacacacaagtgcacacaacacagacacccacacacacacacgcaaggtgtcgagtgtatgtgtgctaatcatggcagaacaggaaaggccctgcccacactgttagggtggtgaggcaggagcagagtgcggggtgtgcgcgtggcttggtctgtcctcgtaaacctggcggaacaggaagggccctgcccacactgttagggtggtggggcaggagcagagtgcggggtgtgcgcatggcttggtctttcctcgtagttacttgtggacttagaaggcagatctgttagttggctgtgtgtgcgtgtggaaggggaagcggcccccggaacacaggcttatgaagaaggtgctgcatgtgcctggatgttagatgtccctccctgctcagtccccatcacatccatgtggtctacctcagtcccaccgtgttgcctgccacacccacccgtgcaaaagcacaacctgtgatgtcatgttcttggttttggaggatgtccactcctctgagctacctgaccccagctcctctcagaggcaggctggcttgttattgttagcccatttcacagaggagaaaatcaaggcttggagagccttggggaattgtccaccgttgcacagcaaggagcgacttctcctgaaccctcgttctttccacaccccacccaggctccggttgcccttctcctggccatacctctgcttggcttcctgatcacattttctcatgtccacaacc

SEQ ID NO: 17913 - DNA, 1035 bp, Homo sapiens
tcctcaggaggaggtgacatacgtgttccatcagctcagcgggagaggatggccctgtgcagccccagctggtttcccagggtccaccagcagctgctgggcagccttgactgctctgcctgcccagaagtcgggtctctgctgccaggccttccctgaagcatgcttggtttccacgtcacacctgatctggggccctggcttaatgccctgtggtgtcatctcaccgccttccccctgagctgagggctggtgcagtggcctttccctctgagtcgctgctgttgcagccaaccaccctgagtggctttgggaggtgagtttgtcacagaatggctccgttttgccccggtgccctgtcccttttcacccacacaagggccctgtccgcacgcggctccgctcgcccgcctttcctggcctcatggatctgcctttcttctgcctccacagcagtcagtttcaagttagaaggaaaatatccacaggccacaggatttgggagaaaatgggatgcatatggacttttgtaggtttgggactaaaacactgcacattgtcttaaaatgaattgtctgagaggacgtcgaattgccaactttgaggacagctgctgtgcaaattgaatccatttgcagattttgacatcagaaacacaattcctatttgggacaagacctcactgtgtttggcttctgaatggtgagcaggtagctgctatggctaatgtcagggtttcgccaagctgcagccacctcagtgagcactaaaaccaaatccaaccgtgctgcagtgattcgtgtgagcccccggcagaatgtccctctgcaggagtcttgatgcttgaatatggctccagaagaattaactgaattgtacatcctgaagtgacagggcaggcctgggcttgggggcagagtgagagagagtgattctgttatactgtctgatattttcctgtatcccactgtacacaccaacctatatgtaaaacccatgagagactagggtaaagggcagtgaatacaaatacca

SEQ ID NO: 17914 - DNA, 1033 bp, Homo sapiens
gctgtaggcatagatgcatagacaacatttttgaactttgcacacaaatgagggaattccttctctcttgggcatgaggaccctggcggggagcctcagggcagaagatggatgtggcttcatgacccagtgaagtgtgtggggagaggttgccagtgggatcccggctttgtggttggatgccagggaccctgcatggaatggaaccaggagagccttatggggcagacagcactggcagactaggggaacctgcagcttgcttccagaaggtgggtcaacttccctgcactgctgttctgggctgggatgagaccggagcgtggatgtggacctagcatcccaaggccttctgtggagacgccacgtgtcacaaggtcatgagacggtccctctttgctgcaaaagcaggcaggcctcaggagccaaggtggaacattccctccactccgggatgtgagggccagggaggagggcgcttgtaaactcacagcttgggccctttgacagttcagataatggaaggaactctgaccctcggatgtctcatcttattcccgccccagccccaacacgccttcatggccctgctgatgagttattgattcctataggcaaagtgtctgagcccctccctgctatttcacaaaggcatcaaagcctaggccctgactgagcccagaagtggacacgggtttctttccccccagcccagcaggctcagagcgctcactggccatctacatagcagttgacctgagcaaaatgattgtcatatttgcctccttgccatgcacttgaaggatcacctagaggtctgggtgttcctgcagccacctccattcactactcagtgtgttcaccgagtcaaatgtacacactagtgagttgccagcaccacactccatctcgtaaggacaacacttaggttatgggaaccagcggctttcagaggcattctccctgctgttagggtctcgtttctcaagacccatcctccaggaaggtgacacacctgcctactgcactgagg

SEQ ID NO: 17915 - DNA, 1106 bp, Homo sapiens
ctttctcacatctgtgaaatttttgttgttcttatagcttataattttcatgtctctttttctttggttgaaatcctgacacaaatagtaggatagcttggttttatttagcagttaatgttgttaactatttcaggaaaataagatgatccaaaatatgattattgctcaggtgtgatatatgagtatgtaagtactgtatagtttgcaaagtataattagttttgtaatcttatatgtgaatatgttgcattagaaggaatatttttcaaatgtcagagtaggattatgagtgattcctcccgtttccagaattttataataagtatatattgttttataataataaagaaggtttaaaaatagttcatcgtaagtgatgtaaatgtttctacttgacggcattttaagagtcgcgtgggttatgggcgagcttatgaaatgcggtttgtaagactacttttcattcatgaatccctctatttcattgtagtcagtctgttataagacatatgttgtggaatctgttcaaaacctggggaggaagtgcatgagatcttatcttcttggcatcagaagtgtactcttgaaagtagaattttgactttttgagatgccactgtttatcctcccacccttcacagctctccctgtctcccttctcccaacccaacccatgcatacaaaaagtcagggtttgtgatttaatttagaaatagaggcaagattagaaaatggaattgtgtggagacttggagatcatgtagcatgcagcagatctgttctaggaggagtaggaagctctggttgtgagtgattgaagaccactgcactgttcagaagcagctgtcgcatcctcttccgttcagcacctgattattatgtagctttatttaatggtgcaaaataccaagtagagaacaaggaacataagggcaaaattaatggctggatagctgttgtggctacgtaattctgatctaaaattagtttagaaattacaattgaaaatgcaattgtgaaatatcattttgaaatactttaaaatgctgcctagcctactgaaatgtttctcagttgaggtacccatgtaaaatgtgtgcgta

SEQ ID NO: 17916 - DNA, 1366 bp, Homo sapiens
ggtggaggttgctgtgagccaagatcacgccattgcactccagcctgggcaaaacgagcgaaactccatctcaagaaaaacaagaatcctctggtatgggtggacaaggatggggtatgtgctggtataacaatgggaaacttttttctctgctgatgactggtgtacgagacagtacttgaaaaaaatcaacctcagtggcagcctgagaaccagtggaccacagatggttggtggtcagcacctgggcagagctgagtggtgtttgtttggagaagtaagctgtggagtgtgggccctgtgttacagaggttttatttaccatgaaatttgacgtttgcttgtgttgatttaaaaatgtatgatttgtttatttttaaaaagataatccacccctccctacgtggaactggatgcatcctcgtgaagctgctttatacctttaccaactgcatagaaatctaccagggcctcagcctttgttttgtcgtctgcagtccatcaacttttagagactgaatgctgttgatcacttggtgatctaagcctttcataatacttaagatttctaactgacacttaacttggcagaaatcactattaatttcaggaggcagttataattgaacattgattcagttaagcctttgtaataaatagatttttttgggggtggatgaggtttaaagttatcttattcttttggtatagagagaaaccccatttaaactgcattcttctaagcctctgcttccgttcttccctaaaacaggattatttaaccttgttcgaggttgtactgcttgtagagagatagattcagagttttaatccaggcaggccgactggagcctgcagtttgaactctaatgatcacattttctttttctgtatgatactgcactatacctttttattgtaaataccgccagtatttgtttgaaaagaaccaataaagttgaaatgttgagaatttttgacaaaggggaaattttcctggttcttacatttcttcatttggtgggatacttttcgtatactcatgtgtttaacagtctattcaagtgacagctgttgggcctcatagaggggtttgtttttgaggcagggtcttgctctgtcaccctggctggcatggctgtagctcagtgcagcctcaaactcttgggctcaaacaatctcccacctcagccttctgttggcatgagccaccacgcccagcctgttttaacgtaagtttaactttaggagagttttatttatgcactgctggagtgcagtggcgcgatctcagctcactgcaacctccgcctcccaggttcaagcgattctcctgcattcaagtgattccccacctcagcctccc

SEQ ID NO: 17917 - DNA, 1045 bp, Homo sapiens
tactaaatgtactgtggggccctagattggaagagaaaaaggacattagtgggaaaactggtgaaatctgaataaagtctgcactctaggtaatagtgtatacatgtatcagtttcttagttttgctctgtgtagcatagtcaagtgggatgttaacatcagaagaagcggggtgaagctgtgggaactgtctctgccatctttacaattcttctttaaatccaaaattgtcttgaagtacaaagtggctagaaccaagagataattggacacaaaaatgatgtcgctgtctctgcctctgtatcctgatggcttctccatgccaaggggaaactaggcaaagcaatagaagactagatcctctgtgactctaagtggatattgtgcaggatgtgatttttagcttattgacttctaagaactctgagacagaaaggtctttgtgtgtgagggctgtagacttctaacccttacaaagagcttatcagttgagcaagcttataatgtgctgtgttattactgtaaaaaatttgtaatggtaccattacagcaaaatgtttccctggctaaaaagatctttcagcgttcactcagcaatttaacgctcgggcttgctgacatcatcttggttaaccctgtagtgcttggcttctgtgttttctctcattgaactctggcagggattttaaaaaaaaaaagtacaaagctattttcttggatgtctagcaattacttccacagccttttcttaagaaacaaacaaaaaaactccctgtgacagaaaaatactataggtgctagtttttctttcacatagttaacatgtctgtgccgtctcctggaacaggtacactggttttaaagacacaacttttatttaaaatgatgtggtttatttaaggcagaaagttgagtacggtttcatttatttttaccacctgaggaatgcttgtttactttttaggtgcttatatattgattctgtaataatttagaattctggttactttattagggtaaagtgagcatggatattgaatatccc

SEQ ID NO: 17918 - DNA, 1662 bp, Homo sapiens
ttattggtggttattaaaaaatagccttgagaactttgtttggaaataatgttaaactcacagagaagtcagaggatagtgagagtgtaggcctggaggctggggaagagctgggaggagctcagctcctggctccccttgccacatggtgtcagcaatattgactcaactcaggtgaggtgtttttgagaattattattgaaaattttgaaataggaattcattttatcaaggcaaatacatgaaaagctatactactcttaagagggaacaaaaagaaaattgacttaagtaacctattcattttgtctttgacttttgcttcgacgtgtactgtacgtatggaaaagtgcataggtcgcaagggtcaagcccagtggattttcacagactgcacgcaggcaaccagtagatctttcttctattattttctcatatttgactaggggtgaagctgtagacagtaatgattattgatgaaatttggagataggcaaaggtggatttgacagctttaaaatattaattgtttttaatagccaatactgtcacgtggctcaaaattcagaagtgcaaagggcttataggaatacgtcttccttcctctgcctccggcccctgggcttccgctgtgaattagccatcatggtgcctcaggtttcctgcgtatcatatcatatacaaacaattaagtttctacttctctccccgtttacatgaatggtagcgtaatacctaccatctatgtcttggaagatttcccatttggtaaataaaagaacttcgtctttttgatggacgttcgggctatttccagttctttcggcagtgtttctaggcggtcatttagcccaaggctccccaatctttttcacatcttgacattgactcaattcactcacgctgaggagcctgcctccaagggctgctgttaccccaatccctagctcctgtcccctccaccacccctacagccccataccactctaggcctggaaggattgttatctgggcacacatggaacttgttcatgttacacccgcacaccaaaatacaccagttatgaagctctgagttagccagtaagtacttgttaagggttcattaatgagcccagaactgccctctgaattggtagggaaattgcaaaagattgaaacatgaatggccacctttttctccctcaaggacttcagagtagttgaggagacaaagaccatatgttcatgaaccagttgaaaagaaattaaaaatatgaaacctgtgatactgattttaaatataaaacagtacagggaaggctgaaatggataatgttctttttatgaggaggcatatatcatcaagggaaattggagtttgcagcaaaatgtgtaaaaagataaaatcttccttgttagtctgtctcataaaggaatgttgaacatccatataccagaagcctggggtatttttcactttaataatagaagaaataatgtttctttttttaaaaaaaattcacacattataattgtacatatttatggagtatggtttaatgtattcatgtatatgttgtataaggatcaaatcaggaaggttgacatgtccatcacctcatgagaggtttttgaatgttctctccacaaagaaataatttttcttgactttgggttgtc

SEQ ID NO: 17919 - DNA, 1031 bp, Homo sapiens
actgactagtccacgtggagcccacactttcctgttctttcactaccttatttgatttgcaaactcttgtcttccttaataataagtcatacttacatagtgccaggcaggcttctaagctgtttacagagagctcatttaaccctcacaacaacccccgtttacagataaggaaactgaggcacagagtaacttgtcccaagtggagctggagttctcgcccccatggcctgattccagagccagctcttgcggtgatgctgtagattcgcctccttagttggttgttctttgaaggcaggaattgtctcgcccaccccatctcccaaataacattacagtgttttagtattttcatggcttcctaggttgaaaatttctcaaagtacaagatagaaatgatttctgaccttttgcaaacacgtgtggcaccattaagttacttattgtacatgagtgggcagtattcagtgcacacatttagtgacctctattatgtgccaagcactgaaattatttacattttcaaagaattgttgcgactgccaaatgaaaaacatttctctataaagagagcattatcaggggctcctcgacttgaatggggggtcattgcactataattttgtccttactaacttcccaaggctggaggagttctgagaagttatctcccctccatatgtcaccgcatcagaagactctgtatagcttgtcacacattcacacattgtcgcatttgcaaaaggacttgtccctttgtaggtgggattggtttttctttaaattaatttccacatctctacgtttattctacatcctttttcttcaggagcatatcctttgtgaaaatgaagtgcagtacctagaacagtatctgttaataaccgtggaatgaatgtctgggctgaatttgttttttgttgttattcttgttctttgttaatgagttatttaagtggcgtaagaatacaggtccattttaaatccataggcactaagggaaaacattaacaacaccatcttatatc

SEQ ID NO: 17920 - DNA, 1101 bp, Homo sapiens
attgggtgcttggagtcgagttgccgaattactgggataaagaaacatcgtgcctcaaggttcctcataggctgaccaggtttctacgtgacctctcagttattcccttacgccatgactcatcttttacgctcttgtccagaggcactatcagcagttttggataaagagccaaacagtaaatattttagactttacaggccacatatgatctctgtcacatagtcttaggtttttatatttttaaaggattgtttttaaaaaagattctctgctcatgggctggatttgggctgaatgctgtagtgtgtggaccccgtctagatcatcagaaggaaaaacattaaccttcagaatagggggtaattcgctgcaaaagtactatagaatggtctcatacataaattagtcaacatttgttatctcctgcaggtagaatattccgtggttgcttcttgaccaagggaaatacagtctggctgtgagagacttaaaatctcttgaggagcgctctggagaatggctgaaggagaggaaacaggagccttgagcagtgtaattacaaacaaataggttggcatagtcttaagtctttgagtctagagagatttgagttttgttttgcctgtggaggcaattgggggtttcaggtcaaagagagggtcagtggaaacaagggtgggccttgtgaggtgtggggaagccctgggaccctcactccccttccagtgtgtaactggattggctcccaccagcccagaagatttacgacgtgggaaatggtatacttggattaaaatatttcatccagatttgtttacatctagagagaaccccttgtaggttataaggaaactttttaacattcttccttgaatatattttctgtagctgaaaatgtttgtgaagtggctgtcaactacacatcgcatgagtagaggggctctgggtcggggtttcatatgcagcagagcagctcccttgctgccgtccatcaagagccctcaacacaagagtttgttataaatagaaataaacgacaaaaagtagaggggtatgtttaagtacactattagatgtgactgactaccttgaaacctg

SEQ ID NO: 17921 - DNA, 1031 bp, Homo sapiens
ggctgctcacatttcgtgtcttcacttggggtggacgttggctgcaaccctcaaatgctgggagtcgtcaaccaactgagccctgttgtccaatgtgccccgggcaaggatgtgggtgcaaatcctgcttccgggcgaccactgacttccttggcttcagtgtccaattagaaaaaaaaaagaaagtagaaattcggtaagaaatccgtgaacgaggtccgtcctccacccccgactcaagccaagagatagcacagaacgttcccacacgcgctgtcccggccccggcgagcgtagccgggatttctcccccgccacgcccctcggccacgcccccctgcgtttggcccagcgacggggcggggtcggcctgcgattggccgggaccacgaccgcgtccgggcgcgccacgtgtgcgtaggagcgcaccggaagcgcccggctggaggcgcggcggcagggctgggcggcggcggcggcggcggtcatggaacgccaagaggagtctctgtccgcgcggccggccctggagaccgaggggctgcgcttcctgcacaccacgggtgagtcgttgcggggcagccgggcgcgcgccgccacttttgcgacgcgcagccatgatgggtgggtcgtccgccgctgcaccgggcgccggagcctgggaggcctgggaacggtcgggcgttggcgcttacgcggaccttgggcagcaggcccggaccttgcgcggaggcttctcgggagccgcacttccctgggcggctcggctgtcccttgtttgcgcaagtcttttttgcgaaccaagcccttcctgtggtagttactggggtcactcggccgttggcgtttgcctctgggacccgtcccacacagccccatacacactcctgactccccgcgctgtcacccctttctatgtggctctgaaaggcctttgccttcctgattcagattagttgctcttcattcttcaaaacccagttgctgtgccctccacactctaactgcccccgactccccagatggttggg

SEQ ID NO: 17922 - DNA, 1034 bp, Homo sapiens
taataaacatgttccgaacattgcagatttcattttcccacagttattagcatacagcaatatttctgtttaaggaaaaactagcataaagttattatttgatcagacttgaaattacacaagctaattaatgtggaggcagctttgtctttctcattttccaaggtgcatttatcacttcgaacagttacttaccttggtatgctgtctcagtgtttgccttaatttttactttcgaagatttgctgtctggcaaatccttttgactgatcagtagggaccctcgttttataatattgcctccttaaattattcagtaacataattgcaaatagttacttcacttagctacgattttagaacatgtggagtgattatttataagaaggcctgcatctcttcaccaattttagaaatttgtggtttggcttctagttttatttttgtgggccaataacattcttccccctacaccaaagtatttaatgttcctgatggagaagttgctgtgaatttctgtaggtgattgacacttagttttctgggtagctgatacttggttgaagttaatcatccatctccattgccctctgtcctccagaatgccatagcaaatgcttcaactctggctgaagtggagaggctgaaggggttgctgcagtctggtcagatccctggcagagaacgcagatcaggtgaacaaatggtgttctttgtatgttcaaattaatgttacactcagagtgtaactcacaaccatttagatgccatgactctggaatgccagagtagtgcctccttacatcaaatctaatatatgaaatctctttaaatgctctttgaagataaagtatttgatgggttgggtgcagtggctcacgcctgtaatcccagcactttgggagcctgaggcgggcggatcacctgaggtcaggagttcgagaccagcctgaccaacatggagaaaccccatctctactaaaaatacaaaattagccgggggtggtggtgcgcgcctgtaatcccagctactc

SEQ ID NO: 17923 - DNA, 1441 bp, Homo sapiens
ttatattttgaaaaaatattttttccataatggaagccacattcaatacatgttttttcttaaaatgagaaatgaacttcacttttcctatagagatccagagattaacctggcattagtctagtcttacttgtatctgttcagaaatcatgtatttttattttcatggttaagtttctaaataaaaacatgttgctttgtatacattttggcttctaaaacaattatcaaaggggtcatagtaaaaggatatataaaggtaacaattatacttttgactgagcgtctctgcttttttttttttttaactgcaactaatttctagactgttacttattgaaattgagatcttttttgaccctgccttcatcagctctgtgtaaactttattggaaaaaaagcacttggtgtatagataatgtctttaaaggtactgggtggtgagtgggatttccttcagatagaaatatttctcataggttaaccattcccctatagtatagttgttgtgtcttgtacctgagctgggaatccagaattatttgtatttctgtgctgcctgcacaaaaaatcatgaagtgagttaagtagtttgtgccacccaggagttgcaccttttctcaggttccactagatggtatgacagtggaattagccccaggcagtgtctaaaatcccacttctgttgctgaccctgtggcctcagaaaagggttctttttgctttgtttcctctttatcagggtgttggaagaaggatctctaagtgtctctctgtgatcctctgagcaaggaggtagataaaattgttagcttatttaattttcacttttactaagactctatttttattttagccgtataggtgagggacttgatcaggctctgccctgtctgacagaactcattctcaccaataatagtctcgtggaactggtaagttgcacagaaggaaaatgtatttggtgggtggggttaaaggtactatgtgcttcctacagaaaatttacaaaatctagaaaatgatctcagtatcctctttcttgtctttttcttaattcaggatctgggccttttgggttctgcagccgtatgttgcaaatattttcctacttttacttgacttttgacttaggatgtcttgttagagaagttcctaatttaggtgcagtccaatgaatcaatcttcttctttattgtagcccttttgatgtttaaatttcccctattccagggttataaactcctatgttgttttctacaattgcagtgttcaatatagtaccagtaactacaggtggctacttataattgagatgtgctagaactataaaatacacactggatttcaaagacttaagtgcaaaaaaaaaaaaaagtaaactatctcagtaatttttttatatcgatgttgaaatgataacgttttggataataagtta

SEQ ID NO: 17924 - DNA, 1038 bp, Homo sapiens
gcgggatggctttcccgactttccttagctgagaactttcggtgacacaaagaactgtgcctcagccacttacatctcctcttgggaaaggtgctagagggcaagtcataattagacttttggaatggatgtggaaatctgcctctttcttttcaacagccttgcacggggcagctgcattcctgactgtgagccaggcacctactttgactcagagctgatcagatgtggggaatgccatcacacctgcggaacctgcgtgggtgagttcaccgcctgcggaggcctcgggccagcgtcacccaagcgtaggctagctgccttgaacccgagaaagccctaggacttcgtgggcttctgcatttattgcagcattaaaatgcaagggcaaaacaaggtacaaaggccctaccagggactgggggccgggagagtggggatttaatgtttaatggttacagagtctcaacttgagaaatgacaattgttctaaggatagatgctggcaatggttacataacagtgtgaatgtacttaatgctgctgaactgtgtacttaaaaatggctgagatggtagattttatgtacattgcagtggctcatgcctataaccccagcacttagagaggcagagatgggaggacagctcgagcccaggaactcaggaccagcctgggcagcaaagctgtgagaccccgttctccacaaaaggaaaacgttttgttggaaattttttttaaaaccatgtttttaaatttgaaacaaaatcccaaaacaatgcaaaggcccactttgaacacgcagcctgaggttctcattagaaacccagccaggcagtggcttatttcagatggggaaagggataagagatgctcaccactcataagccatcttgtctcagagctcagctcttgctgtggaacggcgcggacagaaacacaacaccataaacattgagagggctttgggagaggcgggaatggatccaggtggggatggggatgttttcaaacatagccttagttctttgtgcctat

SEQ ID NO: 17925 - DNA, 1008 bp, Homo sapiens
cgatactgctccagtgaggttctggtgtgctgttcttggatggcgtgaacggtggagaagatggtgataccaaactctcctgtccatcggcagttggtctgagcgcgcaacggcaaagcacatggagaactcccaagttgcttctaacatttatttgtttgtgtatttttttaaatcctggatttcctccacaaaggattgaaggtggagttttcaaataaacccgtgtcagtttaagcccatctagagaggcatcagccgctagccaggctgttcagcacgtgaacggagccccccttgtatgaagagacccctgctaggagttacgggaagtgacacaagaaggcagtggggcttggaggaactgtcacgctaattgaggcaaagggaaaagcagacctaagtacaaattgcaacacaaacatcatggttgcccagagaatgagctgcagctggaccagaacacgctcaggcggtggagtgattgggaccacgtggacagcaaggtggatttaatttaagaacgcttcatgggcgagaggaacctggatatttggcttttaaacacaattcaagtggacagccatactggggaggtttgtttacagatattcatctaggcatctccacccttggatgggcatcgtcttaacctgaccggtgggtgacctcagtgcagtgtgggggccctgcagctctgttgaatagcccccaaccttgcactgggctccttgcaaaattatgaataagctttccactgcagagagacccaggaacaggggtggggggtgtgaagtccatacacccggaccagcagctgggagcactgcttcaggaccctccccaaggctgtcctcctccgaggacatcctagaacattctgtctggagatggtgaggacatctgcactttccctgttcctagccaccctcctctcatccgctcagcaaatagtgattgagcacctgctctgtgcctaatgccaggaatctagcagtgaacacaccg

SEQ ID NO: 17926 - DNA, 1028 bp, Homo sapiens
ttcttctactattcctttaaaatagagcattgaattatgtatggactaatctgctctgtttccccctgtgatttataaactgtggcaagattcagtaattattaataaggaactgatttttttcttaaaatctgctactgacttcagccttgcacaatggaacctcactgtgataccattctgcagtccagcagtctactgagcagggattaggtggagagagggggtctccatgggaaggagatgcattcctggctctcagagaagccccctcaagtctcaggggtgagtgggatgggcagaccagagacagcaggagagcctattcagagaccaggacagagtgacagaggaggtgagaaccagacggtgccagagtatggaagccaaaggaggaggacgagccacgttagagtccaatgcaaggtcaggtggatatgagacggggtgtgcggagccggccatggtcatggtgcatcaggagtgacgggcccaggccagtggaggctgcacctggactctttgggcaagagagcagttgccaagaaatagaggaagtgagcgagggggacgagggaagcctagggagtacttgcaaatggccagggtcccaggacagcagcaggcaagatggtccctggagaggaaggttgaggaccagagcatctggctgggagaaagggcagcagctgcagtgggcagcgtggggcacaaggaagatgtcagtgctgtggttctgaaggtggacaactttgtggtgacagccaacctgctaggccagagccgtctggtggccaaagtgcaggtggaggccaccccagggactccgcagggtgctgagttgagagcagaccctgggctgtccccccgcccagagactgggattcagcaggtgtgggacgcctgggggtctgcacctgtagcaaccactcttaggtgcctgcaggcaccgtgggcttagggagctggcagataatgaaaccagcgaggatgggggcaggaggcagggaagagcttgggttcctgca

SEQ ID NO: 17927 - DNA, 1044 bp, Homo sapiens
agtgtggaggggccggcctggggagcctgtcctggcacaagtgctgctgctgtggggggccgacactgtggacgcaatgagaggaggtggatgcctcctgaaaactaaagcctccaagaagctcattcctgtgtgtctctgccttagtctgttatcctaagtcacccataagcatctgactctcctgcctcagttaagcttgggctgtggtttggagaagggactgtgtagagggggtgattcttatcaagtaactgatttgcccaggtggcctgtggtccctcgcctgggtattttgcagtcaagcctcatgggacaccaaacactgtggcgggatcatgtggcattgccgttcatgatagacataagtttacagttcaagataagacattaacgtgttgtatcacctgacccagtggttccactttcgggactctattgggaaaaagtaatccagactgcatcaagtaatatttctgtcagatttatgtatttcaaaaaagggaactggactaaacgttctgtcataacctatcataagaggttgttaaacaaatggtcacgttcacagggtgaagtattttgctgtaaaaaaaaatgttttaacagattcattcattcagcaaacatttattgagtacctactgtgtgcccaaaagttgctacacactgaagctaatgcaccaaacaagagagacatgttccctgcccccgtgatgcctctaggctgaaggaagagaaaacagtgaacaagaaaataaataacgtcgaatgcgattaacatgatataatgctaagtggaaaaagaaagagaaaacagggtgctgtgtgttttcaactatgcaagaaatacacatgcataggaaagagcccaggaggaaatatgccaaaagagttataggtgatttatttttatttttctttaaatatctcaacatttaataatttttattctaactagggaaaaagtaattttaaaaaagaatcactcttcaaatttatgccatacactttatgccataggtatggaattctcatttttac

SEQ ID NO: 17928 - DNA, 1031 bp, Homo sapiens
actgcagcctccaactcttgggctctagcaatcctcccaactcagcctcctgaatggataggactacaaggacacaccaccacgcctggctaatttttctattttattttttgtagaaacggagtctcactatgttgccaggctggtctcgaactcctggcctcaagagatcctcccacatcagcctcccaaagctctgcgatcacaagcgtgagctactgtgcctggcccctacacggtatttttaataatagctttattgagatataattcacatactgtgaaattcaccccttttaaggagtaaattataggagtattcagtatgtgaattataggggtgtttttgtatatttttataaatggatggaagtaagcttttttattccttccgcccaaacctctgcattaacctttgtaacttgaacatagccatgggtggctggttcaccaaatctcagaaggaagaaacttccactggtgttttaaactgaaacatatttacgtgatttttctagggctctcttacttcactgtgtttcaattaaggaatttcttcctgcatattttaagtatggggacatagggggagaattaattaaactctatattgttaataacttctcctatagccaggaaaacccaggaatccaaaagtattagctcagagtccttaatctaatagaactttcccccacccctacttgctttgtctccaattgtaaatttccttcacaaggattttaatgcttaactcaaaatgccaggcataggaaagcttcattattgctggtactttcctgttggcaaattcaaccatagtctccccttaattctggttctttctttgcataatgggaataatcctgtttgttcattatgaatttaattcattgaggggaaatactgcattgaagatagtgaatgatgataaatccatttactggcagcctcagttggcactagctgtggattatcctctgcctctcacaatgacattccctggccttcattgttgacatctggaggca

SEQ ID NO: 17929 - DNA, 1031 bp, Homo sapiens
tctacttggtctttttctcccctgacatttcacagagtcctaactgtgctgcatgtataacttgttctttctttttgttacttgcatagcaagcatgtttctatgtcattaaatatcctttgtaagcagcattttatagatttttataatacttcaccaacagaagcaccataatttatttaagcatctctctattgttggacatgtagattgctttccattttttcctattatgagcggacagcttagtacaaaaagccttctcctgaatttaaaattatttctttgggattattcaccagaagtaaaattactgggataaataagaggtggaaaccacaaatatgcctgcctttgatacatattgccaatttgcttttcgaaatagttgaactgatttgtagtcttaccaggagtgggcagttctggaggaggtagatgatacccttccttaacttacattgtgatcattactaacaaaggtgaaccttttttcaaatgtttgtgcactgtgttttttcttttgaaaattgccctttctggcgtggtggctcacgcttgtaatcccagcactttgggaggccgaggcaggcggatcacctgaggtcaggagtttgagaccagcctggccaacagggtgaaaccccgcctctaccaaaaatacaaaaattagccggtcatggtggtgggtgcctataatcccagctactcaggaggctgaggcaggagaatcacttgaacccgggaggcggaggttgcagtgagccgagattttgccacctcactccagcctggatgacagaacgagactccgtctcaaaaaaaagaaaaaagaaaattcccttttgtctttcgcgagagcgctcagtgttgctatcaagctgataagtatgtagtctgtgtaaaatattggtaaaatattggtgtaataaccctgtgtgtgtcgtaattcatataaattttttttctggcctgctgtttcacttttgactttttaaaaataattttaaatttcccctccagagttttga

SEQ ID NO: 17930 - DNA, 1229 bp, Homo sapiens
tcttccacattggctgcacccttttacattccggccagcaatatatgagaggtccagctccttcacattctcgttaacacttaatattctctgctttttaaaaaattataagcgttctagtaggtgtgaagtggtatctgtggttcttcaattgcctgatgatgcaccttgatgcacaaaagttttaaattatgatgaaattcaatttattttttcttctgttgcttgtgctcttggtgtcatacctgagaaaccattgcctaacccaaagtcacagagatttactcctgtgtttccttttaagagtgttatagctcttacatgtaggactttgatccattttgaattatttttgtatatggtgtgaggtaggggtccaaactcattcttttgtacccatttgttccagcaccacttgctgaaaaatgcattctttacccattaggtgatcttgagactcctgttgcaaatcaactgaccacagaagagaggttcgtttccacactctcgattctgttccattggtctgtatatctatcttggagtcagtaccatattgttttgatcactgtagctttgtagtaagttttgaaataagaaagtgcgagtcctccaacttggtggttctttctcaagattgttttggctattttgggtcccgtgtaattccatgtgaatttgaagataagcttgtacatttcttttttaaaaggtagttggaattctggtagagattggatatgtagatcattttggggaatatttccacattaacaatattaagtcttccagtccataaacttgggatagttttctgtttatttagctcttctttaattttgtttagcagtgttttttgtagtgttgagtatataagtctttcgcctccttggtgaaagttgttcctaagtattttattatttttatgctattgcaaatggaatggttttcttaatttttcttttggattgtttatttctctggtaattcttgtacctttttaatcccttttacttaatgatcaatcatttatttaactagtctttattaagtaccaaactctgatctaggtaatggggttacaaccaggaaagaaaactggaataatcagcacatcttattttgtagttacccacaaaggtctataaacgcctgtctttgttctctgggtcgaatgcatagtaacgtttacagaatgtgctgggatcttgcttttctatgggcgagtt

SEQ ID NO: 17931 - DNA, 1077 bp, Homo sapiens
taggaggaggccaacatatctgtggtctggagttcctagggagtcagcagggtggctactgttggtgggccttcgcctcctcaggagaagggagcgggtggagagcatttgggatgaatggagaacatctgaagtaccagagtaattaacgttgaaatgtggctgcgtggcacgtggcatttgctgtcattagagatcttttccaagtctggccgtctccctggcttcaacaacgcacggtctccaggcaggttttgcgggatcatttaactccgtggactcccttagcgtcctcggaagatggctttatgtacatagaccacagtttcagaagttaatagcagaagacacttttcagttactttggggactttaagatctttctaaatcagttttcatcattaaagtacaatgtaggtgtattcacgtgacagtgataatctctgcacattgtttaacttgaaagataaattacttggcagtcgacttgcattttcagcgttaccttagaaataactgtagggtggagaaccacttctgtttttttcattgactgttctactttctgtcttggagttaattttttaaagtgatgacttttgatagatggcttccttattttcttcctggagtttctatctgaaatacagaaaaatttgagcacaatgatcatgaaacattttgaagcctcctcttttatttctcttcttaataaaagcactctaattggggatgttaggttaatggtttcaatagcaaccacagaagtaaaatgtgtggggagctaactgcatgtcaggaaggtggcagcgtgccctcctatagtagctgtcctgggctcccgcgctgccccagaacttacaggaatgaggagtcctggtggcctgtaactgagtgatttagcagttaagagctttcacataaaaactaattgttacagttagccttgttccaggaggctgctgggctcctagcccccaggtgaaggtaagggcatggctttgaaaaccaaacgaagtgaggccattaactcctgcaggagctgggtgctcccgcccccagccagcctccctgcag

SEQ ID NO: 17932 - DNA, 1033 bp, Homo sapiens
ttagtattattccaacgaatgaaatagaggcccagctattaaatattctatttgactcttgatttttctagccagtgcttctgtcgctgctttgaaaatccaggcttctgggaaacagtgtatgatatgcatgactcccacctcagtgctggggacactcacaacaacagggtcttttaaaccaacacaaagcgataacttacctgcacgtctttagtttctgctggtttggaaggttactgtccagacagagcttacagtttagcttggcctgtcttttaatgaactcttcacacacccacaacccacacaagacacttcagacccaaaagccaatgtgttgctttgactatcaaggcttatctgtagagcagataatctttttatagatgttcaggaattaactctggattagccgcatatcacctgcttttctggaatttcgtgaaactagactgcgtatggcggtcattttaaaacaactctatttatgaagacatatggctgtggatgagagataatggattgtgattataaaggcacttactgtgtgccaggcattgctctaagcactttatataaaaatccccaataaacatgtgaggttggagttctatctttatcctcattttatggaggaagaaatggaggcagaaaggagttaggaacttaggcccagaggtggggtgctgtggggctgagctgctcccgcaggctgcttgtctccagagtccaccttgcccccctaggtaggagctcaggcggtactgagccaatgagagcgacctgcccacccgttagaagacctcacctctgtgacctctgtgccaggagctagctgggcgcaccacctccagggatgataaagtacctgaccctggctgcccagagcttcctccggccttggccaggtgccagtgcctaagagcacagctgctggcgtctcatctgcggcaggtcagctgggcaagctggtgaggccaggagcccagcggcctggtggagtgccgtgcggatcagacacaggtcaacc

SEQ ID NO: 17933 - DNA, 1056 bp, Homo sapiens
agtgtgacatgtttggtcagcagcaggcttcaatttggctctacggggattgcagaattggtgtgtaagttatctttaaattggccgattgttgagcataagtataaatttcctctgtttgtttgggaaggacggtccttagtaaggatgtgatggccagccagtggctccagtttcccgtggaggtggatgctggcccttctctcgggccagctgtgcaccaccagcccatccagccatctggactatatccgtcagttcagtcttccactcgctaatctttagctggtacttgtggctggaatgattctcagtgtggtcagaaatcatccatcctgtgggtatgggatagagcggagctgcaggaatctgccctgactggctgctgtctttcaaagacttgctttcatgtgtacgttcttaacaatgaacaccggtgcacagctgggcatggcggcacacttctataggcacagctactctgaaggctaaggcaggaggatcacctgagcccgggagttccagaccagcctgggtaacgtagcaagacccctgtctcaaaaaaaaaaaaacaaaaaacaaaaaaacggaaagaaaacctacacacaaatgaggccctggccttggctagtgatataaatcagaccaccctgatacttacccactgcagagaccacagggagctctgacaggacacccacaagctgctaccagcttcctggacgtaaccctttccacctattctgtcttcacgcagagttcatggtcctatccctctttgcaaatttagctctctctgcaagaagggtacctcttcaagtatgttttccagaaaaatcattcttttccccaccagaccagctctttcaacccagaaaaattaaagttgtaaattcttccatcatctgtaatctcagtgtcatttgcagcactgctagctctctttgatcctaggccattgcgatggaaatgacaggcatggctctggaatagagcagcttgtgttgggacccttgattttcctgtgaagaacagaggagtctttctggccccttc

SEQ ID NO: 17934 - DNA, 1037 bp, Homo sapiens
ctgggccgtcctgcagccagctcgctgaggtaggaaagagaggaagggaaacaggtggagtgagaagagaagatagataacactgaagttacatttattcctactgctcatagtaggctttcaagctatgaagagatggctcttcccgtgacttcagccccatcctccatcgctgcccacgcccacgtggctgacactgccgaatgtctctagcactgttgttgaacttctgatgtctcctatgcctcaaccttgctattgccttggtgtaaatttctctgacattgattttgaatacaattccaggcttttggagcagaagtttccagttaagcttggtgtcccacctaagtgttaaggtcaacatgccgagccctagagtggtcctccctctcccaccaccaactatcctacctggcctcccaagaactgcctttggtgactcttgtattctctgtcttgcttcatgcctgggaaatttcagggcatatattaaggggaaaaccttagggaaacctgaaccttcaaaactgggtagaatgaatggatggaatggaagaatttactgcagcgaaatcatcttcaaattccttttaggttggaagcttcttaccctggcaagtgaagaagtacatttggttatatgtttataatccatgtgctactgggtgaaagatgataggacaagaacatttgaaatgtatgtgttagggatctctgcccagcagtttccatcaaaagagcacacccatgattatcgtacaaatggatgggacagcaggattctactcacgtaaaatgtttgtccctgagcacctagggagggtgtcacctccagggtctccttcctgttgctcttctgcatgagtcctgcaccacctcttttaacctcagggaaaacttcactattttgttttttaaagtcagtcatatttaaagttgctgcttttgagtatgcactacgtgttgatgtagattctggaatgtagaacaaacaggcgcagactagtatgggtaaggtggggaacccctacttc

SEQ ID NO: 17935 - DNA, 1002 bp, Homo sapiens
cccgcgctcagcctccctgcttttcagaagcatcgccagtccacagggcaggatccctgaggctggtctggagtaggctgcatttggggcctgcagcaagggcagctggagaccgcagggagccctcccacctgacaaacagaaaagctcccctgctccggcccccggatataggtgcatcttttcagaccatgtttgccctgtttctgggaaggaaaagtaaacggcagcgaccagattcctgttggtgtttttgctccatattttgattggggaactgaatcatgtttttcctttcataaacacgaaaatgttaagtacataacagctaaattaatccatgcccataaattggttaattatgttaattctgagtcacagaattcagtctcgttagtgtttccattaagcagtttaggcctgtgagcattttaagagaacagtttaagctgtagattaatcttcaaaggttcccagcgcattttcaactgcaagaggattttaaatgcactggggggcttggggggatttggtgaatgttaggagctgctgctgtcagggagcgggtgttccccacttcctcgtccctcacctcccccaacacatccaaggcccctgcctgctagatctgagcatcgccaggctaagcaggagccataggaaggaggagatgggcaagaactggcatagccccttctgccctgtgtctccctggtggccatgccctcctcaggccgccctgctgcagacacccgcagagaatgggtgaggctagctctcgaatgctgtgggctgcatagccctgggttcctgagagggctgctgaggggctttcttcctgggtgtacataagaaagaagcagagagacaggaagagagcacgctgagtcttagaaacaagctcctgggtggcctttgttcatggcggcatgaacgtctccttttcgccgtccgtgtccccttcagaggtccgttcaggatatgggtttgctttcttggcac

SEQ ID NO: 17936 - DNA, 1813 bp, Homo sapiens
acgcctgtaatcccagcactttgggaggtcaaagtgggtggatcacctgatgtcgggagctcgagaccggcctggccaaaatgttgaaaccctgtttgtactaaaaatacaaaaattagctgggcatggtggcaggcacctgtaatcccagctactcgggaggctgaggcaggagaatcgcttgaacctgggagacaaaggctgcagtgagtcgagatgacaccactgcactgcagccctgtaagactttgcctcaaaaaaaaaaaaaaaaaaatcctaaattggaaactttttctttcatttttgaaataagttccatttgctcatgagtattgttgttttgatacatctgcattcaactgctgatgtcttcttatggttttacaacttcatttataaaatggatagaatcacagtttctgtgttttgtgatgtttctctctaacttgtttatcagagtcaggccagtctcgtagaaagagttaggaaactttcttttcctgtgctctgaaatagttaatatattgtggatagtgcctgatttctgaagtgttggtagagctgattaactagtctgattggatatggtgactttcaaaaggactagacctattcaggttttctgtttcttcttgaggagatttttgtaattaaatcttcctagaaaatcatcaatttttcaagattttcaaatatatgacataaattcaatatcatatgctcgtaatttaaaagtacatcctccatgtttatagttataattgtttctaatcttatttgtgacatctcctcttttttccttgattgatgaaaaatttctatttttaataaaataggttttttcacctcagtgtcatacaatatacccatgtaataaatttgcacatataacccctgaatctaaagtaaaagttaaaattataaaaaatagtgtacgtaaaaataaaaaaaaacaggcttttgcagagaactaggttttttttaattgagttcctttattttctgcatcataaatttctgcttttacttatttattaattccttcagcttttaaatttgttgttgctgtgttctaattccttgaatggaatgtgtatttagttctttattttcaggattttatgtgttctaataaataaataaataatcatacattctcctttcatcacctcttactagtttaattatatggtgcttttcttgctatatatttctgaataattgtacgtttcagcttagatttttctctttaacccaggagttatttagaagagatttataaaatttttcaactgcgtagattttctgatgctccttttgttgttaatttttaagtttcttatattgggttcacagaatgttctgtatattttctgccttttggaatttctggagaatatctttgtgtcctaatacacgttcagtttttgtgaatatgccaatgggtgtttgcattagtccgttttcacactgctgataaagacatacccaagactgggaacaaaaagaaatttaattgaacttatagttccacatggctggggaggcgtcagaatcatggtgggaggtgaaaggcacttcttaacatggcggtggcaagagaaaaatgaggaggaagcaaaagcagaaacccctgataaacccatcagatctcataagacttattcactatcacgagaatagcacaggatataatataatatagtagcttttccaggcacatggtacaagctgccagtggatctactattctggggtctggaggatggtggccctcttctcacaggtccactaggcagtaccccagtaggga

SEQ ID NO: 17937 - DNA, 1021 bp, Homo sapiens
ttttttttttttgaagagatggggtcttgctctgtcacccaggttggagtgcagtggcataatcatagctcactgcagccttaaactcctggcctcaagtgatcctcccacccgagcctcccaagtatctgggactgcaggtgaacacaacctttcccagctaattaaaaaaaacacacacctttttccttgtaggatgagatactgctgtgttgcccaggctggactcaaactcctggcctcaagcgatcctcccacctcagcctcccaaagtgctgggattacaggcatgagccaccatggcccttccctgtagctgctttcataatgttatttttaaaaatatctgtgctttgcctgtggctctaacattcttttatgtagttttcttcgtattaattccatcttgggttttctgtgcttcttagtgggttattctttttaaagaaaatttggaaaaaaaattgtcaatatttcttcaaatttttttaagttccattttctttctactctctgtgggcacagttatagttgttagattgcttaatacgcctcacaggttactgaggcactgttcatttttttaacccttttttctctgcttcgaatggaatgatttttattgaacttcaagttaactaatccttccttttgttgtgttcagtctggtctttaaaaaaaatttcagggctgggcatggtggctcacacctgtaatctcagcagtttgggtggctgaggtgagtggatcacctgagatcaggagttcaagaccagactggccaacatgctaaaaccccgtctctactaaaaatacaaaaaatcagccaggtgtggtggcacatgcctgtaatcccagctactcaggaggctgaggcaagagaattggcttagacctgggaggcggaggttgcagtgagctgagatcataccactgcattccagcctgggtgacagagcaagactccatctcaaaaaaaaaaaaaaaaaattcagatatttacttttctgtcttatgattt

SEQ ID NO: 17938 - DNA, 1121 bp, Homo sapiens
ctgtggaagtatctgtcagcggccattataaattatctaggacttggtgctgaggattttttaagtgtgtgacgtgaaactggttttgagccctttgcagtgtttctaaggcgtctggtctgctggtgttttatagacgaattacatcggggtgggacaggctgggatgcctctcttccggcattttgccctgtacaccaaggatgtcttggaggccatccccagccctaaatttgagctgtgtatgcaggtgctccgctctccttgctcagggtgatgtggggaggccaaggctcagggaggaggaagagaaatcttgtccctttgctcttggggactgttactccctgcccactcagcctcaggtagctctgttctagcttccagcacgaccctgggtcgccagccttgggtcaccttggggccccgcccccttctcttgttcctcccctgcctctagctgcctcctccaggcagcctgccctgtttggaactcacatcatcctctgattggtgggatcccctgaatgtagtgcagactcctcgagagcacggccctggcgcccatccttatcccacccatgtcaggccccagagccaggctgaaccccagctttgagcattattcaatcaggtggagctgccgtggtaagaccaaagaaaacattcccactcagggtccaagaagtctttaccccaagatccttttaaaatgaaaaagtttttccagcttgaaaagaatgtgtacacgggatgataagagcaggagtgctccaggcactggtctgagggctttatatgtgttgtttcttatattaaccctgtggcaacccatgactgtccccactgtgtgggtggacaccaccctgaggccatggatgtccactgtcagctccaagtcacacagctggtgagcacggggctgggttttattgcaggtggcctggtgccttgatccttggtcttaaatatcagtgatacagccttgtgaacttttttccttgatcgtgaaaacaaatcatgctgattgaaagacatttatgacatcctgaaagtaattgtaaaattttaaattagcaataatgtcaccacccaggaactgatgctactactattttgct

SEQ ID NO: 17939 - DNA, 1012 bp, Homo sapiens
aatgaagcttattaattcatctgaactccaagcttgctgcctggaatggggcatgtgcccagcaagcgtcagctgttgtaatgagccaggggcactcggtaatagtgaggatccctggctgggggacaggtgaaggagggggaattgctgttccccactaactctgtacccttttgtaccttccatgttttgtatcatgtgcacatattacctatatttttttaaatgtcagagcatcttgttaaagaggattacactacattaaactctcttcactgtgagttctttgatctcattccttccagtgttctggtcaagaacatttagcaaggtttgtaatgatgttctaatgatgttatcagtttgatcaagtaatgcatataatcgcctatcaacgttgagtaaagaaacatgagcaccctgtattcagcaaattgtttattttcttgaatggtgcatgagacgggctctaattaattcattgtgaagataccacgggcaccaaagagaacaagaacgtatttaaatttcatgttatgacattacaaagacaatgccttgtggactagcagtcagattcattgatgaagagcagatggaggtcaggggaggacacggggctgagcaggactgggacgcagcctgggatggtggaggcagcgcctcccttctataatcgagggaaggaggaggaggctgccagggccctccgatagcggcagtccgtggaagccaccgctcctgattctaaaggcgggctgctcaggcaccggctggagaagcggtgcgtagtcgatgagctgtgagcacgggagcagagccagcgcctggtgtggacaccgtccgaggccacagccaagcagcagccacccaggacgtccaggctgctgagcagggaggaacacctgccatcagggcaaatgccacataaaaaaagaacctcactttacctggaagattatttggaattttgtctttaggccgcccccttcctgagtccaccgctgtccat

SEQ ID NO: 17940 - DNA, 1454 bp, Homo sapiens
ccatagccatgtgcctggggctgaaagcacggtagaggaaaccggaaagtggatttagagggacaaacagaagatatccaacccactctcagacgtcctcctacaagttttagttttacttctcacacttaagtatttaatctagctcaaattggttttgtgtttgatgtgaagtagggattttattttatttttttctcatatgaataaccaccttttcccagcatcatcagtggattagttcctcctttcaacactgatattctatcagtaaatcaagttctgtatttgcatacagattgtctcccttttctgttccacgagttaaacttgtctgtctctgacccagtgcctcacagacttcagtactgtatcttcataataaggcttgatatgtggtggggcaagtcttattctttttcaggagttttaggctattcttggccctttgttgtttcatattaactttgaatcaacttgacaagttccacaaaacaaaagctgttgggattttgactgaaattttatttaatatatacatctatctatctaatgtatctttatgatatgggaccttcctatccatgagcatggtatctctttatttaggtctcctttaagtattagtaaagtttgtaaattcttatatacacaacttacacatctctgataaaggcataggtaccttaagtgtctaacagttgttgctagtatatagacgtgcagttgattttttagattggtctcacatctagccacctttcaataaagtcccttatttcttccaataatttgtctattttttatgtaaaccataggaaaccatagatttgatatggttatctatgtagatagtcatatcatctgtgaataattgtagttttgtctctccctaatcaatctttaagctaattatttatttatcatggctgttgttgactagaactttcagtataatgatgaataaaagcattgattttgggcagtcttatcttgttcttgattttaaagggagtgctttcagggtttccacattaagattgatatttgctgtttgttttttgtaaatgcctttttaacaggttaagaaagcttccttcttgttttaatttgctaagagtttttaatcatatgggttttgaattttatctaatgcttttcctgtatcttctttattctgctactgtaaaaattacagttattgactttctaatgctaaaatacccttgcatttttggaataaactcaccatggtcatggcagactatctttcttcctcgttgctgaatttggctttctaatattttagttaggagttttgcttctatattctgggtaaagtggacctagagtttccctttcttatactgttcttgtctgtttttaggattaaagtattctggcctgataaatttttactttttctgttctctggaagagcttgtttaagactg

SEQ ID NO: 17941 - DNA, 1025 bp, Homo sapiens
ttccctgccctgcggacacttcttcctcaccttcctaaaactgtaagagacctggagccgttgagcatcaatgactctttgactcaggaatcttaaaaaatcacaccctggggctaccatgggggccttctggttctccttgtgtattactagttgaatgtttatagctttcaatttctttttccccttctatatgctctctaaggacataggaagaatctacctgacctcacagctttggtaggcactgttattgccacaccctcttctcccagtgggcaccccacaccccaactccccggcacgttgttcagtgggactgccagtatcatgtataatcatgaatgctgtggattatccttattcacacacacagactcacaccctcacacccagaaaggcaactatcccagtgctcccagaatagatgaacaaccgaatcccagattcccttcgtgaggatttatttgaagaccactttcagtaacaattactttatcagtggaggtctcagcaggaaagatacggcacatagtagagcactttgaggaaggtcactagaccggttcccaaggcatgggcggagttcagagaaaccaccaggaactggtagcagcagaattgttgcaacgcttggccccaaaggaagaggggagggaatgttgatggcacctggaaggagaggttgtattgacaagtctccttggtagagcagtgatattcggggagaaacacggccagccagaagttaccctgtagaagggggcagaggagaaaacaagccaattcgaccctcctcccaacctgcctctctcgtctctcccattttctgtttccaaaaccgacccacagtcagagggcaaaggagccaaccagaaggcccctgtgtgtgatttttaagattcctgagtcaaagagtcattgatgctcaacggctccaggtctcttacagttttaggaaggtgaggaagaagtgtccgcagggcagggaagacagtggttttggcagcgaactctcacccacc

SEQ ID NO: 17942 - DNA, 1057 bp, Homo sapiens
gatcgtgccattgcactccagcctgggcgacagagcgagactctgtcttgaaaaaaaaaaaaaaagaattgttgctaagaacagccttatacaagaccgctagtacacaaatgccagagtttctttggggtgtgtgcctagaattgggattactgggtgtacatatacggcatatgaatcctttgtcagttaacaggagtgggaaaccgtgtttcccagtttatgaattttttttacctgtatggggtgtcttctgattaaactggagagttaacttttacataattgtatataaaaatttattctcttttaataacaattctgttaagttataattcacataggatgcacctatctagagcatgcagctcagtgggttttggtacattcagagagttgtacaactgtccccgcaccccatctgataacattttcatcaccccagaaagaaatgctatccccgtcttagcagtcagtccccatctaccccactcccttaaccctaagcagccactcatctactctccgtctctctagatttgcctattctggacatttcatataatggaatcatacagtaataatagggtctttttgtatctggcttctttgacttagcatgttttcaaggttcatccattttataacatgtattaatatgtcatgatttttatcaccagataacattccactgtaatgaattgcccacattgtgtttgctcatttatcaaccgatggacatttaggttgttcccaggttttttgctgttgtgaataacgctgctgtggatattcacgtgcaagttgtatgtggacgtatgtttttacctttctagggagcttatctagctgtggagtggctgagtcatatggcagctctatgtttacatttctgagaaactgccaggctgtggacccacccttcacggtctcaccagccatgtctgagggttccagtgtcaccacatcctcatcagcacttgtgatgatgcgtctttttttctgcacccatctcatagatggagtggtttgcatttcccttacggctaatgacgtt

SEQ ID NO: 17943 - DNA, 1145 bp, Homo sapiens
cattgtaaagaattcacacagtgcaggtgtacaaagcaaaatccaaaatctccttcctcccctcatccgatccctgatttactccttccctgagatgtcaccactgttcacacattagtatatgtgtcctgtttctgtgccttaacagacagatacgtgcgcatatacacacaaaaagaatttttgttgttttttttttttttaatataaatggaatcacactaaacatgtttttttttttggacctacctaggttttcttcactaacagtgggacgtcttgggaatcttcccatgctcgtacatagagacctacctcattctttttaaatagttttatggcattttagagatgcaacatgttttgttataccacacctgtgaatgttcctttgatttgcctccagtttttttctgttataagcagtgttgcagtggttatccttattcatgactctgcacttgtgagaatttctgtaggatccataagaacaaaacaaatactagttataataataaatggtgattgctggcccttactgtgtaccaagtaacttttcatgtgctttccttgtattgactcatttaatcttagaaactctatggggtaggtgttattattaccctcattttacagatgtggaaacaaaagcacagagaggttaagtaactttttcccagttacacaacttgtaggtgccagagccaagatttgaacccgaatagtctgactccagagaggggacctgctgagtcaatgtatgtgtgcaagttacattgtgttagatgttggccatggctctcccaacagatagtgccagttgacactgcccccagaagtgtgtgtgggccccaccgattttgtgtagtgatgaccaattgtcatatttgccagttcttataggtgacaaatgagatctggtggttgttttaatatgcttcttttccctcattgttattcaagttaaatgttgcttggccagcacagtggctcacacttgtagtcccagcactttgggaggctgaggctggaggatcatttcagcccaggagttcgagaccagcctgggcaagatggcaagttcctgactctacaaaaaaaaaaaaaaaaaaattagccaagtgtggtggtgtacgcctgtggtc

SEQ ID NO: 17944 - DNA, 1026 bp, Homo sapiens
tgagagagaaaaaaggcaaattgtaggtgtccaatgtgatcatattcatgtaaacgttaagaaacacacaaagcaggccgggcgtggtggctcacgcctgtaatcccagcactttgggaggcagaggcgggtggatcatctgaggtcaggagttcgagaccagcctggccaacatggtgaaaccctgtctctactaaaaaaatatgaaaattagctgggcgtggtggtgcacgcctgtaatgccagctactcaggaggctgaggcaggagaatggcttgaacctgggaggtggaggttgcagtgagctgagatgaacaggactgcactccagtctggccgacgagtagagtgaaactctgtctcaaaacaaaaacaaaaacaagcaaaaacaaagcacaaagcaatactgtattaattatggatgcttatagatgtagtaaaagtataaaagtgtgggctgtaaggatctgcatcaaattctagttagcaatgacctccaagaagggagggaggggagaggaacttcaaactttatctgcagtgtactgctttacaacacacgcttatgtgtgtgggtgtgtgtatgtataaacatacgtggattatatacaaaattgtgcctagacattttgtactttttttctttgtatcagggtatattacatgtggtgatgtgtacaagtgtgtatatatacacacgtataatatataaacacacgtatattgacgcatatacctatatacatagacatatacacagatacacataaaacattgaagagagaaaaaagaaaagggagatgcacatggtacacctaccgcatggtgcttctggaccatctgaagcccaccgctggaggcaggtgcctgcaggcccatgttaagaagtccctactttagatgtccagactgggccgatccacttgtcaaggaaatggtgacagagaaacagaatgtctggctgcaggtcgcatgggcgtttggacagagctggacacggagcccaggaacccttcccttctccc

SEQ ID NO: 17945 - DNA, 1034 bp, Homo sapiens
cggaaatttctatctgtgggaataaaaatgcctaacccttggccatgccgcccctttgagacaacctctgtcaggctcactgagttcttagtgcagtctgctctcctggttttgcggatgggagagaagattcgccccgatgcacactccgtacccaggatattctggggagttaatcggggtctccccagctctgtctagtgcagccagcatgaatgccacgcagcccggtcactcaggcatggtgctggcagtggcactgcggtgacattcactaacagagattagctggttggggataggagctgtctcagaggcttgtgtgtgattactcacggagggcctattactctttattccaaaacgagcttttctttcccccctctaagtgcactgctaatgtggaaaaggcctggagcatttgagcctctacccactcaataagaactctttgaaaaccttatttgcctttttttcagccaggagaatttgtgactcataaataagatgtagatattattagctttgacttacagatgagtaaatgggggtgaagtaagggaaggaagctgtttgtgttcacatggtacgcatatgtcacctctgacagttccatccctgctcatttgcttctgccgtattctctgttctgaggtctcctttgtgaaactctttctccaagcccttaatgggcaattagtgttatgttctgtacttgcctgaatcgcagccctggttttctcccagatagtcgctgtgctcaaggttcttgcttgttttactttcttccatacaactaataactggattcagtttatttcacatggcccagaggtaatttagactggtggttattcacctttcttgtgtcatggctccctttcagcacctgataaaggctgtggatcctctccattgtaaaatatgcatcaccagggacaagacaagacagcctctctttgtccctctactcatcagtccaggtaacaccacaggatttcaaagggaataaaaatgtggaagtgtccaatgtc

SEQ ID NO: 17946 - DNA, 1890 bp, Homo sapiens
gacctgcatatttcttcccttggtgtcagcaggaagtctgaaccacacaagccccaccctttgtgcttgaaccttttcctcagtcccaccacctactcacaatacaagccaaatccattaactctgcctcactcccaccatttatactgacttgcacctgaccttttctcttcagaaagtcccatggcatgagcaagaagcatttccatatcttctcggtgcatacggccttatcattcttgacatttaaactattccagtgagagggggccgatcccatcctcctcaaggtgatcataatacactcttactatctgaagaaatttctttaaatgaatcgagaatgaattgtctcagcctttgtttgtttgaaaatgtttttattttaccctaatttttaaaaatatttttatttaatatagaattctgggttgagagattttttccctttctttcagcattttaaaaatgtcactccattgtcttttggcttgtgtagtttctgatcagaagtgtcctgtaattcttatctttactgttctgcatgtaatgttcccttttttctctgctatcttcaagcttttctcttcatcttccacttttgacagtttcactatgatgtgtatagttaagtgggattttttgctgatggtggtgttggtgttttctttttcctttcttttatttttggtattaattctgcatagggttctctgagagtcttggatctgtggtttaatgtctgttattacttttggaaaatccttgactattgtctcttctaatatttcttcttcttcattccctcctctcctgtgactgataacatatacgttagcccgtctcatgatgtcctacagctcttgaatactctgctttgcttttgccattattttttctttgtgtttctctttggataatttttattgacctattttcaaatttgttgatttttttcaaagctgtattcattctactcatgtgcctgtcaaaagaattctttatctgtgatgtcatatatttaatttctagcacttctattttactttgtcttgtagtgttcctctcgctggtgaaattccctatctgtttgcgtttgttgccccttttacattagatgcattaacatatttattatagttattttaaaatctctgtctaatggttccaactattggggtcatcaagtctatttctgttgattgctttgtctctagattgttttatcttttgctttttaaaaaattataatttttgatcgaatgccagacattgtgtgttaacagtacagactgaggtaaataatattcacatctccaaattattatgcctattatgtctgacttctagtgtgcaaggtgaagtcgatctagttaggagctgagctgggtttgggtttactttgttgctattgctatcttcagtgctgctaaggcttcaagtttctgtaaatacgagatgtttctataatatcttgtactagattggggactggggtgttgggtggttttcttctgtgttcctaatgctccctttaccttttagctattcctgcatgtctttgccacagagggactctatctatactctcgcctcttcagggatagactctctttacttgttactctgtgctaggcttatggtgagatagggttttctttgttgtcttgctgcaacctcaatcttagacagatataaaccttagggtggggctgtctcagcaattctgctcttccttcctacggcaattaaattctgccttgtatctgtgatggtcttggacaggagattcctgctctcccctccctcagtgtagcagacttctggttggtactggtataggatcctgggcctggaatagcttctttattttatctcagaactaggaca

SEQ ID NO: 17947 - DNA, 1085 bp, Homo sapiens
agcaaaatgccatgttggagtctgaccttcaggttctattcctctgctgtcttagattttcaggattgctataacaataccataaacggcgtggcttaacaacagaaatttatttcttaagagttctggaagctagaaagtccaagatgaaggtgctggtaaatttggtatctggtgagggccttcttcctcataacatcttctcacatcctcacatggtagaggcagggaagatctctctggggcctcttctataagggcactaatcccaatcctgagagctccaccctcatgacctgatcacctcccaaaggtcccacctcctgataccatcattacagtggtgaggatttccacatgtgaatttggggtggaaaagacacaaatactcagtccatcatgtgtgagctatgggctctgacccagggatatgattagatagccatcctgttcacacaggttgggaaccatatcagtcaaccatcctctattgatagttctctagacactcagaatttatcactgcagcaggccatctgtcatgatttccccttaagaatctctaccttgctttgtcagctctcttccatttaccccagtaatgcctcacgggaaggtgctgggttatttatgtctaccccctccattgtccctagaacaatgccgtgcacacagaggctctcatttatttgctgagttaatgccacgggtgtcctcaaggttttgaagggactgtgtacaattccagggactggcagttgaggtggctgcaaggagataatatatagaaattggcttcaagtaaatatttgtctgtaacaccatgttgatctgatttctgcaaattgctgaggaacaactggtttatggtgcgtataaaaagattttttcaaagatcttatgcttcaagattttaaaatgtaaaaataccttctctatgccacacaacttcatttctctgtactttttttttaatgccttatgccagacttgcatttattttgggcatatatcatcagctacggaatatgcaaatgattttaattcatcctgtaagcaatgagtggaaaatgagctgtacctga

SEQ ID NO: 17948 - DNA, 1169 bp, Homo sapiens
tctttgctttattttgactaaaaagcaatgagattgataactttaaaaaaagaaaacattggttttttagtacagctaaaaattgtatgtttacttttgacatttaaactgtcttcctgcccgtaattatttggtggtgtcagtttgtgaaatagtcacttgtgttccagttaagggctacgatcaggggaagccctttctcaaatctgacataatgtggtgattaaaccgtgactggccacagctggggtggaggtggtctcatggaatcctgtctgtttgccatcgcagcatcaccctcggtgggtttggagcagaccgtttctacctgggccagtggcgggaaggcctcggcaagctcttcagcttcggtggcctgggaatatggacgctgatagacgtcctgctcattggagttggctatgttggaccagcagatggctctttgtacatttagctgtggtgtgtgcttcagaaaggagcagggcttagaaaaagcccttttgtccgtaggagttgatgtggtgtgagtgatatatttctatgtttttaatgtacagcatctgtactttgtttgccttgataaaggtaagataaatgaaacgctgaactatgctaatctggaatttgtttttatttgcctgaaatatatttttttctgtgaaaaaattaaaacgtacttaagccaggagaatgaattatacagtgattgaaaatccatttaattcctatgacttttgttttgtattgcccaagtcaaactacatcacttgtatctccagcccaaatgtagtctgccttgaaaagtctttcagctgtgactgcaggaagtgggagtgtttttattgttagctaattgctgtgactgcaggaagtgggagtgtttctgttgttggctaattgaagttattaggctcagcttcagtcatgtgtaagttttgcagtgtaatacatatgtagtctggtctgtatatatgaaaatttgaattaaactgcagaatgtttatgtctagttatggtttaaattttcttagtagtatataaaaggtaagagtactgaaaaattaataaaattgcaagttaagaaatactgtgggcctgttttctatattaaatataatcttgaataatcattacaacttacctttattgttaagaataacattttt

SEQ ID NO: 17949 - DNA, 1794 bp, Homo sapiens
cactgcttgggtaggtcagagttcaaggacatttgtcaacaaaatgtttttctccaagtttattgaagggactttaaccagaaatttgcgagtcaagttacttaattagaaacatttatcagcagctctttagatgtgccaagcatcatcaataaactcaacgtactaaagtaaagcatccagaaaattgcagttctttttaaatgtaatatttgataaaataagaaaaacatttgaagtataaagcataatacacagtaattgacctttacccaaaataacaatgaaagcagcaccaataccattgcggccgcctgagtgcctgagtgcttgccttcacctggttgcctttcctcctcttccaaggtaaccacccttttgaattttttatttcacttccttttaaattttttctgtagttttattgtctatatgtaataaaataatattcaataatgcatgttttagaaccgtgtaaaatgatttcaggctgtgtgctcttctgggacttgcttatttcctaaacattgtggctctaggattcatccacgtgacttctcttcttttttttacttctgtgtaataatctattgtaagattgtatcacagtttattctccaatatatttggttaagtgctgttttccgctgttgtgactgttcaaatttctttgcctgtctcccaatggcacaggtgcaagagcttcttcagcatgtactttccagcgtgtgtcattctttaaatggctgtattgactggcattcccacccgcgctatgtaactgttcctgatgagccatattctctccaagagtggttattcttaaatttggtcttaaagttgtctagacttcttttatattttggatattacctgtgctgtccctgaaaccctctcccagattttgattttttttttttttgcattattgtatattttcatgaacagaactttaaaaatataattactggaagttattagagttagtccttttttgtggtggttttaagaaatctttttctaccccaggttaataaagacaatttgctacattttcttttgaaagttgtaagtataacatttcacatttaggtttagaatccacctggaattggtcctggtagatggtgtgaggtagattctactttaattgtccccccacatggatggccagttgtctcaactcttccctgttgatccgtgtgtgacctctgtcataacactcatacatgaagtgtttgtatatttctggttcttgactttctcttcttttcctattgggtgatttttatgcctcaagactacactgtcttatatactcgtaacttccccgtaggtcttgatatgtgggtgagcatttcatgttcctcacgttgtaatcctaacttagctgatttaaatattacatctatgtagatagatggtaagcgctttgtactcttcacttcaacatgtattaccgtaaagagagttgacttttcacattttaaattttgagcccatttgttacaattaagtctttctgagagtattttttataccctgtatttttctttcttttttttttttaaggtaaccgtacttttcccaaaatgctatattgcaattggactggaggctataagtggtctacggctctggctctaaggtaagccttgttactcgtaagtgtaaaaggccgtttgcatttctttgggattggtggaatcttcagacattgagctcagtccccttcattcttcactcagatcctaccacgtgtgttagactctagcaaacagctggaagagttta

SEQ ID NO: 17950 - DNA, 1027 bp, Homo sapiens
ctgtcacttttgactgtgcagtgaaaccatctgttacctgtgttgtaagtactgcagcttacttattctaaataaattcattgtaaactttaagttagaagaacaattcagacttgattattgggaagaaattctgaagaatttttatattcttttatgatttcccttttgagtatgtaagcagaaataaattaaaaaacccaatagacctttccatatcagctcactactgttttagttataatgataactgtcaagccagttgatgtctgctggaaatgcacttgacagaaatgttgctttgtaggactggagaagatctcagtctactagcatatctgaagcaagtctaattcgttcagatggattctgtgttctcaatagtgacagctagtgtacagagggggtggcagtgtctttctgccatagatgagcttttgaagggccagtgcttatctgtggtgagaagatggattcagtaaatgccggaatgcctggtagctctctagaacaaaattaagtggaacgcctgtcttatccagaataaattccagatagtccaaagatgtaatgtgaaaaatgaaaccctgaagtaccacagaaaacaccagatagttgctgttataatcccaaaatggagaatatttttctaagtatgaaataaagtttagaagccataaaataaagaattgatacatttgactcctaaaaattggagatttctgcatgacctaaaaaaaaaagcataaaggcaaaagacatggcaaactaggaaaaagcgtttctagaatatgtgacaaataatacagtaatatcagtaatatataaacacttcctaaaacccacacggaaaagatgacagtcttgtagaaaaacagtgttaggacatgagcagatggttcataggaaaggaaatacaaatagatatataacatgaaaaacatataagttttctcatagtatttaattaatacatttttaacccttagattggcaatttttttttaatttgattaactctgagttt

SEQ ID NO: 17951 - DNA, 1085 bp, Homo sapiens
ttagggaagaatattatctgttgctgtgtcacaagtgaccccaaaacttagcagctttaaacaacaaacattgatgatctcacagttcctacgagtcagggtctgggagcagctcagctggtggattctggcgcagagcgtctcctggggctgcagtcaggctgtcagccagggctgcggagctcggggctcgctcacagttggtggatgcagctcctcatcacctgggtgcttgcttgcctgaatgtcctcactgcatggtggctggtttcccccagagcaagtgatctgagagagatgggagctgcagccttttataaactagtctcagaaacgatgcgccgacacttccgcacttctttatggtcacgcagacccgctctggtatagtgagcagggaactatacaaaggtgtgaataccaagagtggggaacaacggggtcttcttggaggctaggtaccataatgtaacagtaaaggtgtttcattttcttctaggtatccagtgaattttttgaagaaggatttatggctgacgttgacttggatcacagttgtacactaaataagaaaatacgaaatgcacagctggctcagtataattttattttgggtaatttaagtttgtatatatttttccaaatgcttttttttcccacttcaattccaaaagaccaaataagaaatatggttcaactacttgattatcatgatttgtctatttaatacttacacaaaaggaagagtccatagcattcctagcttagctgttcctaggtactctttgttgtttgctggaagaagagttgtaaagtttcacctgaatcccctgggatagttttactagcaatagttcatattgcaagcaaacaacgaaaacaactctgaaaatgatcccatcagtagaattatatactttatatttcagcctcacaggcctgtaatattttccctcacttttctggcttattaggaaactttgggattaaactaacagaaagaaaagatcccaaatttaaaatgatctaaaggaaaagatttagatgaaaagtaaaatgtccttttagcatatgactaattagat

SEQ ID NO: 17952 - DNA, 1046 bp, Homo sapiens
ccaaacaaagtgtcttccaaaagacctgggtagctagagagtctgtgtatattcctgatattttgtgatcatagagaaatatacttaggtatcatggagtttctaagctgttgaagttacagttaagccaaaagtatgggtatgaatatgtatgccgcctgagtatgagttaacatgtttatatttctttccagttggttttaaatagtttaccataggtaagagatgatggtgttttgcattagaatggttgcagtgaaagtggtttaaagaaaagagagagaactagtgaaataggagatggagagggagacaggaggtggttggggccagtgcactgagcatgccttcctttgtcgcagagacggaagtatactccctgcacttcatacatccagacttcagacagcagtcagccttgtggggaaatctccccaggagccaaaagtaaagatggctaaagtgtgggtccttgagaggagtagggctggggatgggataaggacagagctcaaaaggaaatatgtagttgccattatataccctgtatttctgtgttctaccatttatcatgtattgttttgtgtttgtaatttgagaataaatatataaatatgcacatttataaaatgctatctgaaatagtcctccttgcatgtcctttcaccttcagactaaatactcactatgacagggaaagggcaaacatgtcccacagcggacactgtttatacctaccctgccatcttttttattctagaaaaattatattttgaaataattgtaggttcgcatgttgttctaagaagttatatagaggccggatgtggtggctcacgcctgtaatcccaacctttgggaggccgaggtgggtggatcacctgaggtcaggagttcaagaccagtctggccaacatggtgaaaccccgtctctactgaaaatacaaaaattagctgggtgtggtggcaatggctgtaatcccagctactcaggaggctgagctaggagaatcacttgaactcgggaggcagaggttgcagtgagc

SEQ ID NO: 17953 - DNA, 1027 bp, Homo sapiens
aaaaatcctggaggccagaaggaagtggcacaatacttttaaagtgctgaaaaaagaaaaaggaattttcaacccagaattctatgtctaaagaaaatacccttcagcaattgaggggaaatcaagacattggacccaccaaaagaatggctgtaggaagttttctaaacagaaaggaaatgatgaaaagaggaatcagggaactttaggaagaaaaagattgtgaaaataaaaacaggtaaatacaatatattttccttctccttttgcgttttctaaattatgtttgatcattgaagtaaaaatcacatgttctttctgatgttctaaatgtatgtagaagaaatgtttaagaaaattatactataaatggggtaaggtatagggaataaaagtttttgtacttcacctgagctggtaaagtgacaatatctggactgataagttatataatacctagagaaaccaataaaaaaaaaagctatagacagggatacactaagagaacctatagataaattggaattgaattccagaaaaatgttaaagtaatccataggaagacaggaaaaataaaacagaaatgaataacaagagagaacaagaaggaaacaaaaaggcagtgtaaagccctaacatattaagtgtaaatggtctaaataaaccaattaaaagagattgacatagtagattaaaaaatatgacccaggctgggtgaggtggctcatgcctgtaattccagcactttgggaggctgaggcaggcagatcatgaggtcaggagttcaagaccagcctgaccaacatggtgaaaccccatctctactaaaaatacataaattagctgggtgtggtggcacacacctgtaatcccagctatcaggatgctgaggcaagagaatcgcttgaacttgggaggcagaggttgcagtgagccgagatcatgccactgcactccagcctgggtgacagtgatactccatctcaaaaaaaaaaaaaaaatgacccccaaaaaaaaagaagtccca

SEQ ID NO: 17954 - DNA, 1042 bp, Homo sapiens
aaggagtggggtagagtaggaggcacatggtagtcaccatctgtagaaattctggtatctaccggtcatcactgccccagggtcaaaagatacactttgattaagatccagttttgctctgcctggctgtgattctgccctctgagtcatcctttctcttccataagaaatggcccatatgtgccttagggtagctttcttttttaaaaaaaaaaaaattatttatgtatttttttattttttatttttctttgagacagagtctcgctgtgtcgcccaggttggagtgcagtggcgtgatctcagctcactgcaacctcctgcctcccaggctcacgccattctcctgcctcagcctcccgagcagctgggaccacaggcgcctgccaccatgccaggctttttgtatttttagtagagacagggtctccctgtgttagccaggatggtctagatctcctgacttcgtgatccgcctgcctcagcctcccaaagtgctgggattacaggcgtgagtcaccgcgcccggcctggggtagctttgttctcaacctgattccttcctgtagaaggctgggggaatccaaagcccttatttcattttgtgctgcctttcaatctaagctagtacaattcctttaaaaactttgcgagtccttttctataaatttatcatcaacacggttagataaaagccacatccacatctttctgacaccgatccttctttgcctgggaggctactgtgagacaatagtacactgcagagtcttcagagccttcgtgtttaatggaaagggtctacaaagcacactcctaagactttcagaagccttactaggtgcacttacagtagatcattctgaggttttcacagtgtcttacagccccgcccttaagatctttaccgtaaggctgtgctttgatgattataatctgaatttgatccgtgtcctgaagcctcgtgagtcttttttggtacagtctaaggataagaaggtttcatttttgaacccagcaggtcctggtggctttatatttc

SEQ ID NO: 17955 - DNA, 1048 bp, Homo sapiens
aaagttctgtttgagtctctgctttacttcttttgggaatatacttagaaggggaatttctggatcctatggcaattctgtttttaagttttcgagaactcgccataccgtttggtgcagtggctacaccattttacagtcccaccagtgatgcacagggggttcagtttttccacatccttgccaacacttgttttgttttttttttaatcatggacatcctaatggttgtgaagtggtatctcattggggttttgttttgacttgcatttctctgatgacgtactaatggtgagcatcttaatgtgcttattggccatttgtgtattttcttgaagaaatgtctttggagaaatgtctgttgagctcttttgcccattttttaattaggtttttttgtatttgagttataagagttcttgatatattctggatatccatttcttaacagatatgtgatttgcaaatatttaattctgtgggttgccttttttgcagctacttttaagaactaaacacaattaatctttgttaaggaaaatgatttgttgtgaatatatagatacgaaacagttaaatcatgcagatacgggtttttctcccaacaactagcttctttaagtagttatttaatataaagtgccttgtataccccgatagtagtgatggaagcagaaaagaaaggaaaaggaaaaaaacccttagttttataaatatatcatcattacgataaactttgcttttgtttttatacaaattaataatatagctgtgtccttgtcagaattttattgattaatgttaaaattagatcttctagaacagtactgtccaatagaaacataatggaatccactagtctgagctacatgtgtaacctataattttatggcagctacattttaaaagtaaaagttgcaattaattttaacaaatttttaacccaatatataaaaagtataatttcaatggtagccagtataaagaatgattaacgaatgattttcttcttctttttgcaacattatacttccaaagtccagtgtgt

SEQ ID NO: 17956 - DNA, 1049 bp, Homo sapiens
tctcaaaaaaaaaaaaaaaaaaaaaaaaaaaaaacaataaaaaaaaataaagaaagcacacaatacattacataatatattagaaggtaataagccctatggaaacaattacaaagggaaggagaataaattggaaggaggggctgaaatttaaaatacggtaaagacaagaccaatgagtaaggtggcgatctaggggaagagtgaactgagcaacagcaagtgcaaaggccctgctagcaccatgagcacgatgagagatcgtccaggaggcggtgttgatgcggcaaagggcaacaggaagggcattaggacttgaaatcggagacgcacgcaggggagggagtcagtgtcggaacctggtaggccctgggagaactccggcttttcgtctgcgtgagctggagaagagccgaaggtttctgcgcacagcacggacctgcgtgcctcagctttaaggaaatcaccgtggccgccgctgtgaacgcagagaagggcgcgagcgtgggagcaggaacccaaggcggtgggaaacggtggggctttctgagtgtattggaaagtagagcccacagatctgctgcagaccagaaaggggcgcgagaaagagcggacagaggcagacgccggggctggcggcgatggagcagcagtcggaggacgcggaaggcctgcgagagtcgcccgcgcccagcgccggccttcgggtcccaccttgcgggtgatgttgtgcacgtaggggcacgtgttgcaggagaagcggtggcagcgttgtccctcctccacgatcagcccgttcccgcagccggggcagaacagcagcatggtctcgaactccgcaggctccaactcccggcagctcccactgccgctcagcgccgatgcgccgcccgcctcgagctcacattggtcctggcagccttcccgccacaccaaccaaccaatagacagggcgattctgcgctcccggccctgctgcaggctgtctcgcacttgtcattggtcactgcagccgccccaccccccccggcgcgccagtggctgggcgg

SEQ ID NO: 17957 - DNA, 1027 bp, Homo sapiens
acgccagccagagcctgtggagagactccgcctgctgacactaaacgtcctgggaagtgggcccttccctgggtctctgcactgactcccccactcctgaccctggtgatggtcgccactgggcagcagcagccttaccagtcctccatgatcacacccagggacctgcatgggtgaggggacaccctgggcctctctcccgcccagcatcctccctgagtccccacacagggcctcactctgcaccccaccagggtcccgctcacaccaggcagccttcatagtggtctccctggccaccttgggcagagctgggtcatgcagcaccccatccttacccggtgccctctccttgccagcttctccccaggccagagcggccatcgcgtagaaagaaccagggtgtccccgggacaggccgtcccccaccccatcctgtagaagtccattccccttttccctcctgtgctctgtcccccaaggagtcatggaactcagggtactgggcctcaacgggaacctgagacagctccagcttcgcagcccttcccggagctacagggggatcctctagcatggggggtgtgacttggttcctttgaccaggtcctgtgaggaagcctggagcaagggtctcccccagcaggatgggtggggcctgctctggagctgagcccgtggccgctcacaggtgtccttagtggtgttgcagctgtctactggctgcatgtgctgtgaatatcccaaggaactggctgtggaatgcgtgtttgggtcagtctgtgccctctcagtagacactggagctgctctgtccctgaagaggccccgtgccccaggcatggcaagcgcctgcctctccccttccggtgctcacacgcccacgccgtgccacccgatgcaggactcacctctgtgccttgctgctcctgaggcccaagggcagccatggtgctctgtactgctcgggccgcccaggtcacagagcctgagcttcgtagccaaagcagcctgatgacccacccac

SEQ ID NO: 17958 - DNA, 1064 bp, Homo sapiens
ggtacccacaggacttgagaacacctgtgcctccctgctcggccagcggccacggtgccagagtcaccaccttgccggccactcctccagctgccaggggcatcccacagactctgcagaggctcgggcagtatccaggctttgggggcccatggaggtccctgacgtgtgtgccctgtggtcttttcgcaacccttgacacacataggaactgttcttgcctaggaggccttcacaggcagccacatgggcccgggagccccagccatacaaggcacgaaagggaggggtctttttatttttattttttgagatggagttttgcttttgtcgcccaggctggagtgcagtggccctatctcggctcactgcaacctccgcctcccaggttcaagcaattctcctgcctcagcctcccgagtagctgggattataggcatacgcaaccaatcccggctaatattttttgtatttttagtagagatggggtttctccatgttggtcaggctggtctcgaactcccaacctcaggtgatatgcccgcctctgcctcccaaagtgctgggattactggcgtgagccactgagcctggctgtggggggagggggggtggtctttcaagctctcccaagccttactggtccctgtgctgcagcctggggggccacgaagaggcactggtgctcggcttgtccacggccagggctcagggcagaatggagcagcacgcttgttccctgctgggttgtcaggtgtggagagggtgctcctggggttgtggtggcctggggcactcacggccccatcccccagatgccccgtggtgtgggcactgccaggccctggcccccgagtacagcaaggcagctgccgtgctcgcggccgagtcaatggtggtcacgctggccaaggtggatgggcccgcgcagcgcgagctggctgaggagtttggtgtgacggagtaccctacgctcaagttcttccgcaatgggaaccgcacgcacccggaggagtacacaggtgaggggcaggccggtcattgggggggcggtggccaggccg

SEQ ID NO: 17959 - DNA, 1302 bp, Homo sapiens
gcctggcggagcccctttggctctgtccagattctgtgggacatacagggtctgggctcctctggaaaccagggacccgatgccggagggtagcttggctctggagcagcctgggactataggaaggtgaggacgtcttctgtttccctggcagcgtcccctccagaggaggacggctggggcggagctcagcgctgaccctgggtctggaagcgacaggccttgaaactccacagcagcacaggccccgtctcctggctcggacagaaccctgctaccttccctcttcaatcttcaggcccctttttgtccgtgtttccagggctcacctggtggggaaagtgtgtttctccctggttccctgccactcattcacctcagacacagggtgggctctgggttcttcctcatgtggaaagtcggggcttcagaccatgtctgtcgtcatccagaagggatggagtcaaaagtgaggctggagttttgcaggatctccagacttccctgaggccactgagctgggctgtgcctctgtggacctcagggtggtcgctgagctgggctgtccctccctggaccttgaggtggtccctgagctggctctgcctctatggaccttgcggtggtggtccctgagctgggcagtgcctccctgaacctcggggcgatctcaggcagcctctgcctctgctgggaggagccatggcccctgggagaggctagaagccctggggacacattgccttgggtgtccctgacagggactatcatgggggtgtttgtggctgtgggcaccatccctgtcccttccagagtgccctgcatagaggcagacaccctgaagcctggtgacccctgggctctggctgggaaacccgggtcgtggggacgtgaaagggtgaggtggcagtgcctctgacctcttgccttttgaaggagggccctcctggacccgggagcggaccctggtggcggtgaagcccgatggcgtgcaacggcggctcgttggggacgtgatccagcgctttgagaggcggggcttcacgctggtggggatgaagatgctgcaggtagtgggactctgggcttgtgggtgtccctgtggggatggggttgggggatccttctcggcctttcacatcccagccagcgccggggcagggcctggctttggcagttgaaggggcaggagggatctattctgcggtgggggtgctgcccatgctggtgttatctgcaaggtgcctgaggtcagggcatcacagctgctgtgctagtgcccacgtttactgtctgcggctc

SEQ ID NO: 17960 - DNA, 1074 bp, Homo sapiens
cccgtcctgggttcgcggcatagccccgcccgggcccccacgcggaacagaagtaacggacccttttttttttgtttttgtttttgaaacggagtgtcgctctgtcgcccaggatagagtgcagtggcgcgatctcggctcactgcaacctccgcctcccgggttcaagcgattctcctgcctcagcctcccgagtagatggaactacaggcacccgccacaatgcccggctaatttttgtatttttagtaaagagggggtttcgccatgttgtccaggatggtctcgaactcctgacctcgtgatccgcccgcctcggcctcccaaagtgttgggattacaggcgtgagccaccgcgcccggccccggacccttctttattggcctcaaaacgggtcattttgggaagcggcgcggggctggccgcgcttccctgggccccggccctccccatggtgtttacggggaggcgaacggggagcccagaggctgcgagcctggcctggacccaggagccaggggtatcccacaagtcctggaggctctgaacgcggcgctgacgccgaatacctgtgaaaaagactcggggaggagacccgcagaccgccgagcttctgccgcgggaaccgcgcccccggccccgcaatgcgcctgcgcctcgcgcgccgacttccagtcccagcaggccgcgggcgggggcggggcctccggggagaattcgggggaggggcggggcctccgggaagcaatcagggcaggggcggggcgtccggggagtggggcggggctcccggttccaggcgagttcgcagctgcgcgccgggtcctggaggccgaggccgctcccgcccgttgtccccgcagtccccgacgggagcgccatggcccagccgccgcccgacgtggagggggacgactgtctccccgcgtaccgccacctcttctgcccggacctgctgcggtgagcggggcctgggaagcgagcgcagccttggtgcggggtccggtccgcgggcgccggcgcccccacgtggtccccgagggctcgcgtgttaggaaacctgtcttgcctgg

SEQ ID NO: 17961 - DNA, 1046 bp, Homo sapiens
acctgggaggagagtctcacctgtgccacctctggtctgcagcaggggcaggacatgggtgacagtggcctggagggcgacgcagagggaggattctaggacaggtggcaggtggggggagagcgtggcaggttcccacaaacatccactggggtcgtgggcacttgcaggctgtgcttccccagagtggggtccagcagcaaacccagggtccccgaggaacccggaagcatcgtcctctgcagattccaaaggccttttctccaggccgaggctgcagggctgctgtctgcctctttacctggcttctaggccgccaggaagctggctggggccaccggccggcgctgcctccctctctctatggacgtccgagcgcccccagctgtcatggccgccgtggaccaggctctgaaggagtttggcagaatcgacattctcattaactgtgagtcggtgctgagtgaggttggtggcttctcacaggttggtggtaccatttggaggccctagaactctggtcatggggtggggaccatgccagggaacctagctgcctgtgctggggtgggctgcaccccatccaggtacctgaggccaagactcaggctccggccccctgtctccggccccatctccggccccctgtctccgggcccctgtctccgggcctctgtctccgggctctgtctccgggcctctgtcttcggccgcatctccggccccctgtctctgggcctctgtctccgggcgtctctctccggccccatctccggccccctgtctccgggcctctgtctccggccccatctccggccccctgtctccgggcccctgtctccaggcctctgtctccggccccctgtctccgggcccctgtctccgggcctctgtctccggccccctgtctccgggcccctgtctccgggcctctgtctccggccctctgtctccgggcccctgtctccgggcccctgtctccagccccctgtctccggacctctgtctccgggcccctgtctccgggcctctgtctccggccccct

SEQ ID NO: 17962 - DNA, 1067 bp, Homo sapiens
gcatattattgaactcccaggctcaagcgaccgtcctcgggcctcagcctctcaaagttctgggattgcaggcatgagccgtagcgcccagcctggcatcgccttttatttgccctgtatcatttccagtctcttagccttgaatttgagtgaaagtgtgtgtgaatgagagtgagcatgtgtgtgtgtgagcagttacatatgtgagctggtgtgtgtgtgtgtaatatgtgtgtgcggtgagatgtgtgggagcatgtgtctgcaggatcagggatgtgtgtatgtgggagtgggatatttgtgtgtaagtggcatattatgtatgtgtgtgagcaggtgagtgtatgtattctgggtctacatgctgactgaattgctgaaaggcaaatgaagcttgggttgtataaaacagaaaatgaccaataatcccactatcctgagaaaaataacattcccattattttactacatttcttttcagactttttttttttttttgaaatagagtcttgctctcttgcccatgctggagtgcagtggcacaatctcagttcactgcaacctccaccacgtgggttcaagcgattgtcttgcctgagtctcctgagtagcttggactacaggcgtgcaacgcctggctaatttttatatttttagtagagacggggtttcgccgtgttgactaggctggtctcgaacaccagacctcaagtgatccacctgcctcagcctcccaaagtgttgggattacagatgtgagccaccgcacctggcccagaccttttttaacacagacatagacacacaggtgactgtctataaaagtacacaattgagatcatattggggtagaagctaaatttttttttttttttgagatggagtctcgctctgtcacccaggctggagtgcagtggcgtgatcttggctcgctgcaagctccgcctcccgggtttatgccattctcctgcctcagcctcctgagtagctgggactacaggcgcccgccacccctcccggctaatttttttgtatttttattagagatgaggtttcaccgtgtt

SEQ ID NO: 17963 - DNA, 1049 bp, Homo sapiens
agtgctgggattacaggcatgagccatcgcgcccggcctggatatgtagggtttaaagcatttaagaaaatattttccgtcaccaaattgtcttccagaaaagtattgccaatctgatacaggaagaatggcatatcaacggagtttcagtttgtatttcctggagtgtatttgagctgatgttcctctgcatgttaataaacaagtgttttcgttcttgtgcgtgtctgtgttgtggtgtgggtgttctccaccctgaggcctctctttctcaacctgtgcatggaggttggccgaggcagcctctgaagtacatggagccctggacagcgccctgagtttctgtagggtttctttcttttgtggtattatcctttcttacgagtttcagatataggccatcagtctgcgtcattcagtaaggaataaagaacatggaaatgcctacttttcactacctttgttccggtgtgacgttctccttgtaaagggcagagggtagtagactaaggcaggcagcagcaggacggtgctgagaacggctctgaagagtctctcttttgtgctgacttaaaagttttctctactgttggatgatctcttgataattaaaaaagaaattatgatactgatagctgttcggcctgcagaataaagctgcagttacttcattcagcaaggtctcaggctcctaattttagagctcctagaattttgtagtcctctcaagattgggttctggccaggtgccatggctcacgcctataatcccagcactctgggaggctgaggcaggtgttttacttgaggtcaggagttcgaaaccagcctgggcaacacagcgagaccctgtctctattaaaaaagattgggttcaggccgggtgcagtggctcatgcatgtaatccaagcactttgggagacccaggcaggcagatcacttgaggtcaggagttcgagaccagcctggccaacatagcgagactatctctattaaaaaagactggagcctggtgcggtggctcacgcctgtaatcccagcacttcgg

SEQ ID NO: 17964 - DNA, 1125 bp, Homo sapiens
accaggcgggacagagtgtcgggctcattcaggtgctcagcagaattcagctccttgaggttatagaactgaggaccctgtttgctggttggtcgtttgccagaaatggttcttaggtcctggagaaccctcaggttcaaccacatggtcctcccaggtatggcagcttacttcttctttgagaccaggaggctgctacgatggagtcttaagttaacataaatcacagctaggtgtggtggctcacacctgtagtcccagctactcaggaggctgaggtgggaggatcgcttgagcctaggatcttgaggctgcagtgagctgtgtttaccacaccactgcactccagcctgggtgacagggagaccctatctcaaaaaaaaaaaaaaaaagttttaggccgggtgcagtggctcacagctataatcccagcactttgggaggctgagttgggtggatcacttgaggtcaggagtttgagacccgcctggccaacatcgtgaaaccctgtctctactaaaaatacaaaattagccgtgcgtgatggcgggcatctgtaatcccagctgttgcgtagactgaggcaggagaattgtttgaacccgggaagcagaggttgcagtgagccaaggtcgtgccactgcactctagcctgggcgacagagtgaggctccatctcaaaaaaaaattttgttttaaagattaagttaacctcgtcacagtgactgtgccaccacatgcacaggccttgcccacactcaagagagggggtcttagaattctgcctgctaccatggtctagtcttggcacaccttccttgacaacatggaagccaggtcactacccaggccacctacaaggaagttcaccatttgacctgccgaacgtgcacaacaaactttttttctctttcttgagacagggtctcactctgtcgcccaggctggagtgcagtggaacaatcttggtatactgcaacctctgcctcccgggctcaagcgatccttctgtctcaccctcccgagtagctgggaccacaagcatgcaccaccatgcccagctctggctaattttttgtatttttggtagatatttttgtatttttgtttcactgtggtgcccag

SEQ ID NO: 17965 - DNA, 1053 bp, Homo sapiens
acaatgcaatttgtcagtaagtttttcatactgcagtcaccctggagccagtgactgagtggattctccaccatggtgtttctgtaacttattgtccgtctgctggagcggtgctggctggctttggccactctggtttatgtctcttggctcggttttctgccactactggattttgcagggaagggcaggctgtctcatttttcacagtttcacctttttttttttttttgaaagcctctgaattgagtattttggacttggagaattagaactatccccaaatcatcaattacatgaaatccatctgttctacagattataaagaaaatataattaaaatggagttttaaaaatgtatactttgattcactcttgttcattctaacatggtaacatgtaaaaggggcctattctagttaatgatttgtttaaaaaatatttggttaatgtttcagaataaacaacttggtactttgtgttcaattagtagcttcagtgtggaaattcttaggaatcttcaggacagattggccagtctggactccggattaggtaactctcaggtacccagcaagactctcacattcttaggaatgagcttaggaatgaggacttttgtgagataagtggggagatgttttataaactccagttgtctccaggaagttggttgatgatggacttccgaggctagagtcacgctagcacacagagccctaggattggggcgatggccccggcctcttccgttgtgaaggggaagcggaaactcagtctctggctcaggaattccacactgtggggtcccttagctggggctggccctgtttgagcctgactttatgaggcatgttggctgacagtggcgagagggccagccacgggggcccgggccttgctctggtgccctgtgtgcttcgggctctctggattgcctcctgggcgatgctatagccttgctgaccacgtgctacaccccccatccttttcctgaaacagagcagctgtgtcctggcatctccagcagggctgcccttgagggttctgtgc

SEQ ID NO: 17966 - DNA, 1105 bp, Homo sapiens
gaaaagcaccttcctgggttgtctttcttggttccatgaggtggccaccttgtgagacgagaatttataacccccgtttgcggcagggctccaggtggttgagtcacacgtctgaggtcacacggcttttaataaaggggccaaagatggaactgcggcctcccgcaagtgcgccaggctcctggcagctcggcctggcccttcacgtctcttccagtgaggctcaggtgggtgcagcctggggtgggaccctctggtagccctcgcaggtcttagcacactgtctacttcttttttttttttttttgagatggagtcttgctctgttgccaggctggagtgcagtggcatgatcttggctcactgcagcctctgcctcctgggttcaagcgattctcctgtctcagccccccgagtagctgggactgcaggcacgtgccaccacgcctggctaatttttgtattttcagtagagatggggtttcaccatattggctaggctggtctcgaactcctgaccttgtgatccacccgcctcggccttccaaagtgctgggattacaggcattaaccacggcgcccagccactttgtctgcttcttacgatactagaactagagtgcaaagggcatctttttctgctgggactgcagcttttctgagatcttgtttatttgcaaattgttaacctcagagtcttctgagcatgaaatgttggccacttttcctaaccagcaatttcattttcattaaggttgaaattataaattgaaaatgttggctgggcacggtggctcacgcctataatcccagcactttgggaggctgaggtgggcagatctcttgaggccaggagttcaagaccagcctgggcaacatagcaaaacctcgtctctacaaaaaatacaaaaattagctgggcacagtggtgcatgcctgtaatcccagctactttggtggctgagacacaagaatcacttgaatccggaggcagaggttgcagtgagctgagatggtgccactgcactccagcctgggtgacagagtgagaccctgtctcaaaaaacaagaacaattagaaaaagaaaaaaaaagttctgtttaa

SEQ ID NO: 17967 - DNA, 1052 bp, Homo sapiens
ttactatctacctatacctggtcctatgctagatgctagatacttaagagtaaaaacaagttgggtgtggtggcttatgcctataatcccagcacttcgggaggctaaggcaggcagatcacttgagctcaggagtttgggactagcctgagcaacatggcaaaaccccatctctacaaaaaaatacaaaatcagcgaggtgtggtggctcacacctatagtcccagctactcaggaggctgaggtaggaggattgcttgagcccaggagtttgaagctgcagtgagccaagaccgcacgactgcactccaacctgggtgtcacagtgagactctatctcaaaaaaaacacagcagtaaaaacagtaaaaacaattggttgcgatggctcacacctgtaatctgagcagtgtggaggatcacttgaggtgcggagtggatgaccagcctgggcaacagagtgagaccctgattcaaaataaataaatcaacaaacaaacaaacaactgagccaggtgtggtggcacctgtagttcccagctacagctagatcctgtctctattttattaaaataaaaaagaaattactctgccaggctcagtagctcacacccatagttctagcactttgagaggccaaggctggtggatcacttgagcacaggagttcaagacagcctggaaaacaaggcaaaactccatttctacaaaatttcaaaaaattaggcatggtggcttttacctgtggtctcagctactcaggaggctgaggtgggaggatcacttgagcccaggagatcaaggctgcagtgagctgagattacaccattgcactccagcctgggtctcaaagagagacactgtctcaaacaacaacaacaaaaattactcagagtaccttgttttctgctctcagacatgtacctatttttcatttaaaaaaaagttgaattcagccaggcacggtggctcacgcctgtaatcccagcactttgggaggccgaggcaggtggatcacctgaggttaggagttcgagactggcctggccaacg

SEQ ID NO: 17968 - DNA, 1030 bp, Homo sapiens
ttctcactagtttttaagcagtataactcttggtggggcatgcctgtaattccagccctttggggggccgaggcaggtggatcatgaggtcaggagtttgagaccagcctggccaacttggtaaaaccccgtctctactaaaaatacaaaaactagctgggcctggtggcacgcacctgtaatcccagctactcgggaggctgaggcaggagaatcgcttgaacccagagaggcagagtttgcagtgagccgagatggcaccactgcatttcagcctgggcgacagagcgagactctatctcaaaaatgaaaacaaaagtataactcttttgggggacacacattttgaacagctcatttgtggctggatctaactgctagctagcgcggctcatcttctgtggaccgtggaaagcacgttgggcgtctgggtgcagaccgtccggttcatacagtctctgccgtgtggcctgggcctcttggtcctcagtgtgacgttgcatgtgggccttctctgttcccgtcaagcatcaggaagaagtgtcctgaggagaggaggagatggggtggtgaggggtgctgagcccctcgtcattgcttctgagggagtagcaggtttcaccatggtggcccggggaggcggggaagggcctgctggccgatggaccagtgtgtgttttcctctcgctgattctcctcccctcagagggcagttttctgtcacagtatctgagcctgttggtaaaacaagcacccaatcataagaaacagaaaataaggtcttcctgtaacgtagcctaattttagatggcggctgtggaagggagccacacctccctgtcactgtgtaggaaggaaggggctgatgcagacaggcagcgccaagttgaagaccctattgggaggccatgaagtggcacaggcctcctggttttggtttctttttttttttttttttgagacggaatctggctctgtcgcccaggctggagtgcagtggcgcgatctcggctcactgccatctccgcct

SEQ ID NO: 17969 - DNA, 1057 bp, Homo sapiens
gggccagaggactggggcgtttctaaacttgggtctctgtgcttggtaatcacctcttcctacgtgtttagtttgtccctgtctcctgttcagtgttttcattgttacctgtttgaagtgtaatgtctatgctacattgtatgtttcacttttcacctttctttacttgagcttccaaatggtttcccacagcatgtgggtcccagcgcccgcgatgaggctgcctttgctcctttgccttcgcgtcgcagacgcagcacccctgccagtggcccagaagcccttggaggtgaagtcacagggaggttagctagcaccaccacaaaatctaacactgagtttcgacaggtcggtctttttgggggttttttgagacaggatctcactttattgcccaggctggagtggtgcaatcatggctcactgcagcctccacctccctcagcttcctgagtagctgggactacaggtatgagctactacgccgggctaattttgtattttttgtagagacgggttcaccatgttgcccaggctggtctcaaacgcctgagctcaagcgatccacccaaagtgctggaattagaagcaggagccaccatgcccggctttaacgcacatcttaaaaaatcacaaaactattgtagatttatcattcatgcatagtttttgctagaggtggtttttggagtaatcataaatatagtacagtaagtacaagtttacccggagacatggttcgctatcacattgatgtgtttttggcaaaagagaaagcagtatggttttttaccttcttgttaaagaagggcttttgctttgcaaggaggctctcaggctgcccctgctttcttctgggcacccgacccagaggagcaggtgtgtgcagggccccctgaggctcgagctggtgcctgtcctgggctcctggaggcagctgagggatgtgggctcactgcggtctaaaggcaagagccagaacattgcacagctcattctctctccacgtgcttttgttccacaccatgtcctgtcctgttcccctcggcccctcgtg

SEQ ID NO: 17970 - DNA, 1027 bp, Homo sapiens
ctctctagcactgaccctcttgccgcaaagctgcacagcatcctcactgatgaggcgtttgagttttactgtagccagtgccacaaacaaatcaaccgccttgaggatctttctgcccgcctgagtgatcttgaaatgaataggtaactgaccagcgcctggccttgctgtctgttcccagggtgtgggggactccggatacccacagcccccttgagggcctgccccgaggcgaccaggagcctctcaggcagcgggactctccctggggccccgcctcccaccctgcacgctgtggggccaccagggccctgcctcctcccctgcatgcgcagcccaggccagtgcttgtcttggtgggaggaagtgatcggtctttgcaagctgtgctgtctgtcctgtgtgtgaaagaggatactttctgcattttactaaaagatttctttcattgagctcatgagacagaattgggaaagttaaagatttagtctttaagaacagatatgtaaacagctttcaggattgtcagtttaaatggagttttgaatactcacagtgagcgtgtgagggagctcactgtgtctcagcaggggagctcttgtggctggccctcatgtctaactcccagttacagaagacggttttgagtgctttgcacatattgacgtgcccgttgggcatcgtgttgatttcgcttgcggtgaagcccctgggtgggcagctctccagaagggtctggtgaagaaacgggccactttggagctttccacagcagccctagcctagcagaagaggtgagtgagcatacaggctcatgctggcaatctgggacggcttcctgaagaacgggacctggcctgtggggagggtttgtaaaggtggcagaaaggtgagttatcctgacggttctagcatgtttagaggtatctgtgaaactgcttacctgtcttgagcctgccctgtccctgccccagggggcttctgccgaggcacatccttgctggcgggcgctcactgcccacggcct

SEQ ID NO: 17971 - DNA, 2109 bp, Homo sapiens
atgagtctgtcctgtcctattagttctagggagtctcaacaataataagataaaattaaatttgtattaaggctgggtgcggtggctcatgcccgtaatcccagcactttgcgaggctgaggtgggcagatcacgaggtcaggagatcgagaccatcctggctaacacggtgaaaccccatctctactaaaaatataaaaaattagccgggcgtggtggcgggcgcctgtagtcccagctactcgggaggctgaggccggagaatggcgtgaacccgggaggtggaacttgcagtgagccgagatcatgccactgcactccagcctgggtgacacagtgagactccatcttaaaaaaaaaaacctgtattaaaatatacattattagtctccagtcgagaaaggagagccacacagtaatttgaacagggacagtttaatactacaaagaatgggctgagtgtgggctgaaatcgcagtgctttgggaggctgaggtgggaggatcacatgagccggggaggtcgaggctgcagaggtgggaggatcacatgagcctgggaggtcgaggctgcagaggtgggaggatcacatgagccggggaggtcgaggctgcagaggtgggaggatcacatgagccggggaggtcgaggctgctgaggtgggaggatcacatgagccggggaggtcgaggctgctgaggtgggaggatcacatgagccggggaggtcgaggctgcagaggtgggaggatcacatgagccggggaggtcgaggctgcagcgagctgtggttgcaccactgcacttcagcctgggccacagagtcataccttgcctctaagaaaagataatgcaaacaaacaaacaaaaaatttaaaaaatcattagggaaaggaaaagaatgtcacaggctatgggagtaatgaggcactggttgggatgagtaaaaagaactctgcagagtgtagggacagcaggcacaggagcagccgccacccagggccggggcagagccccccagctacagtcactgccacccagggctgaggtctgcaccagctgcaaacggcgtggtggggacaccaccgtgctgtcagggcttgtggggaacctgcctcctggctgccaggaaagctattctgttgcaggacacttggcagaggcacccctagagaacagctacccgaatggggtcggggaagcccctggctctggctacagtgggcaggatgctccctggagtaggtactggggagactgcaggtgtcggagggccctgcagagagtggtcagaaccaggaggcaaacctcttcctgctgtgttcactcctcggctccctctgctgatgacacgcagcattgtggaggaagagcctgctaagggcccagctctgtttctacagggcaagtaaaaaggatggacttagagctgaggggctctacgttaatacctggcacagcagctgattctcctccagtagatttctttttttctttgagacagagtttcactctttgttgcccaggctggagtgcagtggcgtgatctcggctgactgcaacctctgcctcccgggttcaagcgagtctcctgtcccagcctcccgagtagctgggattacaggcatgcgccaccattcccggttatttttgaatttttagtagagacagggtttctccacgttggccaggctggtctcgaactcccgacctctggagatccacccgcctcagcctcccaaagtgctcagattgtaggcatgagccaccacgcccggcccctccagtagacttttctgcctgaccctggaaagaaaatcagaggtgtttttgagacaggtaagctgaagagagacgtggctttgtgagttccaggaccgtgatggttcccaggccccaggggtgagggtgtcttcctgcaggctgaggctaatagttcagcagctagactgtaaaatacaactttggacctcagaaatgagggagaaggtaagtttggcccatgtgccactgcagatggttaaatcagacagctgatgtataattggctatatttactgccctgaaatggcaacgggaaaggtttccaaactgatgcctaggcaggcgt

SEQ ID NO: 17972 - DNA, 1064 bp, Homo sapiens
cgggcgtggtggcaggcgcctgtaatcccagctactcaggaggctgaggcaggagaatcgcttgaaccccgggagatggagcttgcagtgagctgagatcacaccactgcactccagcctggtgacagagtgcgactctgcctcaagaaaaaaataaaaaaataatactaaaaccttcaaggattacggaaaagctgtgccctggagcacatgggtgggcacataaggattggccctggtcgtttgggggcgtctgttggtcacagggcggccccagcagggtttccctgagacacagggcacactggccctgtagaggcgagcttcctggagtgagtttcagctttgttcttgtgtcccaggctacagcaactggacgaggagaacagtgaactccggtcctgcacgccctgtctgaaggccaacattgagcgtctggaggaggtgagctgccaacagcctggagctgtggccagtggggccagcccatgccctgcctgtggggcagctgaggtagccctgagctctgtgctgagcgggatactgtgctgtgtgtgagggaacggggccagctcagggcccaggccgctggaagacactggaccgtgctccacccacaggagcagggcccagaggctcactcctagatggacccagggctctgaatctgggaattgtcctccaaggggaaggcatcagccagccacttatgccccaaccactgccgacgtggaggcagaggctacacatggggctcccacaccccagcttgtcactgcgagacctccctgcccccacctcaccaggtgtgctctgggaagctcccaggaaggatattctcagagcacttgggccctgactcccatgaaccagaggagcccggctggaggtgcccacagccactgagtcaggtcctgtccacacaaaggtccttcctgcccctcgtgagaaacggccctcgtggcctgcgtgtgcgcctctacccagaagcaggtggccttgacctccactgagaggcaggaaggctcagacccagccctgtcgcgctccaagcacgggcgcca

SEQ ID NO: 17973 - DNA, 1081 bp, Homo sapiens
ggcagggcgcagaggctcacgccataatctcagcactttgggaggccaaggcaggaggatcgcttgaacccgggagttcaagaccagcctgggcaacatagcaaggccccatctctaaaaaataaaaaattaaccaggcattgtggtgcgcacctatagtcccagttccttgggaggctgaggtgggagaattgcttgagtccaggagacggaggttacagtgagctgtgatcacaccgctgcactccagcctgggcgacagcgagaccccatttcagaaagaatttaaaagggcagtgatgtgcagggtggtgggaggacatcccccagaagagggggcagacacagtaccagcaccacaggcacgggaaggtgaggaggcaggtcccgacggaagtgggctcccgaggtcatgggcagccagggagtctgagagagctcagtgccactgcagccacaaagaatggcctgcggggagtggtcccatctgatcaagagtcccccaaaaacacaagccttgaaaactggaccacctggtccagcatccaggaagcggactgtgcatctgcggctctcgctctcccgccccccgcgcgagatgcccgcctgcctgtcactctcagatgcagatggagatggagaaaccaaggcccagggaagctgaggacccaggtctgccagtcccctcagcccagctgctgcttgcgggctggtgaccagaagaggaccaggcgtggcctacagtgaggagtccttgaaccctcagtgcaggtgcagcagaatggttccaggtcacagggcccaagaaccctgattgcttcatgagttagaactgaggagtgacaggccgggcgcggtggctcacgcctgtaatcccagcactttgggaggcccaggcaggcggatcacaaggtcaggaaatcgagaccatcctggctaacatggtgaaaccacgtctctactaaaaatacaaaaaaattagccgggcgtggtggccggcacctgtagtcccagctacttgggaggctgaggcatgagaatggcgtgaacctgggaggtggagcttgcagtgagcagcgat

SEQ ID NO: 17974 - DNA, 1020 bp, Homo sapiens
cccatcgtcgcgggggagaagctggaactgcacccccaccccccccagcccgctcacctagggctgcccccaggcctccctgagctccaaaggatatgttctttggtgctttttttttttttggctctgtctcccaggctggaatgcagctgtggtgctcacgccatcctcccacgtcagcctcctgagtagctaggtctacaggtgcacaccaccacacccggatagtgtttagttttctataaagacagggtctcactgtgttgcccaggctggtctcaaactcttgggctcaggtgatcccccacgcacggcagctttgacacttacttgaccctttcctcctaagctctaccctgacgctggctgtgtgtcccagagacttaatcagaagctggaagaagggctgtgacgtgtgtgacagcaggaactgctggtcaacccacagccggccagcctgccgggacgccatcttggccccaatcttggcagggagaggggagtgtatcggactctggggagagcagctgcctgcacgggcagggtcctcccgtctcaggattaacgttctcaactgtatttgatttctcctcagccagagggggtaaggtggccttcccagaagcacaggtgggccgcgtgtcagaggccctggacagcctgtgcctctcccaggcctcccagcaggggtggctctcgcccctctggaggggagaccccaggaaccggcccccgccctcagccatagcctcacagggtccttgtttctcggggcctggctctgtgggtgcacaaggcatggtcgggctcccgtccttctggaagtctccagagtggcatgtgggcagctgtgtgaagcggccccccagatcttcatccagcctggcctgcagcagctccctacgccctctgctacctcccctgcctacctttgggtagacgttctcttgacccttccttctgtgataaagcaaaagcgtgtgatctcttttctcaccaaggaataaaacgtctctgaat

SEQ ID NO: 17975 - DNA, 2052 bp, Homo sapiens
tatttatttagagacagggtcttactctgtcacccaggctggagtacagtggtgtgatcacagctcactgcagcttctacttcctgggttcaagagaacctcccatctcagcctcccaagtagctggaactacaggcgtgcaccaccatagctggttaattagaaaaaaaaaatttggccaggcgcagtagctcacgcctgtaatcccagcactttgggaggccgaggcgggtagatcacctgaggtcaggagttcaagaccagcctggccaacatggtgaaaccccatctctactaaaacaaaaattagctgggcgtggtgacgggcacctataatcctagctactagggaggctgaagcaggagaatcgcttgaacttgggaggcggaggttgcagtgagccaagattgcaccactgcactccagtgtgggcgacagagtgagactctgtctcaaaataaaaatacaaaccctgagcttgggagggtccaggctgcaatgagctgcgatcgtgccaccgcactccagcttgggcgacacagtgagacgctagacggtgtctcaaaaaacttaaacagaaaaatgtagaaaggattgtcgttccctttctcgttttccagagggcagaggactctcggcccctgctttttgagcaccaggccgagtttcagacctcgggatggcctctccagtctgcagctcccggcagcctcgggccacactcccgggatccccagggactggcctgggactaccgggggtggcggccgtggctctggctatggggagggaggcagagccgcggggcaggcgtggggtctgctgtgccgggtatgtggggcgtgtgttagactttggacctggcctgcggggtcaggccgtggtgtatgatgacgccacgccgctctttctctttcaccctggcctcctgcctggccctcccctgggtcggcatccctggggccactcctgcccgtgcccgctgctgtggggcctgggctccaggcagctcctgtctgctgctgcaaacaggcccccaaggtgcatggtgaggagacccccaggctagagatgggcgagagcggtgggcgagcagactgcgggaaggcagctgggcctccacacgcggagccctccccaccacgtgcatgcacaggcgacccctgccgtgctccgacggagggcgccgggactggggagggtcagcgcgacagccctggcgtttactgaagagctgcctgcctggctcgctgccctggtggccgctgaattctcccaacgccccaggacagcaggtgctgtggccccatgaccgctcccccacatggatgaaggggtggtgcacaggctggtggagcctgggagagccagggcagcctgcggccatgcggccatgcggccggcgtggggctgaggtccctgtacagctgacagagtgcctggcgccctcaatcagtaagtcatctacgggccgggcaccggcggctcagcacagagaggcaacaagggtagaccccccctggcaaggctgaccggcgccgggctgtggccagaccaggagactgcagcccagctcgagggaggcaccacgcctgcccctcagagcactgagcagagccccccatggtatcccccgccctgggcacagcaggaggagctgccgaccaagtctggcaccccggtgtgccccgagagctgtctgggcacaggttgcggggctgccccggccggacggggcatctgtgtttctcggtgtggcctcagggctctggtggctttgaccgaggccccgggggacagaatgcagcttcctgctcctcacttttcctaagaaaggggccgcctcccaggactggggctgcgccagtcacaggcccgcggcctccacgctccgggtgctgctgtcccggctgcttcagggcgggctctgtcttgcacgcagcgagcggcttcatcacctcccttttgaattggagctgagtgtcggcaacgcccagataactggggcgcgcgggtcttttgtgctggatttttctgtacagttgcctcga

SEQ ID NO: 17976 - DNA, 1428 bp, Homo sapiens
tcccggagtgggggctgcaaagatcatggccactgtgccacccacaggggcccaggccggacgcctgggctgtgccgcctcggcagccaggccgaggaacgtgcaggtgcggccgggagcccgccggccacagctgcatccatgcccttctccgagtggtgatggcggggagaggcctggctgtctacgggcagattgcttgggctttcacagaagcccgctgttagagcagattcccggccttgggtctctctgctccagctggacgccctgagcctcgccgggcccagtccacccccgtccactctgccaggggcagctcagagccctcgccacgcggggctgagcgcagggaaggcagcatcacggagttcgctcggctccacagaacacccgtgttgctcgcggagactttttgtttttgtgcttcttatgaagaggcaggttttctttcttcctgaaccaaaagggtttagatggagcacaagattcaggccatatttacaagaacaattgatttttctgccaggcagagcagccagtctgtctcggaggctgtgctgtggtgtggggaggccccttgctcagatcagcctgtgccttccccaggccccggcccatgcacctgcccttccgtaggtctgagcacctgttcttccacgcccaggacgacctggtcctgagtttggccgggaccccctgctatctgccgtccacaggcctggtgacagagaaagcagtgccctggaacagcagcccggctgtggggtgctcagccctctctgtaggatcctgtgtggctcaaggggtctgctgagcctccaacgggcaagaggggccctgagccatggatccattctgggtggaggcagcccccaccgccgcctgcctcaaatgctcagccctaggccctcggccccgtagctctgcagccacagacgggtgccttccccaggccgagaggagggtggggtccagccactcaggacctcacagggtggccctgatgagcaccttcccttgcagccacacccactcgcccgggtctatggccacggtcggagagtggtcctgtgtgcgctgcaccttcctgaacccggccggccagcgccagtgctccatctgcgaggctccccggcacaagcccgacctcaaccacatcctgcggctcagcgtggaggagcagaaatggccctgcgcccgctgcaccttccgcaacttcctgggcaaggaggcctgcgaggtgtgcggcttcaccccggagcctgcgcctggggctgccttcctgccagtcctcaacggggtcctccccaagccacccgccatcctgggggagcccaagggcagctgccaggaggaagcaggtccagtgaggactgcggggctggtggccacggagcccgccagggggcagtgcgaggacaagga

SEQ ID NO: 17977 - DNA, 1060 bp, Homo sapiens
ggtcctcagtccagtgtgggtttccctgggctgaagtcaaggtgttggctgacacacagtcctctcggtcctcagtccagtgtgggtttccctgggctgaagtcaaggtgttggctgacacacagtcctctcggtcctcagtccagtgtgggtttccctgggctgaagtcaaggtgttggctgacacacagtcctctcggtcctcagtccagtgtgggtttccctgggctgaagtcaaggtgttggctgacacgcagtcctctcggtcctcagtccagtgtgggtttccctgggctgaagtcaaggtgttggctgacacgcagtcctctcggtcctcagtccagtgtgggtttccctgagctgaagtcaaggtgttggctgacacacagtcctctcggtcctcagtccagtgtgggtttccctgggctgaagtcaaggtgttggccagggctttgctttttgcaggccctacaggaagatgttctcttgctcgttgggaggttggcagaattccgttcttgctggtggtaggactggcagtagcaccttgctgggtgcaagccgagcctttcccggcttctccaggccgcctgcgttgttcacggagggcccttgcccatctgcagagccagcactggcgggtgaagtccctctcatgctttgactctccttctgtctcatctgtagctcagccaggaaaggcggttaaggacttatgtagttaattggccccacccagataatcccggataatctcccacctcgagatccgtgcaccttaatcctgtctgcagagtcccatgctagcaactcagcagcaaacagcccctgcactgtgccctgcaggaacatggctgctggtggcaggccggcccagacagacagactaccacctgagccaaggaacctccactcaggtggccgagggtcccacttccgagccgagggtgctacgcaggctcagcagccagcctccctcggctgccttacagcaactctgctgacagtccctgggcagattggcctccatgggcaggggcacaggtgccacgtccactcc

SEQ ID NO: 17978 - DNA, 1050 bp, Homo sapiens
gcgctcagggcccccgcctaggccctgaggccagagtccccgctcaggcagggtcccgtctgccgggcgcccaccctcgggctcccggagcttggcttccctcgggcgcccggcctcgtcccgccagcctagctggcgttggcgtcgccggggaaggcgcggagagccccggctcctgcctggtccccgaggcccggcccagccccgcagtggccccggctcgcgtggccgagtcccctgacgcccggcgcccgctccccgcagcgtggcagcacccgttcctcaacgtcttcagacacttccgggtggacgagtggaagcgctccgccaagcagggggacgtggccgtggtcacggtaggcggccgggggctcgcccggagcccacacccctgccctgcccccaggagagctgccccgcccccgagggccccctcgcccccgctgcacttcttctgggtgctgtcggtgatgcgggctcccgcttctccaggacaagaccctgaagggcgccgtgtatcgcattcggggctcagtctctgccgccaactacatccagctccctaagagcagcacccagtctctggggctgacgggacgatacctgtatgtgctctttcggcccctgcccagcaagcacttcgtcatccacctcgatgtgtcctccaaggtacggagcccgcggctgggggctgcgtgggagccccggcacccctgcggcccctgtctcctcacggccctgctccgtccccacaggacaaccaagtcatccgtgtgtctttctccaacctcttcaaggagtttaagtctacggccacgtggctccagtttcccttggtcctggaggccaggacacctcagagaggtgacaccaagatggggtgtggatgatccaggacaggtggctggagggagttggtgcaggcccagtgaggctcctctgcggcctggaggacaacctggcgggggcacaagctcacagttctgggagtcgcgggctgtcaggagggtgggcgctgaccctgagtgcccatcctgcagatctggtggg

SEQ ID NO: 17979 - DNA, 1045 bp, Homo sapiens
ccagcagctgcccttgatgagagccccacgggcctgtgcccctcctggccctggcacagtgcccacagctcccacacctcctaccccagcttccccgtctgcccctgggtgtcctctgcagctggcctgggtgtgccccaacacagcctcccatgtgcaggctttggggcacaggtggccatgctgggccccagcagcatccgggtctccttcctcgcagggcacttgcccgcctcccgccagcggtgggtggctgcgtctgaaggctgtcgtcggttacagcgggaatgggcgggccaacatggtctggaggccggacacaggtgggggccaagagcctacccccacccccagccaagatgcggccgcgcgtggtccagccgtctccaccccaaggccaggacctggtggcaaatgagcgccagccatcagtgtggggctctgttctcccggtagcgcctcctggcgctccagccgaggtcctgtgaagcactttggctactggacgctggggagggcgcagctgggacgatgctaaccccttggccccgccccacggctcggcccaggccccgccccctgttcggcccctccccaggcccctccccgcccccccccccccccggcccggcctcaggccccgccctctctgcgcacaggcttctttgcctacacgtgcggccgcctggtggtggtggaggacctgcactctggcgcccagcagcactggtccggccactctgcggagatctccacgctggccctcagccacagtgcccaggtgcccgcctgcatcgccctcctcctctcccagggccaccgtgcccggcagaacccagctcccggaccggtgcgggttctcaccaccaaagacggagcagacggccaccccagcctccactccagccagccacggcctccccactcacgcctggcctcttgcctgccaggtcctggcctctgcctcgggccgaagcagcacgaccgcccattgtcagatccgcgtctgggacgtgtctggcggcctctgccagcatctcatttt

SEQ ID NO: 17980 - DNA, 1032 bp, Homo sapiens
gagtgtttgagaagcacgaccaggtgagagcatggcgagtcccctgcccctgcccccgccccctccccggcacacacatcaccacatccctccttctgcaggaccgcgacggcgccctctcgcccgtggagctgcaaagccttttcagtgtgttcccagcagcgccctggggccccgagctcccacgcacagtccgcacagaggccggccggttgcccctgcacggatacctctgccagtggacgtaagtgcggcccacaccatgcccgcctgccgcaccaccctccccaccataacactgtgcctgcctcccgcccacccccagcctggtgacctacctggacgtccggagctgccttggacacctaggctacctgggctaccccaccctctgtgagcaggaccaggcccatgccatcacaggtaggcacccaccctccctgggcctgggcccagtatcctggcagctgccctaacccgtgtctatcctcacagtcactcgtgagaagaggctggaccaggagaagggacagacgcagcggagcgtcctcctgtgcaaggtggtaggggcccgtggagtgggcaagtctgccttcctgcaggcctttctcggccgcggcctgggggtaagcaccctagactcccccaccaccccaggggctccaggggcagggcagggcaatctggggggcactgcagccagcgagtgtcaggacttcacctccctcagcaccaggacacgagggagcagcctcccggctacgccatcgacacggtgcaggtcaatggacaggagaagtacttgatcgtgagtgctggggcggcgcggcctgtgcccgagggtggacccggggacacccaggcctgcctggcagatctggcccagcatggccctagggggaccgagccccagggacccttcctaaggccgctgtctgtcccagctctgtgaggtgggcacagatggtctgctggccacatcgctggacgccacctgtgacgttgcctgcttgatgtttgatggcagtgacc

SEQ ID NO: 17981 - DNA, 1052 bp, Homo sapiens
ccacccctgggcatcatgtgtgtggggccggggagcacaggtgtgggagctggtgaccccagacccagaattctcagggctctacccccctttcctggtcctaggtggccagtgggtatgaggagggctggaaggcagagctttgggccaaaagcaggcgttggggggtcccccctcaagtttggagccgtttccgtggttgtagcagaggaccggaggttgggttcctgattaaacttcactgtgtgttttctatctcggatcccagtctctgaagacaacttgctttgattcaacctagaatgtgttgtttgtctttatgtgggctggaaacgccacccctcctttcattcctgggtcactgttctgaggtctcaggcgtgtgcatatggcctctggaaggtccactctgggctgctgtggcctgggagcccagtgtccttggaggtcctgcggtctgggagtgggagcccactgcgggaggacggtgcgcgcccggcatggactggggggcgccggtgcctgagatgtttccccggtgactgaccccttctcagggtccagtgtgccctggcactgcccactcactccccagagcgtcctgccagcctggctgagctgcgccgagaacctgggcttgtgtgaccagatgtggtcactgcctgccacagaacggggtgaccctggggccctgacctgagggaagcaggatgggccagagggagggacgggctgggagttgagcccagatgcctgcttctcgggacccagggcgtggccttcccaaggtcacccggacaagtatcagaaggcctggtcccccccctcccatgtctgcctttagggagtggcaggtggggccccttcccaagtcctggcccacacgggccctgccttggagcttgtggcattggcccctgaggtccctcccgactgatggtatttgagcccgctgtacccccacggcctgtcttctgggactactgcaaccctaggagaagccctctgagtggcccttgcaggggctgccatagtcacacgtgtcttatctg

SEQ ID NO: 17982 - DNA, 1046 bp, Homo sapiens
aaaccaagtggaatcaagcggataggctcagccagtactccactgtgcacagatccttggacccaggggctttgacaactgagaaacctagtttcttgattctagccagagcgcagaagctgggacgggccgtgggtcagagtgggcacgctgagcctacgccctcatgcggctggcccggccttggtccctagacccggaacccgctggtggccgtgtattacaccaaccgggccttgtgctacctgaagatgcagcagcacgagcaggccctggccgactgccggcgcgccctggagctggacgggcagtctgtgaaggcgcacttcttcctggggcagtgccagctggagatggagagctatgatgaggccatcgccaatctgcagcgaggttggctgacaagctgcccggttgtggggcctctggggccaggcgggtggactggccagagagtgacgtgaagcccccgttccccagcttacagcctggccaaggagcagcggctgaacttcggggacgacatccccagcgctcttcgaatcgcgaagaagaagcgctggaacagcattgaggagcggcgcatccaccaggagagcgagctgcactcctacctctccaggctcattgccgcggagcgtgagaggtgggaccctcaccccaggccgccctgtcttgggataattctgaatcaccgactcccgacacaagcgtttatcgaaggctttactggcaagcaggaaatgtggggaagtgtggatgttagctctgagattggggtgtggtcagacatctggccaggtccatctctgaccggctcctggtcaacccccagggagctggaagagtgccagcgaaaccacgagggtgatgaggacgacagccacgtccgggcccagcaggcctgcattgaggccaagcacgtgagggtgccccccacccacatgtgggtctgtgtgtgtgcacgtggcgtgggagcatccccgccttgtgttgggtctgtgccccatggaggagggaggtggggtgtctcccccaagcacagc

SEQ ID NO: 17983 - DNA, 1040 bp, Homo sapiens
accagagggcccggggcagcccttctcccccgcgcgaaccccaatcttttactaaaagcgcacggttgtccggaaccgccgcgccggaagccgctgtctttcccgtccctcgccggaagtggtcctcttcttacccatccctctcaggaagtgggcacaaactctcgcccgacaccacgaaagttccgggtcagggagctgcgttggcagaggccaggaggggcccgggattggggtctgcgggccgccctgggcgttgccattgcgctgcggtgctgtgcttgtgtgattggtttatttatttatttatttaaacggagtctcgctctgtcgcccaggctggagtacagtggcgcgaccttggctcattgcaacctccacctcccaggttcaagcgattctcccgcctcagcctcccaagtagctggcactacaggcgcccgccaccacgcccggctaatttggctaattttgtatttttggtagacacggggtttcaccgtgttggccaggctggtcttaaaactactgaactcaagcgatcctctggcgtcagcctcctgaagtgctgggaatgcaggtgtgagccaccgcgcctggcctgttttttaagtctcaatttcagtattttaatgccatcacctattttaatccccaggtccatcatgacatctggtcatccctagacaagttccgagtgcccccagtcttcccctccttcctcactcctcgacctcgggagcagcctcccaacggctttcctgggtccgtctttcccctttgatcagaaacccgcacagaagtcaggcaccaggtcttctgcctgaggcctctggcagctcccactatgctgtgaatgaaccccaactcctggcctccgccttcccctgcccacctccagccatggcagcctccacccccattcccagcccaccaagccctttcctgcctcagggacattgtacgtgcgtgcgatgcctcctccacagagcggacctccctgaccactgccctaatgggcttctccatcactgtggcct

SEQ ID NO: 17984 - DNA, 1022 bp, Homo sapiens
ccgtgggggtggagcccctggtgtgagccttgcggtcactcgctggcaggaagacgggggtggccattcatcctgtggcttggcatcccatggggcatggggctcatggtggcaggtggactgtccgtgcctggaggcggtgccctcaggctgtgcttcccttcccgtccttcccgcagttcaccaaccgctgcctgctcaagtggctgaagttgtgggacctggtggtgtttggccacgagaggccttcccggaagcccaggcccagtgttgagccggcccgggtcagcaaggaggccacagccccaggcaagtggaagagccacgaacaggtgctggaggagatgctggaggctgggctggacccgagccagcgaccgaagcagaaggtgagccccgctggctgtgccgccgggaacaagcctgaggctttgcactcggcgccggcacccttgcagcctgttgactttctccaggagccgtgggtgtggtgacgtgtgggtcttggcgtgaagcgccattagcgtgagttagaactggagcgttgcagtaacaactcgggggaagtcgttgtccctgaagggctctgcggctggccaggatgatctgggtggacggtgggtggtttctgggggccagtcacactggtatcagctgtgttttgtctgcacgaactttgctttgtgtaggtttttttttccgttgccatcttggtgtgtgaaagtgctcaattttgttcttatttgatggctggagtggggtggagggagcgcccagcctgtgggacacatgtggcagtccctggctgctaggccgggagcgtcctgtaggtgcggtgcacactacgccttcatctacctgggctgcaggtggcactgctctgtgggcccccggggctggggaagaccaccctggcacacgtgattgcgcgtcacgcggggtactctgtggtggagatgaacgccaggtgagtgatgtgaggtccgtctctggctcgccttctgtcctgacgtgtttgagtt

SEQ ID NO: 17985 - DNA, 1015 bp, Homo sapiens
ggcagctgaagcagcaggccttcctgctccacttcccgccgactctgccctcgaggctggtgcagcggctccaggaggtcggtggagccccaggagccgtgtggctgatggcggggttgggggcgtggcctcgttctggcccctgtttccctgcccctccccatggaaccctggtaacccctgaaaggatggggcataccatcgggccctccagcagcccttctccaccaggtctccctgcggcagggcatgagggccgacccaggggtgctggccgccctctgtgagaaaactgacaatgacatccgggcctgcatcaacaccctgcaggtgggcggccggcaggcaccgggtggggtggggtggggtcaggagttggccgcttctcatgcccccgccctatgtctagttcctgtacagccggggccagcgggagctgagcgtgcgggacgtgcaggccacacgcgtgggcctcaaggaccagcgcagagggctcttctcggtgtggcaggaggtcttccagctgcctcgagcccagaggtaggcggtggccacagcctcggcccagatgctcacggtgcccggacctcaggacgctagccctgtgtgcaggccagcactaccttcgaggcggggactcagtgtcctgagcccgcggttgcctggtccagcctccagggccctcctcagccttttcctggcttgttctcgcccctacagccttggggggtcagctagagaagcctccagggccccctgtgggaaggacacccccagtgtggtggggcctccagggcgtccctctccagggcgccccttgactcagctgctgtcccagttgcaccctcatttttgccacatttggcctgggctgtggtctctgagcccctgcctgcccacactgcttggcctcccgtgggcaggagcagccagcatgtctctgtcctgacgtgccatgggaccccaggggatgctggcctggtcgtgctgcaggatatgggagacgctggcctgg

SEQ ID NO: 17986 - DNA, 1112 bp, Homo sapiens
acttccagctacttgagattggctctgggacctgagttttgctgcagagctgctcccagccttagcacccccacatggaactggagccgggggccccgagagtgactgcactttccaacactccgtttcccgctgtgggatggccatgggggtggtgggggtgaggcatggggcagtggccccggggtcctgctgccccagcgacggcaccaacttgcaggacgctgagtcactctccgtggcagccatcggcaggtttcatcatcatcccacgtacacttgcagttggggaaactgaggctcggggcagttaaacctggctgccgcagggttggggtgcggtggcaccaggactcagccccacattcctgctctggccttgtggcttttggggtttgcggttggagtgcccggcggctctctggccctgagcctggccccgctgacctgccctggtgtccccctgtgctgagcaggaacgtggaggaactctgccgcttccctgagctgcctgcccgcaagcccctcacctaccagacgaagcagctcatcgcccgcgagatcgaggtggagaagatgcggcgggcggaggcttctgcccgggtagagaacagcccccaggtgagcccacccaggctctggagcaggttgcagtctgggcgtgcaccatccccactgtatccctgtgtggccagatctcacaatgcctgctccctacaggtggatgggagccccccagggctcgagggtctgctggggggcattggggagaaaggggtgcaccgacctgccccacgcaaccatgagcagcggctggagcacatcatgaggcgagcggcccgggaggaacaggtgtggaatgggcagctgtgggggtgggaccagggtacatacctttgggggtgtggctagggcagtcatgaggcggggccaaggcacccatggggtggggccagggtacctttgtgggtgtggctagggcccctcatgaggcagggccagggtaccttcagggctgtggctagggcagtcatgaggcggggccagggtatctttaggggtggggccaaggcacccatggggtggggccagggtacctttgggggtggggc

SEQ ID NO: 17987 - DNA, 1027 bp, Homo sapiens
cttggcatggtgggggctagacgtctccctgatcccagtgcccgccctgccctgcctgtgccccctggtgctgtgacttcggatgcaccttagtttctgggctgctgagggctctccctgtggctgggggcaccactttgggcgccagagagtggaatggctgttaggggaggggtgtgtgccaccccaggatgcaggcaaggcgggggggaccccagggcatgtcccccacgttccctgggacagcaggtggcttggagccagggccaggcgggggaacaccctgaggtccgcagctgagttgtgagagctgggggttctgtggccactctcaggaccccaagcggcctttgcatctgctcatctggaaggacctaggaggtctcctaatggggtcgccaaggctccaggttctggcttttggtcaattcactggacccagtaaggtccctgagggtgcctgagctctgtccaacacggccagtgcccccagtgaatcaggacacaggttggagtgtggtgtgggccaccaggacaggtgagacgggccgtggggtcacgtcctggagtgagcactgccctgtggtccgggcaggtcctgccagtcctcagcatctcagcagagaagtggctgtgtgtacctgcatggtggacccggcctgcctacctgagcagggtctgggtgacccccaaggccaagggcaggaggaggttgagggaagtgggggcagggccagggcaagctgagggttttgggtctgctgcaggcccatgtcccaggcatgtgatgtgggtcccgtctctcaccccacttctgtggcgtttctggtcgctgggggggcaccagtcagcctcggtgtcgtgtggacccccagaatcagaagcaggtcctgtgctgacctgggtgggtgcagtaacctctgctcccgtgtgaggggctgtgaggtcccatcctcagtaagacgggggtcttgaagactgacttcgaccttcctaccaaggctgcactcggaaacccccaaacaca

SEQ ID NO: 17988 - DNA, 1120 bp, Homo sapiens
gtccctgcctgtcctcgtcagtgggcattcccctccctggcacggaagaggagtctctcctcagtggctcatgttggcgtaacttggaacaactctaagtcacgcgggcccaggttgaatttccagggtggagattaaggagcgaccactcaccctgggcagatacaaggggtgaagtcagccggtcgcgccctgagcagtgatggacggccgcctcggtcagagatggtgggggcggggctcggggaaggagctctgctggctctcagcccctgcccggctcaggagagctggcagcaggtctgggcaccgtccccagagcactgtgcccgccgaggatgacagatggggacggagtagcagcttgccgtggtgcagggggtgtgccgccacgtggccgctggtgtccctggcctccgtgcacactcctcgcggggcggaggtgggcccgggctgacgggagaagcgggccgttggcggggccgtgagagcccccgggtttgatgagccggacggttgatgaatgtgctccacgaggcctcctttgtcctcttgctgccgcccggtcgcttgccgggagcgggagctgtgggcagagagatccttgggtgggtgtggccgccgcctgcgtttggaggccccgtgcagcgtcaacccgggacgccagagcaccccatcctcgggtgcgcggccggcgaggaccgaggcatcagcccagtgcggcccccccccagcctcggtgcagccctgggctctttgcccaagttgagagcagggctggcagggagaggatccggaggcccccacgctgcctcggggtgaagaggctcctctgacccccaaggtgtgtagacctgacacagttgcacccccagccctgctttgatgtctgcagaactggctcctgcagaaaaggccttgagcgagacctcagcgtctgctggccctgctggactcgtctgaccctgggctgctggtggtgtgggtgcttctgccgttggcgactgatgggagcgaagctgttcctttgtggatggaccgttaggtgacacgggatgttggcattaatgaacgctgtcaactgagccggtggcagaggtgggggcaagccctcgcctct

SEQ ID NO: 17989 - DNA, 1026 bp, Homo sapiens
gatcctgggagtgggttttgagggctgcgtaggagtgttcccaggctgggcaggtaggtgggcagtgggcgttgcaggccgcgggcgagttgggctgggcttgggatggtgcgttgaggggcgtgtgccagtggcccctgcccgtctcgggcagaccttgggctgccattcctcctgcccggacccccagtgcaggctctgcaacagcctggagtttgaccccagttcctccgtctggacctggcctgggggctgccatgctcccaggacatcctggtggctgctgggtcccaaccccgttcgtggaggcgcctcccactcccatcgcccagtcacaggacacaccgtgtctagcgggctctgatctttacacctcatcgcagattggcttgcataatggctcagctgggttctagactttgggaatttcagcctaacccattaaacataaacgctgtgtggttacagatgctgtgtggttagagatgtttgtgctggagctgccctgactgtcggttctgagcttggagctctaattagtgcccgacggggcatctcacccaccacgggagggcaggggcgaggcgcagcagcaatgtctcggagctcccctgcccatccttgggtccagctgtgaggacagccaggcatgggtctgggagggctgtccccgcagagtggggtcggccgctcctactctcggcagcaccagggtctctgcatggaccccagctgccgtctctttctgcaggtgggcatggcaatgacctgtggctcgggctgaggaggcctggggccagtacttccccccatgctcagaggtgacgggcctgggctgctgtggggattccgagaatggaatctgggtctcaggtgaccccccaaccaaggggttccgggtttgtctgcacaggccccgggaccagccactgtagcagtgagcagggggctgatgggggtccgggggccggctgggcaccaagtctctgtgacccacaggggatgctcatgaagctcagtttatca

SEQ ID NO: 17990 - DNA, 1041 bp, Homo sapiens
tcaccaggctgtggtggacggaaaccctggctgaccaggcatcggggattgggggcccccccatggactctcctgcccccgcgaggttggggaggtgggagagccgaccgagccgctgctgagtggctgttccgtcctcctcatttatttattgatgtgtgtgtgtgtcgttgttgttgctggtgtgatctcggctcaccccaatctccgcctcccgggttcaagcgattctcctgcctcagcctcctgaatagctgggattacaggcgcccgccaccatgcctggctaatttttgtattgttagtagagacgggattttatcatgttggccaggctggtcttgaactcctgacctcaagtgatccacccgcctcagcctcccaaagtgttgggatgacaggtgtgagccaccacgcccggcctcttttttttttttttttttttttgagatggagtcttgctctgtcgcccaggttggagtgcagtggcgtgatctccgctcactgcaacctctgcctcacgtgttcaagcgattctcctgcctcagcctcccacgtagctgggattacaggcatgtgccaccacgcccagctaattgttttgtatttttagtagagacggggtttcaccatcttggccaggctggtgttgaactcctgacctcatgatccacctgcctcggcctccaaaagtgctgggataacaggcgtgagccaccatgcccggcccggccttgttttttaatatacatctggttgccgggtgatactgagggggccgggctctgcaggcacagggctgaggggcgtcgtgtggatggacggccagcccgttgggtgccctggctgggtccctgtccctgcacaccgggtcagccggctcctgggtgcacaggcaggtggtgtgcgtccgcattgcagaacacggggcgttgcaggccggagctgggttttcacacagattgagaccaggcgtcgcccacagagcataatgtgaggcgagagggactcgggctgctgtgggctggggaggacggtccc

SEQ ID NO: 17991 - DNA, 1027 bp, Homo sapiens
gggcccagcctgagagcactgattatagagtgtggggctgagggacaggatgggtactgtgcctgaggagtatttcaacagacagggccccaccaccgagggggtcttcagccctgttcccctgttcaggcctctctctggggggttttcatcgttacgagcccctggctcgtgagcccagtccagtgggggctgcctggggaacatgtcatccaggccagactccaggggctggagaaggacaatgtggtccccacaaccttggtctgtcagaaaagaggagaatcactgaggtcctggggcttggtccagggagatgaaggagggagggtgagtgggtgcattgctgctggttgggcctcagggtctggtggaggctccctgcctgagggagaccccgtagccaagaccacctcactgcgccactgcccggcccttccctggctgggttccctgaccgttctgccgccctgcagccagcaggccccctcccagggctgttcccggctacgttggcctgcttctccgacccgcagtggaaattgattctaatttatagaagttgatttgaaatctaaaggaatttttaattaaaacccagaaaatccatctgtatgattaagcctccagaagtcaccaggctccgtgcgacacagccggcagacactgcctgtcctcagctgcccacagaagtgtgacacatgagggccagcctgctcagcccagagctgcccgagcccctgctggcctgtgcgggatgtgggacctcggctgactgctcccctctctaggcagagccccaggggggcactgggacctggtacatctggcagtccctctccagggcagggagggctggtggctggggtgtgacccggttgggaggcgcgcaatacgcctgcctgtcacgtcctctgtcgtgagaggcctccttggggccccccagaccctgctataccaccgtcccctccagagctgccccacaggcacaggggtggggtccttgccattggaggagctctctggg

SEQ ID NO: 17992 - DNA, 1034 bp, Homo sapiens
cagcccctctgccgtgggcagctttcatggtgactggcactgatgggccctgggctctgacaccatccactccactctgctggctggacagtcttagagatggctggtcaggggtgctggccccttcccttctgtccccattgggccctccgcctcagggtctgggccgggtccagaagtcagcattcccctcagtgccaggaaggccatgccgtagctttagctcaaagtcctgagctggctagggtggcaggaactgccagggtcaggcaagtggctgggggccagctggggtacagggagggtgtgaaaggccttgtgtccaggtagccccctagcctagggcaccctctgctccagcctggacatttctggggggtctccggggtgatctgagagcaaacatggggcaggcctgggagaaatcgggcaatggctggagacatctggaggcgggtctcagccctcagtcctggagtccaggggtggctggaaattgcctgctttggtagtggaatgtgtgtgtgctggttgggagccggcccaacttgaaggagagtgtggagagaggagacagaaaggcggtccgaggcacccacaggacaagcagtcccaccaccccccattgggtagatgggtaaactgaggcctgggatgccctgtgcccagggagaggcagtgccacctacaagacccctggctcagccaggctggggtagagtgccgtgggggctcaggtcagggagcaccgttccccacacctgcctgctgtgtcctgtttgggccgggtgtctttgagctcctccccgccagcctgttccgtttacccaagaaaacccctcccctcgggaaatgatggccctcagagatgcacaaagacagtccccagccacccccgcagaaaggtgctatttgcggcagttaggggacaaaggtgcccgaggctgggggcggagccgccatccaccatcgctcccttgcactagtgccgggtcaggaggctgggagaggccaaggggcctggcacggcttcc

SEQ ID NO: 17993 - DNA, 1044 bp, Homo sapiens
caggttgcgtcctttcaggccccgcgttgttacaggacactcgctgggggccctgtgcccttgccggcggcaggttgcagccaccgcggcccaatgtcaccttcactcacagtctgagttcttgtccgcctgtcacgccctcaccaccctccccttccagccaccaccctttccgttccgctcgggccttcccagaagcgtcctgtgactctgggagaggtgacacctcactaaggggccgaccccatggagtaacgcgcccggccccgatgcgaatcaggcctcccctacatctgggggcgttggccgcgagattcccattgacacctttgtttcgtgtgcttttaaattcaggttaaatgttgcaataatctgatgcagaagactcagcttctcaagggagagggagggggcggagcggaataaatagtaacttatttaagaaatgcacttggattcctgccatcagtcaggggcggggaagggagtaccatccgcagatgggtgcagcaggcacttggccagcaggacacaggagactagcagaaggaagaggccggggaggaagaagccagccaggagggggagcctggggtacccagactctgagccccctgatgctgtgatgtggcggcggatccagttcacgtaggcagggacacgagtgtagactcccggcctgttggggcggccgcagccctcaccccagctcacagtgccagcctgcacccaggcaccgttcacctggcagaccagaggccccccggagtcgtcctgaggacagagaaggcgagcattgggagccgagaagatggggagcccctccctgggcttcagccgcccccatcctctgtcacggcctggcaggctcacctggcaggcatccccggggccccgggcacacagcatgtcgggctgaaggatgctgcccccggggccgggatagtcccggcggcaggtctctgtgtccaccacggagactttcacctcccgcaggctgtacgggggtggcagaggctctggggtggggggaacaggcttcag

SEQ ID NO: 17994 - DNA, 1459 bp, Homo sapiens
gttctatgccctcaactacagcctccggcagcgcatggacatcctggatgtaagtgcctcctgggcctcagtccccctggtctggcccaagctgccctaaggtggggctgccaaaacctgggtctccttgttgctgggccccaagggctcgtgcaggcctgtccactgccttcgtgagtgtgtgacccggcaggactcagcagtgggggagtcagggctcccggggcagagagttttgtttgtttaaaataacagctttactgatataattcacacgccataaaattcaccgctttagggtaaaatgtgtgctgcgcaggtgagggaatattatttagcaatgaaaaagaaaaatttgaatcccagcactggaaggctgaggcgggaggatcgctggagcccaggagttcgagacccgcttgggcaccacaatgagactccatctttattagccaagtgtggtggtgggcgactgtggtcccagttactcgggaggctggggtgggaggatccctcgaacccaggaggtggaggccgcagtggagctgtttgcaccaccgcactcccgtgtgggtgagagagggagacactgtctcaaagataattcgactctgatacgcactgccacacgatgagccttgagaacatttagttaaagcagccccagggcctgtatatcgttcgatttcacttaagcgagccgtccggaggagctagttcacggagagcggacggggctgccggggcttggggaggggatgtggagtgagggtttcacggggacagtttcagcttgggaaggcaaaagagttctggcgagggcggaggtgatggttgcccatcatgaacgtacttattaatgccacggaactgtacacttaaagatggggaaaacgggctgggcgcggcggctcatgcctgtcatcccagtgctgtgggagaccaaagtgggaggattgctcaagcccaggagtttgagatcaacctggtcaacatagcaagaccctgtcatctccaccagaagaaaattagctgggagtggggcgcctgtggtccctgctactcttgaggctgaggcaggaggatggcttgagcccagaggttgaggctgtcgtgagccgtgatggcaccactgccctgcagcctgggcaatagagcaagactctgtctctttaaaaaaaaaaaaaaaaaaaaaaagcagccggccacggcggctcacacctgtaatcccagcactttgggaggctaagccgggcggatcatgaggtcaggagttcaagaccagcctcgccaacatggtgaaaccctgtttctactaaaaacacaaaaaattagctgggcatggtggtgcatgcctgtagtcccagttacgtgggaggctgaggcaggagaattgcttggacctgggaggcggaggttgtggtgagtcaagatggcgccactgcactccagactgggc

SEQ ID NO: 17995 - DNA, 1031 bp, Homo sapiens
gggtaagaagcggagaaaggatccttggggtctgacttggacccattgtcctctccttcaagtgctcctgggttgagagtaggaagggcatagagatggggccctttgagttgcaactggggtttacttctgtgccaaagaaaggaaagagtggtgaaaacgattgacatgaacaagcagcagcttgtagtgttcgcccttgtattctgaggtgatggagaatgttgctacttagctggggtctcttaccaagatagtaagaaaacggcatgttagtttcgttctccatgtgccagtgcttcattgttgtctgctcttatttctatttcagtcttgtgcttttccttacgcaggtgaatgactctgattctttttgtttccgaccatgttcgcagcactttgtataaatagcaaatataacatcagcttccagtgagtttcacgtgaaaaaaaaatctttcacttccttccttgggaaatgctcgtttacatttagtgaatggtcctggtagttttgacaaggaaatatattacgaactaatggagaacctgctttggagatctgtgccacatgtgttccattaagcccacttctcctgccgcattctcaaccgaagaaggctggcctccggaatcatggccttactcattggtaaagaattctgatataagtatacttatttaaagatgtaaatagaaggtaacttagcatgtttcagaatttaaaacttgcctcatatgaatttattttgatgtgaaagttgctgatcaatttggaaaacatgagtggctttgcttgttactagttttttattgctagttacaggtatgtctaagctcatataagctccatggttccttcaaaggtttgttgttcatggttcagaagccctggaccttgaatccagccggcattcgtcccccatgtccctggcctccaaccttgctctgccccttcaccctcttggagatgcttttctgtcgggtgtcctcacctgtgaggcaaggaatgagagcagctacttcacccc

SEQ ID NO: 17996 - DNA, 1034 bp, Homo sapiens
ctcgaacttttggcctcaagtgatccacccgcctcagcctcccaaagtgctgggattacaggagtgagccaccacgcctagccagtttttgatttttaaagcatttttgtttcagagtttgaaggtttcccagctttttatggtcctgcagttccataaaaagagaaccctggttatcacagggatatgctgacagttcccgctccctctgcgaggaggaactgaaatgggtgggaggaatgtgttaggccatgaaaagtttttatctgtggtcttttgactcctgccacatctctgcctccggtctcggaggagcctggccagggttctcggtccacagctggggaatgaagcctcctcggggtcgtcttgggcttttccctccttggtctcagaggacttggcatgagattgggaactgatgctataataggatttgcaaggttatcaggtcattctcagaacactacgtttttttggtggacattgattgagggtaaggaattttaagactaaagattcttaggcgttggacagttcatattctgaagcactgattttatctaaaagaaggtggtgttttacacgtttgtttccttgagtttgaatctcaacctacttatttgaaaagatgttaagaatatttaaccaaaaacctcatttacaaaagaaatacgcatgaaatgtgatgtgaggcttcattttgcagagggaagggatctctgtctccattgtggacagggcgtcttaggctgcagcgtcattgtgctgttacatggttccacataaaatcttgctccttttctaactgtaaaaacatttgagggtcatttggccaggtaaagatcctggcagtcctaagcagcctcgctggtgccgtgggtcctgggtgctgcctgccagcatcctcggttgaggagtgtggagtgggacctcagggcagtgggcccttccctcccaccggccctctaccctgcccagcccgccagctttctggaacagatcactgtacggtgctttctctccaaggagct

SEQ ID NO: 17997 - DNA, 1025 bp, Homo sapiens
agaattaggagacatggaagaggaagaacaaagtcccctctgtagttggtttccttcctgtgtccctttgcaagcttccaggcgatctaaggtgtcatttctccctcctggggtgacccttaggcgctaatatgattacagcgaagactttcctgataagttctcaaactcgatgtgtgactgtttggcacttgagacaaacctgcctttgcagggaaagtgtctctcacgggcattggtgtgggcgtgcctgacatacgtgttcagtcccttgcatacctttgccttgagacttctgtgtctccttcccatttgggacacccaggtgagggcccagacatctggatgtggtcagacctcaccaaatatatgccttcgtggtggtctccctccttgcgccctcttgggtggccagcgttcctactgcagacggcccaacatccagtctttccccaggacagagctaacaagggcccctttgccttctcatcctcaggagttccaggcacatgagtcaccgtccatccacatccagtgtggcctggagctgctacagaggtgttgggcaggccatgcctgtgccgccatctctcccttcctgcctcatttcatcccccgcagcagccgggattgattgtgctttcctaacccccttggacctactctccctcctccccaccattcctcttcccccacatgtgtggcacgctgcagccctcaaggccagccctggcccctccactgcttctctccccatccacaatggagaaggtgaaaagaggagggaaaggcctttggtgtggacaagcatgtggacgccctccgtcctgcagtcttgccagcccaccacagccactgtagaccacaggcaggccgtgtactgcaccactgggaggacgtggagaggacagtgaacttccaggcaagagcttccttcttttgtctcacgagtttttcttagagctcttgcctgagctggcttccctccttcagacattgacatgagatcttaagcaaacagtccc

SEQ ID NO: 17998 - DNA, 1552 bp, Homo sapiens
ggggctgggtacagtggctcatgcctgtaatcccagcaccttgggaggccgaggcaggcggatcacctgaggccgggagttcgagaccagcctgaccaacatggagaaaccccgtctctactaaaagtataaaattagccgggcctggtggcacatgcttgtaatctcagctactcgggaggctgaggcaggagaatcgcttgaacccaggaggtggaggttgcagtgagctgagatcgtgctattgcactccagcctgggcaacaagagcgaaactccgtcccaaaaaaaaaaaaaaaaatcagttgcgtatggttgcgtgcacctgtggtcctagttacctgggaggctgaggtgggaagattgcttgagcccagttgttcaaggctgcagagagcagtgattttgccatttgcactccagcctgggtgacagaatgagatcctgtctcaaaaaaattataaaaagcctaggcatagtggctcatgcctataaccccagcactttgggaggctgaagcaggcagattgcttgagcctaggattttgagaccagcctgggcagcatgacaaaaccccttctccacaaaaatacaaaaaattacccgggcatggtggtgcacacctgtggtcccagctgttcaggaggctgagttgggaggatcacttgagcccaggaggcagaggttgcagtgagctaagatcatgcaactgcactccagcatgggcaacaagcaagactgtctgaaaaaataagtaaataaataggtcttcattaaagttataaacttctgtgcatcaaaggacactataaagaatgaaaacaggccaggcacagtggctaacacctgtaatcccatcactttgggaggccgaggtgggcagatcacctgaggtcaagagttcgagaccagcctagccaacatggtgaaaccccatgtctactaaaaatacgaaaactagccgggcatgatggtggatgcctgtaatcccaggtactcggaagactgaggcagaagaatcaactgaacctgggaggctgaggttgcaatgagttgagactgcgccattgcactccaacctgagtgacagaatgagactctgtctcaaaaaaacaaaaaacaaacaaaaaagcctgggcacagtggctcacacctgtaatcccagcaatttgggaggctgaggcaggcggatcacgaggtcagatcaagaccatcctggctaacatggtgaaaccccgtctctactaaaaatacaaaaaaagtagctgggcgcctgtactcccagctactctggaggctgaggcaagagaattgcttgaacccagaaggcaaagggcgcagtgagccgagattgcgccactgcactccagcctgggcaacagagtgagactccgtgtcaaaaaaaaaaaaaagtgaaaagataactcgcagaatgggaggaaatatttgcaaatcatttctgataaggagttactatccagaatacataaagaatgcctacaactcaacaacgaaataacaaacccaattcaaaaatggtagtggacttga

SEQ ID NO: 17999 - DNA, 1089 bp, Homo sapiens
tgtgtcctgtgttctgcggtggcccctcgttctctgctcttattgaccttgaccattgcgacaacacagttcagtcactttgcagctgtgcctcagtctggctcatgggccctggggaccagatatggagcatgtcctcaggcctcagcaggaagacccatggcatgcagagcctcctagatccttaatctgtgccagatgggcatcaggtgaggggcacaagatttttggatgggcccctttcccaggttcccatttattaccagggctggaggatgagctgttagtgcatgaaaatcactacagaagcttgcccaggagctgcatggggtgccggctctccggacttgttttcctttgccctgttgaaagttggggtcccaacgctgggcgcagtggctcacgcccgtaatcccaacactttgaaaggccgaggcgggtggatcatgaggtaaggagttcgagaccagcctggccaatatggtgaaaccccgtctctactaaaaatacaaaaattagctgggcatggtgatgcacacctgtactcccagctacttggaaggctgaagcaggagaatcgcttgaacacaggaggtagagcttgcagtgagccgagattgcaacgctactgcactccagcctgggcaattgagggagactccgtctcaaaaaaaaaaaaaaagaaaaaaaaagaaaactgaggtcccgagctccccttgtcaccccaagtatctagccgccactaggtcctggtgttcttttggcctcaggagttctttttttttttttttttttttcttttttgagatggagtctcgctctgtcacccatgctggagtacagtggcgcaatctcggctcactgcaagctccacctcccaggtttatgccattcttctgcctcagcctcccgagtagctgagactacaggtgcccgccaacacgcccggctaattttttgtatttttagtagagatggggtttcaccgtgttagccaggatggtctcgatctgctgacctcgtgatccacccatctcggcctcccaaagtgctgggattacaggcatgagccatcgcgcccggccagcc

SEQ ID NO: 18000 - DNA, 1045 bp, Homo sapiens
gaaggagtacaatgccctgcaccagcggcacacagaggtgggcgcccagaggcaagcgcggagacgagggttggagacagggccgcggcctgacgcctgcgactcttgcggaccgtggttttcttccctggcatgtcccttttctagcatttgctgccaggcttgaaggctgtcagccccaggctggttagattcccctccaggacgctgtcttgatttctgcctgcacagggcagccggaaaagcctcacaggttagaggggacggagacagccccccacggcagcgctaatgcaggcgtttccctcctcgcagatgatacagacctacgtggagcacattgagaggtccaagatgcagcaggtcggaggaaacagccagaccgagagcagcctgccggggcggaggtacgcggggcgcggcggggtggaggtacgcggggcgcggcggggcggaggtacgcaggacgcggcacatgccagggtcgtagtgcttgttatggcccgcgctctgggctcaggacgacagggaacactctggagacccaggaggagggagctggttggagcgtggctgagcagggatgtgggggggcggccctgggcgacggacatgtgtcgagcccgtgtgtcccttctgctcggtccacaattcagtcagggaggccccgggcagcttgcgcatatttaacccttactatccacagattctgtgtttgcaaatgtatctactcgctaaaatatatctgtgacctcagccgggcacagtgacttatgcctgtaatcctagaactttgggaggccaaggcaggaggattacttgagcccaggagttcgagctcagcttgggcaaccagcaagatcttgtctctacaaaaaaaaaaaaaaaaaaaaaaaaaaaaattgtttaaaaattagctaagcatgaggtggcacttctaggacatactgcctcaaataactacctgtagtcccagctactcaggaggctgagagaggaggatagcttgagcccaggggctggaggctgcagtgatctacagtcg

SEQ ID NO: 18001 - DNA, 1022 bp, Homo sapiens
gtgagcatccgtgtgagcgtgtgaccgtccgtgtgtgtgaccatccatgtgagcatctgtgtgactgtccgtgtgagcatccgtgtgagcgtgtgagcatccgtgtgagtgtgaccatccatgtgagcatctgtgtgaccgtccgtgtgagcatcggtgtgagcgtgtgagcgtccgtgtgagtgtgaccatccatgtgagcatgtgtgaccgtccgtgtagcatccatgtgagcgtgtgagcatccgtgtgagtgtgaccacccatgtgagcatctgtgaccgtccgtgtgagcgtccgtgtgagcgtgtgagcgtccgtgtgagtgtgaccacccatgtgagcatctgtgtgaccgtccgtgtgagcgtccgtgtgagcgtgtgagcgtccgtgtgagtgtgaccatccatgtgagcatctgtgtgaccatccgtgtagcatccatgtgtgtgagcgtccgtgtgagagtgtgaccacccatgtgagcatctgtgtgaccgtccgtgtgagcatgtgagcatccgtgtgtgtgaccatccatgtgagcatctgtgtgagcgtccgtgtgagcgtccgtgtgagcgtgtgagcgtccgtgtgagtgtgaccatccatgtgagcatctgtgtgaccgtctgtgtgagcatccgtgtgagcgtgtgaccgtccgtgtgtgtgaccatccgtgtgagtgtgaccatccatgtgagcatccgtgtgaccgtccgtgtgagcgtccgtgtgagcgtgtgaccgtccgtgagagtgtgaccatccatgtgagcatctgtgtgaccgtccgtgtgagcatccatgtgagcctgtgaccgtccgtgtgagtgtgtgaccatccgtgtgagagtgtgaccatccatgtgagcatccgtgtgagcatccgtgtgaccgtccgtgtgagcatccgtgtgaccgtccatgtgagcatccctgtgaccgtccgtgtgagcctccgtgtgaccgtccgtgtgagcttccgtgtgaccgtccgtgtgagcatgtgt

SEQ ID NO: 18002 - DNA, 1916 bp, Homo sapiens
gtgtgagcatctgtgtgaccgttcgtgtgagtgaccgtccgtgtgagcttccgtgtgaccgtccgtgtgagcatctgtgtgaccgtgtgtgtgtgaccgtccgtgtgtgaccgtccatgtgagcgtgtcaccgtccatgtgagcatccgtgtgaccatccgtgtgagcgtgtgagcatccgtgtgaccgtccgtgtgagcatccgtgtgaccgtgtgagcctgtgagcatccgtgtgaccgtccgtgtgagcatccctgtgaccgtccgtgtgagcttccgtgtgactgtccgtgtgagcatccgtgtgaccgtccgtgtgagcgtgtgaccgtccgtgtgagcatccgtgtgaccatccgtgtgagcgtgtgagcatccgtgtgaccgtccgtgtgagcatccgtgtgactgtccgtgtgagcgtgagcatccgtgtgaccgtccgtgtgagcatccctgtgaccgtccgtgtgagcgtgtgactgtccgtgtgagcttccgtgtgaccgtccgtgtgagcatctgtgtgaccgttcgtgtgagtgtgtgaccgtccgtgtgagcttccgtgtgaccgtccgtgtgagcatctgtgtgaccgttcgtgtgagtgtgtgaccgtccgtgtgagtgtccgcataaccgtgtgagcatccgtgtgatcatccgtaaccgtgtaggcgtccttgtgagcctccgtgtgagcgtgcaaccgtctgtgtgaccgtccgtgtaagcgtgtgaccgtccgtgtgagcgtgtgcacacgctgctgcccacaccctctaacacctgtctccttatcgtcacatgctgaccgtccgtgtgagcatctgtgtgaccgtccatatgagcgtgtgcgcacgctgtggcccacgccctctaacacctgtctccttgtctcgccctctgtgccatcaccacatgctgaccatccatgtggcgtgtgcgcattctgctgcccacgccttctaacgcctgtctccttgtcttgccctctgtgctgtcgctgccgtgtgctgccgtgtctgtcgctgccctgcagtcctcgtcagtcgtggaggaaaaggtaaaacccaagaggtgtgtccactgtggtgctgggggacgaccagcaggcacattagggcatcagttaccagcccagggcggctgcttggtctgctgtgaggtgtttcctgtggcagatgtgagaggtcggaagggccatctggccacattcacgagactgacactgagaaggtggcgaccactgggtcccctgcacagccatgcagctgggcagcgccgtccaggtcgcccacactctgccctcgctccacaagcactgccttggtcacagacgaaggcacggcgccgactcctgctaaggaggggtgtgcatcaggtggggctggtgctgactcggggggcgacgggccaaggaagggcccctctctgcatcagtcggacctggactcatagcccagctccctcactcaccagcctgtgtcagagccggtgacacacccatgacccccaagggcagcgtgacccccgagggtggcgtgacccctgggggtggtggtctctgaactagggagcatctgcatcccctgagggagctgcgaggacaaatcgggaggacggggtcagtcggcaaacgctcacgagcctgaggccagggcctgggggccggtggggaggagcaaaggaaagagtgaaggcagctcctgatcctgggtgatttctgtcggaggtggtggcctggctgagccgtggcccagcatggagctgtgtgggtgggagagccgtacatgcattcccttggcctcctgggagaccagaggcccctctgaccctgctgtcccctgtagcatctggtgacagccaggaccgcatcggcttcggtctagggactgagacgtgtctgat

SEQ ID NO: 18003 - DNA, 1035 bp, Homo sapiens
caaaccacacccccacataaagcctcatgctcacccgggctccagccagacacatcctgcccctgagagccacgcctctactctcggaggaacgtcagtgtctagagtgtggggtttgccctccgttggcagaaaggtgaggagaaagctcctcttctctgggcccctccctgcctgtccctggtaacgcctcctgggtcctgagtttgagaaagcagagcctcgccccagcaggtactcacagccagagtgcgggggccccagcaggttctcacagccagccggtgagtgcacctcagagcacaggggcccagagccaggccactccttcagggccccaggtcgcttgctgccagttttggcctgtgagctcactggcctcagtgccaggtaaggacagccaccttcctgggaagaagaggtgaccccgggtctggtggatttcccacaggggccgtcagaggatgtccacagaggcagagcccttggggcctgtgggctgggttgggctggtggatgtggggcctgggacttctccagaagcttacttcctgctgcatgctttgccgactgtccttccacctctaagtgtccatcgtgcctgtgggggctgctgcaggctcctgctccgtcagcccacctgctgctgcgctgctctgggagcgagctccctcatggcatctggaacgctctcctgtcctccctgtgctcagggctggagagagggtggcggggctgcgggctccccgggccttctgggcccagccctgccacctgggcccacctcctctcactgtctctggctcacgcttcccgggcctggagctgggacctgcccataggcatctgaagacacgtcagcctcagccggggggagcccttgcttgacgctctctggcctccgggctgcctctcgcgcccgctctgggcccgctcttcttctcatgatgtctttcctttcacctcctgcgttgtctgacatcgtcgctctcttcataaattgtagcgttttatgttttcgttcataggagtgtt

SEQ ID NO: 18004 - DNA, 1045 bp, Homo sapiens
tggcccatggcccacagaggtatgacacatgtgtacgcagaacacacagtgtcaggtcgcagctgcccttctcattgtgggcggtgtcatttccgtgggtggcagcactgacgggcacggccaccgtcggtccttactgcagcatcaagccgccctcctgccagtgtccccatttatagatgaagaaactgaggccgggcacagtggctcatgcccgtaatcccagcactttgggaggccgaggcgggtggattgcttgaagtcaggagtttgagaccagcctggccaacatggtgaaacccatctctactaaaaatacaaaaagaaattagctgggcctggtggcgggcacctgtaatcccagctactcgggagactgaggcagaagaattgtttgaacccaggaagcggagattgcagtgagctgagatcgcaccattgcactccagcctgggtgacagggagagggactctgtctcaaaaaaaaaactgaggtcagggagggtgagatgacggtgagagctcggacttgaacgcaggtcccacccagaacagcagccctaactctgagcaaggtctgtgctgttcagtagctctattgagatgtgatttccacactgtgtaattcattcacttacggtgtacagtccagtgggtcttagcatgctcggtgttgacagtcacatcgtcttcacccccaaaaggaaaccccgtgcccatgagcagtcgctttgtctgcccctcgtccccagccccaggcaaccacaaatccatgctctgtctctgtagatttgcctgttccagacgtttcacagcaatgggccttttctgcctggcttctttaacgttgcatcacatcttcaaggtccatcccagctgcagcgtgtcagtgcctcctggcttttcactgctgagtagtgcccgttgcatggacagaccacgttgtgctcacctgtttgccctaatgggcccctgcttggtgctttccacctttgggaggctgtgaatcgtgctccagccacactctgacccccgcccggctcca

SEQ ID NO: 18005 - DNA, 2230 bp, Homo sapiens
atgaggaaaaaaatgtacgtcttagaattggtatactaggaccggccgggcacagtggctcacgcctataatcccagcactctgggaggccgaggcgggtgggtcatgaggtcaggagttcaagaccagcctggccaagatagtgaaccccatctctactaaaaatacaaaagaattaactgagtgcagtggcaggtacctgtaatcccagctacttgggagactgaggcaggagaattgcttgaacctgggaggcagaggttgcagtgagccgagatcgcaccaccgcactgcagcctgggcagtaagagcgaaactctgtctcaaaaaaaaaaaaaaattggcctaatagggagtaagggaattaatactcactgagtatgtcgctggtgctgggagctgtaccagctattaccgcactacctggtgggaatttcacagcaaatattcactaaggaacttatttttctgtttcacaaatgactaatactcagagaagttatactatgtgccttgcattgctgagcggaatctggaatccacgcagctgatctttctctccgctctgctctgcatggacgaggcagccctcaggagagattccaccgatgtagtagccagatgtagaaactgtccacaaataggccgggcacagtggttcatgcctgtcatcccagcactgtgggaggccagggtgggcggatcacaaggtcaggagttcgagaccactctggccgacgtggtgaaaccccatctctactaaaaatacaaaaattacccgggtgtggtggcgggccctgtagtcccagctactcaggaggctgagacaggagaatcacttgaacctgggaggcgggggttgcagtgaactgagatcatgccactgcactccagagcgagactccgtctcaaaaaaaaaaaaaaagaagaagaaaatatccacaaataaccttgagaaaagacaagcctgtgtaagattcagaagcaccattgaaagacataaaagaagctgtacacgcagagggtgttgccacgtgcccggacctgaagacacaccctgtgagctgtctgctgacatgacaggcagccccaccgttcccacaggaatccgttcattaccagtaaaaatacccacatgcttgttggagatttttctggaactctatgaatggatctgaagttgatccagtagaggaaacatgtgagaatatcccagaaaatgtggggagagaaaaagcttgcaggattccacataaagctgcggcagttgaggcaggcagcaacaaacctgtgatacgagctcatgagctcagggccaagagccaagacagacctggagccatggggaattcatctatgtatgacaagtatggcatctcaaaccgtggaaaacgggcagatgagtcagtaaatgtactgccttagttgctgctggtgtaaaatgaagtctaagcctgacctccccgtaaacagcagtgatttccaggtggattaaagatctaagtacacaattacgaggacaacagaatgcagccgggtgtgctggcacctgtggtcctagctacttgggcgtctgaagtgggaggatcacttgagcctgggagttcaaggatatagtgagccatgattgtgccactgcactccagcgtgggggacagagcaagaccctgtctcagaaaaataagaacgtcaacaaaggatagtagaactggaaaaggggccgggtgcggtggctcatgcctgtaatcccagcacattgggaggccaaggtgggcggatcacgaggtcaagagatcgagaccatcttggccaacatggtgaaaccccatctctactaaaaatacaaaaattacctgggcctggtgacacatgcctgtaatcccagctactcagaagactaaggcaagtgaatcgcttgaacccgagacgtggaggttgcagtgaagtgagccaagatcgcgccgttgcactccagcctggtgacagagtgagagtctttctcaaaaaaaaaaaaaaaaaaggaaaaggaagtttataggctataccaataaacatctgaaaagatgctcaatttcggaaataataaagaaataaagagaaaatcaagaaaactttttccctaaaagattgaaaataagacaatcgaggctgactagggtggagcaggtgctgccctacgtgccagccaggggtgatgggtgcagccccaccgagcactggcgggtggtaa

SEQ ID NO: 18006 - DNA, 1049 bp, Homo sapiens
tcagcaagatgctaggtgaggggccacgccagatggggtggtggggtgctcaaggccagccaccctgaccgctctcccccacaggcactggcaagctgggtttctccttcgtacgcatcacggccctgcttgtcgcgggcagccggctctgggtgggcaccggcaacggagtggtcatctccatccccctgacagagagtgagtggcctgcacacctgcaggggcagtggtgctgccagaggtgtacgtgggttcacggggtggctctgcagggccaccttggagggtgccttgctgcccctacgctgaccgctctcctcttctcccatgctcctcccatgtccccagctgtggtcctgcaccgaggccagctcctggggctccgaggtaagcccagccacctcgtgtcccctcacgggagcctctcccactctccacctgtatgcgggctcagcgcctctgggttctctccctgcagccaataagacatcccccacctctggggagggcgcccgtcccgggggcatcatccacgtgtatggcgatgacagcagtgacagggcggccagcagcttcatcccctactgctccatggcccaggcccagctatgcttccatgggcaccgcgatgccgtgaagttctttgtctcggtgccaggtgaggctgggcccctcctgccatccacatcccctgcatgccagtggccgccgcctcccccaggaggccgctgtcctgaatcgcttctgccatcccagggaacgtgctggccaccctgaatgggagtgtgctggacagcccagccgagggccctgggccagctgcccctgcctcggaggtcgagggccagaagctgcggaacgtgctggtgctgagcggcggggagggctacatcgacttccgcattggtgagcggggcccagggacagggctgaggttgggcgcggggggagcctggccgtcactctgctgctttgcccgcaggagacggagaggacgacgagacggaggagggcgcaggggacatgagccaggtgaagcccgtgctgtc

SEQ ID NO: 18007 - DNA, 1031 bp, Homo sapiens
ccagtgaaggcgggcgtccccgcagggtggggcctgacctctcccgccgcatctgcctcttcctgaccacagccaaccctgatctcctgctggacctgggctcctgaccacacgtgggaccaccaggacagcatgcagccttggggacagaccagacaccctgggcggtgggggaggacccccagccacatgtggaccctcagcctgggtgggttctctggctgagcaggtctgacctcaggggaagggtgggtggttgcaggggaagttttaggtagctgggagaagaggggcttctggctggcagatggctggcggttcctgtgctgagtcctgaacacgtaggccccaggggaggcctcagcagcagggctgtgcccccccaacacacacacacactcggcagggaccagaaggcagctccagggccccactgccacctggaggcttggggtgtggcaccctcagccagaagcagtaggggactcccaaggatgtggaggggcagtgaggcctgggagaaggcccaggctgctcgcaagcccggcctctgcacggatacgtttcagctcacgccatgtgggtgttagacatcaactctacatttattgcagtcctttaagtctatgacggcggggcagccgctgacagcatgcagagcaagttaggaaaaaccgaggccctgtgggaacagcaacgcgggctccagccaggctctcgtcctcgcagcctcccacaagacctggggctcagggcagccgcttccccacccagcacagcagcagaggggccctagagcccccacagaaaggactgtcccagcctcgggagcaagagatggctccctccggacgggcctcatccaactccgccctggagtgtggctggaaggaagggacagagaaagaagggacagaggaaaggggctgtcccagcccaagaaggcagttccactgggaagtcagtcaggtccggcggcagcgcttcctctggcagggccgaggctcgcgactgctggggtgggcggaggt

SEQ ID NO: 18008 - DNA, 1046 bp, Homo sapiens
ggcggtggcagcacaggtactggagggaagtggcgctggcacaggagcgggtgaccttcatgctgctccgggccgccgtggagcacaccatcgggtagaatctcttgttctgcagcttggtggctgccacacctggaagggaggggcccagcctgaaccccaggcagggaaggggccagctactgggcgcagcccctcagacctcacgctacagtcacccgggtgggcagctggcacagctgaggcaaggcagggtgcacgcgctggccctgccactccagcctggcctcactgtcccaccccctgggaccctggggcctcaggcttctgggaggaaccctttcagaaaacctcagtgtcccctgggctggggcggggtggctgcctccctcggggtgacagctgagaggagctcaagtcctgtgacggcctcacctatacacttcctgttcttgaaaaaggtgagtgtgccgtgccaggtgtccaggtgcacgccaatgatggagccctggccgaaccgcgatgagaagctggtcttgtcgcccttgtggtggaggaggcctgggggcagccagggtcgcagtgagcccgggagctccaggctcggccccgccccaccctgggcctcacgcacccgtgtaggagaggccccagctgtcctcatccctgcccagcaggctgcagaacgtgtggcggtatttgtccaggtccacatccgacgtcccgatgcccaccatctaggaacaggggccaggcagagggcgcggggctgggctgccggagccaggttccccagaagcaccctgggccgaagcaacttaccatgtcggtgccgtagacgggagaggtcatcttgatctcccagaagtgctggccctcccccagctccttggtgccccggatggccgctgtgccgcagctgtactccatgtggaagctgaccttacggttgtcacagctcagcagggtggctgatgacttatttaagtcatcccagacccagtcgaaatctgcaagagaggcccaggctggggcagccctgagag

SEQ ID NO: 18009 - DNA, 1756 bp, Homo sapiens
ccaggagccctgaccttctctgtcgtgtttccgcccagagcctggaaacctggccggcgtcaggcacatcatcctggtcctctcaggaaaggggggcgttgggaaaagcaccatctccacggagctggccctggcactgcgccatgcaggcaagaaggtgagcgccctacccctcactgggcggagccccgggcagctgcccgcatcccggtggaggcctggcggtgcccccggcctaggctgtgccgctccttgcaggtgggaatcctggatgtggacctgtgtggccccagtatcccccgcatgctcggggcgcagggcagggctgtgcaccagtgcgaccgcggctgggcacccgtcttcctggaccgggagcagagcatctcgctcatgtctgtgggcttcctgctggagaagccggacgaggccgtggtgtggagaggccccaagaaaaacggtaacggccgggcggcgcgtccgccgtcctggtgaagggggttagcgtccgtgccggcctctcctgtggaaatgttcctcttcagcagccaggcctgttcctggggacctgcacatgacacccacgaccaggcacagggctcaggctggcggtgtgtctccagttgggtccgtgctgccacacagctgtccccaactcccggtcagagggagtggggtctgctgagaccctggccatggcatgcagggacctgaggccccagtgtggcaggtcataggggcagagctgagggggttctggtgcctctggagcaggtggcattagacgcccccaaaggcagggagaggctggtgggagtgaggcgcaggctgtgggtgcaccagtggggcatccaccacggagaatgtgggtgctcccatgtgtgggtacagacgcctggagggtcctggctccgtgttctgatttggggcctcggggagtcagcgggggctctgtgggcaggggccagacactgcagaaagggacgctgtaatggccccggccccatctttgcactcctgcagcgggccagggcctcccgagagcctgtgatggaggctggtggcaagtgacacctgatggactgcagcccctcggcctgacctggctggttcttagtggcgcagggccacgtgtgcagacctgccctgccctgaccgccccgtctgccccgtctttgcagcgctgataaagcagtttgtgtccgacgtggcctggggggagctggactacctggtggtggacacgcccccggggacctccgatgagcacatggccaccatagaagccctgcgtccctaccagcccctgggggccctcgtggtcaccacgccccaggtagcgctgcggcaccttcccgagtccctgtgggtggcttcccagagggctgggcgggtgtccctgctggtgcgcctggctgaccgtggcctcggctcctgccccgcaggcggtgtccgtgggggacgtgaggcgcgagctgaccttctgtaggaagacgggcttgcgggtgatgggaatcgtggagaatatgagcggcttcacctgcccacactgcacggtgagtcccgggggttgcagagggggcgaggcagcacctggccggtgggggctttgggcagtgctgggctcaccaccgtctcctaggagtgcaccagcgtcttctccaggggcggcggagaggagctggcccagctcgccggggtgcccttcttaggtgagtgtcccaagctggtgctggggtcgcggcctcccattccatct

SEQ ID NO: 18010 - DNA, 1029 bp, Homo sapiens
tggtggcgggcgcctgtagtcccagctactctggaggctgaggcaggagaatcaattgaacccgggaggcggagcttacagtgagctgagattgcgccactgtactcctgggcaacagcgagactccgtctcaaaaaaaaaaaaaaaaaaagaaaccatttattttaaaaatgattagattgctatgcctcaactcatagaagatgaacccttcaagaaaacgtgaagtagaacgggtgggccagaaatgaaaacaggcaagtaaagtatttcttcggaaaacattttatcaaaccaaatgttaaaaagactttccttttgtaaaactggattagagaagacttttcagtgggttatctctaggatgatcagtagttcagcacttaaaaactgcagagaaaactgaaagttatgttccagataactttccgttgtttaccaaattttcttagatttggtcatcatcaggaagcatttgtaaaaataaaaatctccacaaattactggcccatctcggacttgctgaatcaatttgataggattaatctccagtgaagctgtgtttacagggcattccaagtgattcttatcaggaaatgtgaaaaacactcctgtacataatcggttaatttaaaattttacttaataagtgaacaagtaatgaagatttcacctgtttacttagggtatctacccagacccatcgattctgagttcgggagatgattttgaaattactgttttccaaataaaggtgctcccttctaagtggcttacaagggtaatttttttccccccagtaatgacgaggagggatatttcctccttgtggggcttcagaccttagtctttgacctttggccttctgagcactgtgctgtgttaacacagttaatcagcaactgtacttcccaaccggagataaggaggctttgtggaagttgaatagcctgggactgctgcttttgctcttgcctgcaccctcctctgaaaaaacatccaggcaagatgcacagcatagctgtcaat

SEQ ID NO: 18011 - DNA, 1026 bp, Homo sapiens
cctctctcccctccaaagggcttatgagaaataagaaagctaaaagcctgtccaaaccgatgaggcatttgagtctgtggctttgtctttgcagaatttatagagcggcagcacgcaaagaacaggtattactactaccaccggcagtaccgccgcgtgccagacatcactgagtgcaaggaggaggacatcatgtgcatgtatgaagccgaaatgcagtggaagagggactagtacgtgagccatgctgggagtgtggagatctgcaccgtgtgctgctgggacactagtccctgggatgccacagggtggcatgcccagattttaggggtgacatgggaggagccagaccccagggctcttgctttcaattgttctcacagggtacaggaaaaggattccttgtgattagcctctcttgctccttttctccaccagcaaagtcgaccaagaaattatcaacattatgcaggatcggctcaaagcctgtcagcagagggaaggacagaactaccagcagaactgtatcaaggaagtggagcagttcacccaggtggccaaggcctaccaggaccgctgtgcgtgccccacccacccccaaccccccaccatcctcctgaggcctgggggccagaaccattgcaaatcttccctcccctcccttgtgctcacttgactttgccccctttgcatgtagcagaggcctcggttcccagcttgtttccattgcttccccagatcaggacctgggggcctacagttctgccaggaagtgcctggccaaacagaggcagaggatgctgcaagagagaaaagctgcaaaagaggccgccgctgccacctcctgaggcagctgtgggtgcccctgctgtgtggctctgtatgactgttgctgaaatataaagccctgcaacctgcctgtgtgtctggtgtgatctattggccccacgccccagattcaaaccaccactaaccatgcaggacacgggaaaaaaacagtaacacgcttaattcactttatttttc

SEQ ID NO: 18012 - DNA, 1029 bp, Homo sapiens
aggttgctggtagagcacctgagggctctgcccttgccttgcccagcatttgtgtgtgggagagcagtgagacctggacctctcatgctcagatctgctaagaggagagtgattgctacctctgcagcagctcatctgaaacgtgctggccgtacgctaccaaagataggtgtaaagaacaggtgtccttagccgggcgcagtggttcacgcctgtaatcccagcactttgggaggccaaggtggatggatcacctgaggtgaggagttcgagacccgcctggccaatgtggcaaaaccctgtttctactaaagatacaaaaattagctgggcatggtgtcgggcacctgtaatcccagctacttgggaggctgagggaggagaatcgcttaaactcaggaggcagaggttgtggtgagctgagattgtgccattgcactgcagcctgggcaacagagcaagactgtctcagaaaacaaaaaaaagaacaagcgtcctgcatcctgttctgaaagttgtttgtgtgggtacggggcagcctgtgagtggataaataggcctccgaggctgggatggtcccgggccctgtgtccacggatctttgcagctcaggttgcaacggtaagagtattgtcaatgagacaaaggaggtgagagtgccagttgtctgaattggttgggatgttggtcagatgacatctaaaagaacacggccattttgttattatttggttagagacaaggtctcactctgtcacccaggccggggtgcagtgtcacaatcatggctcactacagcctcaacctgccaggctcacgtgatcctcctactttagcctctcaagtagctgggactacaggcatgcagcaccacgcctggctaagttttgtattttttgtcgtgacagggtctcactgtgttgcccaggctagtctgaaactcctgggctgacgtgaccctctcccctctgccacccgaagtgctgagattacaggtgtgagccaccgcacttggccagaacacggcca

SEQ ID NO: 18013 - DNA, 1035 bp, Homo sapiens
gcccgatgctggtgtgttcactagaggagagccacaagcagggattctgggtcaggtgcaggcctagggcttagtgtgcacttgtggttctgagactgtcccatgacttcctgccagcattccggcagctctagtgggactccctcctggtccaggtgaggccaccattgctgccctggcttgctgctgtcctctcagcccccagtctgtcacctggtgggagttaaagggacctgctggggtttgaggaagctctgagccgttccctgtacgaagcctgtggtcatctcaggctgcaggagacacaggagatacgagctttggaggtggggctctcagtcacaagcccccgttgttcctccctgtcctccgctcacggcactgctccagttgccggggccagggttcttggagagcacatcctcaccgctgtcccctctgctggtgacagcacgcagtggaagcactctggaaggcggtcgcggatctgttgcagccggagcggccgctggaggcccggcacgcggtgctggctctgctgaaggccatcgtgcaggggcaggtaaggcccagggcgacgctgggatgggtgacgtcaggctgcccactgactgtcctgtccctgctgggccgtgtttggactcctgcctcggtgagttgctgggcacagggtctaggggctgatgggctctggagctggatggcctgtggggtctcctggtgtcatgaggtctgtgtgaccgtaggcactgcctcctcgcctgtaaacagatggtcactgcaccttcctcttatgggatgttctggggatcatatgaggcagttctcgcagagtgctgagatcgtacctggcagctggtgtggggctacggtgttgttttgcccttgcaccctttcggggccactcccctgctcactgcattccatctgtgctggtcttggctgaccctgaacacccaggcctcttggtgttcctgcctcccctggtcggccacttctactccttcatgtcccagctgctcagaagggccgtcc

SEQ ID NO: 18014 - DNA, 1040 bp, Homo sapiens
gaggatgtgaagacagccgtcctggggcttctggtcatccttcaggtgggtgttctgcacgaggcctctgctcccggggcgcgcatggctagcgtccaccagctgcatctgcgttgtgttggagtctgttccccagcgggacccacaccctccctggatttgctgagggtgcggtggtctcagcaggcagcagaaccttcctcctgctcttgtggagggatggatgcaagaggccccgttgtacgccctgaccagagcttgtctctgtgctcctgagtcagggccggaaccatgtaccatcctcagcgtggcgcttgccctcgtcacccagcacagcacctgggaagtaagggtggccctccattcctgccctgcagtccgtttaatatttgcagctgttttgttgagatttaatttacatatcatgcaatttacccattcacagtgaacagttcagtggttttcagtaaattcacagagctctgcagccaaccccacagtcagcttgagaacctcctgagcataccagtagcacacgctcccatcccccgttgctcccgtacccccgggtaccatcaagctgcttcctgtctctgtggatttacctactctcaacatttcatggaagtggaatcacacaaaattcatccataagatgttggatggtagaacagtttcctgtctgctgactggattgttccacccagcgccatgtgtccaggcccgtccaggctgtggcagctgttggtgctcccctccttttcatggctgagtagtattccatcatctggaaggagcacattttgtctgtccgttcctccattggtggacatttggcctgtgtccgccttgcagctgcggtgagtggtgctgctgtgaaccttctcctacgagggctccgccgggcctgcattttcacttttgggtctgcacctaggagtgaattgttgggccctaggtttagtctgcatttggtgtttcaaggcgataccaggctgttttccactggtgctgtgccattttccatccactcgagcagc

SEQ ID NO: 18015 - DNA, 1025 bp, Homo sapiens
ggggcgttggggctccttcctcacccgatagtctgaggatagccagaccccccaaacaaggcttgaataactctccacccgtgaaagaattcaaggagagctctgcagccgaggccttccggtgccgcagcatcagtgtgtctgaacatgtggtccgcaggtagcgggactgtcgggtggggggcacggaccctggagcttggccccgtgagcacctgggtggcagtgcatggggctgcttgcatgacctcatcgtctgcccgtgtcctccctggccagcccagggggagccggtgacgaggggtggaaaggttgcattctgtccccaggccccgtatgagcacgggctggttgcacgcatccccaggccccctcggggtgccgctccgagagagccaggcgtgccgggcagcagcctccccaggctgtccccaagggccgcagtgtgggttgggggagacaccactcctggttttggccttttcgtattctctagaatggacgtttttcttcgggctttcttctcaacaaggtttattttttgttgtagctgaaagggaacaaggggcatttgtggagggtgctggggtggggcagcctgggagggcctgggtgggggctaggatcctgcagggcatgggcatgggcctgggccccaggccatggtcttagttctccccgcagtgtctgggtgcaggtgtgggctctcgggctctcggctgtcacctgcctgtgggtcatcgctgctggcactggcagaggggatacctgtctcctcctggaagcccgttgcaggccaaggggtcccatggccctcagtccatccacctcctcacctcaggccggcctctgctgggtgggacttggccaggggttggggtggtagaggtgctcggtgaggcttaaagccattttctagcacattctgtatcatgagcaaaatattgcctaggggctatgaaatttgtatcagaatgaactcccataagcctcttccctgtcactgggtgtggagctcaggcagc

SEQ ID NO: 18016 - DNA, 1023 bp, Homo sapiens
tgggccacaccctgggcctacccaccaaggcccagccttggccccagggacattcagcctggaggtgactggctgtgactcaggacccagaggagtagagggagccaggcaggggtccctccacctcggggaagagctggatgggctcttcgggagctcagaaaggctaagccttgagggacggtgacgcagagccgcctgcctgcccgggcctctgcatacctgggatcggggtgaaggacctttgcctcctagaggcctgcctgagccggggctggtggtggaaggctgctgcggcggccccacggtgccccacagcaggtctgcacacttgcagcagcccgtctgactcacaggggcctgggctccatctctcaagcccctcatttgtgctccacccacaggaggtgcttcccaaggaccgtagatgcctctctagagcatgagctcaggcaagagtgcccgctacaaccgcttctccggggggcccagcaatcttcccaccccagacgtcaccacaggggtaagggtgtgcccctctgcaagcccaacatccccaggacccccagcatgccccagggatctggtgttgcctgcagagctcccagcgcagtcccgtcccgagctggggtctcaggggagctcggtgggggggggtgtggtgtgtgtgtgtgtgtgtgtgcgcgcgcgcgcgcgcgcgcgcacgcgtgcgtgtgtggttggggcgtgttagtgctgtgtggcgcggcctggttgcatggttaagcgtgtgagtgctgcgtggcgcggcctggtcgcatggttaagcgtgtgagtgctgcgtgacctggcctggtcgcatggtaaagcgtgttagtgctgcgtggcgcggcctggttgcatggttaagcgtgttagtgctgcgtggtgcggcctggtcgcatggttaagcgtgtgagtgctgcgtggcctggcctggtcgcatggttaagcgtgttagtgctgcgtggcctggcctggtcgcatggttaagcgtgtgagtgc

SEQ ID NO: 18017 - DNA, 1025 bp, Homo sapiens
gtcgcatggttaagcgtgtgagtgctgcgtggcctggcctggtcgcatggttaagcgtgttagtgctgcgtggcctggcctggtcgcatggttaagcgtgtgagtgctgtgtggcgcagcctggtcgcatggttaaacgtgtgagtgctgcgtggcctggcctggtcgcatggtttagcgtgttagtgctgcgtggcctggcctggtcgcatggttaagcgtgtgagtgctgtgtggcgcagcctggtcgcatggttaagcgtgtgagtgctgcgtggcctggcctggtcgcatggttaagcgtgttagcgctgcgtggcgcggcctggtcgcatgattaagcgtgtgagtgctgcgtggcgtggcctggtcgcatggttaagtgtgtgagtgctgcgtggcctggcctggtcgcgtgttaggcatgtgagtgggctccacatgtgcacgtcctccttgtgtcccggaatgaggccaggtctcctccgtcctccctctagaccagaatggaaacgaccttcggacccgccttttcagccgtcaccaccatcacaaaaggtgagcccttaagccaaggccagcccaggctgggaataaccggggcacccccatgcccaccctgctaaggactgagggacacttcccggtgagctggtgttgggtgccagtgctgggcgcgggcagcctcacaccgcagcctgtgtcctcacagcctctcagccctgggcctccccactggacaggagtcgggtgtcctgctccttgtgcctcggtgactgtgctgtgccctctctccctgccctcttcatcccctctagggaggcttgccctgacatctccagcaccaccacacagccctgtcccttgtcacagtgatccccagcttgtccccagtctcaggctcctggccagcctccgaaaggtcccgtgtgcccggaggtcttctcttgagtttggccctagggcttcagtaacagtgctgcagttgtgacatgttaataggaagggagggagagtggaagaga

SEQ ID NO: 18018 - DNA, 1054 bp, Homo sapiens
acctcatggagttccggcgggacgcatccatgttaaatgtgagcgggcggggctggaggggctgggttgtgagacccggggaggccggcggccccggcagggaggcctcccctggccttgcctacactagtcaagatcaggggtcttgtgtgtggcaggggctgctgtcacccctgcccacccctggcccagggcagcaggggcagagaggctgcactggccccacagcagccctgcccacctgccctctgccctgcccttggccctgcaggacgagctgtcccacatcaacgcgcggctgaacatgggcatcctaggctgtgagtatggacccgccgtggctcccgcccaccctcccccccgggccccaactgggccttcacccactgctcccatctctgcagcctacgaccctcagcagatcttcaagtgcaaagggacctttgtgggccaccagggccctgtgtggtgtctctgcgtctactccatgggtgacctgctcttcagtggctcctctgacaagaccatcaaggtgggcagggtcctacctcagtctctgcagcctggctgggctgggcactgccacatgcctggcactgccagcctgcctatgggtgggaccttctgggcagggccctctcccatgggcggggctccctcactcattcctgtcatgctgccccttgacactgggctgaccttgctgggacccactgtggccctggtctctgcaggtgtgggacacatgtaccacctacaagtgtcagaagacactggagggccatgatggcatcgtgctggctctctgcatccaggggtgagtccaggcacatgtgtgatcagtgattcccaggacaggagacgtggcgctgccaccccgtgggccgtgagccatgagctcgagcctgtgtagctatgtgtgtgccccacctatagggcaccctccacccggagcagcactgtttcctgggtagcagtgtgtgggcccttgtgtggcctacaccatctccaaagttgtgtgttcccaatacctggcgcagccagcctcccagca

SEQ ID NO: 18019 - DNA, 1032 bp, Homo sapiens
ctccctgatgtgctgtgggaggggctgttgcgaggtctggatgggcaggctctcatcggggacagatgcttgtgcaggggggcattcagaggcagccagggcctgggcaggttgagggagctaggggctgctggggttgggggtgcggcaggggcgagtggctaggtgtgcagacgcgagggaaggagctgtctagggacctgatgctgtgggaggtggggcggggcatggctgctgcctggggagcctgctggaccggggctgaggcaggcggggagtgggcagctggacaggaagtaggtttgggcaccaggcggaacctggccttgggcagccctggggactggctgcagcaggaagagggggtggaggagccgtggcggaggccaacccggggcctgggaagggcacctgtgagcaggctgctctccaggaggcagccagggcacctgtctcacctccgtgctgcctttccctggcattcctgcgaccaagacactcatcaatgccactcagagctcggaatgttcatgtgggaggtggggcgggctctggccttgacctggcgtttggtttctgggatggtggcgtcacctgggagcatgaactccttaggttctggcggggtctctgggctgggtctctggccagccaggcccctttccacccacctaaactctagcagcctccagccctaggctcagcacccctccctgtgcttcagcagcccctcttggcacccctgccactctggcacccctgggattttcccctttgcgggcatcctgggtactctgtgtgtgcccttggccagtcagcaggcccggtgggcttagtccagggctgctagctctcctgttggcctctagtggagatggcagagggtcctgcctgctggtggccaagggctggggcgtgccaggtcctgtctttgcgggtgcaggggtgcggtcagctgtgtgggcagttggaacccacctccaggccctcctgccgcttcgcggaaaaagttcgcgtctcctctggcctcgc

SEQ ID NO: 18020 - DNA, 1054 bp, Homo sapiens
cagggtcatttcagggcagcctctgctccacccctccggctctgggctccgtggctggtctctgctgtggctgctgggcgtggcctccccgcctggagcacagccccaggggagcagggtcaggagttcatggtgtctgtcctatgtggatttggcagccagcgctgtgatggtgccacgctgcggcctgttggcgtgcagccctctttcttctgggccagcaaaggcctgtcgggggatcggtactcacactaacctctctttgtctgttttatttttcttctccatgtccgttgctttctcctgtttttcagtgtgtcactttctaaaaggtaggtctgaaactgtatctgcacacctggcctctgtctttccaccaggctgactctaggccagctgcttgctctgggtctcagggctgctctcgtgggccagcttcagcagcgctgcctctgagccggactgatgctcaggcgccttctgtctgtctgtctgcctgcctccctgcctgtctgcctctgtcatgctatctgctggtgtttggctcaccctgaagccttgtcttgccagagcagttgctctctgtcctgatttcttagagaaaagttgcattgtccccatccaagctgggcactttcccttctgtaatgggtgggaggtggggctcctgggaactttctccccgttgggcacctagaacccggccctaaaccggggccggggcaagcaggcgagaagttccctctgggtttacttccaaagaggctctggggcatacctcggggggcatggcctggccccagacgtgccttcgggctctgacccctgctcgctcccctcaggcagtttgtacacttggccgtccatgcagagaacttccgctcggagatcgtcagcgtgagggagatgagagacatctggtcctgggtccccgagcgctttgccctgtgccagccccttctgctgttctcctccctgcagcacgggtacagcctggccaggtaacaccccaaggggccagagcgggcggcagagccgcccagccacgtgtcct

SEQ ID NO: 18021 - DNA, 1039 bp, Homo sapiens
gtctgtgaagcccttccccagcacccccttctccgctctcctggagcatgtctctgtgcctggaggtcaccgcgcctgtgtcctcacccctgctgagtgctgggacacagggtaggcaagttttgtggcccaaatatatcaataaaatatgaagaggaatggtaggggtagtcctggtcccttccacctctgacatatgtagtcttctgcaggtcaggctgtttgtgtgtgtgtgtgtgtgtgtgtgtgtgtgtgtgtgtgtgtctgtcagagattcactcttgttgtttgtttgagacggagtctctctgtgtcgcccaggctggagtgcagtggcgtgatcttgactcactgcaacctccactcctgggttcaggcgattctcctgcctcagcctccctagtaactgggatgacaggcatgcgccaccactcctggctaatttttgtatttttagtagagacgaggtttcaccatgttacccaggctaatctcgaacttctgacaccaggtgatccgcccgccttggcctcctaaagtgctgggattacaggcgtgagccactgcgcctggccaagtcaggctggttattgatctgctcccctaaaagaccatggcatgagttctgtgggcagagagggggcagggagttgccagtgcagtccccacaagcagctcagtaggcccctgtggtggccctggagggcagctggcagaagtcagaaaggcaaatgagcccccgtgacactgctgtgtccacagaattctccactttgagaatagggcccaggagaggggaactgaaaagaaaggcaacattctcttgggagaggaaggagggacagctctggaggagacaggccaccctggagcccagcccaccagcactgttgcggtgggaggcttgggccctctggccaggctcctgtgtgcttggagccaccccgtgtgcaggggagacctctctgggaggtcagctgaggcctcgtagttggactgttgatgatccccgtcgtcttctctgcccccatcctcttct

SEQ ID NO: 18022 - DNA, 1979 bp, Homo sapiens
ccaggtcagctgcttctgaccctccggtcacaccctgtagcagtggctttgccatccccaagacctttggtggcttttccagcatgttgtcctgggcagtagccccaagggtcgactgaccctgaccccacatgggggctgctgaggctgcactgaggctccctggggtgacaggtgggttcactgcagagccaggagccccagatgggtcacgccgccccaagagctgctgctggaggaagagctggactctgagggtgggggcctcacgtagaggaaggaggagtggctgtcctggcctccttttgcttgcccgtggctgttcctcctgggtcctcttgccctgggctggatgccttcttcggctccccctctgcatgtgataacttggggtggcccttggagctgtgccaaagctacacctcggggtcctagtctcaactggcctgcgtactgctgtgggctcaccccgccttcctcccacagccctgggcgctgcctatggcacagccaagagcggtaccggcattgcggccatgtctgtcatgcggccggagcagatcatgaagtccatcatcccagtggtcatggctggcatcatcgccatctacggcctggtggtggcagtcctcatcgccaactccctgaatgacgacatcagcctctacaagtgagcactggggtcaggcccctgcccagggctggaggactgcagggaggggggcggttcacctgtgggtggtgacccggacccttgtctccccctggttggcaggctgctgatgtcagtcctctcttctcgcccccaggagcttcctccagctgggcgccggcctgagcgtgggcctgagcggcctggcagccggctttgccatcggcatcgtgggggacgctggcgtgcggggcaccgcccagcagccccgactattcgtgggcatgatcctgattctcatcttcgccgaggtgctcggcctctacggtctcatcgtcgccctcatcctctccacaaagtagaccctctccgagcccaccagccacagaatattatgtaaagaccacccctcctcattccagaacgaacagcctgacacatacgcacggggccgccgcccccagtagttggtcttgtacatgcgcagtgtcctagtgcccatcgtctgtttccccggccttgcccccgcccgccccgtgccgtggacatctgggcccactcatcgcccctccaggcccccggcgccccaccccctagagtgctctgtgtatgcggatgatttagaattgtcatttctctttactggatgtttatttataaagatctggcctgttcctgcgtctgcggagcggcccttgtctcccagctatctataaccttagctagagtgtcgccttgtgggttcctgttgctgagacttcctggatggagccgccctcaccgccgggcccgtggccctgcgcggagctgtgtccaataaagttcttggatgtgacgggcctgtgtctgctcagcttgttgggggcgggggcgggcgggcgggcgggcgggcgccgggcgctgccggtcacgtgggctggctcgatcacgtgggcgcggcggtcacgtggcgcgccgcttcagtcagctgaaggtcacgtgggcgcggtctcagctctcggctggggttcgtcactgggcgcgggatttggccgccgcggggctccggagccgctcgctcccgacacggctcacgatgcgcggcgagcagggcgcggcgggggcccgcgtgctccagttcactaactgccggatcctgcgcggagggaaactgctcaggtgggcgcgggccggggactgcggggctggggaccgggcggggtgcagggtgcggggccggggaccgggcggggtgcagggtgcggggccggggacagggcggggtgcagggtgcggggccggggaccgggcggggtgcagggtgcggggccggggaccgggcggggtg

SEQ ID NO: 18023 - DNA, 1163 bp, Homo sapiens
gacacacaccgtttgcatcgtcttctcccttgatattttaagcattttcccatgtcatgagtttctcagaaacatgtttttaacaattgtactatttagtcattgtccatttactataatttatctgaccatttccctactgtaaaatacttaagacggtttctgatttttccactatttaaataatgctgtgatgaatatctttaaaatcttctgatttcttacttttttcccccttagatgcctggaagtggtattttgaggtgaaagagtttgttcattttgaagatatttctgtctctctctcgacctgatgtgtagacgctcacttccagtagcagaaccaccttagttgtgtcttacagattctgaacaaatcggtttctgataagccatgtgttccaaagaatgtctgaataagaccgctctttatttaaatgctaagaggatgtcactactgcaatccatctgtggccgattttttccaagagccaatttccttgttttggttgcaagaacctggctctgcctgcatgtcagctctctgccctccctgctgccgtggctttcaagcgcttggcagaatcttgtacttcgtgtccacaatggtactgaatttgcatctgcacagtcagcagagataacaagtgttgaactgaccttgccacatgcttagtgagtgatttgtaattaagtttatagactcagaaggtatattaggacatttggaatcagtagcagagcaaagcctctttgaaaaaaaccacgtagctgattgggttttacaagagtgcatttgtctcccccttccacccgtggggccccaccttcaggtcttagtggttcacaagagcccagcagccaggctggctttttcattgtagggcgtggttgtcccagctggtgtagatttcaggccgccccccccaactccctgcccacagtgttgcagattgcctggctggcagcaagtccagaccacccaaatttggttggattcttcatttctccactgtagttggggtccattgattgtgcaggggaacgtgcaggaggtttttctaggcaccgtgttcagtgctgcttcactctaccagagattatggccaaattgcacggaatttggtttcttgccctctgaagcctgagggcccccccttgcc

SEQ ID NO: 18024 - DNA, 1048 bp, Homo sapiens
gttccagatctcctttcctcgggcttctcttcggcgttgggctgcccgtgtcgggggcctcccagactgcgggacgccgcgcagccccctcccccattccgcaaggccgaaaataggcccccggcgctgcggggagggccttgaacttcgtgggccggatttaaatggtttaggattcccggctatcagcctttgagttgttagtggcggggagaaaccccaaatcttaaaaactgtgaagaaagtgaacgtgttcagtttacatttgtaaggtagaccgtgcgttccctttttacactttttcaacgtctcccgagaattcgtgttcaaactaaggaggcttttggagaccttcgttgggaagaaaacgccagactcatatataagttttctggttggtttcaggcgttctttggcacacagctcttctgaagcttggtttccactcggcttcagttaggacgaatctggatcagaatttcagagtgttgtgttgtctttcatcctaagtgcgtgggcttagggctcttctaaagctactattttagctttctgggttctttgtgtccactcagccgctctggagcgccccggtgctgagctggctgtgcttgctgatgtccatttttttcgacaacccttgtctcccctttttctccccttttggtaccgttttcttttttgcatattttactgttgaattcaaatatatctttctacttcattgttagcttaccactcggataatttcccaacagaaaagggtgtttttgtcttcctttgtactttttactttctgcttttaacttgggtaacttttgcatatccactgtctatggcccccactttaagagttttgtaatatcgtttggtttggtgatttgtgtgtggtgttgatcttcctactttctgtgtcttaacacaccccttagatgccgtggggtcgtcgtctttttttgtggggtggactaggtggctcattccctaaaagttctccgaaacattgtgacctaatatcctttgcttagcacctactggtttttctttt

SEQ ID NO: 18025 - DNA, 1036 bp, Homo sapiens
ctgcaaccttccgcctcccgggttcaagcgattctcctgcttcagcctctggagttgctgagattacaggcaatcgccgccgcccagctaatttttgtatttttggtagagatggagtttcaccgtgttggccaggctggtgtcaatctcctgatctggtgatccgcccacctcggcctcccaaagtgcaggtgttacaggcgtgagccaccgtacccggcctggttttcctttcttaaggagtggggggatttttgtgtgaggtggtatggaagtgtgggtgaatggttaagctgaagaattaagtgcaggtcaaaaacatgctgcaggggaagcagaaattaagtggggtaggggagaggcgaagaaggacctagttttaaaccgtgaggaggattggtactagaagatgaaaatgaggattggggtgtagagaaattgattttttgagccatacagtttttcattttttcctggatttctgcttgccttatccaggtttagcctcttctgtcaccttctgctttcaatattgggtctgctactgggcttgggtagggacccatccttaggcgcatgcgctagtatatttttccaaacatttgtatgatgcttcttcattctggaattttctaaatgcatccttcccttctatccagttcttttacatctttgattactctctccgctttacgtattccttagggttttttcttagtagtattttctcatatatgcatgttctaggaaactatcttggagaggatgagggtgagaaagagagtatatgtaataggagaaaggaatagagtatgtgtagccaaggaatctaaccaggaaagctgggacttgagaatttttcagaatcacgttagggttgggacaagttgaaaggctagaacctgggaggaggcatggggttaacacaggagagaaggaagaggcagggctgagagagaaaaactaggaagtgctatccaggggattggtggggaaagccaacggttggacattaatgaaagtggggtgtagagag

SEQ ID NO: 18026 - DNA, 1471 bp, Homo sapiens
gttgtcattggtagaaaagaagaagataaatggatgtaaggattgaggccttggaaagtagcataggcaggaaaagaggaattagaagaatacgtgaagaagtgggaatcatgggctgggaagggaaattttggaaaaggagcccattaaggcagaaaactcttttagagcagtggttttaaacttcagcaatggtgatccttttatacagtatcccttactttggaatcccaggaagtaaaaggcacattcttgttgaagttggggaggagcacttggaaccctgcttgcttaacttttttcttttggtccctgaggtgtagcatatttaaaatccactgttctagagggagtagtaagtagagggaagaaagatgatgggaaaagatcagacagaagggacttttgggtgagcgaaaagttctgtgtgcgcatggagagggaggggccccttttgggaatgagggaaatggaaacctgggactggggaaagtgtcctgtcgagcttaaccctgaagggatttgttcttcaggtacgaggaacagcaaattcaggaaaaagtggcgacctttcgactcatgttgctggagaaggatgtgaaccctgggggcaaggaggagaccccagggcagaggccagcgtgagtgttgcgctctccctcgatgactctggactctactctggctgctggctgctgctgctgtccttttccttacgtgggacttcctccctgctttcgtctgcctttcccatgccttatttggctcctgcttatacttgtgttctgaatatggctctgtcctttatatttccttcagacttttgcccttcttttctctagggtcacggagactcaccagttggcagaattaaatgagaagaagaatgaaagactccgtgctgcctttggcatcagtgattcttacgtagatggcagctcttttgatcctcagcgtcgtgcccgagaagctaaacaaccagctcctgagcctcccaaaccttacaggtatacaaggccaagaaaccactgtcagcttcttttcttgattgtaagctccatgctctatttttgtctttttgcgggctggtttcttcccaaactcttcagattttgttcttctgaagttgaggtgtccaaaaaaatgtgtccaagggttagtcacagtgggtcacgcgcgtaatcccagcattttgggaagctcaggcaggagatcacttgaggccaggagtttgagaccagcctgggcgatgtagtgagaccccatctctacaaaaagaaaaaaagctggttggtggcacatgcctgtagtccaggctgcttggagaggtggaggcaggagggtcttttgagcccacaagttggaggttacggtgtgagctgtgttgctgccactgcaccccacctgaggcaacagagcgagactcttatttttttatttttattactatttttttagactctgtctttta

SEQ ID NO: 18027 - DNA, 1524 bp, Homo sapiens
tttttcttctcttttttccaacaggtcagaatctgagtccaagaaacgtaagcataggtaagagctctttaactcatagggggcgcagtggcatgtggagtggtgatttttttttcttggagtgaagctcaattccttgatcttccttgtgtcaacactccctctttccatttcacttttggttttatttccttttttaaagaagttacttttaacaacctttccttatttcccaggtctcccactccaaagagcaaacgtaaatctaaggacaaaaagcgaaagcggtgagtgaatttgtggggaatttgcttaggaagtaagtgaacgccaccttagtgggagggagttgaatgagttatgtccctgactggtaaagggttgagggatacgtgaggagaatccagggcaggtacagcagtaccctgagctgtggtggtggtcttccttcaggtctcgaagtacaacaccagcccccaagagccgccgggcccaccgttcaacttctgctgactctgcttcctcctccgatacttcccgcagtcggtaaggggtagtccaggaggaagggagggagagggaatgatgggttaattaatttaatatttattgagcgcccacggtgtgctaggcgctgcacagaccattcggaagacacggtccctgccctctaggagctgacaggctaaagcaacaggatggacagacatatacatttccccttctctttttttttttgtttttgtttatttgttatttttgtttcgttctgatgtatatggactgccagaatagggggggtggtggtttgttcgtggtgtctgggggaggaaggaatccttaccctggcttccttaatcggggaaggcttcctgaaggaggtgggctcagaggtgagttgtgaatgaagcgggtagggagtgggctgggtggatggtttggggatgtttgggggaggtgagtaaaggggtagagggagaacgctctttgggattgtgttgggaaaagaagaaccaaagtggactgtacttgcatttcagtgaatgatttgagttgtgcgactaaaggctttttggaagagggttgtccagttaggaaaggtggatgggagttggggagggggttttctgttctccctttgagctgatttccttcctctcccacgtcctcaattaactcctgcaggtctcgaagtgctgcagctaaaactcatacaactgccttggctgggcgaagtccttcccctgcttcagggcgacgcggggagggagatgcgcctttcagtgaaccaggtactaccagcacacaacggcctagtagcccggagactgctacgaaacagcctagcagcccttatgaagacaaagataaagacaagaaggaggtatgttcctgagttggtgatgttcattggattgcaaatgtatagatttaggatagacatgtgatgtgaaagggagaggtaataacttattaaaataaataaattcagttttttttcctgcatttctctcctagttctct

SEQ ID NO: 18028 - DNA, 1101 bp, Homo sapiens
ccagtgaaccccccatctgaggcctctccaactcgggaccgttcaccacctaagtctcccgagaaacttccccagtcttcttcctcagagagcagcccaccatcccctcaacctaccaaagtttctcggcatgccagctcttccccagaaagtcctaaacctgctccagctccagggtcccaccgagagatttcttcttctcccacatctaagaatcgctcacatggccgagcaaaacgggataaatcacattctcataccccctcccgtaggatggggaggtcccgtagccctgccaccgctaagagagggcgatctcggtctcgaacccctaccaagagaggtcattctcgatcccgatctccccagtggcgtaggtccaggtctgcacagaggtggggaagatctagaagcccccagcgacgtggccgctctaggtctcctcagcgaccaggctggtctaggagcagaaatacccagagaagaggcaggtctaggtcagcaaggcgagggaggtcccactctagatccccagccactaggggtagatctcgttctagaacaccagcccgccggggcaggtcccgctctagaacacctgccaggcggagatcacgatccagaactcccaccaggcgtaggtctcggtctagaacaccagcccggaggggcaggtctcggtctagaacacctgctaggcgcagatctaggacccgatcaccagtacgacgcaggtctcgtagtagatcaccagccaggagaagtggcaggtcacgctctagaaccccagctagacgtggccgctcacgctccagaaccccagccagacgtggccgctcacgctctagaaccccagctagacgcagtggtcgctcacgctccagaacaccagccaggagagggaggtctcggtctaggacaccaagacgaggaagatcccgcagtagaagcttagttagacgtggaagatctcactctagaacacctcaaagaagaggcagatctggctcatcttcagagcggaaaaacaaatccagaacatctcaaagaagaagcaggtccaattcaagcccagaaatgaagaaatctcgcatttcttca

SEQ ID NO: 18029 - DNA, 2155 bp, Homo sapiens
aagtgaaacctgaaacaccgccaagacaaagtcactcagggtctatttcaccataccccaaagtaaaggcccaaactccaccggggccaagtctttctggatcaaagtcaccatgtccccaagagaagtctaaagactcactagttcaaagttgccctggatccctctctctctgtgcaggagtaaaatctagcacaccaccaggcgagagctattttggtgtctcatctctgcaactgaaaggacaatctcaaacttcaccagaccacagatctgatacttcaagtccagaagtgagacagagtcattcagaatcaccatctctgcagagcaaatctcaaacatcacctaagggaggtcggtccaggtcttcatctccagtcactgagctggcatccagatctccaataagacaagatagaggtgagttctcagcgagtcctatgttgaaatctggaatgtctcctgagcagagcaggttccagtctgactcttcttcatatcctacagtggactcgaattctctcttggggcagagtagattggagactgctgaatcaaaagagaaaatggccttaccccctcaggaggatgctactgcatcacctcctagacagaaagacaaatttagtccctttccagtacaggataggcctgagtcttcactggtattcaaagacacacttagaaccccgccaagggaaagaagtggtgctgggtcatctccagaaacaaaagagcaaaatagtgcattgcctacgtcaagccaagatgaagagttaatggaggtggtagagaagtctgaagaacccgcaggccaaatcctgtctcatttgtcttcagaacttaaagaaatgtccacaagtaactttgaatcatctcctgaagtagaagaaaggcctgctgtgtctttgactcttgatcagagccagtcacaggcttctttggaagcagtagaagtcccttcaatggcctcatcttggggtgggccacatttttctccagaacataaagaactgtctaactccccactcagggagaacagctttggatcacctttagaatttagaaactcaggcccacttggtacagaaatgaatactggattttcttctgaggttaaagaagatttgaatggaccgtttcttaatcagctggaaacagatccatctctagacatgaaagaacaatcgacaagatcctctggacacagcagttctgagttatccccagatgcagtggaaaaggcagggatgtcttcaaatcagagcatctcttcacctgtgcttgatgctgtacccagaacaccctcgagagaaagaagtagttctgcatcttctcctgaaatgaaagatggtttacccagaactccatcaaggagaagcaggtctgggtcttctccaggacttagagatgggtctgggactccctcgaggcacagcctgtctgggtcctctcctggaatgaaagatatacctagaacgccatctagagggagaagcgaatgtgattcttccccagaaccgaaagctttgcctcagactcctaggccgaggagtcgttctccatcatccccagagctcaacaacaagtgtcttaccccccagagagaaagaagcgggtcagaatcatcagttgatcagaaaactgtggctcggactcccctggggcagagaagtcgttcgggatcctctcaagaacttgatgtgaaacccagtgcatcccctcaggaaagaagtgagtcagactcttctccagattctaaagccaagacaagaaccccacttcggcagaggagtcggtctggatcatctccagaggttgacagcaaatctcgactatcccctcggcgcagtaggtctggttcctcccctgaagtgaaagataagccaagagcagcacccagggcacagagtggttctgattcctctcctgaacctaaagctccagcccctcgggcccttcccagacgaagcagatcaggttcatcaagcaaaggcagaggcccttctcctgaaggaagcagcagtaccgagtcctctcctgaacatccgcccaaatccagaactgctcgcagaggttccaggtcatcaccagagcccaagaccaagtctcgtacaccacctcgacgtcgcagctctcgatcatctccgga

SEQ ID NO: 18030 - DNA, 2033 bp, Homo sapiens
ccaggacacctgccattccaacagcagtgaacctggctgactctcgaacgccagctgcagcagcggccatgaacttggccagccccagaacagcggtggcaccttcggctgtgaacctggctgaccctcgcactcccacagccccagctgtgaacctagcaggggccagaaccccagctgccttggcagctctgagtctcacaggctctggcacaccaccaactgctgcaaactatccctccagctccagaacaccacaggctccagcctctgcaaacctggtgggtcctcggtctgcacatgccacagctcctgtgaatattgccggctccagaaccgccgcagccttggcccccgcgagcctcaccagtgctaggatggctccagcattgtctggtgcaaacctcaccagccccagggtgcccctttctgcctacgagcgtgtcagtggcagaacctcaccaccgctccttgaccgagctaggtccagaacaccaccgtctgccccaagccaatctaggatgacctctgaacgggctccctccccttcctctagaatgggccaggctccttcacagtctcttctccctccagcacaggatcagccgaggtctcctgtgccttctgctttttcagaccaatcccgttgtttgattgcccagaccacccctgtagcagggtctcagtccctttcctctggggcagtggcaacgaccacgtcctctgctggtgatcacaatggcatgctctctgtccctgcccctggggtgccccactctgatgtgggggagccacctgcctctactggggcccagcagccttctgcattagccgccctgcagccagcaaaggagcggcggagttcctcctcgtcgtcgtcgtcctctagctcctcctcttcttcatcatcgtcgtcgtcgtcctcctcctcctctggctccagttctagtgactcagagggctctagccttcctgtgcaacctgaggtggcactgaagaggtgagggagcttgacttttagaaatcttcagtgggggaggtattggggatgggttggggagtggggagggagaaaccatgtcacaggtgcttggctcttggaggaggtatggggaccttgaccctcaagctgggggtagaagagaatgctggggcagggggcggagggaggaggaatgggacagataaaagtctccgaaggttcattctctagaggataatgataagttttccgtctctacagaggacagaactagaggaaatggacttaattttacagcaggagggatggcagttagacctcaagaggaactccctgggctggaaggatcttcagaggtcatcccatccctctccctgcctccaggcaggacggccccttccccagccaacctgcactcacaggggcctccccaagctgcggctctccgaggaaggagactacccagcttcagcttccacacctgagcccagaggccttattcctccatcagggacattcttgaggtttaaccttgatcccttatgctgcgggccccagcctgttgcttctgttagcagaggttgggtcagctcgcaccactgctctccagagaattgctggctcacgtggctcggagagctcccagcgcctttctcaggcacccctccccccactgccgttcctccaggccaaggaaggtagggttggggctggggcagcttgtctccttgtgacactcctctcctcccacagggtccccagccccaccccagccccaaaggaggctgttcgagagggacgtcctccggagccaaccccagccaaacggaagaggcgctctagcagttccagttccagctcctcctcttcatcttcctcctcctcctcctcctcctcttcttcctcctcctcttcctcttcttcttcttcctcctcatcttcctcctcctcgtcgtcttcctccccttcccctgctaagcctggccctcaggccttgcccaaacctgcaagccccaagaagccaccccctggcgagcggaggtgagtgctg

SEQ ID NO: 18031 - DNA, 1021 bp, Homo sapiens
tctccataaattgtctttgggggattccaccacacccaatgctctggagccacaaggagtgtcccttcttccccagcagagccgtgggagggtccttgtctgctctcctttgaaccttggcagcccttggatggagggctccctttccctccccttttttttttctttgttcctgtgaaatgttaatctccgtgagttcttcctggttcatgtgttctggggggtttggggtgggagggaatgcagatgggagttgggggaggggaggatacagttcaggataccccagcctggagtcagggccagggaggcatggccccacttgtatccagaagttcccaggggtgattgtgatggtggttgggactggaggttgtataaggtgttcttggaaggaaggggcaggagttggaattagttggtccctactgtcccccatgaggttgtgaacccctccccccaacttttcatgtttcttaaaggcattttggttttttaaaatctgtacagcaagagcaactttttctgtcaaataaaaatgagaaatgcaggaactgggtctgtagactgtttattaaaggtgtgttaagggggcagccacttccctccgtgattacagcccccagcgtgggtggacctgtgtgggtccgtcttggggttccctcgttgaacatgctgtcaaaccaggacactggctccagcttgtgtttctgctcttggccatcgtctgggagtggacatgcaggctatgggggtggggggcacttagaaggagaaaggcctaaaactggaatctcttgtccctgaggctggctctggtctttgtgtctctcccagtccttccctttcctccccctggcgtggttggtgtggctggctagctgctaacaatggcttgggtctcagggcaacccaggtccccatggtgcctttaagcagcaggctgggccaagttctcagccagggtctcaggatctgggagacaggacagcacaggaactgccaagcacaagccccaaaa

SEQ ID NO: 18032 - DNA, 1090 bp, Homo sapiens
gccggcgcttgtaatcccagctactcgggaggctgaggcaggagaattgcttgaacctgggaggtggaggttgcagtgagctgagattgcgacattgcactccagcctgggtgggaagagcgagacttcatctcaaaaaaacaaactatttacaggccaggtgtggtagctcatgcctgtaatcccagcactttgggaggctgaggcgggtggatcacctgaggtcaggagttcgagaccagcttggccaacatggtgaaaccccatctccactaaaaatacaaaaaattagccgggcatggtggtgcacaccagtaatcccagctacttgtgagtctgagacaggagaatatcttcaacccaggaggcagaagttgcagtgagccaagatcacaccactgcactccagcctgggagacagagcgagactccatctcaaaaaaaaaacacaatttatctacatttaccattttattataaaggagacagatgaaaatataaatgcagtcgggcacagtggctcatgcctgtaatcccagcactttgggaggctgaggcgggtggatcacgaggtcaacagatcgagaccatcctggccaacatggtgaaaccgcgtatctactaaaaatataaaaattaggagagcatggtggcgtgtgcctgtagtcccagctatgtgggaggctgaggcaggaggatcacttgaacccaggaggtggaggttgcagtgatccgagatcacgccactgcactccagcctggcgacagaaccagattctgtctcaaaaaataactaaaatttatatatattttaaatatatataatatataatgtatatatgtcatataatatatattatatatgtcatatatataccatatatgttgtatatgtgtcatatatcgtatataatatatattatatatgtcacatatatacatatattttatttatatatatacacacacacacacatataaatgcagcagcacgtatgggaggggctcactttccattcccaccccactcccaactcccacacacccgtccaaggactccatgtgttcctggaagctctcggaaccctct

SEQ ID NO: 18033 - DNA, 1032 bp, Homo sapiens
tcagccagggtggcagtcatctgaaggcccaagtgaggctggaggccctgctcctcaccatagggacccctccttgggcccacttgagcatccttcacatgacagccatgggacagagagagaacaagagggaagctgccagcagcagaattcaggttcttctcaaccacagccaggccataaagcaagagtccattattttattttttgagatggagtctgtgtgtggcccaggctggagtacagcggcatgatctcagctcactgcaaactctaccttccgggttcaagcaattctcctgtctcagccccctgagtagctgggattacaggcatgtaccaccacaccgagctgatttttgtatttgcagtagagatagggttttatcatggtggccaggctgagtctcaaacttctgacctcaaatgatcctcctgtctcgggtctcccgagtgctgggattacaggcaagagccactgtgcccagccttgttattggtttgtaattacatcccactatggtcaaagaacatactttgtatcatttcagtcctttcacggctggatacagtggctcatacctgtaattccagcactttgggaggccaaggcaggcagatcatttgtaattccagcactttgggaggccaaggcaggcagatcatttgaggtcaggagttcgagaccagcctggccaacatggtgaaaccccatctctactaaaaatacaaaaattagtcaggcatggtggtacatgcatgtaatccaagctattcgggaggcagaggttgcagtgagccaagattgtgccactgcactccagcctaggtgacaaacaaaaaccaaatcaaaaacagagaaatttgggaaactcagaaatacgtagaaattaaagaacacacttataagaaaccagtgagtcagactgggcatggtggctcacgcctgtaatctcaacactctgggaggcagaggcaggaggatcacttgagcccaggagtttgaaaccagttggggcaacagagcatgac

SEQ ID NO: 18034 - DNA, 1034 bp, Homo sapiens
tgtgtctgaaccgtggtccccttgaggatgtgactgaaactatctggtagatgactgtctccctccctagggctggccctgctgggcttcctggtgctggtgccaatgaccatgccctggggtcagctgggcaaggatggctggctgggaggcacacattgcgtggcctgccttgcaccccctgcaggctccgtgctctatcacctctttatgtgccaccaagggggcagcgctgtgtacgcccggctcctcgccctggacatgtgtggggtctgccttgtcaacacccttggtgagtcagggcccaagggatgggagctggagccaccggcgggagaggcatggggcacgcatacaagccatgggtagggaagggcgggtggaccctcacaatgacatgccctctcctgttctctcctcttgtgcaggggccctgcccatcatccactgcaccctggcctgcaggccctggctgcgcccggctgccctggtgggctacactgtgttgtcgggtgtggccggctggcgtgctctcaccgccccctccaccagtgctcggctccgggcatttggatggcaggctgctgcccgcctactggtatttggggcccggggagtgggtctgggttcaggggctccaggctccctgccctgctacctgcgcatggacgcactggcgctgcttgggggactggtaaatgtagcccgtctgcccgagcgctggggacctggccgctttgactactggggcaactcccaccagatcatgcacctgctgagcgtgggctccatcctgcagctgcacgccggcgtcgtgcccgacctgctctgggctgcccaccacgcctgtccccgggactgagctgccatgccagcctgcccacagcagcctcctagagttagcaacaccaggtgttcctcccaactcgtctgcaaggggctggctccttggatgcttccagctcatgagatgtctcagcaggagccctgttcacccgttcttccctgtggactgacctcttccacccacgccg

SEQ ID NO: 18035 - DNA, 1036 bp, Homo sapiens
gcggaaggccccgtgtcccccggagcacaatgccagccgtgctccgggaagcgcatcccggcccaggagggtgcttcttgctcagagcccgggtcctggacccaatctcagaccctgcgcctccggcgctctccccccaaccgttccttctcttcctgccgctacggaaacaggagagaatcctccctaaaaagacaggtaactcattgtgctaattgcgtttactattaaaaaaagaaaagaaaagaaaacagaaaaaaaggcaaaaaacaaaacaacaaacaaaccaaaacagctaccgcgacttgtgtgcgggttaaacgacgcactagcttcaaatgcgggcgtccatcccagtgagaaaggaaacagggcccggcgcggtggctcagagaggcaaggccgggagattacctgaggtcaggagttcgagaccagcctggctaacatggtgaaaccctgtctctactaaaaatacaaaaatattaaccgggcgtggtgggggtggcctgtaatcccagctactcgggaggctgaggcaagagaatcgctggagcccgggagttggaggttgcagtgagcagagatcacaccattgtattacaagcccgggggacagagtggaactcaaaaaaaaaaaaaaaaaagaagtgaagaccagcaactacctctgatacagaatccaccctctttctttttctgttttgaaagtccattttgttaactgctatatccccagtgcctggcacacagaggtgctcaatacatatttgagagcatgaattactttattgggcaatgtggcccccagtacatctgggcacaccttgggactgagaacatagggtgggatgtaccctcccacctgggtgcgcagccccaccaggtgggtttggtcactgagcccctgcctggggcttccaggaccccagagtctctgtgccacccgccagcaggacgcgtgggtcacgtctctcctggtggactttctcttctcctgggaagggcaggacccagcgagcagttggtggcactg

SEQ ID NO: 18036 - DNA, 1032 bp, Homo sapiens
atctatacagccgtttgcagctcaagatcacaccttgattcattggttgaatcaaggttgaagtgttatgggggaagaacatacattttattcgaccatcctcactggttagggattcagaggaaggatgagccgggcaactgtccagaagtaacaatgccctgacgtcctcgtcatgaaatcttagaacattaagttgaaaatgtcggacctcaggaacaaagttttgaaaaaaccattctgaaaacaattctctggtgaaccaaacatctttactgggtttatatatcacaggcaatgtacttgtgtcctctttcacacttttgggcagttttgattttccaataatgattgactttaatttatgagttccgtctgcatttgcacataaaaaggcagacaacctttctttgtttattttcttccctggtaggcagatatctttcctacttgcctgagaattttctggcattgacttccaaaagaggtctgtttcatccccactgtatagctgagctagacacagtttctcctctttgattatcatggacagtttttgtcgaaatggctcaacattttcagaaactgaacttaggacttgttccccacatccttttcggttcccaattgcatgccgatttcgaaatctaaaaagccaaccagtgctagctttgaaatctgttcgcccaaaacaccgtgcaaatctctctgcagcagcctgaagctccacgcctcttaccggaacaccggctgagcgtttctgttggtaccacatgtagaccgcatcatctacatcaccatatttggctcccgttgtcctctttctcttctcagcccctactaatggcatgtcctgcttcagtacaaagtccagaattaacttcttattttttttaatgtcataaaatgttgacttactgattccaaattcatccattacacttttaagtgatcgtccagcttcaattctacttagaaccttcattttctcctccaaattcagtgttgtatatttccctctcttattcatac

SEQ ID NO: 18037 - DNA, 1090 bp, Homo sapiens
gtgcctgctatgagtccccacatggtagtctcttgggtttcttttataaggacactaatcccatttatgaggaccccaccctcataacctaatcacctcccagatgccccacctcccaagaccactgcactggggactgtcaatatatgtgtgtcaggggacaggggggataaacattcagaccatagcagggtccaacttcattctcttgtatgtggaaatccagtagtcctagaatcctttatgaaaaagactattcttttcccattgaattgtcttgtcaaaaagcaattgaccctgattgtataggctgattatttacatttgaatttaaatgaattaaaattaaaaaaaaatttaaaattaagttccttagtcacagtagtcacatttcaagtacccagtagccacatagtcacatgtggctagtggctgccatattgaacaacgtgcatgtgcctgtgcatgcacgtgtgcacacacacattttccacatcacaagggatccttctccagatcctgtgatttcccataggccgttccagctcatctccatccagactgtcaatccttctgtaattaggatacatggctaagccctgattccagtttctgaactcatatactgtcaaatttgtaatgaaagaaaacatcacagtctctgaacttaccatcttttgaagagaaggtggttgtcaattagtgtttactaagtgaggggtatttgttgaaatagctcaggcattggactacagcagtaaaatttgcaatgttgagatttcacctctcttccttcttcattagatacccaattctgatgggtttgcttttccctgttcttcatttcctaaacctttccctaaagggagaaaggaagaaggaggatggagaacttggttcctaaatttaatataaatcacagtcaccccaggagcctgctaactgtgcagattatcaggcccaaccccccgagattctgacccagcagctctgggggaagggtgaagagcctgcttgtttaacaagtgctccagatgagtctaatgcaagttgccagcggagggccaccctttgagaaacctctcagagt

SEQ ID NO: 18038 - DNA, 1048 bp, Homo sapiens
gcgctgagccctacaacacccccagcggccgccggctcccccacgaggtgaggtggcggggggcggccgccggggctcggacctgcggcggggcgccgagggggcggggtaggcggggaggccgcgccggggtcaggggggccagcgcccaccgggtacgagcgcgctggtgaggcaggcccggccgcgcccgcgcccccggcgcacggtcctcccgggagccggtttcggggacggcggcggggagtgggcgctggccagggacgagggttgaggaggtcgcggctctcatgctgggtgggagtcgggccttctgcctgggggttgcgtcagtgtccgaccccgcgatgagtggtcgggacaatttgcaactagagggtggtcctcatgggtaccctgtggggtgtcgcgcgaggtgaagggccaggccatttccgtcgggtcagcgatttccgccttcgccccgctctcgcctggcctggtcagggcctgttttggtacttgttgcgccgattggagtcatctgcgacttgtttgccctcctctgaactcctgaaagccaggggctccgtctaggtctcctcctagtcttattctcccagctttcgttgttaagacaaattccttacgttcctggccctttacagaccggccctacagaacccacacccccagctccgactttcttctccagattgggtacttcccagggagtaaagggaatctgtagcttttgtggtttgtcctgctgggaaaatttgggggtaagtggtgggccttctctggacgaccacccacaaatctgtgtgcccaaacggagacaggacccagggtctggacatcaggcaaggggtactctgcagtaaacgtggacattggccgtttcgtgggtttgttttcactctgccaagtccttgaggcgtacacttttgtgtcactcatttatcttgaaagaaaaggttaacagcccaacagagtagttcgctttggtatctggagtggtaatcagagtgccagaactggagagaacattgccgtgtacagatgt

SEQ ID NO: 18039 - DNA, 1051 bp, Homo sapiens
atcgtgaaaccttgtctctactaaaagtaaaaaataaattagccaggcatgatggcgcttgcctttaatcccagctactcaggaggctgaggcacaagaatcacttgaacccaggaggcagtggaggttgcagtgagcggagattgcacttttgcactccagcctgggtgacagagtgagactctgtctataaataagtaaataaaagtgcaagaaggcctgtctctccctttaaggacccgaatccactggcatctaccctgttttgcctgtggtcatactctgtctggcacagcttttttctcctgagtcactttttctgccctagcttcctcctgagcttttttctttgatttttaagagctaagatgtagcagaaagcaagtgtcaacattcttttctctcctcttttttttttattgaaacggagtctcactatcacccagggtggagtgcagtgatgcgatcctgatcccggctcactgcaacctccgcctctcaagtaggattttagacgtgcgccaccacaccaagctaatttttgtatttttagtggagatggggtttcaccatgttggccatgctgatctggaatccctggcctcaagtgatccgcctgcctcgcgggagtgctaggattacaggtgtgagccaccgtgcccagcctgatctctcttgttaatgggacacgtggtcccccccttcccccaatgactcattcccctgaaccccatccccctccgggtggctttcctgagtgccccctggtgactgtgtgcctgcccccaggtggcggctgggtctcttcctcctctggaatgtgtttgtgttccctcgaggccgacatggggaccctttggctcatgttcccggctctcagtagagggccctctggcctgcacgctggcactcattcatctggccccttcctctcaggcttagtgagttcaaggtcagggcaaagtagaccctgttaagagatgtcagctggggaacagacacccttcctgcaggcctggagtaacaagagtgataaggacgccttcctccc

SEQ ID NO: 18040 - DNA, 1034 bp, Homo sapiens
taacgaggatggttgtgattaggtcaaatagaaaactagcaggccattgctgacaatttttactatataattagaggacttcctaaaatgctttaaaaaaaaatgtgtatggatggaaaatacaaaggaatttttcaaatactcaatttttattggtagtagttatcaagaacaaagtcctcggacttctgatgggaaatctgaactgctgtttctcttttagcgtacaagaagaaatagatccctctcattagcactttaatatcagtgtcacgtgtctggaaggaaattgtattcatttaggtaagcaacacactacataaatatcatagctgttagacccaggggactctcaggtgccagaattggggactcctttaattggaagggagctaaagggtctacctcctacctagaagtcctttctatgtggatatgaattaaattctcttgtctgttttgctctgatggggtctgtgtgggctagctggctctggtgtgtgcctgacgacagactgaactccttaaccatttcagacagcttgaagatgtatgatcattatttgaaaagggagagagggaggactctttgttttctccaccagtttggctcctgaggtttcttcagcgttaggtttctgtagggcccagctttctccagtgtttggctactgcaactctgtgttctgccagtctcttaactcagacagaaacaatgcaaaccagcagacagagcatcaccttgaaagtactaaaacagctgtcaatctagaaatctctgccccgcaaaaactgtcataaatactgcaagacccatgttcagatttccccccttttacaaataatgttttgttttatttcccagctactacaagtgatccaaatgttctttatagcagactttttcctgcagtctaggatccagtcagagatcttgcattaaattatatctctgtaatctttaatttcacgctatctgcaatgttttgtgtttttcatgacattgatgtttttgatgaggtcaggccatttat

SEQ ID NO: 18041 - DNA, 1063 bp, Homo sapiens
agcccaggagtttgagaccagcttgggcaacatagtgagaacccatctctaaaattttttaaaaattagcctggtatggggtgtgtgccagtagtcccagctacttgggaggccaaggcagcaggatcgcttgagcccaggaggtcaaagctgcagtgagccatgatcacaccacggcactccagcctgggtgacagagcaagaccccatctctaagaaaaacaaaataaaacaaaaaacttaactcttcttgctcctgagttagagcaaaaagcaaaaaaaaaaaaaaaaaaaaaaaaaaagaatgagccagagtatacactatggacattgggtgatggcgacatgtccgtgtaggtttactgattataatcaatggaccactgtggcaggggacggtgatagtgacagagtctgggtgggggcaggcatggggtgtatgggaagtctctgtactttcccatcaatttttctgtaaacctggccagacgcggtggctcatgtctgtaagcccagcactttgggaggtcgaggcgggcagatcacttgaggtcaggaatttgagaccagcctggccgatatggtgagaccctgtctctactgaaaatacaaaaattagccggggagggtggctcgcgcctgtaatcccagcactttgggaggacgaagtgggcagatcacctgaggtcaggagttcaagaccagcctgaccaacatggagaaaccccatctctattaaatatacaaaattagccaagtgtggcagcacatgcctgtaatcccagctactcaggaggctgaggcaggagaatcacttgaacccgggaggcagaggttgcagtaagctgagatcatgccattgcactgtagcctgggcaacaagaacgaaactccgtataaaaaaaaaaaaaaaaattagccaggcgtggtggctggtgcctgtaatcccagctactcaggaggctgaggcaggacaatcacttgaacctggaaggtagaggctgcaatgagctgagattgcgccactgcactccagtcggaggggaagagcgagactccgtaa

SEQ ID NO: 18042 - DNA, 1195 bp, Homo sapiens
ggacttgaatagacattccaaagagtggcaggtgccaacaagcacatgaaaagatgatcagcatcatgaatcgttagagaagtgcaaattgaaactgcagtgagataccacttcatggccagtaggacagccatttcctaaaaaaaaaaaaaaaaaagtattggtgaggatgtaaggaagttagaactctgatacattgctggagggaatgtaaaatggtacagctgctgtgggaaacagtttgaggttcctgaacaagttaaagataaaatcatcatatgattcagcaattccgcttctaaggatatgtcccaaaaaattgaaaaagtgtttaagggccaggcgcggtggctcacgcccgtaatcccagcactttgggaggccaaggcgggcggattacctctggtcaggagtttgagaccagcttggccaatatggtgaaaccccgtctctactaaaactataaaaattagccgggcttggtggtgggtgcctgaatcccaactactcgggaggctgaggcaggagaatcacttgaacctgggaggcagagtttatggtgagctgagatggtgccattgcactccagcctgggcaacaagaatgaaactccgtcaaaaagaagaaatgctcaaacaaaaacgtgtacacctcatattcagtctaaatgcccttcagtgcatgaatgaacaaaatgtagtatagaatggaatacatgttacactgaacatttgcttatttccgttttgtaatttttttttagtgacaaggtctcatttctgttgcccaggctcgagtacagtggcacaatcatgactcatggcagcctcagactgccagggatcaagtgatctttctgatcttcccaacttccttatcttcctgactcagcctacctgtagctagagctagaagggcccctgggtaatttttttttttttgagacggggttacactctatcatccagaatggagtgcagtggggcaatctcagctcactgcaacctccacatcccaggctcaagtgatcctcctgcctcagcctccctagtagctgggactgcaggcatgtaaaaccacacctggctaattttttgtatttttagtagagaaagggttttgccatgttgcccaggctgatctcaaactcctgcgctcaagtgatctgcccaccttggcctcccaaagtgctggg

SEQ ID NO: 18043 - DNA, 1027 bp, Homo sapiens
tcacctctgatcagggccttattttgtacttgcttttgttattttccagagcaaagcattctgtcatacttagttatatgtggccttcagagtgttctctggctgtctccctggttcaatttttttttttttttttgagacggagtctcacactgtcgcccaggctggagtgcagtggcgcgatctcggctcactggaacctctacctcccaggtttaagcgattctcctgttctcctgcctcagcctcccaagtagctgagattacaggcgcctgccaccaggcctggctaatttttgtgtatttttagtagagacgaggtttcactatgttggccaggctggtctcgaactcctgacctcgtaatccacctgcctccgcctcccaaagtgctgggattacaggcatgagctactgcacctggcctccttggtccaattttgtctcccagagacgagggactgtgcttttactcttttctctcttcacgggggatggtacagggctgggcacatgtgtgaactgcagagagtgatctgcaaagctgatatccctggagacagccttggcagaaaggatgagagggagaccctaggcacaagtgggtggcccaggcagacccgggagctggctgcccacactgaactgggtagtaggcactcatcccctctcctaataaatcaaggaagcccccgcaaagcagcggcatttggagtccggccaggggatggcagagacctgctttttcatttgtcttggaagtcatttctaggcccacacagaatctggttcctggggcaagagttgacatcgcaaaatgtaagagagtgacaaaaatttcaacacccaagataaattatgttgggttttctttgttgttattgttgtttttttttgagacagagtctcgctctgtcacccacgctggagtccaatggcgcaatctcggctcacggcaacctccgcctcccgggttcaagtgattctcgtccctcagcctcctgagttgctgggactacaggagtgc

SEQ ID NO: 18044 - DNA, 1027 bp, Homo sapiens
gaggcaggtggatcaccaggtcaggagatcgagaccatcccggctaacacggtgaaaccccgtctctactaaaaataaaaaaaaattagccgggcatggcggcatgcgcctgtagtcccaggtgctggggaggctgaggcaggagaatggcgtgaacccgggaggcggagcttgcagtgagctgagattgcgccactgcactccagcctgggcgacagagcaagaccccgtctcaaaaaaaaaaaaaagaacaggatccaataatctgtactaataaagttccccaggtaatttacacttgtagctggatttgggaattcacagttggattaattaattcagcccttattcaatgacatccccttcctccacctcagggcatcactgctttttggggatagaggttattgtaaaagtagaagcccattattgtcctataagaatgtcaatgtaatcagaggacaaagcatacatctctgaaaacagctattgaccccacttccatagttttctgaaagtagacctttttcccagattttttgacaatcttttctttttttttttttttttttgcttaagagacagggtccctctatgttgcccaggctggtcttgaactcctgagctgaagagatcctcctgcctcagcctctcaaattgctaggattataggtgcaaggcaccagacctgcccgactttggccatcctaaaggggttcagtatatataggagctcatatatctataagagtagacagccacgtagaagaacaggctcaactcagtaaatcttttttgagtaaatatctgtcaactagatctaatgaaaagtttatttactagtgtaattttaaaataatatgttcttattaggtaactcaaactaattgataacataactaaacagtcttggaacctgcttctatggaagataagattaatttttttttttttttcaagagttgaggtctcagccaggtgcagtggcttacgtctataatccctataatcccagcactttgggagg

SEQ ID NO: 18045 - DNA, 1187 bp, Homo sapiens
agctacggctacggagaccactacatccacatcaagatacgagttccaaagtaagtgccccctaggctgtggccaagcccgcctggtcctgcggtggcactgcccttggagctctgtggcttgggcaggttactgctccctgtaagtcaggtggttcctgcccgagttatctgtctgtaaagtggacatagtagaatggtcaacttctttttttttgagatggagtctcgctgtgtcccccaggctggagtgcagtggcgccatctcggctcactgcaacctccgcttcccaggttcaagcgattctcctgcctcagcctcccgagtagctgggattacaggtgcctgccaccatgcccggctaattttttgtatttttagtagagatggggtttcaccgtgttagccagagtggcctcaatctcctgacctagtgatccacccaccttggcctcccaaagtgttgggattacaggcgtgagccaccatgcccggccagaatggtcgacttcttggagttgttgggagaattaaatgaacaacacataggaattgctttgctgctgctgctattgttgattttcttcttttttttttgagaaggaatctgtcactgtgttgcccaggctggaatgtggtggtgccatttcagctcactgcaacctcctcctccccagttcaaatgattctcctgcctcagcctcccgagtagctgggactacaggcgcttaccaccacgcccagctaatttttgtatttttagtagagacggagtttcactggccaggctaatctcgaactcctgacctcaggtgatctgcccaccttgacttcccaaagtggtgggattacaggtgtgagccagcacgcctggcccgttgcttttcttgttgatgttactagcactgttaggagctggagaggtggcctgggcagagtgctgtgggtacctagggcgggacatgcctgactcccctcgggagcactcatgctttttgttaattagataatttctttttttttttttgagatggtgtctagctctgtctctaggtggagttcagtggtgcaatctccacctcccagatttaagcaattctcctgcctcagcctcccaagtagctgggactataggcatgtgccgccacgcccagctaatttttgtattttcagtagagacggggttt

SEQ ID NO: 18046 - DNA, 1051 bp, Homo sapiens
aaaaaaaagaaaacaaggctatgaaaatttaacacattgactgggcagggtaatgcatggtgatctgttttctcttcgctccaatcctgaaaggtttctttgaagagctggagtgtctagaaagctttcctagaaagctagtgtacattttgctaagtaatcactgtgtcacttagattttctgctctttaagtgtggttatgagatgtgttccaaacaatttgttactaaccatgaagttgatgaatgctttgcctttaaaaaaataagtttgggtggggtgcagtggctcatgcttgtattcccagcattttgggaggctgaggcaggcagatcgcttgagtccaggagtttgagaccagcctggacaacatggtgaaaccctgtctttactaaaaatacaaaaattagccaggtgtggtggcgtgtgcctgtagtcccagctgctttgggggctgaagcaggaggatcacttgagcctgggaaatccaggctgcagtgagctatgatcacaccactgcactccagcctgcgtgaaaaagtgagactgtctaaaaaaaaaaagtttggccaggcatggtggttcatacctgtaatcacagcactttgggaggccaaagtgggaggattgttgaggctaggaggtcaagaccagtctcggtttgattgggttaaacattatccctgtaagttggctctcattctgagaagttgtttagagtagaagagagggctgcatttacagctaattgctagtaatttcacatcatctgcaatatattttctggacactctgcccgactagtcctatgggacgttgtcattcatgtgcaaatcaggccctatatactaagggaggaaaacagttgaggacctcctttttttaggcactcttggtgccttgtgcattaagatagtgagtcagaggataagaaggaagcagattccattccccttaccactctttgggtgtaggcagggcctgctggtagtgctgggaaagccgaccatccttctttgagcaagtccaatagctgctgctgctagttct

SEQ ID NO: 18047 - DNA, 1063 bp, Homo sapiens
agagatggggttttgccatgttggccaggctggtcttgaatgcctgacctcaggtgatctacccgctcggcctcccaaagtgctgggattacagacatgagccaccacacccggctggattcagtcttaacttgctctttttttttttttgcatctcactcccttgccaggctggagtgcaacggtgtgatcatagttcactgcatccttgaactcctggggtcaaaagatcctcttgccccagtttcccgagtggttgggactacaggtgtgtgtcaccacgcctggctaattattttatttttcgtagagacaaggtctgactgtgttgcccaggctagtcttgagctcctaggcttaggtgatcctcccaccttggcctcccaaagtgtcaggattataggtgtgagccactgcacccagcctggatttgctcttttatcaagaggttaatatttattcttccgttcagtgaaccgtgggattgaattcccccagcgattgaaatgaaagggcttatgtataacatttcctgaggaatggtagtaccagagttcagaggagacctcaggccatttattctataaactcagaagctgtagttctagatgatgtggcttcttcagggtgttgagaagtctctgttatctcgtgccttgttggattagaactgattgagctctgtctgctgccccaaacatgtggctcagccaatctccagtggcatctgcaatgtgggtattctagcctccagtgctcacgtggctcaccttagaaagggcagatattcctatttcctgacgctgctggagaatgaggtctgagtcagaagtcctcaggtgtgacctgcccagaactatctgaaattgctggatttcttgttcttcctcagtgtttaacaatcacccaattgctcattctcaccagcgacttcctcagtaagagctcaatatttgaggtggtgctgcattttgtcaaacattcatgcgtgttagcccacttagtcttcgcagcacacagtggattaatggatttttaaaagctggtatttatgcacgatgga

SEQ ID NO: 18048 - DNA, 1026 bp, Homo sapiens
tcagcattattgcagagtagagtgtctctgatttggagtcaagagaaggttccatttttctgtacatcccgatgtttattttctgagtgttctcagacatcactaagcctcagtcaaaataaagtatgatcatgatgtaacattcattgagtgcttatcacatggtaggcattgtgctatatgagttattgcttgacttcctaaaataatcccagtagagatgctaaatctaaaggtgagagagatggttcaaaaagacctcagtgagcaaaccatgtactataatatcctaaaagataacaaaaatgtaactaggtatctagagaaaactcaggaaggatatgtgccttgggccttttaaggaccatttcttaacacttctgtgttcttcttgacacctgtttctgggtagagcacatagaaaatgctcagtaaataagttctttttccttggcccagtttggcctgatttggccccagttctgtctttgtgagttactttattagttgtcggtgctactgtgctgctattcatgtggaagattccccaaatgggctgcgccttacattgcctgagcagaagccccgagggatggaggatgagcttgccttgttatgggactgtgtttccctggctgacaaaggctcagcatttgcagcaggcaatgggaattgattggccaacttaatatttccttcagcctagcaaagtcctgagtaggctagggacagtctgcttttttggtaactcctgtaggctgccttctgcacaaggcacccagcctctcacaggtaggatgaactggcctcagcacgcttgcagaggggtggaactgtgcgttgcttgccaagctttttgtttccctaaggtttttgaggttttctttgtttttggtaactttcaattttttttttttttttttttttttggacagagtttcactcttattgcccaggctggagtgcagtggcgcgatcttggctcactgcaacttctgcttcgtaggttcaagtgattctcctgcc

SEQ ID NO: 18049 - DNA, 1022 bp, Homo sapiens
ggaacccccactagaagttaaggggtgcgtatcagccaagtgcagggctgggacaggacttcacaaccagaaggatcaagagtggcctgcaagtcttggagtcgctcctggggaggccctgagtttgttgttctggcaaggccccaccccagggatgtgcttgccacccggtggaaggctttaaatgaaacaagcagtcaagaacatgggctctgggccaggtgtggtggctcaggcctgtaattccagcactcggggaggccgagacgggaggattacttgagcccaggagttcgaaaccagcctggacaacatggcaagacgtcatcaatattaaaaaaaaaaaaaaaaaaaaaaggcgggggggcccgctctgcatcagcttaattcaaacccagacccccaagacccaccactttccagctgagcgagctgagcctcggtttcttcctctgtaaacagagatgatcatgcctacctctcagggtgggagtgaggttgaagagagactgtgtgtgaaacgcctgcagcagaaacgctgggcctagcacacaatgacgctaaataaatggaaactgctattattatgctttattaggcaacttccaacagggaggaaaacaacaggtattgacgcctctgccatggagtgccttctgattcccaacgaggggtcctggtgcatgttcactaatatgactacaaggggatgcctctaccggattctggagggacttgcaatcaaaaccctccctaagaactcagctcagcagcgttccctcacagcacagctcagctgggccacctgctccacggtaacccgagacaactctttgagaaggcagagacactagcagtcctccaagggccatctctcctggtgggctgtggaaatgccaggggcctgcctgggagtgcccaaggttggcaatgcccctggaaggatgctccaccaatacaccctggtggcaggggctctgcagcagctgctgcccagacacatttctcagagctgggctggc

SEQ ID NO: 18050 - DNA, 1065 bp, Homo sapiens
ccggcgggcgcgggggcggggactcggggcggggcgccctgctcggccccctccgggcctcgttgctaccccgagccttcgcgcggccccacggccccgatccctaggcgtggctgggggccccggaggaacctgcccgagccgtacctggcgctgctactgcccggcttgggtgaccttggggcagtcccttcgccccgggcacctcagctccgtccttgcaacaggggggagctcctgggggaaaccccgagggcggggcggggtgctgagcgcgggtcccggcgcatcgcttctgcctagaaaactctcattgtcatcagattgacctcaccgcgggggccggctttcgctttctttagtggcttggtgtgaaggccgagccagtggtttgggcaatttccctcccatcaggacggaggctcttggtgtgtgggttggaggagtggggctgggcccaaggagacgattatagttgatcgggaggggccagggtccttgctgagaggacccagccgatactcgggcctctgtgttatggctgagggacgtaagacaccaaggaggaagtgactgccaagatctcagctggatggaagcatagttgggaccgggaccagctgtggggctcccacgtagctttgttcccagctctctttctgcctctattgatgagttatgtgttgactgggagcatctagctccaagtctcaccctccatctcctcgtggggttctttgtggtggaaaggagagaaggaagaggagagagaacttgggcatcatggggacatctagattgggtcctcagatcctggcgtctcatctgatctgatgtctcagtctcctgggtgtctccggacacccacaggccagatttctctgagtgtgggccaggtccacaagtgggggaggactgctagacatgccagggcctgcctgggaccccttggggcctgggaacctgcattttcaacccattccccatgtgagttttacgtccactcaggtttgaaaaactgctctgcccaggttttgtaaggtgtgactaggtgagggcctgggg

SEQ ID NO: 18051 - DNA, 1013 bp, Homo sapiens
aagctctgcctcccgggttcacgccattctcctgtctcagcctcctgagtagctgggactacaggcacccgccactacgtctggctaatttttttgtatttttagtggagatgtggtttcaccgtgttagccaggatggtctcgatctcctgacctcttgatccgcccgtctcggcctcccaaaatgcggggattacaggcatgagccaccgtgccgggaccagtggtttttggtatacttgtgttgtgcagccatcaccactgtctaattccagaacatcttcatcacaccaaaaagaaacccagtggccatgaaacagtcactcacggccaggcgtggtggctcacatttgtaatcccagcactttgggaggccagggcaggcagattacttgagctcagaagtttgagaccaccctgggcaacacggcaaaaccttgtctctacaaaaaataaaaaaattatctgggtgtggtggcgtccacctttagtcctagctacctggtgggctgaggtgggaggattgcttgagctcaggaggtcgaggctgcagtgagctatgattgccccactgtactccagcctgggcagcagagtgagactctgtctctaaagaataaattaataaaatttggccgggtgcagtggctcacacctgtaatcctagtactttgggaggctgaggcgggtggaccatttgaggttaggagtttgagagcagcctggccagcatggtaaaaccccacctctattaaaaatccaaaaaattagctggacgtggtggtgggtgcccataatcccagctactcaggaggctgaggcaggagaactgctttaaaccaggaagcagagcttgcagtgagctgagatcacgccactgcattccagcctgggcaacagtgcccaggctttatttattgaaaaattaataaaaattggctgggtgccgtggctcacacctgtaatctcagcactttgggaggccaaggcgggtggatcacctgaggtcggag

SEQ ID NO: 18052 - DNA, 1033 bp, Homo sapiens
gctgggagcagcgaggagccgtccagggaagggtgttgaggctggcagtgtggagaggccaggaggccaccttggaaggcccgaggccaggtggccgaggcagagggtatgaggggcacccgctggcctgtctgcatcagctcccctcaggtggagcctttctcagggccgagcttcttggccgtcagatgttcccaccaggctgtgttcagcctcagagtcgataactgtttccaggctgggcgccgtggctcatacctgtaatcccagaaccttgggaggctgaggcgggcggattacctgaggccgggcattggagaccatcctggccaatatggtgaaaccccgtctccactaagaatacaaaaatcagctgggcgtggtggtgggtgccggtaatcccagctactcgggaggctgaggcagaagaatcgcttgaacccggtgggcggagcttgcagtgagctgagatagcgccactgcactccagcctgggtggagcgccactgcactctagcctgagactctgtctcaaaaaaaaaaaaaaaaaatctataatcgtgtttccttttttaaacaggaaactactttgcttcgcactttttcatgggaggagagaaattcgacaccccccaccctgaaggttacctctttggagagaacatggatctgaacttcctgggcagccgcccggtccaggtgggtctggacagggctgtctcatggggctgtgggggtgggaggcccctgtccccagcagtccgcatcccagccatgagggcaagcaggcaccaaatcacccctaaagggggcagagctcctggcaggattccagttgagcttgggtgtgggcacgtgccctggaatgggttgtgtcctggtgctgccccctagaggccagatggccaggggcaggtcactgagaaacagagcagccatactgaatgggtgcgtctgggctgcaacggctgcggaacatggtggatttgattccagccttcttggatgactttctttacaaggcaaaaatagt

SEQ ID NO: 18053 - DNA, 1073 bp, Homo sapiens
ataagacactcctaccacccgggaaattccaagggtttggagttctgtgttgggagcaaaggtcaaggaacaaatattagaacaaaagaggctcctagcacccctgttgctgaggaaatgacaagggttttagaggactctgtgtcaggaactggggctgggaccaaatatttattttttattgtgtcataattagatatttgtactttcagaggttttatttgagataagggtccttctggccctgaaagtttgaaaactgcaacttcagcaggagctggcaggactgcctccaggctacaagggcacatgtgccccaagtggctttagagacaggcaagagcgtgccccctgccttcctgcactggagcacaccgctcagtggtcagctttgcatctggggatagggtgtggttgagagcctaggctttgaatgctgtccccgctgagtggcttgggggcacatgactgcttgtgcctctgtgtcctcagctggaagttcgggtgggtggtgtgaggaggggaccatgtgtcctgtgcacagcccctcgcgtgacaggtgctcttgaaaggagcctgagtgctcgagttgaggggctggtggagacgacttatgtggggaggttcttagggacctgccaccaggtgaggccgcccttgggctctggccttgggctccccggcagccagggctcctcctgtggagcagcactttggggaggaacaggttcctttttctagactttgttctttgaggctctaccttgccccggcacttgattatatttctttaatgacactagtaatgcatgcctgtgtgctatgacaggcgtcgaattcttgggcgtaggagcatttggagtgaccagggcaggcccctctgtcccctccttgcaccccactgcttggggttgagtgtttgacacccacggggcctggtgccctcctcgggcctggccgacatggtggaggagctgggttgtggcgaggtgtccaggggctgccacagagagggtgtgggctgaggacacaggccagtgtaagttgtctatccgctgccccccagtgctcca

SEQ ID NO: 18054 - DNA, 1226 bp, Homo sapiens
ccccgcccccagtgtgcactgacgttcatcagcaccctgccgttgcaggtctgcgtggcaccatcctgctgcctaggagtcggagggggaaaggatcccgtgtgacaaggcccagcctgcctgctgcgggcttcacgctgcctctgggtcctgcctagcccaggctctccacccacctccagccccatgtgcagccgcagcccctgagagctctaagtgcagagtccagctcttacctgtgatctgggtctttctagagcaccccagggtcgggggttctgttagctgggtagaggaccctctcctctgtgtgtcctgtggcgaggctgggtctgttctctcccgggtccaggaccacagactgtggtgacacaagtgccctgggcagagggcagccttctgcctttttagtactgggctccccagctgctctccccggcccggactcgtcagaagccacggtgactattgacacatctgcatcctctggcagaggcagatgggacatctctggcaaaatggtctattctgtgcttgaagtacagaacccagtgggaaactgctttatttttggagtccaacattctggaaatttctgttagaacccaccagcctcactggaaaattctgagtgctgatggtggttgactgagaagggataatgagtgttgttgcgaggtctccgatctcaagccgtaattaaccttgttgaactctgagcggtggtgtgtttccctggataccgccgggtgtgcttgttctatttcgttcctgcgtttttagagctttgcggttccctgtgtgtgcaccactgtgcgtgctcccgctctgtctttctaactcagccgggcctgggagagcaggaagctgttttgtctgtcttgattcttgctgccaggtgatacttctcggtgtgcaggaggcccttgtccatcatctgaacttggctgattggcattcagcttgagtgtgcttgagaccaaccgaggagagttgggttctgtgggtcagcagagggtccccgggctgtgtgttctggaggcctcagatagttgcacagccaggcctgaggccgtgttttcagaaatcccggctctttcgctgtcaagtggccccacccttttttttttttttcttttttctttttccagctgtgggcatggattggctggggcagggtggccaacccaggcggccacgcaggggtgctcagaggcgccagcttg

SEQ ID NO: 18055 - DNA, 1030 bp, Homo sapiens
agatcacttgagcccaggagtttgatatcagcttggccaacatggtgagaccccgtctctactaaaaataaaaaaattaaccgggtataataacacatgcctgtaatctcagcaactcaggaggatgaggtaggagaatggcttgaacccaggaggtggaggttgcagtgagccgagatcatgccactgcactccagcctgggtgacagaggaagactgtgtcaaaaaaaaaaaaaaaaagctgtgcaacagcctgttgacttccctgtagagctctaagctctgggacgacgggtccctgtcttgggtgagcatatatgttttgcgtgcccgccatgtacagggacgcctgcaggccctgagttctgtccagtttgagccattgtgtctggaacatagtgttaagtaaatatttgccgaatggatggatggaaaaggaaggaaagagaccagaaacaaagtctgcaactccttctcctcttccttacaaattgtccaatatgtcagtattggacagagacttagcttgacttcatcaatacttgaaaagaaggattaaatagttgagaataaatggagctatagagcagtacatctgttctctggggtcagcgatcctgggatgctgcattgggaagtgttattcctggtggcctcacaagtaggcaccgagaatttagaggatggggtgccctaaacagcagtgttagatcttgctaatgagatgtcctaggccacagctaacagttactccgtgtgtactgttggggcgcataagacctgtttcaagccaccacttgggaatgatttttgttagtttttaattttttaaatatttaatttaattttaattttaattttattttattgagacaagacagagtctcgctctgttgcccaggctggaatgcagtggcgcgatctcagctcacttcaacctctgtctcccaggttcaagtgatttctcgttcaggctcccaagtagctgggactgcaggtgtgcgccaccacagttggttaatttgttttg

SEQ ID NO: 18056 - DNA, 1023 bp, Homo sapiens
gagatgaaaaacgtttgagatgatggatatgctaataactctaacgtgacactacacattttagatgttgaaacatcactatgtaccccataaaatatgtgtcattattatgagtcagtttttaaaactgtttaaggctctcagaggctggatgtggtggcattgagaggcaggaggattgcttgaacccaggaatcagagggtatagtgtgctgtgatcatgcttgtgaatagctgctgtactccagcctgggcaacatagtgagacctcatctctaaaaaaattttttttaatcagtttaaaagttcgaggaaaaagaaaatcaatcagaaaagcaactataccaaaacagggttatccaagtgagcttctctcacttccttagatggacttcagcttataggatgacacgagatgcgagtaagaagctatttgcgcatttcagctgcgtgacttgtgtctgcgttgctttcctttctttcttctgtggactgagaatgctagtgcctttgaatttgtctttacaggacctgagggtcttttgatggtaagagaatgaatgatcattgctgccttgagttctgtgtgatcgtcaggcctcgcctcaggatggcaattgtagcctgagatgacgtagcccaagttgcacagcagagttgctgttctggaaacactgtgctgagtgaccaccgaccttcacagtgctagtgtgcttgcaggctgtggccaggagtagtgtacacgaataactgctggctggtgtctcatggcttgtttgagctctagaacactcagcatttggggacttttgctatttaggtgtctcccttgaagtttggttactactgccttaaggaaatcagagagcatgaaaaacttgcgttctaatttttcttactcttttccaggtgcttctcagcttcacgggaaagggcctgctgtaccacggaaattgtgaccgcttcagaggcaaggcttgccacttgggtctgggtggaatcagaacgtgcaggtctcccagg

SEQ ID NO: 18057 - DNA, 1031 bp, Homo sapiens
aaaccccatgatgagctcttgcagaacaacagaattcagattgtggggttgacagaacttcagagtcttgcaggtaggatgccgtcaactccagaatcctctgaatccatgggctgggggcagggggtgttcgtttgaaaagccgtgcagattgccagacgctcctttggtagtcacaggtgttttctgacttgcagttgggccccgagttttccagtacggagtcaaagttgtacttcaggctatgtacttgctgtggaagttgatgtggagggagccaggtgcctatatctttctccaggtgtgtatcagcctctgcctccctctgtgagagccatgttagcagtttactttccagcacaaattggtactatattgcatattcatatgtgtgtgtgttgtgtgtatgggcgtttaaagacatgagtaggagcctatggtatgtgtctatttatggcacctatccatgctctctgtgtcattacagatagtcttacattgtactgactgtgtatcaagtgttttccatgtattaactcatttagtcctcacagttaccctaagaaatattgcatgtaggtaatacaagaacctgtttcttaaggttgttctcatttagatgagaaaacctagactgagaaaggctctgtaagtagcccatcgccatacagctaggaagtggtggaatcaggatttgaacgtaggtcgtcagtgtggttctatagtatacacacgcacgcatacgcgcgcacacacaaacacacatatatttttttgagacagagtttcgctcttgccgcccaggctggagtgcagtggcgtgatctcggctcactgcaacctctgcctgccgggttcaagtgattctcctgcctcagcctcctgagtagctgggattacaggtgcccgccaccacgcccagctaatttttgtatttttagtagaaatggggttacgccatgttggccaggctgttctcgaactcctgacctcaggtaatccgcccccctcggcgtcccaaagtgctggga

SEQ ID NO: 18058 - DNA, 1033 bp, Homo sapiens
agcaatcctcccacttcctgagtagctgggatgacaggtgcgtgccaccatgccagtaatttttttattttgtagagatggggtcctgaacgcatggcctcaagtgatgctcctgcctcagcctcttttattatttgtttttagacgaagttttactctgttccccaggctggagtgcagtggcacaatctcagctcactgcaacgcctcccaggttcaagtgattctcctgcctcagtctcccgagtagctttgactataggcgtgcaccaccacgcctggctaatttttgtgtttttagtagagatggggtttcaccatgtgggccaggctggtcttgaactcgacctcccgtgatctgctcacctcagcctcccaaagcctcagcctcttacagtgttgggattacaggcgtgagacactgtgacccgggacgattttcaatcacagttttttgttacgagtggaaaatgcgtatttataagaatgaagtagtacagacatgaatgtgtagaaatctctataatcctgccatccaaggatggcacctgttaatgtgtatatcagggatgtccaatcttttggcctccctgtgccacactggaagaagaagaatcgccttgggccacgcataaaatacactaacactagcaatacctgatgagctaaaagaaaaaaaatcacaaaaaaacctcgtactgtttgaagaaagtttacagatttgcgttgggccgcaagttggacaagactgctatatgtatattctaggttttcccctataggtatacttatgtgaaaatgattattgtgataaattttgttttgagatgaagtctcgctatgttgctcaaggtggccacaaactcctgggcttaagccatcctcccgcgtcagcctcctgaggagttgggaatataggtactcataaccatgtgtgggtgattattattagtttttaaacaaaaatggggttgggcgcagtagctcacgcccgtattcctaacactttgggaggctgaggcggcagatcact

SEQ ID NO: 18059 - DNA, 1057 bp, Homo sapiens
ctcagcctctacacttttttttttttttttgagagggagtcttgctctgttgcccaggctggagtgcagtggcatgatcatgtttacctggaacctatgaataggacctaatttggaaatagagactttgcagaaatagttaggttgaaatgaggtctttctgcattagagtggcccctaatccaatgactgctatcttttttttttttttttttgagatggagtcttgctctgttgcccaggctggggtgcagtggtgcaatctcagctcactgcaacttctgcctcccgggttcaagcgattctcctgcctcagcatcctgagtagctgggattacaggcacccgccaccacactcagctaatttttgtatttttagtggagacagggtttcaccatgttggccaggctggtcttgaacttgtgacctcaggtgatccacccgcctcggcctcccaaagtgctgggattacaggctgagccacctctcctggcccacctctatactactgacgtggaagcgaggctgtcctgtgccggatgtttagcagcattcttggcctccacccaccagacgctggcaacataccttcctccacgttgtgacagccagaaatgtctccaggcattatgaagtgtcccctggggaacaagattgcccctggttgagaatcaccggttagaggctaagacagccgtgtatatctataatttcaatcagattgcttgtgcctaacaggatacacacacacacacacacacacacacacacacacacacacagaggaggcattcaggatgtatttgttggatgttggatggctgggggtgtagatggatgcatggatggacagacacaacccctttgttggttggctagattgatggatacatgtgtgaatgaatggatgaataaatgaatccaatttacaaattccactgtgggaaaacagaacgctattcttccaaccagagtagcctgcccctttatctctgtctagcacagtgtttttcaaactttagcatcagaatcccctcaagagcttgttaaaacaca

SEQ ID NO: 18060 - DNA, 1033 bp, Homo sapiens
tctgaattcgcaggcaagagaacctgtacttacccatgctttctgtaaaagtcatcttggctttaaggcagttgcaacatgaaaacattctaacacttcatgaatatcaagcagctggtttggtttttgacttgacgcttccattttgggtaatttggctatcagtgcactcaagcatgtgtgaaagactcacgcagagggttcagggttggggacagccccgctgctcctcaggaggctggccacatgacagtggtctgtctctgcactgggatgccatgtagctgtaaaaagagtccatgtggacccatctctagggctttttgttaggtgatcaaagcaaagtgcaggacaatataagtaatgtgctggctacatttttgtctaaagagggcaaaggaatttctctttttgttagcttataaatgcataaaaggagtctgaatggatgaaatttacagaggttactgtgggggtggggaggacaggagagagaattgccacctaggtcttaactctttcttaatatgtttgaactatatgaatgtgctatctattgaaaaataaaatttttaaatcaacttgagaaaaggatctgagtaatccctgtaatcctggctactagggaggctgaagtgggaggattacttgagcctaggagttcaagattatagtgagccacgattgcgccactgcactccagcctaggcaacagagcgagacctcgtctcttaaaaaaaaaaaaaacaataaaaattaaaaatttttaaaaattgaaaaaagggaggaaatgtaaatcttccagcacttcctcagtgtcagaccctgagctggacacttatgttgtacatgctcccaggggagacagcagcatcctccctcttacagaggaagcacagtgggaagtccagggtctcagctagtcagagactaagctgggatctgaaagcctcgcctctgtcattctcctacatcgcttctaacatgctacctgccttccttttaagtaaattgtgcaacattttattctcca

SEQ ID NO: 18061 - DNA, 1017 bp, Homo sapiens
tgctgacagggagcgtagtcagggtaggtgttgacccaaaggtaggaggagtgaaaccactttgcagctgtctgcttctactcaggggttcctggttagggtttgaaggcctgcatgacaaaggcattagtattctcatctatagttttaacaaatgagtcctaggataaagagtgaaagtcctggcttcagaagcttttgtagaattgatcctaagctctgagggacccaggtaaatagctccaagaaccaatcagacatggggttactagcagagagagatttgggtcagaggttgttagacagacagattggggtagacaggaaagaggaaatttaaatatactcatccttatctttttagtcagttttcctagtcctaagactagatcagttcagttaaacagctgtttccattatcaagagatggcactggagatgggctaggcatctttagttatagaggaggaaggcagtggcaatttgacatgtttttgtcatctgtattacaaagaataagcttcagcttgcagggcctcaggaaaaaggtagtagcaatttaattgagtccaagtcagaaaagtgggaaaaaaaaattgaaagcattagtttgggaattgtagcccacagagaattcaggatttagtccaaattgcaggaaataataaaaactcaagaacaaaggacaagactagaatctaacagcagggtgtatcatagttttttgaaacacttttttccctctcccatccttatttttattaaagacaaaccgtagtaggacaagtttacttgcaaaataagtcatagtcttattaagcttggcctgattatttgtataaagtaaagcaagaataattgtttgccagataggctgtttttaaaattggctttgctgaaactttgttccataagaaatctcaggttagacttttttaaagcctcgagcccagccatggatttatctactatacctgcaaagataaacctgtatgagttgggtgaaattttttcttc

SEQ ID NO: 18062 - DNA, 1053 bp, Homo sapiens
gccaggttggtctcaaattcctgacctcaagtgatccacccttctcagcctcccaaagtgctgggattacaggcatgagccaccatgcccggcccacgtggggctgtttaaattaaaatcaaattaactgagttcctccattgcattggccacgtttcaagtgtgcagagtgacacatggccagtggctgccatcaccgctgatgtcgccacgtccctcatcacaggaatatccctggcagccctgctcccggccctctgccctcctgacgctcccttgtgacttgttagaaaagcgtaggtacagctaaaaaaaaaaaaaaaactgatggctgtgagaatactgtcactcgctgatgccttctgtgtagaaaaataagccttagacagatcttcgcaagaacatcgtgatggctctcataggcataattacgtgttccaagccaaattgcagttcaagagaaggttataaatctcttcttaataacaattgtactcacgttcctctcctggaaactaagaggaaggtagctgaagaaactctccctgcccagttaaatcttgttttttgggtacttttggactccagggtcacatcagcaatggcccgggacagacgagggggagccttcatctgtacttcgtgtctttccagggtggcaatgaccatgagatcttcacagaccccagaaccatgggctactccgtgacagcgcctgaggacacgcgcaggatctgtgaactgctgttctcctaacgtgggagcgggaggggcggggtcccggctgacaagccagcatagggcattcggtggccagagccgagggtcctcccacacgtgctcacccacccgcagcctaggcaggctctgcatgctatgccaggcatgtgcagtctggacttccacctccagtgccagaaacttccagaaggaaggagaaaactcttgtcaagaatggcccagaggaatgcctcgcacaaaaggtcttccccacccacccccagccccctagtctaatacccaccctgatacgtgcaatcatgtagttttggc

SEQ ID NO: 18063 - DNA, 1068 bp, Homo sapiens
aggttcacccatcgagttcgcattgcaggtgtgcatagttcagtgccttttgattggctagtattactctatggtgtggcagtaccatggtttattcttttgcttttgttggtattgctttgtgcttgaaggggaaggcaacacatttttagtgtttttatgtgccaggttcttagcctaggccgtataaaatgggattgtcctctggctttggtcctgttgggttcttgtagaatgtgtccctttaggactaacctagcagttttcgttagtgctaacttttcgtgtaagaagatgggttcagcagttgaactctgaaataatccttaatttgattacttcatttaaaaatgtttacaatttgtttgttttcctgctcagaaaacttaaggaggaacattaattttatttttagaaaacatcacatatgattcttggattattgtaaatgctagattgttagtctgaactagttttattttgtaccttgtttctgtacagtgaaaacacatcccttgcctaatagaaatggtaagttgtgtcttgtggaatttgatagtgcaacgttttcttatttgattcaaggagtgtgtggataatactctggatagcctcacactttttctttttcagggtgtggtctttagagaacaggcatacagctgtaggaataattggttaccttaaatagaaccaataaaattagcaaggtggtgtcacaagtgcatgcagcagtaagtagtactaaatttaaatgatattggttatagttctgattaaatatttaaatataatttaaggggggaaaaatttggtggatacttctaagtgggcagcaggcagcattcctgtattttgtataatatctgacaaggtaaaaatggcttattgtgcagcctggggacaatttggcactcctaccagcttcttgataactaccaagaagttcattaggtgtttatctcaatcctgaccttcattaagaaggtcaggattgagattaaaaacccagcagagggtcgcttttagttgtcagagggcttttgaaaagttgaaaattgagttaat

SEQ ID NO: 18064 - DNA, 1033 bp, Homo sapiens
aacactgaatttagaccattaagattaaatgttacatataacattttcattatgactgaaatcatttcagtttatattactgatgggctcagaggccacatcatggtattcactttggttaaattgtaaaatggttttctttagaagggaatacgggctctaatggtcatgatacatgttttctttttctttttttctaacagaaagcgtggatacccatcaacgaagttttgatattggaattcagattggctatcagcgacgcaataaggatgtgttggcttgggttaaaaaacgcagaagaactattcgtcgagaagatttgatcagcttcctgtgtggaaaagttcctccaccacgaaactctagagctcccccaagactgactgtagtgtcccctaaccgagctacttcaacggaaactagctcatctgtagagactgatttgcaacccttccgggaagccatagctctgcatggtaaagccgtttaaacatatttctttggaaaaatggttaagagggtgcctgtggacccatttttcacggttaggtttaggtccagatatactgttttttgtcttacagtaaacagcttgctctagaaatgtttaatagaatgtaagctaagaacttaatatgggcgatttctgtcagctaacctatcctagaaaatgtttttagaaagttagtttgagcttattggtgttaaaatgacatatctttctgcagtgttgattagaatttatcgctttacacttatgtgttgtacgtgtttttttcctcttctgaagtcaaagaggaagttcttgtgtcttaagaattctgttatatttctaatggtccatgacaggcaagtaaggtgggaaattgttgggttagttctcatgggacctgggacctcccttgacacctttcttacttggtttgctgtagatggtgggagaggatggatgtaagacttgaccttctgcctgtcgtccctcaggtcccttgcactttaagaggcaggaccagcagagtgcagccagtgg

SEQ ID NO: 18065 - DNA, 1090 bp, Homo sapiens
gctggagtgcattggcgcgatattggctcaccgcgacctctacctctgggttcaagcgattctcctgcctcagcctcccgagtagctgggattacaggcatgtgccaccacgccggctaattttttagagacagggtttcaccgtgttggtcaggctggtctcgaactcccaacctcaggtgatccgcccaccttggcctcccaaagtgttgggattacaggtgtgagccactgcgcctggccatgagtcttgttgaaagttaacatttttgggccatagtacaggtcatctaaaacaaagtaacctggtaaggtactaagaaatagtggcatataaagaaactttatagacgttgaatcattgagactttataatacctgtagagatcttgttctctctggcaaaccgtagttctttcctgaaaccccaatgttgttttttcccttgatagtgtttaggacaattaaaaacaaaaacatgaattgcaggaaagttcaggttgtgtggatgcagtactttaagactgcacactgttcctgacacagtggaatagttaggctgtcagaactttggaagctcaggcaaaaatgggattgatctgtttatgctgaattagagagtttcacatctttccccctaaagtttgggaaaacaattaactagaggtgtacatagtttgttagattaattttagcgcatggtaatatttgatgcagttgtctctccttaagtattgtgattttcttcctttattaagagggttgtgggtcattccatgcttctcttaaggtatctttttactctgttttactgttatattttagaagatagttttaagaaacataaaaaccatgcttgttatcttaacgtagtagtagtgtacataatagtaaaaagggcaagccagccccctctgccctcgaaaaactgtattctccaactcccactacattttctcatattgaatctgttccacctgtgatttattgttttcctgaactttgggagttttaagcaatgatacagttgaagggactgtttataattttcacatgtttaagttgtgaggctttaaaacttaaatataag

SEQ ID NO: 18066 - DNA, 1116 bp, Homo sapiens
gaatggtagtttaatttgaatatttaaagaaagtaatttgaatggttctagtactagggccattattaactagtaacatagattagtgacttcaactgggtgtccttattatctgatttgtctgaagtgaaaactgttaaggtgctcttttaaaatgtatttggaaacaccatagttagggtaaatacaatgtcacaattcactcttgcatattatttgcttagccaaatttatgaattctaagttaggccaaattgaaggttttggagttttacattgtgggtgagtctaaattcatgcgtttggcaagcacaaggacatgggaaaagaatctggtattttgaggcaggcttgagtttataatgaaagcaaactcagttcctcttcatgtcctatgtatttaagagaggacagttttccctcagtttttttccccttccttacccctacccccatcaaatacagcccaaccaaataactgtgttcttaatttaaaggaaaatggcagacttgacacctgctgaatatttcgtgtagacagagtatgacaatgaatgagatccccagtcattgcccttgtaagcctgggaacccagtttagtgggagagactaatgtaaacagctttaatcaaaagtatatcaattggccgggtgctgtggctcacacctataatgccggcactttgggaggccaaggtgggtggatcacttgaggtcaggagtttgagaccaccctggccaacatggtgaaaccctctccctatttaaagaaaaaaaagtaaggcatatcaatttatggttatcaaataggtttttttttttttttttgagactgagtgtcgctctatagcccaggctggagtgtagtgctcactgcgacttccgcctcctgggttcaaatgattctcgtgcctcagtctcccgagtagctgggattgtaggcgcctgccaccacgcccagctaatttttgtatttgtagtagagatggggtttcatcatgttggcgaagctggtcttgaacacctgacctcaagtgatctgccttagcctcactgcttgcccctaagtggtgggattgcaggtgtgagccactgtgctggcctcaaatagtttt

SEQ ID NO: 18067 - DNA, 1035 bp, Homo sapiens
cctatttttatccttaaaagaccattgcaaatcagtgtaagggtttttccagtaattactcacagcactttgttaaagtttgcaatttcttcagccatttaataatatctttctgtgaagaaactttgctgagttaaccataaatgttcattcattgactgggtgggatgtgaatggaatgttagaaatgttgtgtgaattgaagttctgtattcattatagatgtagcccttatttaaaaaagtgaattccatactaaaactaggaatgaaagtgagagatttctaaacttttgcgaaagtgggtcattttttgtttgactataatagcaggaagaattatagcaatctgtcattttacctgaaacagacaagcctatgtattatgaatactttcaagcttccctttggaatatacaagacatgcgtttggagttacctttgtttttctatcgtaaatttagattctggaattggggtttggtggtgcaatgtgttgctcacaagtggccagaactcctattcctaaaaggattttgagatggaggaacacatatttaattcccctttatgccttggttcttgctcctctttccacgttggataacaattttttggttgttttgtttaagttggtgctctgaagcttaatctcagtaccctttactctgaattgtcaaattttgataaaacgtgccattttctttggtaagagaaagcaggtcttaatgtctgccagaacacaatttatatgccttattggcttcattaaacttttagaaaactttagcatttgttacttttttccattgcgtttactttcaaatgcacctaatgaatttgtcacccagtcgcaacttttcccttctctgtcccattgctttctcctttccccgacgcacagaataaacatgaagctcagcagtagaagcgtaatgatttccctcaggaaaaacttctgacagctaggtttttcaagggtttccctgtgctagctgagatgcaaaacaaatcatggaagattgcatacctgtgt

SEQ ID NO: 18068 - DNA, 1117 bp, Homo sapiens
agtgggctcaacactcagaactatttgcttgtggactcataatctgaatgccctctataaacccaccaaggtatgtgccactataacttagagctttaaggaaggattctaagaccattcatacctcttcctcaggagtggcggtgccagggctgaagttccctggggaaaaggggatcacctgctaaactgtccttgagtgtagtgggcaggagcttaatcactcccaaactcttttccccatggtgagtctcaagatcaccatggccatgttgatttcaaggtgtatgtagaaatttgtaactaccaagaagttcttatttgctgtttggggtctcttaggttaatgtgaatgttgtatagaactgtgtttgcgtacacaattgcattgggcacaggaaggctcgcctcttgcccatcctcagtgtttctcagacatactggactatgatctgtggtaagaaatacctctcccatcaagatcttttacccagccacaccttttgtgaatgaacacacagaactgatgaaacaggtctcagcagttcttagctttttatgtcaaatgcactttatagcttcttgctgtttcactgaacaggatgttgtatgtgaccaactgtgttgatttcacagccagcttgaaaacctgggctctctggacctcagcatgcagcacagggtaggtatagacatttcttgaatgagttcataaaaggtggcttgaagttttctaggttttcacaaggaactccctatttttcctcttcctgggccttaggtctgtcaagaactagggtggtggtgaagagaaggactttggggtcagtagggtgtaggtgacagtcccactggcggcctgcctcccgggcccctccctcaaggttatggtgtggaggatgcctagcaccatgcctggtgcgaagtgaggactcagatgttagcctttaaatgtgcttgtcgtggcatggctggataagattcccttctcagagtccgagggctcgcttctgggttctgcactggcctccagcctcagtttcccccgtctcctctttgctctctagttttgtgtttctcatccttccttcatgttagaatctgccactgggcatgt

SEQ ID NO: 18069 - DNA, 1056 bp, Homo sapiens
tggttgctgtccttgcataggctgctgggggagccgactgggatgggggtggagtatttccaagccccgggtggctgagatgggccttctgagcctggggagggccagggctctcagtgggtccagcaattgagatttcccttccttctgaggtgtgacctagcagggcctggtctgcccaatggaaccttctccagaggcctcccttgttaacattcacttcagctgcaagtttgacaactactgtggtttacatctcccaggacgtccttctgcccattctttggaaaggccatcccccttattctggctcatctgtcgtgtcctcccgggcatgtcttcaccctctcctcctgtgtgagtctctgggccccttgtttctcattctgccttgtgatgattttccttgctggtttcctggtgttttgggtctgctattgctgtagggcagggtctgcatgtgtgtattcactgttgccctggcactgaatagacaccagtacgcagttgaatgaggggattcccagcttacagatgagagggctgaggcactgaaaggtctggggggtgcgcagatctctctggcttctgtcctgtctgaaaggtttggggggtgcgcagatctcgctggcttctgtcctgtctgaaaggtttggggggtgcgcagagctctctggcttctgtcctgtctgaaaggtttggggggtgcgcagatctgtctggcttctgtcctgtctgaaaggtttggggggtgcgcagatctcgctggcttctgtcctgtctgaaaggtttggggggtgggcagatctgtctggcttctgtcctgtctgaaaggtttggggggtgctcagatctgtctggcttctgtcctgtctgaaaggtttggggggtgggcagatctgtctggcttctgtcctgtctgaaaggtactcatgagcatttcttgtcaagcccaagcttgggttcaaaatcaggaggggattggggagtgtgggctggtaggaacttgggcagataacttaatctgagcctcagttttctcatctgtgaaggtgg

SEQ ID NO: 18070 - DNA, 1041 bp, Homo sapiens
gaccttcccctcagtcacacaccattcaatgatgtcagcaaatgctgaaataatctttccccacccacagagccatgcacctacaaaggcctgacccccacgggggcatctgaggtcagcctcgagccccctaaggctgggaaccctgtattttcctgtggtgactcacttcctgttggggccttggtttttgaaagacagaaacagctcagagtctgctccatggaaatggctgggcctgcccaccagacccttaaagcgacagttttcccacggcagggcttgtcctgggaggtccctggtggcgaatggggtgctgacaaacgggcccagaacttcttgagtcaggatttgaagcgaggggggtctgctgccagattccacagctcagacacgtcctcttttccccacccggattttcagttcccctgaggaaccacctctccgtctccgagtgcccagtctggttcactgagccatttgtgcccagaaggacctgtagtgctgggcatttacttgctaaccttgtttaactcactgccctgtctgggctccgctgccttttgtctcaaactgggtgataaaaccccaagttaattgtgaaaatgcatcctgtttgcttggggtggtgcattcagatgctggcagcctgagaccacagcgattcgcagagtgcacatctgtttaaggacacttgaacctgtgtatttaaaaacagaccaggttgacccaccaagcacatctgtggacagggctgtctttggcttctcttgggtcaggacacctgggaaaatgggcaggtacgcttccatgctccttcggaaacagctctctgggcctcactatccccatctctaaaatgggctccctcgcctgtcctggatctggggttctgggctggaatgctcaggaatcagtgaactgtactcgcaggtgcttattctctgggtttagaacctgctccccccgccccaaacatcttcccgtttccacactaccaggtggggtcctggtggtgccctgggcctgcccttcggggct

SEQ ID NO: 18071 - DNA, 1071 bp, Homo sapiens
gaacgtagaagtgatggtatgtgacttctgagcctagcttataaaaatgccatgcacatctgccttgtgctccatcttggaagccagccatcatgctgtgaggaagcccaaatgtcctgtggagaggcccatgtgaggaagactgaggtccccagcccatagccctggctgaggtcccagctgatagacagcaccaacttgtcagccatacgagttatgatttagttctccatctagctaccccagtgcgtgccacctcgaatggagatgagctgttttcactgagccctactcaacctataaatttgtgagtaaaataaagcactgttgtattaagccattaagttttggaatagttggccacttggcaatagacaacccaaacaaatctatgtcctaacaagatgttttgctttgtggagggagaatatgcactcatttttattttgtatgtatgtatgtatgtatgtatgtatttatttatttatttttgagacagagtctcgcactgtcaccaaggcgggaatgcagtggtgcgatctcggctcactgcaacctccccttcctgggttcaaacgattctcctgcctcagcttcctgagtagctgggattataggtgtgagccaccacactgggctaatttttttgtattttcagtagagatggggtttcaccatgttggccaggctggtctcgaactcctgacctcagatgattcacccaccttggcgagtgctgggattacaggcatgagccactgtgcctggcctaatttttattttttattgaatatttaattttttaatttttaatttttttatttagagacaaggtttaactgtgttgcccaggctggtcttgaactcctggcctcaagcattcttctcacctcagcctctcaaagtgttgagtttacaggcatgagccactgcacgtgtcccatccccaattttctgtcttctacctgcactgatgcatttctaattctgttttaaaattagacctcctcaagattctgagtagctctcaacagtgaccttgtagcagagacttgaaaaatgagttcaggt

SEQ ID NO: 18072 - DNA, 1034 bp, Homo sapiens
tcttatttgcagtgagaatggacctgaaggcatgtgggtgtgtggggtcttcattccaggtgatgtgaggtgttcttttgtcctcagcagctcatgtgaggagcctttatgtatgtgtatgtgtgtagatgtgtttgcatgtgtctctgtgtgagtgtatgtttatgtctgtctgtgtatgtatgtgcatgtgtgtatacatgtttctgtgtgcctctgagttcgtgtgtatgtctgtgtaggtgtgtgcatgtgttaaggtaagtgtgtatagatatgttaatgtgtgtatgtgtgcacatctgtgtgtatgcatatgtgtatgtgtatccttgtgtgtatgcctgcacgtgtgtgtatgtggatcgctgtgtgtttatgtatgtgtacatgcatatgcatgcatatttatgttctatgttcatatctgtgtatgcatggctgtatgtgtttatgtgtctctgtatgaatacatatgcatgtgtaaatatgtgtttatatttgtgaatctatgtatgtgtctgtgtgtgtgtgtgcacatgtgctatgtgtcctgtgtgtgtgtgtgcatgcatgttgctggtaacttcagtgggagtgaggatgaaatgtgacttccaaggggataatgtgagtctgggctggctcaatacacaagaaaagaaggtgatgatgaaatgatgtttcctgacctggttcagacccaggtaccacccttgcagggtgatgctcgaaccatgtccaggagagaacctagaaggtggaagttctgcaaatcatgtagatcaaatgctatttactagagcgttcccttctcaagccaacttcctctccctttctcccattcctctcctctcagctttctggtaacttccaatatgctgggagcctttccctgctttccccctacaaagagataggcacatcacccatgactggccacaggaattctgaattcctctggccacaatgattggctcaacaaaagcatgttacccacccctcctcccccaggcaaatcggaactcttccta

SEQ ID NO: 18073 - DNA, 1130 bp, Homo sapiens
ggtggatcacgaggtcaggagattgagaccatcttggttaacatggtgaaaccccgtctccactaaaaaatacaaaaaaattagccgggcgtggtggccggcgcctgtagtcccagcttctcgggaagctgaggcaggagaatggcgtgaagccgggaggcggagcttgcagtgagccgagatcgcaccactgcattccatcctgggcgacagagcaagactgtctcaaaaaaaaaaaaaaattatagtgggaaatttagataaagaagtagtagttctctcggggctgtttttttgaggaggtgatctttaagcttgatcttgaaagagcatagactaggagggaaggttgataatatgacagttctggtcaatttggaaagtgaaggttaggtttataagaaggttcagttgatatctccaggaaaagacaaactactgtgaaagaaagatagtgtagtcatggtagtctatctggctatatagagaatatttataacaacttaaatattgatttaactgaaaatacgatgagctgtaagagacgtgtgaactacagaactggatctacgaatgacaggagggcagaccacagtgcttttcacatcctcccctccttcccttgggcataagacctggctataggaaatctagctaattacaagaacgtctttataatttggagggaaactcttggaactgtgagtgctccccgtccagtgttaccatcccctaccatccaattaaaatgtttccaacccacctccaaaaaaaatacatatgtgagctaaatcttcatctgcaattacaggaaatcgacatggctaaaatttgtaactcaagaaacagtatgaaaatattttaaaatactgagattttaaaaacaagttgttaaaattaaagtgattgccattagatattcgggagtgctggcaagcaactgctttatttcataatgagcattttatactattacattgataaaacttgaaaaaagtaatgtcagaattctattagcattcaggtgatgcggatgctgctggtctatgaaccacacttggcattacttcatggtcattatgagattaactgccacctggcctgagttttgttattttgttaaccactat

SEQ ID NO: 18074 - DNA, 1063 bp, Homo sapiens
gctattcaggaggctgaggcaggagaatcgcttgaacccgtgaggcggagtttgcagtgagccgagattgtgccattgcactccagcctgggcaacaagaaggaaattcagactaaaagaaaaaaaaagatctattgttctattgtgcaaaatctgactagtcagtaacaatatgctgtatacttggaaaattgtacaacggtattgttgaaattcataaataataactataatcttaaatgaaaaaatagtaatactaaactgatctacaaattcaacacaatccttatgaaaattgcagctggcttgggagaaatttatgatttttcttttctgtgtaaatttaatgagagtttatttttaagtatggtaacagatagggattcagtttcattcttatacatatgttaatccagttttcccagcaccatttattgaaaagtatgtgtcctttctgcagcatatattcttgtcaactttgtcaaagatcacttggctgtagatacgtggctttatttccgggttctctgttcagttgatctgtatgtctatttctatacattactatgctgttttgattaccatcagctttgtgttataatattgttagaagtcaggtaatgcaatatcttcagctttattgttttagcttaggattgctttggctatttgggctctcttttggttccatgtgattttcaagacttttttgtaattcagtgaagaatgacattggtattttgatagtgaatgcattgaatttgtagattgctttgggcagtatggccattttaacaatattaattctcctgatcagtgagcatgggatatttttccatttgtgtcagctacaatttcttttgtcagtgttttatagtttttcttgtataggaggtctttgacctccttggttaaaaatattcctgagtattttattttacgttttgtagctatggtaaatgggattgccttctgatttggctctcagtttgattgttattggtgtatagaaatgctacacattttaatttgttgattattttatttatttatttattttgag

SEQ ID NO: 18075 - DNA, 1053 bp, Homo sapiens
aagaagtcagaaaattaatttaggatatgaatgagaaatttaccaaggaaatagatatcttttcgtaaaaccaaacagaactttatggcaatgaaaaattcattgaagaaattttggaatgcatttgaaagcctcaagtatagatcagccaaggcagaagaaataatcttttaaattaacctagtgagacaaaaataatatataagactgaagaaggcctttgaaacatacgagactacataaagccgcagaactaatgaattaacagtatttccaaagggaaagaaaaagcaaatatttagggaacctttttcaggaaataattaatgaaaacctccctagtctagcaaaagattcagacatcttagatacaggaagcctaatgattcctaggaaaatatgttgcaacatggatttaatgctagctatatagtcatcaaactgtctcaagtcaaggtgaaggaaagaattttaaaatcagcaagagaaaagtgtctaatcacctataaaagaaacttcattagatgaatagtgtacttgtcaacaataatcttttgtttttcctttttgagacagagtctcactctgtcacccaggctggattgaagtggtgcgatctctgctcactgcaccttccgcctcccaggttcaagcgattctcctgcctcagcctcccgagtagctgggattacaggtgtgtgcccccagactctgctgatttttagtagatactgggtttcaccatgttggcccggccggtcttgaactcctgactttataaatgatccacccaccttggcctcccaaagtgctgggattataggcgtgagccactctgcccagccttttttttattttttgagacagaatctcactgtgttgcccaggatagtatgcagtggcacgatcatggcttactgcaacctccacctccaggtttaagcagttctcatgccactgcctccagctgggactacaagcatgtgccaccatgcccagataatttttttgtatttttagtagtgacaggatttccccatgttggccaggctc

SEQ ID NO: 18076 - DNA, 1026 bp, Homo sapiens
cctgccggtgccacctcaatccccagtgccattgggtgggaaattcaggaaaagttggcctatggtcactaccactgcaatggattgggcctgccattgccccagatgtcagatgagcacccaactgatagtgctgctgtggtgaattgggccccctaatcctaccagtatggaattggggggttagccaccactgctacaggtttggggcaacagatgggtgcccagcttccatggcacctagtgcatttttgttcatgctgtccttgatccttttgaattaatgtacatatatatttacatatatataaaatgctgcaagttctcaaccaaagctgagaacactgaatgtttcagcttcaagttttaaataaactcaacaattggaagagcaagttagcaatctgagttatttctagtctttattaaaagtataacaaaagtaaaattttcttaaatatagtgtttattagttcctaaaagttagtctaataggaataaagtgttgtctaagtacctgaacatttgtttttccttctttccatccaagctaggaagttgatgtataccatcatttttatttcttcggagtttttaaaaattcattttggcaggcaaatcacaatcatggtcatcagccatcgaaatacatgtgatttaacttatgttttgccatatgtatgcaagaatactttgaaaatgctaattttgtttggaaggatacaattggtaaaattcccttcaactgcttttttctcacctatttaataggttgcaaattcagaggctatgattttggataagaatcttgagtcagttaatagtccaattgaaaagtcttctgtgaattatgagccttctaacccttccgaaaaaggaagtaaaaaaattaatttgtcatcagatcaaaataagtctgtttctgaaaggtaggtgtttctgcaaaaatgcataaatttatctaaatctataataatgaattttttcttcatcacagttttggatctttgtaatattgattattct

SEQ ID NO: 18077 - DNA, 1046 bp, Homo sapiens
gatgggggcttgtggcccttcttgaatctatggcttgatacctttcattatcttgggaaaattcttgacattattgcttcagatattgcttctggagcattctatgtcttctgtcttactggtttctaattatgtgcttttctatatactccatctgttttgctctagatacttttgtctggatattttcaactaacctgtgttgtgttccagcttattaatcctttcttttattggatccaagtagctattaaacccatgtattcttaatttcaatttgtatatttttcagttcttggttattttttacaaattcatgttctttggtgaaattctttaccttgccatccaagcgttgtacattttagtcactaagattttcagatctatttctgatgactctcctatctgggtcactttgaactctatttgtgtttgctgttttacatctttgtcctatttgttaggacagttgctaattttgtgtttgattactggatattgtatattggaaactgtaaaggctctaaatgatgtcttccaccagactagattcactctgtactctggaaagcagcagagagacacagcacctgtgatggattttaaatatgtccacaaattttcgatacccctcctttaaaatgtgaagcctaatttccatcttggactatacttagtgactcacttctaatgaatagaatatggcacaagtgacattatttttgtaggtcataaaagacattagcttccttgctttcccttagatgacttgctctggagcaagttaactgtcatgtcataagaacatcaagcaatctatgcagagctctacatggtgaggcatcctgctaatagctatgtgaacaagccgttttaggctctgacccccagccctggtcagacctttggtgactacagcacctgccaacatcctgactgcaacctcatgagaaaacgtgaggtagaactcctgaactacacgacttcctacttatttacccacaggaactgagataatgaatgtttggatttttaggccatta

SEQ ID NO: 18078 - DNA, 1046 bp, Homo sapiens
tgaaacaacatccattacccaacagcataaattttacaatatctgacatctaataagaaattcccaggcatgcaacatagcaaaaaatatgacctatcaacaaggagaagaatgaagtgatctacctagaaataatttggacttagcagacgacctaaaagagctattgccaatatatcagtgaaagaggtatagaaaatgttcagtctaaagcatggagaggaaaaagactgaaaaaacaatgaacagagcatcagagacctatggaacagtatcaggcagtctaatacacattattggagtatcactaaggcaggagctgagcaaatgtttgaagatacagtgtctgaaaattttccatagttgatgcaaattctaaatccataaatgaaaaaatgttaaattcaagcagaagaaacatgaaagcatacaaaaccacatcatcagattgctgaaagtcagtgaggaagggaaaattttaaaaagtagccacacaaaagacacatcacatagaaaggaacagaaagtctgaccaacatggagaaaaccccgtctctactaaaaatataaaattagcccagcattgtggcgcatgcctgtaatcccagctactcgggaggctgaggcaggagaatcactttgaaccaaggaggcagaggttgcggtgagccgagatcatgccactgcactccagcctgggaaacgagcaaaacaccgtctcaaaaaacaaaaaaggaacaaaaagtaagaatggcaccatacttcttgctgtaagctgtgcaaactagaagacatctctaaaattgagatcatagatacttctaaagtattgaaagtttaaaaaaaaaaaaaagtccattcagaattctatatgcagtgaaaatatgtttccaaagtgtaggggaaaaacagactttttaagccaaaaaaaagggagagaatacatcaacagacctacattacaagaaattttggaggagatttttcaggcaaaaggaaaatagtattaaatagaaatttggatctgtacaaagtaatatagactg

SEQ ID NO: 18079 - DNA, 1053 bp, Homo sapiens
aacatgaatggcatttacaggcagatgggcctccgagttggagaagattgtaagggtcttttttaggccatttaaattttttcatttatccgttcatggattcagacagaatcaggcagcactgagtaagttccaggcccatgacctcaccactgtggagatgccagacgaggacagagaggcacccacaactgagtcagcccgcaggcacacctcatttcttccaagtgtcccagatgcaagattatctggtgttagcttgagtacagagaacacataactagaaacgtcattctcttcctttagagaaaggcactggatggtctgtttccttttcaagactgaaagagccaacgtgtacccccagaagccagtgccgctaggctgtgtacagacaagtatcctatccacaaggagaaaggcagaaacagacctggggatgggttagtagggtttctccaccacatcagtacctgtgtatttctttctagttattttcccctagaacttgacaatttgggagccacagtacatttggttgtcatatctccccagcctcctctgttccgtgactcttttttagtcttctgttgtttttacgaccctgaaagttttgagaaatgctggccaggtcttctgtggaatgtcccccaaaatgggtttgtctcacttttctcatgattaaactggcagttaaggggaagaaaaccgtagggctaaagctttttgggaacttttttttcttttttttcttttttttttttttggctctgtcacccaggctggagtgcagtggcctgatcatatctcactgcagccttgaactcctgggctcaagcggtcctcccaccttagcctcctgagtagctggcacttcaggcatgcaccaccgcctaattttttttttcttctctgtagaggtaggggtcttgttattttgcccaggctgggtcttgaactggcctcaagcgatcatcctgcctcagcctcccaaagtactgggattgcaggcatgagccactgtgcccagatctaaaactcatttaatactca

SEQ ID NO: 18080 - DNA, 1093 bp, Homo sapiens
cttctagtcttctcataaccaaatttgacactaaaatgcccatggaaaggaaggagtgtgctggtttggctgttctttcccgcattgctccacttcagccggatttggcttcacccagccatgagggacagtctcgcattaatgcacttccttccgaggaagagcagccagccaaataggcaacagtctgaaggagagactgaccttacaagagtggaaccgagtcctgcttcctgtggctcattctttgaattttgcatcgtaggaattgctgcttaatacaggacttaggtagcccagcctggtcgcttctgatccaggaagcaagaggttgaaaataccgcacactttcatgcaaatcccgtttcttttttttccgccaggtcttcttaattatacatcatgcaccgctggtgaactcgttagctgaagtcattctgaatggtgatctgtctgagatgtacgctaagactgaacaggatattcagagaagttctgtaagtcattagcttcgggactgaccttaacaggaaaccattgctcattttgctaatctgtgtgtttctctaaaatcagaaactaacattctgaatatatagcagtgatgatgcataagctggtccgggattcagtgaacctaatcagagtcttgattgcatacccaagagaagctgggatcagggaccacctggatttgattgattgtgtgttcttaaacatggaattgtaccactccgggccttaggttgcatatctgtgagacactgttatcgggacacagtgagaaaatgccttatcagaggaactaatgtctacagaagttgggcgatgaacatccatgaatgactcaggccccaggtgagggcagtagagagtggcgaggggtgtggcaaattggagagtgtatgccaccttggcgagcagctcctgttctaccccaggctgctgctgttctgcaggaatatggatgtaggattactaggttttttcatgtttctagagaagcgggaaaaacgcattgttacgtgtaatctctagttttaaatgatcatcaagctttggactaagtagcatgtttgtggtctgcaggaag

SEQ ID NO: 18081 - DNA, 1033 bp, Homo sapiens
gccccaattcaaattctgactccaactcagtagctgtgtgacattgggcaagttatttaacctttctgctcctctattttctcaatgataaaaatgggactgataattcctatatattatggttgttataaagactgagatatactaatatgaagcatgaaccacagttgacactagcctcattctgtcgcccaggctggatggagtgtagtggcacgatctcgctcactgaagccttgacctcccagcctcaagcaatccctcccacctcagccccgcaaagtgctgggattagagaggtgagccaccacacccggccatctctgactttttaaaggaagaactttgtcctctggggcgagctgatctttgacttattgctgatacttactaggctccctttctaatgagagccagaatttgacaacacccactacacctggctttttctttctggttatttatgtttaatataatagcaaggcacgctagtgttccattgcctgtagtgatagttttgtttaaaatgaacttatttgggttaaaattaataataatatcagtgggctgtagctaagacacagcttgtgtggctggtacgtggttttgaatcccggctctgccacctcctggctgtgtgacctcgggcagatccttttctgtctctgtgcttcagtttcttcacctgtaaaatgaggatgacacagtaatatctcatgcagttgctataaagttcaagtgagatcatatagtcagagcctgagaacagcatctgacacataagaaagtaccacagaagtgttcatcagaagttctccttacacaaacagctaatatttggggagtgtagagctgctgctggtaaagtgcaccatttctgacttagggcagtagacagtaaatggtagctggcactgttgttttgattatttgatgatgatgttaataatgggcataataatagatctggaggtggcatttgttttggagattaatttctctttattaaaatatgtttttattgtctgtgttc

SEQ ID NO: 18082 - DNA, 1026 bp, Homo sapiens
tatacttaaaaaggaaggagaaaattttgaatagtgcaatttgatatttggtctgtcatttgagcgtgtgtgtttgtgttcacgtgtgcattttacttcctggtgatttacgagaactcactaatgagaaacagatggcctctaaagccacaaactagagtttataatactctgttgtttatggaaaaaaatatgaataatctcctcttccctcccttcctttctttttagggagaagacatttttttggacatgtttgaagatgagtataggagcatgacagtaagtgaggggctgggacacacttgggctggtgtgcgcctgtgtccctgccaagctccccctgcccatcccagagggagttttttgacttagggctttgtgaccaaatagcacagattgatggggaagcagatttagaatggtgtcttgtgatccccaccactgttaaaatttcagactatattctctccctctaacatgggaggtgtccgatgaatcaggatgattctctgctatgaatagtaattttggggacagtatcattttattgaggacttactctgtgctggatgtatatagcatgctgtacagattatatctcttcatcctcacaccaaccaacggtaatagctactgccattgtccctttcttgctgaattagtctcttctcatactgctacgcagaaatacccaagactgggtaatttataaagaaaagaggtttaattgactcacagttccacattgccggagaggcctcaggaaacttacgatcatggtggaaggcacctcttcacagggtgacaggagagagaattagtgcaaggagaaaagatgccagatgcttagaaaaccatcagatttcatgagaacttactcactatcatgagaacagtataagggaaactgctcccatgattcagttaccggcacatggttctgcccttgacacgtggggattctcatgtgtctcaccattcaaggtgcgatttgggtgaggacacagagccaaaccatatcac

SEQ ID NO: 18083 - DNA, 1016 bp, Homo sapiens
tttgataattcattatttatatgtatataccgtaggcatatgattttttaaaatccagacaggagatgatcaaatgaaaaataagtctactttgcttcagaagtaactattgttaacagtttcttgcctgtctttccagaaatatttctttgtatgtcatgcatatgtttgttttttacacatggggtataccgtatgtctgatgctgcaccttgctacttcttccttaatagaaagtgtcacacattaacacgtataaatcaacctaattctccttaactgttacatggtattttgtcatatggatgggcaaaaaaatcttttttgctgtttcgtatttgggtcatttccagtgttttgctcttacagtgtcacagtgagcatccttagggtgtctttgtgtaattgtgcaaatttctcatgtctgtgtgataaattcctagcagtgaatttgccaaaggggaaggtttttaatcttgatatatgtagtcccaacgtgaactctagaaaacagtacaccaattcactctgccacccacagcttgtgattggtttctttcttaaatccagtctcagggctgggcatggcggctcatgccagtaatcctagcactttgggaggctaagacaaggcggattgcttgagcccaggagtttgagaccagcctgggcaacacagtgagacatcgtgtctagtataaataaaaaattagccaggcatggtggtgggcacctgtggtctcagctacactcaggaggctgaggtgggagggtcacttgagcccaggaggttgacgctgcagtgagctatgattgtaccattgccctccagcctgggcaacagagtgagaccctgtctcaaaaagaaaagaaaaaaataatcttaggctgagagactgattgtggcaccgcctgttttcagtgatgaaatgtgagatgattctgcctgtttcagggtcaggaggattctttgcttaaaaaattctgcaggttgcttcgtgttctgtggctatgat

SEQ ID NO: 18084 - DNA, 1044 bp, Homo sapiens
aggtgggcggatcacctgaggtcaggagttcgagaccagcctgaccaacatggtgaaaccccatttctactaaaaatacaaaaaaattagacaggtgtggtggcagttgcctataatcccagctacttgggaggctgaggtaagagaatcacttgaacctgggagtcggaggttgtagtgagctgagatcgtgccattgcactccagtctgggcaacagagcgggactccatctcaaaaataaataaataaataaaacccaccactacaaaaaacagaaaaattacccaggtgtggtggtgtgcacctgtagtcccagctacacgggaggctgaggtgggaggatcagctgagcctggcgaggtcaagaggctgcagtgagccgggatcatgccactgcactccaggcttggtgacagagtgagaccctgtctccaaaaaaagagaagaaaatcccagttattgcctcattgggcccaagttccaggcaccgtaaattccagccgaggaatcaaaacagcgagtgctacctgaacatttagattgcgttaatgctttcatcctcacgaaccctgtaaggtgtggtggtgtcactctgctttagagtgacaacagtgctttagaggacacaggctcgtggggtgaacaggtcccctgctgtcacatgcccagagccacggcactctcctcaccaccgtatcctgtagccagagtaaaagtgacaagcctaaagccaagttgctgctcttcaggtttctcccctgcagatagcagaaggctcgtgtccagccgtccggttagccatgtcccacaggtctgccagggcagacgtcaacagagccctgtccacttaacaacctcagctgtgggtttttgaagcttgttctgtgctgttatccatcacggcctttctgtggctccgcacatactccctgattctatctgactcacatagttccagatagtatcttcagttcttgttgtagatgatgtgtcatagaacgtcatcagccatcggtctggcctagccccaatctgttaaaac

SEQ ID NO: 18085 - DNA, 1044 bp, Homo sapiens
atatcaccatttgggggcaagtccttcattgccccgaaagcacagagttttgtgcactgaaacagtaaatcatctgagacttattaaagggatactgaaaaggggtctctgtgcatatacctgaagctttcccaaacttcagggtcctagcagtgagggaggaaacttctggggccccccaaggctcctgcaggcccttggagtcactgctatctgaaccctgcccacatgtcagtgaatgcttttgtttctctttggtttttgtgtagattcctaagaggagtcccgggcaaggacccaggcctcacctggcccatgtcggtgtgctgttgctagacttgaatctgaaccctgcttcctcagcccccaacacgtgctctttgagcagccgtgggtagtttgggccctgtgccctgtcttcctaaggtggctttcctagggtagccccccactgagtagctcctagcccccgcctgccctcgggtattgctgtcatcttgccagggtgtaggatccagagctgcttcttgagtcagaagcacgaacaagaaggttctatgtcacctgcagatctttctagtaagccgcaatctgtccagagccaccagcagctgaagtcccagacttagtcacctcccagccccccatctctcgccccagggacctggcaggctgcactgggaggtgaaagggcagatccaaggaaggagccgacaaggggagaaataaggccatgcacacttgctgtcttcagtttgtgtgcgaggtcacagggccgattgatttttttttactgtttcccagcatcgtgatgggtggtgagaaaatatgaacactgcatcgtcagaaacctgagccacagcctcggaatgaatttgctaatgaaaggcaagctcagggcacccacgcctcatggtcctcattcacggcagagactgtggaaaatgcacgggttgcttctcccgaatcagccctcagcgggttttatattatgctttgcaatctgcaacaaccataaataagtgtaggtttttcttagggcag

SEQ ID NO: 18086 - DNA, 1054 bp, Homo sapiens
gacttgatcccaacccattcccaaaataaaagaatttaagcatcctgactgcagtgccagcttctcatctgctaccctacatgtcccactgcagatgtcttttgataataaaccaggtttatgatgctgtaataaaccatggctttaaagagggcaagagaaaagacgtgtcttcttcaaatgggcctgtgaccaccttggcaacggctatgtcattgatcccttccagccggggtcattgtcgggagcatacaaggtgtaatcccaactctgttactacactggctggccctctgttcatggccctgataaataggcagctcgggaaaagccatcttgacattttgatttgttaaggggtaattcattttcgaggcaagtaaacagcttgtaaactggggggtttaccgctctaagtgattaagaagtgagcagctataaaactggttccatgaggctgcggctgagtgtccccaaggaatcttcctgcccagtgtttggatttgccggatgtttgccatagttcatctgagcgggcccccgacacacacacacacaatatatcacattgtgcctcttcctgagaactccagctacattcatcctgcctttctctccgcaagcagacctctgcggtaggtgcgggcaggaaataccctccacgcaagaggagctggtgctcaggatgaccgcctcactcggagactcaccctgctttcactgggccccatgcacttgccattatagtcagcgcttgttaagtcacccccaaaacccaactgggggtataaatagggcccttgccttttaaggagctgatctttagacgaaaacagcttcacatgaacctgagtggaaatagcccctccttgatggcccggagaagagtcctgctaagccctaagctgagccgcaggtcccatctgtaggtgaaaggaaggaggctgagggacatcagggacttgcccaaggtccctcagctgggaagtgagcagaggagggttaaatcccaggcttccctggtgccataacctgggtgtcatcccctgcacca

SEQ ID NO: 18087 - DNA, 1058 bp, Homo sapiens
tttgctagccacactcagtccccgggttcatctctcggggccaatgcgatgttgtttgtgagatggagagaatggcattgcccctacccccaccagggtggcttcaggatgaaattcaacacgggaagcagcctccccccacccccatggaccgagaggtgatactattagagttatatgggtttgtggtttccccttactgtctccacttccttcctgaaaccctgaaagaggcttcgcaggaaaggaagggtctttcagatgcctgagtgcagctgggaatggctgtccccagttagccaggctggttggagcctagggtgagttggctgggttgtgggtttgaaccaccagaatcactgaggcacagctggcccactgccgagtgctgccagccatcctgcaaacgccaccattgctcatccctgggagatgctccagcattgaccaaaagggttgccgggtcttgtcctgctcaggacaggccactctagagtgatctatagtcatactgtaaggatagatctgggtcctgtgcctcccacggaccctgagcacagaatacacatgacagggccccagcacacgggcggcggcccctcttgttagtattaattatgcacttatgtgaaatgcacctgctcttgaagaaggggacagccaatgattaaaacagttgagggcaggtcaccaggctgttgcaggctccattaagaaatggctctgagagggttactttagagcaagggaagggtcttctgttgcaggggctctgtgcctggccagcaccacctcccccgccttttttttttttttttttttttgagatggagtctcgttctgttgcccaggctggagtgcagtggcgcagtctcggctcactgcaacctctgcctcccaggttcaagcgattctcctgcctcagcctcccaagtagctgggaccacaggcgtgtgccaccattcctggctaacttcttgtatttttagtggagacgaggtttcactgtgttagccaggatgatctcaatctcttgacctcgtgatccacccaccttg

SEQ ID NO: 18088 - DNA, 1035 bp, Homo sapiens
ccttgtacctccatatcccatccccacatatattaactcatccttctaatttctgcttcagattacttctggagaattgtagcttagataatcctgtccttttaccccaaaatatttatagttttcctactataattggctctcccccatttgacgataagctttgagagggtagaagagagccagttaatggtaggaaaactacaaatggtatcttcactatttttccttatttatttattataagtgacataaatagtatttctttagaatgaataatgcattagaatggcctgagacagggcttaaggggatgaacataggaaactattgtggtatcaagatctgatggtagggtgatagtgaggacagggtacttatactgcttgacctgagcttggacatagaaggagagaaatgtagattactccctaattctaagagcctgaaaagctgggcaaatgggtggtattaatagaactggggaagaaaggaggagcagcagatttagagggaaaacataagattccttttcagtagagtgctgtaccacataatgatgtttctttcaacaacagacccacatacatggtcacgtaagatcataatggagctgaaaaattcctgtcacctagtgatgtcatagccatcataatgtcagcgcattcctcacgtttgtggtgatgctggtataaacaaacctgcactgcccccaagtatggcaaatataattatgtacagtacataattacttgataataataaacaactatgttactggtttatgtatgtactatactgtatttttttttttagggatgggatcttactacattgcccaggctgttcttgaactcctgagctcaagtggtcctcctgccttagcctcctgaagtgttgggcatgagattacaggggtgagccaccatgccctgctatactgtacttttttttttttttttttttttttttgagacagagtctcactctgtcacccaaggtggagtgcagtggcacaatctcagctcactgcaa

SEQ ID NO: 18089 - DNA, 1034 bp, Homo sapiens
aacatggggaagaaaaatacactcagctcccgaaaattcttgtactctcttttcaccacctttcctgcgttctctgcctcacagtctccgtaccttattctctctccaccttctttctcctcacccccagccagattttgcccttcatttcaaagccggtgcagattgcaaagctgatttcattttatgtaatcatttcgtggaagaaacaataaaaccgtgagatattccggcttaaaactgcagtgtggctcataaagcgctggggcccaggctctgcccaggcagaagggattgttaactggaaaatttcaatgactcaccgtttgtttgactagtcatataaagccttcacccaaatttttccatcctttcctcctccccgccaaagggtttgcaaattaaacagaggattgccgtattccatggtgtatccggcttacctaacagggttattttggtgagtctagcttccttatgcaccattacgtgaagtggtttccttttgaatggtctgatttgctcaagaattcccatagtacttttcatcgactgcatcttacacttacagattaggtaaacctgggaaaagaacaaaagcaaacgagaaatacttaagagttcgcatttaggcccttcatgaagtaggaaaaaatgttgctctgagtacctgttaagctttcctgtaattcacccatgtggagcccaagacagagaaaaacatattgttagtatttttctgaaaggagtctagacagggtgcaactaatctgcctagaaattacagactaaagaagcacatacatagaatagatgtttctgaacaaccttaggttgttaaaaaaaaaaaaaacctaacaaaatccagatctagatctgtattttaattttcttttttcttttttttgagacggagtcttgctctgtagcccaggctggagtgcagtggcgcgatgtcggctcgctgcaagcccgcctcccgggttcacaacattctcctgcctcagtctccggagtagctgggactagaggcg

SEQ ID NO: 18090 - DNA, 1030 bp, Homo sapiens
atttaaagataggttatttttccattttctggttcctctgtacaaagattaatttgattatttgtatgtacctttctgctattctcaaaccttcacacttatggtaccttgaaaactgctgccttgtgagttatcactgttgcaaagcatgaatttttttctttttactttttggtcaactattttttttgggggagagggggagggtcccgttttttctgtcctgtatgttttccttccctttgggttgcttatgttaatgaccaagaattatttgttctatatttttccatgcgtacacaattatttacagataaaatagccatgtatatatacacatatatgtagccttattgccattgttttacaaaaatagaatcatacataatgctgtgcatttttattttttatcttggtactcctgcactgaaacatttccaagttatagttctttttttttaattttttatattttttggagatggtgtctcactctgtcgccagattggagtgctgtagtgcgatctcagctcactgaaactctctggttcaagtgattctcctgcctcagcgtccggagtagctgggattacaggcacgcaccaccatgcctggctaatttttgtattttagtagagatgtagtttccctatgttggccaggatggtcttgatctcctgacctcgtgatctgcccgcctcagcctcccaaagtgctgggattataggcgtgagccaccgtgcctggtcttttttttttttttccgagacggagtcttgctctgtcgcccaggctggagtgcagtgatgcgatcttggctcagtgcaagctccgcctcccgggttcacaccattctcctgtctcagcctcctgagtagctgggactacacgcgcccgccaccgtgcccggctaactttttgtatttttagtagagatagggtttcaccgtgttagccaggatggtctcgatctcctgacctcgtgatctgcccaccttggcctcccaaagtgctaggattacaggcgcct

SEQ ID NO: 18091 - DNA, 1046 bp, Homo sapiens
gctttaatttctctgaactcgttttcccagtccttgaaatggtggtaatattatccccttggtggattcctgggagttatatgaagtgtctgttgtatctgggaacctcattggaggctcatagatagttttagagatttcagatacctcttgcaattgtgtgcaaaatcgtgcttgtgtgtttgtgcacatacgtggattttcctggggagaagttcctttgctttcacgactctccttcagagtgttccaggctttagaaaaaagtaagaaacacgaaacacttcaggtagttagcaggtggtaattgcacatagtgtctggggcaacactggcaatcgtggtatcattatttttgtttttactgttctgcttgctgatgttaaaccagctacactggctgtgttcttacgcacatccctacatgtattagcagtgggaacctgggcaagttatttaagctaactgtgcctcagcgttctcgtctataaaatggggctatcatagtacccctctgacacagttgtgaggattaaatgaactaacagatggaagatactcagaagatacactatgtaaattaccacctgagctatcgaagggtgttatatgctatgtaaattataccttgataagaaaaattggaaaaaaaatccaagagagtatctggcatcttaaagactgaataactggtaggtgtgatcattaacaacaccctcaaagggtacgttgctgacgaatcttcctgaaaacaacatctgggccttattgttgaactgcaaataggttgacctgattttccatcttactgaaaccatccctcctgcagaggccctgaagttccctttagctggtatctacccctcaatcctccctctggttaagaggacataaaccaggctactctttctatgaggcctgaaaattggaagtgatcacgcaggatggtggttcttagctgggggtgattgcaacccccaggggacatttagccatgtctgggacatatatggttgtcacacctgggatgagggtccttccggcat

SEQ ID NO: 18092 - DNA, 1124 bp, Homo sapiens
cagcctggccaacttggtgaaaccccatctctactaaaaatacaaaaattagctgggcgtggtggtgcatgcctgtaatcccagctatacaggaggctgaggcaggagaatctcttgaacccgggaggcagaggttgcagtgagctgagattgcaccactgcactccagcctgggtgacagagcgagactccatctcaaacaaacaaacaaataaacaaaaaaaaaaaacccaaaccaagaaacttgttgccactttttctttgaccttcaggttctccagatctccaggatcattcccaggattagctgtgggttggggccattattttcataaagtgtagttggaagtttccttaaatagtgggtgtacctgtcactgtgaatactggaaacctcttgttatgtttatccatgcaaatctttgttaaaaatagttggcaacccttgtctttattgttgtgcattgtatgcagaactttctttgctttccagacataagatccaaaagacaaattgtactgaagaaagcgaactggaaagaatgtcaaagacttgccttctagggctgggtctgaatgtctgctgggaatggcggtgtgatttgaagagttggctccaaatgcagatccactcgggttttattaatgcttccttctgcagggtccctgctcatccacataggaaggagattgaggcttactttggaattccagggaagtcagcctcagtcttcagagcatgaggcaacaccgtgagcagtttcttaatggtgagggtcacagttaacccaaaaatgaggccagactgtgctgagagtctaatttatttccttccttcctcccttcctccctccctccctccctccctcccttccttccttccttccttcattgtctcactctgtcgctaggctggagtgcagggtcatgatctcagctcactgcaacctctgcctcctgggttcaagcgattcttgtgcctcagccacccgagtagctgggattacaggcacacaccaccacacctagctagttttttgtttttttcttttaatagaggtgggtttttaccatgttggccaggtaaaaacctgaccttgtgatctgcctatttcagcctccca

SEQ ID NO: 18093 - DNA, 1042 bp, Homo sapiens
gtcatattctctcacagctgcagtgcttgtctcaatgcctggtatataatagatgcttaattattgtgaattttttaatagctgtattaagatgggatttacatctcttacaattcacccacccacctatgcaattcagtggttttttatatattaacagtatacaattatttttttccagtcttttaaaatgagtgaatgaattctgtatctggtgctttgtctgtaacagtgttaacttcaatcagtcaatatttgccaaatgcctgctgtgggcggggtgctggtctcaacactggggagatagcagtccgacaatcagatgaaattccccctgccctcacggagcttaggttcttgttgggagaacactctgtgcctagatatgatagttttttggcatctgttttttgtctagcttttctccagctgttgtgcagagatggttagctggctagtgataacccgtagtctactttgtcttagacctcgttgtcctcactgtttcagacattgctggtaaatgctctatgtcatcttagttttcatatgatcaatagtcactagacatgggggagggagccagggcaggaaatgccaggctggaggttacagatgctgcaggctcaaggggacaagacgcacagggaccctggcaggatgagcatctcgtggttacagggaccggggcatgggctgatgggttcctctgggctcccttgcttatgttccttccatttgctatgatgtgggggtggtggttatgttggaagggcgccggtgctgggagaggcatgtaaactgttagcagccagaagaggtgggaggtttaagtcatgctcattggagtgtgatgctggagacgtattgctttctgttccatggaatgcaaccctcagtcaggacggcacccagctgtccccagatttcgcaaaaccagcctggcttttgtcttctgttgagtcagcccaggacacaaggggccagatgtcctgaatgttccgtcatggtcctggaaaaaacatggaacccccaacagttg

SEQ ID NO: 18094 - DNA, 1029 bp, Homo sapiens
cattgtatttatttagttatttatggagacagggtctcagtctgtcgcctaggctggagtgcagtggtacagccttggctcactgcagcctcaacctccccggctcaacggatcttcctacctcagcctcccaagtagctgagactacaggcatgtgccactattcccagctaatttttttaaatttactttttctagagatgggatcttgctatgctgcccaagttggtctcaaacttgtgacctccaacaatactctcacctcggcctctcaaagtgctgggatcacaagtgtatgccattgtgcccagtccatctcattttagataataaggatatttggaacaccttaaacatggtgattcatcccagtgcgaagggagtttctgagaatttttttatctaggtgtctttgagagcatgaaagccaactcatctatctgcacatacacactacacatttgtgcttggtgacctggaatccagtgtcctggacagcacagaacctaaagtcggtgccataaagccctctttaaatggctggtgggcatcttgtgccaaggactggaggtataaaaattgttcctgacaccctgtggttgttaactcaggaaaacaaggaggacaggagaattctggcaggtatacattaatctggcaagggtaaaagcactagtagtatcacagcccctgtaatactagcagcagctgtcaggtgagtactgttagatccaggcactgtgctggggtttttacgtagatgaacatatgtgatcctgagaagagttctttgaggaggacactcttgctgcctccagttcacagacaaagctttgggaagtttagtaactttcccaagagtccttagctgctaagaagcagagctggggctgggcgtggtggctcaaacctgtaatcccagcactttgagagaacgaggcgggtggatcacttcagactaggagttcgagagtagcctggccaacacggggaaactatgtctgccagatagaatctgtttccattctc

SEQ ID NO: 18095 - DNA, 1075 bp, Homo sapiens
agcatggagggaggcatgacttgggagggcagaacccggcagcttcattcccatcctctgttggtggggaagagtgagcaactcacaggtagaaccaggacagtagtcagggctgtttaaaaatttagggctcctggctggacgcggtggcttatgcctgtaatcctgttcctggaccaaaccgagggttgcgctgcttgttcttatggcccaataacaagatgcagatgaactgggaagagaagaattttttttttttctgtaacgaggtacagggagaaggcttagaaattatctgcagaccaactcaaaattacaaagtttcccggagcttacataccttctaagctacgtgtccacgtgtaagtgtgcattcctctagagacctaagtgatcagcttcttctagtctatgactaaggtctgagtcctgaagaccttcctctagagcttcagtaaatttacttaatctaaatgggtccaggtgtgggcgtgattacccttatcttgtctcctgctaaatcatggaggtttggggagtcccttcagacccccagtaaacttgtttgtggaggcctggggagtttcttcacatccccagtaaaacttgtttaatccttcgttatcttgtcatgcttcaaggcccaggaaaggcctgggcacaactaggggtgggcttttgttacattccagcccttgtataagggcagtagctctctcagcttttaatatttaacttaaccactcagtcagtgctgacacaattgttatagaggcctgtgttagtgagaactggcctgccacaatcccagcactgtgggaggatcatttgcggccaggagttcgagaccagcccaagcaacatagaccgtctctacaaaagtaaaaagttagttgggcatgatggtgcatacctgtagttccagctactggggaggctgaggtgagaggattgcatgagtccaggatactgaggctataatgagctatgatcaccccagcctgggtgacagagcgagaccctgtcttaagaaaaaattaggactcctatcccacctcttcagagacactcatat

SEQ ID NO: 18096 - DNA, 1066 bp, Homo sapiens
ctcggggcaccgcccagtcactcattggtcattgcagagtcacagttagacaggaggaagaagttctggtgatctgttgcgcagcagggtgactatggttaacaatgacgtatatttcaaaatagctggaagagagggttctgaatgtttccaccacaaagaaatgagaagtatttgaggtgatggatctgctcattaccctgatttgattacaaaacagatacatgtagcaaaacaccacatcatgcccctgagttcgtttgttttgtgtggctgtgaaggaacacctgacgctgggtagttgataaagagaagaggtttctttggctcccagttctgcaggctgtacaagaagcatggtgtcagcatctgctcggcttctgggaaggccttggaggcttttagtcatggtggaaggtgcagggggagcaggcatgtcacatggcaagagaaggagcaagagagaggaggaggtgttactctatcccaaccaccagccctcacatggactaacagaacaagaagtcactcattctcatgggcagggcaccaagccattcatgaggcatctgccccatgccccagacacctcccactaggcccacctccagcttcaggggtgacattgcaacatgatttggaggggacaaacatatcaaccccataactgtgtataattattatgtgccaattaaaagtaaaacaaaactgaacatttatggagcccctgctgtgtgccaggcactgcgcctagtgagatacgcttgagtaaggggaagggcctcccaggtgcagccagggtgccagccacctcaggcacagtacttcttgggagcctaccattccatgagacaatcaggggcggtttgcattctactccataatccatccgtatcttactgtttatgaaacttgcatttccctcaggctagtctgcagtgaaaatgctttgtgtttcttctgcgtagccaggctgtgtgtacctcttggcacactgggcttcctgtgttcagcatctagagtgctctggttccagaagtgagcttccatggaagccgcctctgtc

SEQ ID NO: 18097 - DNA, 1024 bp, Homo sapiens
gaggaggtagaagtgcctggacttgatacagcatccccctgcttgcccagtaagcaaaccgagatgagctccaccaagcagttgagtcagggacccagtactagggaataacaaggcttctgaccatggctctgcacagaatatgcaccttctacaagcaagggagaaagtacgtctcctgcccccaaagtagccacttttgtccttgaacagaagagccgcagaggtacttactgctatttttattgattcaacaatctgctactcgctggcctccaaactcctgagagttatgagctcattactgccaaccacattcctctaaagtacacattaggttcataaacacaatttcagggctctgtgcgaaatggagatgctctgtaatagaaaattagcttcttccccaccagctccaccaagtttatgtttcgtctccttggatggcagtattcttggtaggggagagaaagcaatccatggagctgggagtattagaggctgattgccgagtaggagcctcctcttgtccccaaccatttaatgatccggtggctgcccaatgtgtgggatgacctgtgacctgctctgttctatttaccaaccaaagagattccatgcagcagccttttagcattaacagaaataggaaaggctgccatgcactggttgcattcaagaaacggatggggccgggtgcggtggctcacgcctgtaatcccagcactttgggaggctgaggcgggtggaccatgaggtcaggagatcaagaccatcctggctaatggggtgaaatccccatctctactaaaaatacaaaaaattagccgggcatggtgatgcacacctgtagtcccagctactagggaggctgaggcagcagaatcgcttgaacctggaaggcagaagttgcagtgagcccagatcgcgccactgcattctagcctgggtgacagagcaagacttcatctaaaaataaataaacaaacagatggtttctaaccaaactggccttaccggatac

SEQ ID NO: 18098 - DNA, 1042 bp, Homo sapiens
attttatcaatcagctgaagatagaaggagttgaacacctccctcgccgtgtaacaaatgaaatcacaagcaacagtcgctatgaagtttacacacaaggtggtgttatatttgcgacaagtaggatacttgtggttgacttcttgactgatagaataccttcagatttaattactggtaagaatttgaaatcttattattagtatgtaaatttgtacttttttttttttaagtacaatttccattttatttttctccagagaatagtctgtcttcagtcttgaaggactcagctccctacatcacctttggtaggggtcgtggggcagcacccacaggtctaaatctgggtgggggtgttcggtccttgcaggcttcacaagatcgattcctgactactttgttgtgaattgcacaactcacacagtaatttagcttcacatacatcttgggaagcacataggcgtcgaagatgctcgcttcagaaatgtccctgactgctgtggcctccactgtgttttgaatgacgaatttcttaatggctttatccttgggcacacatcaggcacagttcgtgcagcaaataggctgcacatggccgcagccctttttggcatgaccgttgtcctttcttttctttgtcatcttggaggcacggaccggagagggtattttctacatttttatttttgtctgtctcctctgctgaacgctctactagaaccttctagtgggcactactggatccttttgttcaacattatgcttccaactttcagcatgatacctgacacattgtagatgctcagtaaatatctgtgacctgaataagtaactaaatgttagattaacttttcattgttttctaagctcttattcagtaaatacttgcaattcgttagcatttgcttttagaacttaatcagatttgaaatgtttataaataatctttgtatatttcctaaaatatttagttttcctccttaagatttttttggcattatttgaaattaaatcaagtagttgcttgcttattttgagg

SEQ ID NO: 18099 - DNA, 1050 bp, Homo sapiens
tggaagataatttgctgagctagagtaaatttagctccatccacctctatccaaaacttaaacattaaaatagtaaaatctgagtttagtttattgaactattagaagggtcataaatcactgttagtattattgtccatacccttccagatatgagaactggatcaaaagcatgcaagtaccattatgccaaatatatataaggtaaccagcttgatttaggtctaaaagacagactcgtcttggagtaattgtggttttgatctagaaagcatgtctgtatgcctttatgtcatctcatgtttctccctaacttagcactaatcacactgcatcagatgacacaatatatatgaaagatctgggtcagtagtctcatttcataaataacaaagcatgtataattgttcttatttttgagatgctgaggtgttataatcatgtacacccccaaagacatgtataagtatgtcgattgaaggtttttgttttaaatggactaatttacctctgaattgactatcttctgattctgaaaattgaattcatctcataggtaatgtagatgttgcccagacttctaaaatgtggctattttgtatagtccacatctgattcatacattaaaaaaaaaaaattcatgacctactttgctttcagaaattcttcctctgacatgccagaaacaccccaccccagggcctgtgccctcactgtcccctcagcctggcagcctggaactctcttggcccagatggtcacaaggctccatccagcctttattcagataccaccttggtgagaccacccctcatacatactccctctcctccttctctgattcattttttcttctcagcacttgtagcatcctaaatattttacgtatttatattgtttatagtcaattccttgaggacagggatttatctctgttctgtgcgtggctatatgcccagtctagaatggtgcttattcattctcttgtaagtacttaagaaaaatgtgatgaatgaatggcaattacctacctgttctgtagtttaaatt

SEQ ID NO: 18100 - DNA, 1077 bp, Homo sapiens
tttgtttgttgttttgcttttcgtgttgtttgtagcatttataaaaatggggtgttaaaccaagaccagaaatacatagctgctgaaactctagaaaattgttgaaaaatatttgtctctttaggttccatgtagcagtaaactcatttttagaacagcacaaacctgaagttgtagaaatccatgtttctatgacacctaccatgcttgctatacagactgctatactggacattttaaatgcatgtctaaaggaactaaaatgccataacccatcgcttgaagtggaagatttatctttagaaaatgctattggaaaaccttttgacaaggtactctttttccttttaagcacagtttattatgttgtaattttaaagaatgcaagttattttaatatttgcaatgttgttaataggaatttgctgttatttaagaataaaattggaggtcacttaaaaacatagcttctttggtttactggaaagtaataatttatagtaaagtatgtggattggcatataagcatcactctgacttttgcagttatagtaagtgattatctcttattttaactataatcaagaagaaaataaataactttttttactttgaaatgacaacacttggatgtctacaggtagaagagttttacataagaatgctccataattgtacatgaatttatgatctcttttatggaataaaaaataatttggatgagttttcattactgaggagtgtgaaacttgctctgtcttaaaattacattctgaattgaggaaatggtaagacatcagttccaggaatttttattctaactaattttttattatagattaatattgcagatatataaatgtctactttttcattatagattaatattattacagatacataaacgtctagtattgaattggagatccagaaaatgctgaccttttagaaattcttggcagcctttttgtcatattctggtagaaaaagtttctgtcttttaaactctgagtcaatctctatgtcactggcaataatgcgtggcgattataaaaaaggaaaaaattgacttatttc

SEQ ID NO: 18101 - DNA, 1043 bp, Homo sapiens
gcccggaagaaattaagcatgaagaatttgatgtaaatttgtcatcggatgctgctttcggaatcctgaaagaacccctcactatcatccatccgcttctgggttgcagcgacccctatgctctgacaagggtactacatgaagtggagccaagatacgtggttctttatgacgcagagctaacctttgttcggcagcttgaaatttacagggcgagtaggcctgggaaacctctgaggcaagttataaagaatcacagctttcagttgcacagttctttaggatttaacccagaaactataccagttgcatgttagttttctttaatatccgttacgatgctgcttatgtttatgaaaccttattttgcttcctgatgaatctgggaagttggataggaaggatgtcaagtatcacagcagaacaacaaaccaaggggactgctcttgttctcgttacgtgctgctgtgcgttctctcctttattctttgggtattggtttgcatcgtatggggtactgtatctgaaaaagtctgggaaatgcataatattctaatttctaacaaaagttaatataactgtgactcggctaagtaattttaatcttctaaaatatctttcctataaattttaagaaatgactctaaattacatccatataaaactaaagtgttgggggaattactgtaccaggttttcttgagtttcaagatatatcagatgaaacatctacagaaatatcagatgagaaaatgatgcctcccaaagaagatagtgttctggctttccaattatctgaggggaaataaacagcaaaattaatatcctgaactcagtctgaaccaaaaacggagccaaaagaaaccttcccctagcattttaactaacacagcctttcagagtagagatgaatggaggagctggatcagaaataatgcaggatgaagagattagatgaggctggtaaaataattataggctggtaaattttttgtaccgtgctgttgatcaactttgtagatagcttatgtacaccaagcttc

SEQ ID NO: 18102 - DNA, 1050 bp, Homo sapiens
ttcctcatttctcaccatcctgtgccagggtggctacttctctctgtgaggactcaaatacaagccaatgagtggcccactaagcttttaagatttgattttcctgccttgagataaaaaggagtgtaggtaaatgaaagatcaatgtatggaatatataaaaatacgaaagaaatatatacgtttaaaaatccataaagaaaaaaatctcattctaaacctgattaagttggctttttacgtaagtgtacaaataggatattcacagcatctttgtgcagtttttaaacttttatatttaaacattattaagttggcttttgttcacatgttgagtaatgggtagtaaattttctacctcaggagctgatatagacatcagttctgctagccatatcacatattttaatgtttcatcaacatcagctgtttttttgtttgctacactatttgaactaatagacagtggatcatgtaacacaaaattgtcttcaactttaacaaaattgtcattgttatttttttttgagacagagtctccctctgttgcccaggctggagtgcagtggcgcaatctcggctcactgcaacctcgcctgctgggttcaagcagttctcccacctcagcctcccaagtagctgggattataggtgtgcaccaccagacccggctaatttttgtatttttagtagagacggggtttcaccatgttggccaggctggtctcaaactactgacctcaggtgatccacccaccttggcctcccaaagtgctgagataacaggcgtgagccaccgcacccacccaacaaaattatttttaactgtcgtttctgaactgaacctctcacattggcatcttgatttattggtacttaacagtatatatggattttgaactctacacaagggtataaccagaatgaattgaggggtatcaagaaccagattggttacagtagaactctgtaagatgatgtggagagtaaggaaaaggagaagaaataaaaattagtttaagatggaataaagatttgggctgctaattt

SEQ ID NO: 18103 - DNA, 1031 bp, Homo sapiens
tcatggtgcctcttttgatactttcttaaaattgtgcaagaagaaatcatttttagtagtggtcataaatattatccttttggcagtaagctattactaattcagcctgaagctcggtagacaatatgtctacatgtgtttgagtacatcctggatacagtttcccagctcatgagggactgaaaatagtcttattcatcaacccactaggatgtgaagggttaagtctagatttggtcgcattgaaaccccacaatatagaattaataaatggccttcagtaggaaaacctacactaaagcaaatccgaagaagtggggcagggggaaagaggcattactggtctttccttttgttttgcaagcataatttgattttcctttggctcagaaaactcatttggggaaattctcttttgtgttcagtttaacctagaaaggtcctcttgaaaaaccaacattttaggaaagttcttttttcaggatggagtatattaaaattaagccaggctttgacgtgaattatcacttttctttattattttgttttctattttggtttatagctatttctggttcagttctgaacttcagcacttaatcatccttatcaaccaggcttttggtagcctaaaccgctatgctgttgtttttttaatttaaagatgtataagccaaaatttggatgggagtgagacataactgatttatatgaattttaacagagttgtatttgtgtgtgtttaataaaatatatatttattcagtactttcctcagtattttatgggcaaagtaaaaataacaatgcatagtgaaagggcatatattaccagcagtaataattcaaaatcctgaaaatgtttcattttttttgtttttgttatgcagaataaacaaggcagaaatgctctttgaaccactgcttttgctgtttaattcatttgataacctactttctaagacttgaaactattagttatttttcctttctgcttttcattctgtatcatgtctccttaaggaggaaaac

SEQ ID NO: 18104 - DNA, 1085 bp, Homo sapiens
aacatcttttgtgttttcaggtattctcagctcattcaatgtgagaaaaccaaatctcctaaccttacacccaatgtgcttttttgttttttaaatcagaaagatgtctttcattgttctgcgtcgcttaaaatgcacgcatcatcccatgagcatttatgtgtctaatacatactgagcactttgcagggcttggggatccagaggtgagtgggatgtggccctatctttaaggaacaggagctcacatgccatgctagaagcttccacagaggactgtggtggtgccaggagggggaagggagcagtctcctctttcgggtgagaatactttatagaagagttggtgctggtgctcagtctgcaaagatgggtgggtgatcagaactttttgttatagtctgtgagtctctcttctggttacttcctgccatgtatgccaagtacactagcaccagatatctcacaacagcctatctaggattattgatataataaaatgtagatagaggtgtgacgactctgatgcctaaaagtgagcccaaagaaaaccactttaattttttcaggttttcaaaatcagttcagcatggtgtgtgtgtgtgtgtgtgtgtgtgtgtgtgtgtgtgtgtgtagttctgtatagtcacagcataaaataggaggcaaggagtgacagttgcttggctggagaggaagactgattatagacagttgggtgtgtcccattaaggaatttagattttgcccttagtgatggggagtcactgaagagtccagcagcggggaggtgattggatcactctagttactataccatggatgctggatgcaaggggcaggtctagagacaggcaacccattaggctgttacacgagtccaggtgacagttgatgaggacctgaactagggcactggtggtagagttgtagaagacagaggctggaaatgtttaggaggtactagtcaggactcttggctgcaagttaacagaaacctcactcaaactatcttaagttaaaaggggagctaattggaagattcctagagaaggttgcaaaaggaatgaaatgctgcagaaacc

SEQ ID NO: 18105 - DNA, 1033 bp, Homo sapiens
gccttttctttccttttttgtcctgtttagtttttaatgccagtaattatctgctgacagtcctgccaatgatttttttaaaattttgttacagattatgattagacttgtgatagataggaaaataaaggtgataaagacagattctatttcctttttaagaataactgactcatgggatgaaactttggatatgatttcagatcactcctgtaaactctcacaagagatgtttataaaacacttggaacaatacagattgtactaagaaaatgtgctttgatcaactgtggagatacaaagcaggaaacttaataaatcaagtcctatttgtgaatggaaaggactggaagttcaccttaaaagtaagaattcagcttacatccagacttaaattttgtagtctaaatagcagatgttaacttagtttcatcttttatataaaaataaaatgaattatagacttcatatcttggcatcttgaaatctgactcctgattcctctctcttaatgactattggaacactaggctagacatggaatttgactttggtttttttaccctttaatttttgaagtcagtgtgcttccaactctgtcttccctctgtagtcaggaaaaccaaaccattggtagcttggatatgctataatttttattatgtaaatattagaaaagcacagttgtatttatataaagagtgatattcatacttgagagatggattttttttttttttacaaattaaagcataaatacaattgtattacttttataggccaagcactcttgtcctgccacccttccatatgacaagatattatagtaaactgcatatattttgtgtttttgcatattgcctagattcctttttttaaatttgcagtacagatgtgagccatttttatttatttacttaatttttcactaaagaactttcattaaatttggctctgaatgcaggtcagtatcttagcaagttgtaatttagtagagcatttctaagaactcaaatcgagttacagcatctca

SEQ ID NO: 18106 - DNA, 1062 bp, Homo sapiens
tctccaatttaaatcaaggtactatatttaggtattttgaaaaatacataacagctgtttgctgagaggcactaatgggactggtggtcaattgtagggaagaaacaaaaggagaaaaatagaggagttattttcaaatggccatgagggcagagggtttgtgtgtattattttagtttctctttaaagaaaaataaagtgcaacctgagtctttttaaaaaaaaaaaaagaaattgtggttgaaagagcaagctgctcctttgatagtttgattttcaaagttaaaacttaattttgtagaggagaaaacagcaagtgggctaagcagctagttttgtgacagtgcaagaaccagaatccagactcttgagtcaggaaactgggttctaatcctgactcttaatcacgggcttaacgtcgcctcttcattggtaaagtggagatgataatgatacctttcttccagttgggggtgaaatgacaaaatgtgttgagttatcactcgtacatgtttaatattttgggtagggaaccattttcccccctctcaaggactcaagaaaataattaagggtcatatacagataagaagatatttactttagagtttttgtgttttctagagtaaattcaactcacccaccacatctacgtttagacttacagatattatttattctaattaaacaaatgcaactgaatttccatgtgtttatacttgctttaaaaactgttagctcttcagtgttaaagattggctctttagtttcatttgttctcaaactttctgtgtccagcaaacaatgcagtatgttaaaacatggtattatttctcttgttacatgccttggagtttaataatattcacatagtatgtgtgtctgcctttttccctttcatggtaggtactttagaatgtgcagttttctctatctgggggcatgctgttgcattagctttaaggtgaaaggagaaggtgaagtagagcatgttgagtgatacaaagtcttggagtagagagaccatttgtatatcagctccctttgccaggagtgccctct

SEQ ID NO: 18107 - DNA, 1051 bp, Homo sapiens
ggggaattaagctttattgaggttatacattgctcaagttcatataatttattagtgatagtgctggattttgtccccatatctaactccaaaacatgaactctgaactgataccctatactacactgtctctgttgtggaaaaggatttcaaaattcatctaatataaattcaaaccaaattagtaagagcctcatcagtgggtgaggcaatcacaatctcatacttaagagaatgtagttaaactgttttttagctaatttaggatagcgtgaccagaattgtgagtagatgcaaaagttcatggatgtgcatttggtgatggtttcttaggtatgacatcaaaagtacaagcaaccaaggaaaaaaatagaaaaatttgacttattcaaaattaaattttttttgtctgtcaaagcacattatcaagaaatgaaaagtcaacccacagaatgggagaaaatatttgcaaatctataaggatctggtatccattagacttacatataatgaaagaaaaaactgttctaactcaacaatgaaaacacaagtcaccctatataaaaatgggtatttctgtaaataagatatataaatggccaataaaacatgaaaagaaattcaacatcattagtcattagggaaatgcaaatcaaaaccacaatgagttaccactttacattcacaaggataactataatttaaaaaaaaaaagagagaatgtggagaagttggaaccccaacttttgctggtgggaatgtaaaatggtatagtcactgtggacagcagttgggcattctctcaaatggttacacacagacttaccctatgacccagcaattccactcttatgtgtatacccaagagaatggaaaaaatatatacacacaaaaacgtgtgaactcattccatagcaacattcgtagtagccagaaggtggaaacaatccaaagtccatcatctgatgcatgggtaaacaaaaggtggtaaattcacgcaatgaaatattactcaaccataaaaagcagtaaaatattgataattggacag

SEQ ID NO: 18108 - DNA, 1033 bp, Homo sapiens
atgataaatatatataatttttgccgggcgcagtggctcaagcctgtaatcccagcactttgggaggccgaggcaggcagatcacaaggtcaggagatcgagaccatcctggctaacacggtgaaaccccgtctctactaaaaatacaaaaaattagccgggcgtggtggcgggtgcctgtagtctcagctactccggaggctgaggcaggaaaatggcatgaacccgggaggcggagtttgcagtgagtcaagattgcaccactgcactccatcctgggtgacagagcaagactctgtctcaaaaaaaaaaaaaataaataaatatatacatacatatatatatatatgtatatatatatatataacttttgtcagtttcaaaataaaagcaaatatattaattttttttaaatctaagtttttgacagttatgtgagcagagtatgttcacatcaagtaatatatagatgaaaggaccgtaacattcttactttaatgatttttttcagacatgttgttcattttttaggtcttcttaatgcagtgtttaagtcatacaaaatgcaggtgttggcatcaaaattaatcaatacaaagtattgtttagatattatgaaataaatgaattcagatttttttggtgattgtgttattattcctagacatttgaatttcacttattagaattattttctgttgagggaaaaatggagatatttcagtttgggattagtgtctaaaagggtaatatataatagtttataaatacactttacaaggaaaatgaagttgacgtttaatgattccaggatcttcccttgttttacattcatattcatgttactgatgatagtggagcggcaggatattcccactattggagcacataggagagatacttagtaaagagaagctgggattttcctttactcttgaatgtgaccaaaatagtacctcaaagtaaagcagccatatttaggcaattaacttttcctaacaagtgaggccttaatgaaggaaaatggatatac

SEQ ID NO: 18109 - DNA, 1048 bp, Homo sapiens
atctaggggcccaagttacttgctgagaaagctatgaggatagtagggtagtgtaatcttgaggaaaatgaaaatgctttgtggaacagaggtgcaggagattcaaagtcagtaagagatgaaggaaacattttagagtttatatgagggcatggcatgacttcatactggatttggtagtcatcttggctccttaacttctcaagctttgcttttgttattctctacctttgccgtaactcccaagatagtaaaataggacactcagtcagattaggtaaacaaaggcaaatgcttaattcccactttaagagagcgttgtgtaagccaagaagtaggatctcctctctccatttgagttatatggtggactagtgtttcacaaacttgagtaatatacagaccttttaaaaacagtttgtagatgacttagttgggcttttcagtgtatggggggcaggggaggttttttttgtttgtttttttttccctgagacaagttctcacttcgtcgacaaggctaggatacagtggccccatttcagctcactgcagcctcgtcctcctgggctcaagctatcctcccacctcagcctcccaagtagctgggaccagaggtgcacgccaccacacttgtctaattcttttgtagagatggggtttcaccatgttgcccaggctggccttgaactcccgaattcaagaaatccacccaccttagcctcccaaagtgcgggaattacaggcatgagccaccacaccagccagatgacttaatttttgttaatatgacattgttggattatgtacaattataaatgaagtgtaaactccttgtacttagtagcacttatatgacaaaactgaaacactttgcatattaattatagaaatccacaatgctaatgaaattaaaataaatattaacttactgtgacatgatgcatttttacataaatgtgattgctgcttgacacctgacagtggtcctcactgctctagcactggtttatgccatcatgactcatagatcccattccttttctct

SEQ ID NO: 18110 - DNA, 1046 bp, Homo sapiens
gaattttccttaaaaaaaatcatggcaatgttaactctcccagccaactagtggcactaagaaaaactgctgcttgggtctgaattgccaaaggaagaaagctgcaattgcagtacatttccctattacaaagagcatcagctttgccaggaagaggcacatgcaacacaaagcacaccacaaaagaactttggtggtgaaatgactctgtcttcattcacatatgctggtagcatgtttattcagtgtgtgcctctgctgagataagagccgcttccttcagatgccctagactgccgtttgtgtagctggagaacttaatgagtaattgatgtgcttgtctggtcaatataaagtatttccatagcctgtggctgtgtttatagagagcgggagagagaccacaggcagcaatttgtcttcttaggtatcagcaaagtcttctcttttaacaactagaagatttatttttaactgcttgactcagtgtttgtcagatgattcggaccatcaaactgcagactgaagtccccagcgcgggggaagctggaatggcaagggaaagggggctggctgggaaaaggggtgggattttagaatcgtgcctgtgtggctctgcctcccgatgtgggagagagttaagggcttccagcggcatgagtgtatttgcaggtcaagctgggaactaaagggtaatggctgccttcagctgcttaaagacataattggccagtgattggggtattgtggggagcaaccagggacccagggaccagagtgttctgcgcaccgcacttcgctcttctgcaaattaagcttttctcctgcttgatgctgcctgtcttcagaagcctctcaccatgatcgatagctccaagaagcagcaacagggcttcccagagattttaactgctggggattttgaaccattaaaagaaaaggaatgccttgaggggagcaaccagaaaagtctcaaggaaggtcagtctgtctgtggacaggggcaaaactgccaaattcatattctggtcagccagctgagcgtg

SEQ ID NO: 18111 - DNA, 1141 bp, Homo sapiens
tcataggaaacaatgttttcctccttcacattaagcttggtattccaaagccaacataagtcaagtcaaaaatcatttctttctttaggcgttgggaaggaggactatccccacactcagggcgatttctcatttgatgaagacagcagtgacgctttgtctccggaccagcctgcgagtcaggagtcacaggggtcagccgcgtccccaagtgagccaaaagttagtgaatcgccatctcctgtgactacaaacactccagcgcaggtattatctttctggttttgacccctaaagaaagaaaatgccttgtttttttttaatatattaaggtaatacactttgaccagaagaaaattctgaattgaatttaaattgatttattaagcaaaaagcaggcacttaactgccctccaggaaggtaataaagatttccagccactatgtcttcatcacaagtaggtaataccatttcctgaaatcttggagagttgaatgttttgatcattgatggaactgaatttgtttgttcaacaaatacacattgagcacctattatgtttcaaatttattgggaactgagaatctagtgcatacaaaggaatgtaagaaatattttggtaattgcattggaaatttacatgtcttttaatgggtgtccatgtttcctttggctttataataattcttgtgctgtacataatttttctctccttatagtgcttttgccttactgaaattttaatagtgttattttaaagtcaaaactattgaactacttaatgggagtgatcaagtcagcagaaaatgttcttgataagcctggcatcatagaatttttgagttagaaaggaatttagcaattatctgctttaacccttatacaagaggcagtctgggttcacagaagtatggaagtttggggattaaaaatgcccattttcttacagcatttcttctcattcatgaccattgatttgttaggagctatgtctttcagcattattttcttcattgcatttatcaccatgatctgaaatatgtttatttgtttgttgtctgtatgcctgcagctaaaatgtgagcctatgagagggactttgactgttagcagataagagctactttggagagggaggga

SEQ ID NO: 18112 - DNA, 1070 bp, Homo sapiens
tgtagtcccagctgtttggaaggctcaggtgggaggatcccttgagcccaggaggtcaaggctgcagtcagctatgattgcaccactgcactctaacctatgtgacagagcaagacccctcaaaaaaaaaaaaaaaaaagaagaagaaattgtggatctagacaatgatcatcaacaacagctgctaacattgcaaagaggaacaaccagatagtgtgtgcctttgaatggaagtacaaaaccaccaataggaagtactcatacaaaaaaaaaaaaatcaaacatcaatctaagttatctcctaggcctaactaccaatttctaagaaatatagcgggaagaggagcacatgacacttctatggagatgctataaccaaaattcagaccacaggaaactacagaacaaacaagccagtttcttcaacaaataaattgcaaaggaagaaaaagacaagggaagagaacctacaggttaggagagatacaaaagcaatcccaaccgatggcaacattcgaactttatttggatcctgattttaactagctaaagaaaccctttagctgggcgcggtggctcacacctgtaatcccagcactttgggaggccaagccgggtggatcacaaggtcaggagttcaagaccagcctggccaagatggtgaaaccccgtctctactaaaaatacaaaaattagccaggtgcagtggcgtgcacctgtaatctcagctattcaggaggctgaggcaggagaatctctgaaacccaggagtcagaggttgcagcgagctgatatcatgccaccgcactctagcctgggcaacagagcaagactccgtctcaaaaaaaaaaaaaagaaacgctttatgagataaccagagaaatctgaatactaactgggtatttgctgatagtaaaagcattactgttattaaatagttttaggaggagtgaaggtggccaaaaaaaattttttggagttatacattgaaatgtttgtaaaagaaatgactgacgtctgaaatttgcttcagagtaatctgggatgagggaaggggaagagggcgtgga

SEQ ID NO: 18113 - DNA, 1046 bp, Homo sapiens
cgccggccgcgggcgcgggggacgtcagcgctgccagcgtggaaggagctgcggggcgcgggaggaggaagtagagcccgggaccgccaggccaccaccggccgcctcagccatggacgcgtccctggagaaggtccgtgccgggagggggcgatggggacggtgctgcggcccggggctcccgcttccgaggcaactgtttcccagtcgcgagctgccattgtgacccggacagggggacgcgggctgacaggccctgcctgaggaggcctcgccgggagggcggctggggcccgggcgcgtcacggggccgggtgtctcttgggtccccgtgggccgaagaggctgggcggggttcggtgggggccgcgacgggcccggagcccaggactgggaccgcggggccgaccttgggccctgccgaggttccgcgagtggccggcctgagctcggctggccctttcggaggaccgggagctctccgttggcggccccagatgctcccggaaagaagccgcagttatttcagagccagctgcaaacctgtaggtttttcttggtctccgagttaggaatgaaaattgccaaagcagtggttttccaacttcagcctgagtgggaatcacctggggcctttggtaaaatgcggaggttcagtcccggggtcagaacctctgggggcgggaccgggaactgcgtgtttaaccgccaccgccccgctcccactccgccccacgcaggtgattctgatgctgagcctgcgatcaccgggcgagaacctctgagttccagaaaggggtgggtgttgcgtagattgcgaattgagttttggggatcgcagctgctccacaacttcctggctcccccattccagtggcgaggagggatccccgagtcaactcgaaatccactggtaacagagcctacctctggtttccccttgggggaacggcagcgtggtgtaccaggctgactgctctaccatgtgaaacggattctcattgtcccagtgttagggcttgtaaatggaaaccagtttgggtttc

SEQ ID NO: 18114 - DNA, 1057 bp, Homo sapiens
aactgcatgtacactccagagtcagagattcacctggggattgtgaatctgcatttccctcctgcctttcagtttaagcatcttgtcattacacgggattttagtgtttataaatgcatgttcacacaatgtggcttctaaactattttgtgtgtatatatatgtattatatatgtatatagatatgtgtgtgtgtgtgtgtgtgtgtgtgtgtgtgtgtgtgtatttgttgttgtcgagacaggttctctgttgaccaggctggagtgcagtggtgtgatcatggctcaccaccagagcctcaacctcccaggctcaagtgatcatcccacctaaacctcccaagtagttgggactacaggcgtgcaccaccacacctggctgatttttgtactttttgcagatatggggttttgtcatattgcctaagctgtattttgtctatttttttttttttttttggtgacaggttgttgctctgtcacccaggcagtggcacaatcttgtctcactgtagccttgacctcctgggctcaagcaatcctcttgcctcagcctcctgagtagctgagaccagaggcatgcactaccatgcccggcttactttttttgtattttttgtagagacgaggttttgccatgttgcccaggctcatctcaaactcccggactcaactgatcctccttccttgacctctcaaaagtgctgggattacaggcatgagccaccacacctggcgtattttatctattcttaacagaaatattcattataattctattgaaagaaatagctgtgttgcatttagagaacagtatgttgatatccactctggcatgccttcctaagggattttcaggttaatatgacaattggagaattgagccaactttagacccgtggtctaaagagaagtcaaaattagtaggagtctgaatccttgccttcaagaagcttgtaatctaattggagagcacatttatactggaaagcacatctataaaacaattcacagtaaagggtgtaaggaatcatgaggataaatggcagccgcaa

SEQ ID NO: 18115 - DNA, 1102 bp, Homo sapiens
ctgtaacatattgctagatacagtgagcaataggaaaaggtaaacacagctcttcctttaagcagcacacttagaagagtaagaggggaacaaaagagctataacttatatatgatattatatgtattatatgtaatataatatataatatataatttattgttataacacaactcatactacatagagattgaagtcaacaagaattttctccctaaacataactacagagattaagaatagagaaaggaaaaggaaaggaatgcgtatgttttaattctgcaaaaagttcgggcacagtggctcagcctgtaatcccagcagaaggataacttgagctcaggagtttgagatcagcctgtgcagcataatgagaccttgtatctacaaaaaaattttgaaaattagccaggcatggtggcgagcacttgtattcccaggtactcaggaggctgaggtgggaggatcacttgatccctggaggtcaaggctgcagtgagccacgatcaaaccactgtaccccagcctgtgtaacagagcgactgcctcaaaaataatatttgtcaaaatagcttgtctttgtatcactgccacattgcttgtttgaaacgaagctgactcactttgttatcataagtgatcttaccaaagaccaagttgtccagttgccttggagtgtaggtcatgcgttgccggtaccctggggctgtgtacaatggccaggctgaggggaccttgtggttacccccatgggacttgtaacttgtcaagtgggaaggtggtaccaagtgaagaagggtagggtccttggttttggcctcacctggttcttcccagaatgaatggtgaaaaaattataattctgcagaaaaatttaaattctattttgtttactttttggatgggagataggtgtacacatggcactaaaattcaaaaggaacttaaggaggccaggcacggtggctcacacctgcaatcccagcactttgggaagccaaggcgggcagatcacttgaggtcaagagttcgagactagcatggccaacatggtgaaacccccccgtctctactaaaaatacaaaaattagctgggcatggt

SEQ ID NO: 18116 - DNA, 1120 bp, Homo sapiens
aggttgacttatacaatccttaactagaaataagagcatattaatatgtatctcttaacagatatgaaaatgggtgtgcttatttccacgaagaggaaagagaaggacttgcaaagatatgtaggcttgccattcattctcgatatgaagacttcgtagtggatggcttcaatgtgttatataacaagaagcctgtcatatatcttagtgctgctgctagacctggcctgggccaatacctttgtaatcaggtaatgtggtatcaggtggctattttaaagaaataatgtcttattttgttctgaaagttttaaagttgacccgtttgtctagttgctgttcttgctgagtgaaaagaaagatggtcttatatgcttttgtcatatttgtaaaaattactgaatttagaaataaggaatatgggatagattacccaggggcatccacagtcaacattttctcttttttcccagactttaatcgaagggggtgtgtttgtgtttatatggttgtatctggctcttttcacttattgttaaaacaggaatatatcattttaataataatttttcaaagtatagtttatttttaatgtcttcatggtattccttcaagtgaatatatagtaattaactgttgcccttttggacaactaagagtgtttgcattctcttgctttctgtgaccattttcaggtaatgttctttgtgtagtgctgttaaggacttctctgtgcataaagctcttcctgtattttatttagggttatggtcctcagatggattttcagagtcagtctagaattgctggatcaaagagcatgactttttttttttttttttttttttttttttttgagacagagtcttgctctgtcgcccaggccggagtgcagtggcgtgatctcggctcactgcaagctccgcctcccggattcatgccattctcctgcctcagcctcccaagtagctgggactacaggtgcccgccaccacgcccagataatttttttgtattttttttagtagagatggggtttcaccgtgttagccaggatggtgtcgatctcctggcctcgtgatctgcccacctcagcctcccaaagtgctgggattacagg

SEQ ID NO: 18117 - DNA, 1108 bp, Homo sapiens
gagtacctgggactataggcgcccaccactacacccggctaattttgtttttgtatttttagtagagacgggatttcaccgtgttagccaggatggtctccatctcctgaccttgtgatccacccgcctgggcctcccagagtgctgggattacagatgtgagccactgtgcccagcccacctatatgatttttataaagggcatatctaaatcaaaataatccaggaagtgacaataaaataaaaaggtggaaaagtttatcttggacaaatgctgacaaaatgaaagtaccatagccatattagtgtgggataaaatagacttcatattgatgaaagatgtaatctcctaaaagaaataacagttatacctgctgggcacggtggctcatgcttataatcccagcactttggaaggccgaggcaggtggatcacgaggtcaggagttcgagaccagcctggccaacgtagtgaaaccccgtctctactaaaaatacaaaaaaattagccgggcgtggtggccaccgcctgtaatcccacctacttgggaggctgaggcaaggagaattgcttgaacctgggaggtggaggttgcagagttgagatcatgccactgcactctagcctgggcgacagtgtgagactccgtctcaaaaaaaaaaaaaaacagttatgaatgcttgtgaacataactttaaaatatataaaggaaagctaaaggaaaagtctgatgtaacacaagtatatattgacaaaccacaatcttggtgggagatttgaatatatttctcatgagtcagcagatcaagtagatagaaaataagtatataaaagaattcaatgacacaattagatacatgtaatagagattacatactcttcaaagcttgtaataagtcaactcacaaacactgattttaagtccttccacaaagaaaatctcaataaaatagggatataataagtcacttccctcctagggcgataatgtgtataaaagtgtttaaggtataaagccttagaaaacatttgttccttttaatgccctgatgtgttttatcctaggaacggcagcagtaggacacacagacaagattgggagattga

SEQ ID NO: 18118 - DNA, 1078 bp, Homo sapiens
cacaatcttggctcactgcaacctccgcctcccgggctcaagcgattcccctgcctcccgggtagctgggaccataggcacttgccaccacacccagctattttttgtatttttggtagagacgggggtttcaccgtgttggccaggctgttctcaaactcctgacctcaagtgatctgcccgccttggcctcccaagtagctggaactacagccgtgcaccactatgccgggctaatttttgtattttggtttcgccatgttgccccaggctggtgattttttttttttttttaagcgttggcctgggctagagtgcagtggcatgatcatagtttactggagcctcaacctcctggcctcaagcagtcctcccacctcagcctcccccatagctaggactgcaggtgcatgccaccacgcctggctgttcttaaattttctgtagagatggagtcttcctatgttgcctaggctaatatgcctctgccacctgaggtgctgggattgcggcatgaggcaccgcacctggctctgggtgtttggtgaaggaaagtaatttggaagcagagcaggaatagaatcgagagagcacgggaacgggcaggtgatctggattgagatggtttagggctggttagcataattgcttaaggacacctgctcaggaggctggggtttggtcttggcccagtcatttgctactggttgattctgggctagttaagtaattgagtctcagtgttcatgtctctgaagtggaattaaacgagacaacataggaagtgtacttagcctggaggccagcacagaataagtatgtaatggatgttattgctgcagctggcaacagggaatcattgagaagtgcgctggactgtttctttggtaattaacaagatctccctctctgtctctctcctctccttttctctccctttcccttcctccatcttctccctcccttctgtcttagtttttgtttgtttgttttgagatggagtcttgttcgtcgcccagactagagaacagtggcacaatctctgctcactgcaacctccgcctcctgggttcaagcg

SEQ ID NO: 18119 - DNA, 1069 bp, Homo sapiens
gggttgttcgttgttttttttcccatgatttctaggagatttttatatatttgtctgtgacatgaatggacagtattgggagtttgtcatttgtttccagctttgtctgatgtatattttattgtacagagttactgatttgttttgttttgagtcagagtcttgccctatggcccaggctggagtgcaggtgcaggatctcggctaactgcaacctccaccctcccaggttcaagctattctcctgcctcagcctcccaagtagctgggattacaggcgcccactgccacgcctggctaatttttgtatttttagcggagatggggtttcaccatgttggccaggctggtatttgatttttttgtagtcagatttcttagtcatagttagaagggccttgtgcactccaaggtttataaagcaattagccaagtgttttcttgtagtatttttgttttttctttcttttctatttttatttttgtactaaacgtgcattgtttttgttaatacaatttggccaaatgctgaatagtttagtgttaaaaatcggatgaggtagaagcccagttcaccattatagaatcaataaagttctaggtcaccaaagttttatgtatttatgttttgagacaaggtctctctctgtcgcccctgctggagtgcagtggcacgatcacttcagcctccccagtagctgggactacagtcatgtgccaccatgactcactaatttgtgtattctttgtaaagaccgggtttctccatgttgcctaggctccaaagctttattttaaagacttgaaaatgttacaattttgtgcaagtttaatagttatatttagaacgtttgacagtcttctccaagaacaagagtttctcagcaccatcagctgtttgattgctctcatggtccttcttctatacgtccctcaaacgaaactactcacttttaactgaggacaggcactttgtataagaataaccttgaaaagtgtgcaggacctaattggaagtaactaaaaattaaatacatttcctaaaggttactttgtttcatatgagtac

SEQ ID NO: 18120 - DNA, 1033 bp, Homo sapiens
tagtgcctgattttatgtttttgtgcacccaaaagatgcagaaggcaggacagaccttccacctgcattatgtgtgtattcgtgtcggaactggcaaaaatggtctttttgttccactttgcccttggctgcccaagaaggctcaagtgtctggggcagaacccacaggaggtgtccagtgtgtgctaaagaatcactgggccggccgggcatggtggctcacgcctgtaaccccagcactttgggagaccgaggcaggtggatcacgaggtcaggagatcgagaccatcccagccagtatggtgaaaccttgccactactaaaaatacaaaaattagccaggtgtggtggcacgcacctgtaatctcagctacttgggaggctgaggcaggagaatcgcttgaacctgggaggcaaaggttgcagtgagccgagatcgcgccactgcactccagcctggcaacagagctagactccgtctaaaaataaataataaaaagaaaagaaatcactgggcctgagaaagggaagcagagacagcagtggggtagggagtcagagtggctgtatccccatcgctcagcccagccactcaggagaggcagggggactggttgccagcagagcacatctgagggtttttgttttttgttttttttttggagacagagtcttgctctgaaggctggagtatagaggcttgatcttggctcactgcaggctcctcctcctgggttgcaaaggagtgtcctgtctcagcctcacgagtagctgggattacaggcatctgccaccacgcctagctgatttttgtgtttttagtagagatgaagtttcaccatgttggccaggctggtctcgaactcctgacctcaggtgatcagcccacctcagcctcccaaagtgctgggattacaggcgtgagccaccgcgctttgccccaggagtcttcacagtgagaacagctctcctccactgacccctcaaccctgggagatgcttccaggcccctgctgtactttgggagcctagg

SEQ ID NO: 18121 - DNA, 1091 bp, Homo sapiens
ccgctctgagtccaggtcctcctggaggtctgagatgtggccctccagctcccggatcttcttcagggcattgttcttctgagcgatttcatcgtcaagccttccagggagagacccagcagaatgaacccccaggtcccttggtttcctctcttacaatgtggccaaaaacttttctgggaccagacagttatgttgcagagacatcaaacaccttctatccatgtccccaggtctgcttcttgacatgccagactatatgagattaacataggatgtgagtgccaaggtctgacatcaaaacaggttgtacatgtgcatgggtgtgtgtacgtgtgtatgcacgtgtgtgcatgtgtgtgcaagaatgcaaagcattgaccccagactggcaaggtacctggtcacagtagggactgtgtagatgctttctgaatgttggacagttcttcttccctggcaactgtctgttctttctgcatttgctcagtgactgagtacccgccccatgcacagcatttggccagccactgcttgcgggggatattcagactggggctctgcatctggtggaggtggtgaccagagatcaaggtgggctgcaagaagccctgttaaatggcagaatgctgcaggagaggcaagcactttgattttactgtacttgtgaaagggcagcaacaagagagaaagtgaaatagttgggttggggtgagactgcagagggtggatgggctctgagggtgaggctaaggaaactggattttccctagtaagccagtgaagttaggtttttgttttgttgttattattgttttgagacagggtcttgctctgttgcccaggctggagtgcagtggcatgatcatagctcactttagcctcaacctcctgggctcaagtgatcctcccatctcagcctcctgagtagctgggactacaggcacacaccaccatgcctggctcattttttaactttttgtagggacagggtcttgctatgttgcccatgttggtctcaaactgctggcctcaagcaatccccccacctcggcttcccaaagtgctgagattacaggcgtgagccactg

SEQ ID NO: 18122 - DNA, 1090 bp, Homo sapiens
gatttcacagaaacatctggatttctggcttcccttgaaaaatcagaagttctgctagccccaggcccacatttatacatggtagcggtccgctgaggctgtccgtttctgagttgctccagtttgccgcagtccccacccctccctgttgttgctttaattttaaggccaaatgtttgttgcctttgttttattttatattatttttttgagacgaagtctcgctctgtcacccaggctggagtgcagtagtggaatctcggctcactgcaacctctgcctcccgggttccagtgattctgctgcctcagcttcccgagtagctgggattacaggcccgcaccaccacactcggcttatttttgtatttttagtagagatggggtttctccatattggccaggctggtcttgaattcctgaactcaagtggatcacttgagttcctcagcctcccaaagtgctgggattacaggcatgagccaccgtgcctggcctgttgcctttttaaaattgtgcttcctcacacctggtctgcttcttgcatggatggaacccactttggcacctgttggtatctgagttggcatctcctgctttgcaggccaaccttgaagttagcatctgattggtatgttggcttcagattttcatggcgaagtaaggcctagctttgatgatcagctcttagtgtggtcagtacaactctagctcgtgaaaacttgcccaaacattttgccaaaattaattaatggccagacatcctgaggcaagcttccccccgcttagcaagaaaactgggatagggcagcatccctgtgggtggagtggtgctggggacctgcacttacctcttagaggctgaatggttgaacggggcctttgaggaagctgtattttgcgggtggggacatggagcacagttgctcagtgtcggccccgttgacatgtaggccacatcattctttgtggcctggttgctgttctgtgcagcgtagtcttagccccaaacctggcctctaccccctagtagatgctggtagcacctcctcttgttgtgacaaccgaaaatgcctctagatgtttccata

SEQ ID NO: 18123 - DNA, 1026 bp, Homo sapiens
ccctcttggtgtctatcaaggtcattcccagttcctggtttcttgctgtgataagcagtgctgcactgaaggcacatgtatgcaaatatatgtaaatgattcagcagaataaattttcccacaggaaattgctaggttgacagtatgtgcattttgaaatttgatagttaattgtcaggttactgcagcagtttatactcccactaatgggcccaccagcacttattaagcacctgttgttttcctgccatatcagaaaaattgagcaagctgggaagtgatcaggcccatgttgcttggctgtgtgtgagagggctttgcccagttaagttaaaccttactttccagaggtcaggagatcaaagcagaagtgtgctttggttttgttcagttttttaaaagatgtgtttaaattttaaacatctttggacttattttaaaaattgcttttaaatcaataatttaacaatgtgtaaaaacattactgatagtctcaccatgctaatgtcactctgatttttacacctaaactaatttaattgcagagttttctgatcacaagtgacatgtgttccatatgacagaacaaacaatacaaagatatttaaataaagcctgaacatggtactgatattagtttgttcatgctgctatgaaaaaatacctgagactgcgtagtttataaaggaaagaggtttaattgactcacagttctgcatggctggggaggcctcaggaaacttaaaatgatggtggaaaggaaagcaaacatgtccttcttcacatggtggcaggagacagaagtgcagagtaaagaggagaaaagccggtataaaaccatcagatcttctgaggactcactatcaggagaacagcatgggggaaccgctcccatgatctaatcacctccagtgaggtccctccaccaacacgtggggattacaattaagattacaattcaagatgagatttgtgcggggacacagagccgtgccatatcattctgcccctggcccctcccaaatc

SEQ ID NO: 18124 - DNA, 1033 bp, Homo sapiens
tggccttacagggaaaaaccccagaccggggttctgttcctcattctattccggggatgcccaggatacaggccttcagtcagacccagatggtgggtgggaatctggacatccatgtgccagccactaggacatcagcagaggacctcgtgactccggtcggaggctgtttgggtggtccaggtgatgggagaaattgtctcgtgggaggcagatagagcttgggcctctgtgactgagcattgtaaggaaatggcccatgtccatgacccagttgaaggtttttggcaggcaaaggtggggtccctgtttattacagttcttcatggagacagaactagtaggatggatggatggatggatagatgatagatagatggatgatagattgatagatgataggtagatgatagacggatagttggtggatgtatacatggtaggtagatggatagatgatagatagatggatgattgatagatgatggatggatggatggatggaggatgagaggggatctactagggaaactggatcatgtgattatggaggctgagaagtcccaccctaggtcatctgcaacctggagaacccaggaagctggtagcatggctcaggcctagtccaaaagtctcagacccagggaagctgatggtggaattctcagtccatagtcaaaggcctgagaacctggagtcattgggtaagtcccagaggccagaaatcctggagttctgatgttcaagggtgggagaggatgacatcctggctgcagaagagagagtgcctgcatttgccattactctgactttttgttgtgtccggaccctctgctgattgggcggtgccacccacatggggcgaggatggatcttccttagtcagtccactcattcaaatgccagtctcgtctggaaacatcctcacagacacacccagaaataacactttaacagcaatctgggtatcccttaacccagtcaacttgacccctaacatcacccatctcatctggattccttcagcctcacc

SEQ ID NO: 18125 - DNA, 1034 bp, Homo sapiens
ggctcactgcaacctccatctcctaggctggagtgatcctcccacctcagcttccctagtagctgggactacaggcacgtgccaccacacctggctaattttttttttttttttttgtagagatgatatctcgccatgttgcccaggctgttctcaagctcctgagctcaagcagtccacctaccttggtctcccaaagtgctggtattacaggcgtgagccactgtgcctgactggagcctccatttttcacccagagcattttctgagaattcagtgagatatatgatatgataagctgtgccctagccctgagtacatgctgggcaggttttaattgtacaagttttatttattcatctgtacactttgatcttgccagggaggatgtggtgagaactgggtcttggggcttgaaagcgggccacctgagaagggtctggctctgtgagtaccttggtgtttagagatcctcagcgtggagccaggggatcatttacttgggacattggtagacggatcgcttgctttattcccagaggcataagccagatctggcacctgtaacccctgtgaacctggagagagtgagaaggaaaaccctgtcctaggctggaatttcctggtgtggccccttacactcagatcccttttgttaaccagagaaaggaatgcagctcgtgcagctctgggctgctgggtatcctaggctcggggatcaggtgatggacgccagggctgggggctctgcatggcttcctggatccttttaccacctctcttcacccatgagtgactccttctcaaaagtcaggtgtggctgggcatggtggctcatgcctgtaattgcagtacgttgggaggctgaggcgggaggctcacctgagttcatgagttcgagaccagcctggccaacatggtgaatccctgtctctgctaaaaatacaaaaattagccgggtgtggtggcgctcacctgtaatccagctacaggggggctgaagcatgagaattgcttgaattgtttggatttaa

SEQ ID NO: 18126 - DNA, 1050 bp, Homo sapiens
tggggagtcagaaaggaagttgcctctctcctacctggctctctgctgctctgtgactcaggggctacacatcccttctcttttcctccctacctctttacctcgtgttccctatgcaattcctttgggtgacttgctggtgatgagatatagctagagcaattagtgcacaaccccaaggcagaggcctcttttatgagcagtttgggtcacctgcacagccagatcaccactgtggacttgtttttccatctatgaaattgaagtgatagtgtctagctcatctggctcaggagaaagttgcagtgccaacactgaagctctcttccctgcccccacgtgtcacaagtcattccaggccctctctttgctcctttgcaggttgctcatcaagttcgtgaatgacacgaaggccccagactggcagggctacttctacaccgtgctgctgtttgtcactgcctgcctgcagaccctcgtgctgcaccagtacttccacatctgcttcgtcagtggcatgaggatcaagaccgctgtcattggggctgtctatcggaaggtaggggacgctgtgccattggcatgtggcccgacttccacatcccctcctgcagccctgggttactctggggccagcgtggggatttccagcccagcttctggagcagtaggatgagggtagcttccgtgaccttaggtggcagggacagcacgcatcaggcattgtacgttaggaaagctgatttcaagggtgggcgtgtagatgtctttgtgtatcagctgtgagtaattgagtttcttagatggatcagtggcccttgttgtggggaaatccaagtttggatcctcattctgctgttaacattctgtgtttcagcttgttgtcactctttttttttcgtttttttgagaccaggtctcactctctcccccagactggagtgcagtggcatgatattggctcactgcaacttctgcctcctgagttcaagcgattcttctgcctcagcctcctgagtagcggggactacaggcgcctgccaccacgac

SEQ ID NO: 18127 - DNA, 1072 bp, Homo sapiens
agaacacgaaccagctctggcttcccgtgggaccgggctctcgcttgtgtgaccacgttaatagattccttggaagaatgatctaaggaatttggaccaaatcttccaacaagaaataaaaacagctgccatctgttgagttttactgtgcttgggccctgtgcaaataaacaccctacataagtgccaacagcccttaaaagcctatcatgacttccattttatagatgagaaaataggggcttgcctggagaggtgaaataactcaaccagggtcccacagcggaaatatggcaaagtgtatggtttttatttttaagctgtatgaccttccaggaagtaacaatgaaatggcagtgctgagaccctgaaaatacatgggccgatggccagatggcagggctatttgggtaaagtgggagagacagctcccttgaatggtgagagggaggagtcaggtggccccctggatggaagatggtttcaggcagaggaaacgtcaggggcaaaggcctggcttggggattgtgcttggtgcttttgaggaatactaagaatgcccctctaggacatctctgagaaagttgatgggagaggccggctctttgggctcccggtcgttgatttatccagttcattcccagagtgtttagtgagcacctgccatgtgccagatactgccccaggtttttccacgagctccagcagctggtcagttgtggccacctggggagggcccaagcgcgtctccagggcctgtcactgctcctaggatgatgactctcactcggggcacagcagtcagcactgggcgttctgcttgcaggtggccttgtgcacatttgccgtctacgtgaccattgacgagaacaacatcctggatgcccagacagccttcgtgtctttggccttgttcaacatcctccggtttcccctgaacattctccccatggtcatcagcagcatcgtgcaggtacagggggaagctggggcgacttccgagagggggccttggggttctaggccacgaaagcatggaagtgcccccgagcgcagcctctagatcacactc

SEQ ID NO: 18128 - DNA, 1050 bp, Homo sapiens
acctccacttgctcttttgaaatacatctattaccttatccagcctaatgatagttacctaaaaaattctttgttccgtaggaagtctctgacaagctgttattcatttccttgacgttaaaagaatctgggggcaacatttatattttatcagaaaaactttttaaaagtttacctatcatgttcatattgagaacaatgtctgtggcgggcatggtggctcacgcctgtaatcccagcactttgggaggtagaggtgggtggatcatgaggtcaggagttagagaccagcctggccaacatggtgaaaccacatctctactaaaaatacaaaaattagctgggtgtggtggcgggtgtctgtaatcccagctactcaggaggctgaggcaggagagtcgcttgaacctgggaggcaggggttgcagtgagctgagatcatgccattgcactccagcctgggcgacagagtgagactccatctcaaaaaaaaaagaacaatgtctatacaaatcagttgtacaattattttaaaagaatggtgagcatgaacgtcacgttaattctggcagacaaaaatgaacaactatggtccattgagccattatctgttacacagagatgacagctttacagaaggtatctctgacctactgagggatgatcatgtcctctcagtttctgtgccttctaccactagttcactttctatatcagcagctgtgtcactcttcttgtttatgttcataaatgtgtgttgaacacctactatgtgctctgagccctgggatacagcagtgaacaattagagcctgtcctcattgagtggatggtgcagtgggtgtgggagacagaatacactcaagcatgcgagccccaagagggctggggacaggcagtgccctgaaggagaaggcagtgcgggaggggacagagggacacagggctgagagggtgctctgtatcgaccagagatccacaggatgcaagggggtcatttggggaataacattccaggaagggcaaccccccagtgctgaggcctgggag

SEQ ID NO: 18129 - DNA, 1050 bp, Homo sapiens
acctcgttggcttgcagcacgacgctggccctggcgccctcccgcactgctcgccggctcccggccaccctggtccccaggccccgtacctctccgccaacgcctcgtcatggctgccccacttgccagcccagctggagggcacttgggcctgccctgcctgtgccctgcggctgcttgcagccacggaacagctcaccgtgctgctgggcctgaggcccaaccctgggctgcggctgcctgggcgctatgaggtccgggcagaggtgggcaatggcgtgtccaggcacaacctgtcctgcagctttgacgtggtctccccagtggctgggctgcgggtcatctaccctgccccccgcgacggccgcctctacgtgcccaccaacggctcagcctcggtgctccaggtggactctggtgccagcgccacggccacggctcgctggcctgggggcagtgtcagcgcccgctttgagaatgcctgccctgccctggtggccaccttcgtgcccagctgcccctgggagaccaatgataccctgttctcagtggtagcactgccgtggctcggtgagggggagcacgtgatggacgttgtggtggaaaacagcgccagccgggccaacctcagcctgcgggtgacggcggaggagcccatctgtggcctccgcgccacgcccagccccgaggcccgtgtactgcagggagtcccagtggtgagtatggccgaggctccaccaccagcccccaggcaggtgcctgcagacagggtgctcacacagggcgtgaggcctggcttcccagtgagggcggcagcccagttactggggacgtcggccccgggcaggtcctgctggctggctcctcaggctacctggtgggctttaaattcctggaaagtcacggctctgacagcggctccgctaactcattccaccgtctcatttcacgaaatgaatttaaaactccgctccctgacctcacacgagtccccgtgagtctctcacgccctctgctgtgttctcgcctggctaaagcaagtggcttttg

SEQ ID NO: 18130 - DNA, 1069 bp, Homo sapiens
ctctctggctgcccattagaatgtcctgtggagattaaacttttttttttcagtttatggaccaagagttttgatttatttagggtggagttcaggatcagaatggtttcagaagctcccaggtgattccggagtgagttggagctgcaagcccctgagctagattataagatgcttctgggaaagaaccacattttaggaatttgcttcccacccagtgccctgcatttaatcagcacctgatgacttggcaggacttgccccaccagggtctggctttgaagggtagtggacaccaggatcctttggattaatcctctgccacctctctcttttcctcaaccgagagtgaatttatgtaattgagtgaaagtctacgaatcataattgtaataaattaaggctgggcatttgtttgaaattagataggataaagccaaaggtttgaacaagttgtggatggtttgtaaaaattaatcttacaaaataaatgctgtgtgtgaacacgttgattaaattcaaaagggtattatttggtttttctgtaaattgaaccttgaaataaaagcacaacaaggttttcttaaggtactgatctgctctttaacaagaatttgtaaagggttataaaaggtttacaagaatctcacctcatggtcaaactagttaagattggatagatttatctataaggtattattaaaaattggggatgacattaatagtagactgatgcaaggatgacatttgactctgtcttgaacaagatttttatgtaatagtaaaggataatgaaagatttttgtttgccttgcaaataaactaccaaaaaaagaagggaaaggcaagagacaaattgtttggaaagttgtcttcccttttaatgggtaaaggttttgtgctttttaaaaaagtttttgagtcatcattttggctaatgataacctggaattctattttataatatcaagtgttttaaacctttaatatgttcagtaggcttccccaaatcgaactttagcttcaagattgtcttttttgacccctaacttttggatgccatagaggg

SEQ ID NO: 18131 - DNA, 1082 bp, Homo sapiens
gagatttatcatatgtgaaattaggaaattgaaagttattgggattgatcaaagcacatgaacataaaatatacttcacatctccatacttcttaaggtgatgaagaagggtgtggctgatgatattgtttgttgagggatctgatagtgtccaaagaaaaattatctgcaattttcttttcccttccttccttctttccttccttctttccttccttccttccctcctccctccctcttttcttttctcatttcttttcttttccctccctccctctttctttctttccttccttccctcctccctccctcttttcttttctcatttcttttccctccctccctcccttcctttctttctttctttttctttctttccttccttccttccttctctttctttccttccttccttccttctctctttctttctttcttttctttcctttctttttctttctctttccttcctgcttttatttcttctctctgtctctctctgtctctgtctctgtctctctctctctcctgttgcctaggctggagtttagctcactgcaacctctgcctcctgggttcaagcaattctcctccctcagccttctgagtagctgggactacaggctttagaactggcggctttataagaagagaaagagagatctgagctagcacactcaacccccttgctctgtgatgccctgtgccatctcgggactctgcagagggtccccaccagcaagaaggccttcaccagagcggccccttaaccttggacttcccagcctccataactgtaagtaataaattattttccttgtaaattacccagtttcaggtattctgtaataagcaacagaaaatggacaaagacaatcactattttttgaatcaatgaatattgaatgaattatctataataaacagaaatacctgttaggtgaacaaaagtcacagagtaggacaaggatcattctgttaaaataactctgagtaaacatagctgcctgccttttccatccctctgtgtggttaagataagctgtgcctagtttgggctttgagttttcactcatgcaaag

SEQ ID NO: 18132 - DNA, 1029 bp, Homo sapiens
acccactgcatttcaaaccatggtctttcatttctccaggattccatgcatgacgtgacttctgcccaggatgtccttctccatctctttatctaacaacgatcaattcatcctccaaaatcagcttagcagacatctcttccaggaagccttttgtaccagacccagcttatgggtcaccccagatccatttggccccatctgcactcctgggcctcagccacttgccttgtttcatgtgtgtgtgtgtgtgtctgtgtgtgtgtctctgtgtgtgtgtgttttgaggcagggtcttgttctgttgcctaggctggtgtgcagtggcatgattagggctcactgcagccgcagcctcccagggctcaagcaatcctcccacctcagccactgagtagctgggactacaagtgtacaccacctcgcctggctaatttttttaaaataattttttgtagagacagggtctcactatgttgtccaggctagcctcaaattcctggattcaagtgatcttcccgcctctgtctcccaaagtgttgggattccaggtgtgaaccatcgtacctggcctgccttgtttcttaacaagcgcagctctagcaagggatcattctattttcacagctggaaagaactggctgctgccactcctgccacagactaaggacctctttgtgtggtgctgaccgataaggagagaccacccacatgtacaggcagggactttcagggacgctggcttctgcatcagccgatgacaaggcccggagtgggggcagtaaatatcctgtgggtatcctttgaccaacaagagacaggagatgggaagaatcatcagctcaattgtttgcccttttttctccccaactgtttagagattaagaggctctgtgcagcctctttgaaggggatggaggaaccagctgtgtttgctgcaaagcttccttgggcttgaaccactccccataaaacactcataggcaagccatacccttaggttctgttttctgaggatctgggctgaag

SEQ ID NO: 18133 - DNA, 1035 bp, Homo sapiens
cactgtgaaggaattaacctaagtgcttccagagcatctcatgtaacctctatggagtaagtcactttttctgtaacatgtggcttttgaccttgatgaagactttgacttctcatccctgtctacatggaggaagatgattcagtggtggggaaaatgaacctcggtaacatttccaatgtccttcaagagggaaacaagttcagtgttatcatcgtggcattcgttagtttttttttttttaaatcacttgtttagatacaactttatttttttatacctacatagcacatgactggggggataaagcatgtataagttgggagagggtaaagaatgtgtgactatgtatacagaaaatagactaaaatgtgcagcaaaatgatatatactgtaatctggtttttgaagtatctactattctggaatattgttaaacaactttttgcttttgaaaaaaaaaggtgccttgattcagttgcgtgacttagaacattcatcctattttattgtgatttttaatgtcttctgaccccaaactgtgtttttggttgcagtctggcggctgcaggcatagcgtcggttttgttccaataacagagaccaaagagttaatcagatatggttcagctgctacaattgtatgattcaaaggcaatttaatcaccccaaatttccatggcccccacagtcaagacctgccattcgttttctcttgcaggttggagtaaatttgcactttgaatcatgtgggtcatttggggaccttgttcttttctattttgctttattaataaaggaacttgtagaaacctctggactgaatgtcagatctggggagggctttcgtcttcccggagggcagcctgtgcctgtgctggcttgtagttccttgcacaagcctcaactgctttgagcatctgggtgtatgggaaacttttcccatgcattaaggctggggatcattcttgtgtagaattagctctgtatacaggtgggaaaaaaatgctagttcacaatgctacaggtgtgctc

SEQ ID NO: 18134 - DNA, 1046 bp, Homo sapiens
acgaaacaggtgtggggatggtaactggcttgccaagaacttgcagctagtacgcatctgaataagaaatcttcccctttaccgcttttacaagaagtttgcgtctttggcggaactgatgggcaaagaaacactaggttctgcaaaaaaaaagcaggatctgttctgtgttacttttaccactcttttcagtgacatgtctggcagagcacgggtaaggagcagataggaccatgagtctacggggtttgcaaagaggctcatttgcacaagggtcagtggttctctgtggtataaatggagaagacggcatgtctgaacctgctgtagctgacaaattattactggaagtggaccagtgatgcctgatggcaagatatagagcagtagatttgtggctggggtagccttgtagtcagggctcccttaaaataaaaccttgctgacagtggtaattgtagtgtgaaaggcatagtgtcctcttgcttaatcatgggatacagactgctcacttcttaaatggttacctttgcagtttaagaggtaccagtttctctgggactagagccatggtgaaatttccattctctaaattccactcttccttgctagcttcggtgtatagtccgccttctttttttcttctggtttacattattgtttgagcttattattattcttattcatttattcaatacttttatcaagtgcctgctgtgtgctgatactgttctgtgtaatggggattcagtgaacaagactgaaaaggtacctgtacttatggcgcttacattttggtggaggaagacagacaaaaatcaaggaaataaacacgataatttcagatagtggtaagtgctatgaaaattgggaaacagcagggtaatgtgatagtgatagaggcagagttcatttagatggggtcatcagggatgccttctctgaggaggggatatccaagccgagactgaagaataagaaggatccagtcatgctctaaggatcatctagtaatttgtataatctccatattagcactcatattt

SEQ ID NO: 18135 - DNA, 1050 bp, Homo sapiens
aaaagatatgagagtaacctctgaacttcaaaatagaaaatttttaaaagtaaatattctttgatttaagtaggcttttttactacagtgtttgtacctttgtatgatatagtttttcttgtgtagataagtcctgttaaagaaaatataatatcctgttttacaatgtgaagttagtaaagatttacagaactttgtttcctttaagaaggttttactgaattcttagctaaattaatcccatttaaagattgatttacatgcaataatattcagaaatatttaatatataaagtaaatcttaattggacaggttcttgaggtgaattaccatacccaagaattagctcctgatcagtaagacaattctgggaggaccagttataggaattgtgaattatagggactctctcatgctctacaaaatctgccaaataattaagatctgtttttcccagtacattaaaaataacatttttctctcttgtagtgtgactgtgggaagatggaggagtatgagaagttctgtgaaaaaagtcttgccagaatacaagaagcatcactatccacagagagctttctccctgctcagtctgaaagtatctcacttattcgctttcatggagtggctatcctttctccactggtaaacttgctttgtttttaaatagtttttttctgtagtgaacaactaaaacagttcgtggaaaaacaaaagaaaggcttataaacatttgaagagatgccctcattcagaattagagaaatacaaatgaattagcattttttacttactattatagattggccaagacctaatagaactttgtgttccttagattgtggagaaaatgcacttttaatgcacttttgctaagagaatcagtttattttatttctagatgagcagtttggtagaatttaaaagcatacatagcctttgggtcagcagttccatttttgggtatatcctacaattatatgtgagcccaaagaaataagtacaaagttacattagcattgtttaaaatagcaaaggttgacgaacca

SEQ ID NO: 18136 - DNA, 1048 bp, Homo sapiens
ctctccccatttgaagaaatagggaaccagtctcactttgttgcccaggctggagtgcagtggcacaatcttgctcactgcaaccaccacctcccgggttcaagcgatcctcccacctcaacctcccaggtagctgggtctacaggcgtgcgccaccacacccggctaatttttgtgtttttagtacagaaagagtttcaccatgttgaccaggctggtctcaaactcctaacctcaagtgattggcccacctgggcctcccaaagtgctgggattacaggtgtgagccactgcagcccagcctacgaagttgtttttgcggttaagcagcaatttggaaacgaagcatttctgaggagctcagtttaagaaacactgtgatgttgtgttttaaacctatgaactcccctccgtagctcatccctctacttttccatctaaccccagtactggcaccttctctatgattagtaaatttcttcagctagaaatgttacagtctgttttttaacaatgaagtcaggacccagtggattatagcattgttacacttcatgctcatgttatataaaattgcataaaatgtattaaaatttatgtctgctcttatctctgccttgcaaagaatgaatttgtatagcttttaactaagcatgtaacgggggcagcaccacatctggaattcaagctgactttctcacgtaccgtaatctttgtgcttggtctaataagtacaaccccatgtgtgtttatcatttttttattgtatgcacaatcttgagagtacattcctttttagttctgtattgatttgttctcttggtcgtctgttcagaaatacattcaatacctttggggaagggcaaagatgatttctgcaaatgttgcccttttttattaaaaatagcttctgtggtctttcttataaaagcaatacatgtttattgaaaaagaaatcaggctgggcgtggtggctcacacctgtaatcccagcactttggtaggccgaggcaggcagatcatctgaggtcaggagttggagaccagc

SEQ ID NO: 18137 - DNA, 1041 bp, Homo sapiens
cttcttcctggaagctgatgtacctcaaccatgtccacgttccagcctgtgggcattggggaacagcagctttcttttagggacaaagctgggaaggctcacacatcatatcccattgttcagaactgtcccatagccacccctagctgggaaggaggctagggaatgttgttctaagaacaaagtggggctgggcatggtgtctcacacctgtaatcccagcactttaagaggccaagatgagtggatcacctgaggtcaggagtttgagatcagcctggccaacatggtgaaaccccgtctctactttaaaaaaaaaaaaaatacaaaaaattagctgggcgccttggaacgtgcctgtaatcccagctacttgggaggctgaggcaggagaatcgcttgaacctgggaagcacaggttgcagtgatccaagatcatgccattgcactccagcctgggcaacaagagcgaaactccatctcaaaacaaaaacaaaaacaaaaaagaacgaagtgggcatttgtattgaaggacagtgggcaatctttgccaaaacattttctccgagaacaaaccaacaaacaaaaaccttgactcctgttttctctgggctcttaaaaattttttttttaaataactttggggaactatttattccccaaataactatttatttaactatccaagtataatcaaaactgtaatgactttttcttatttatatttgtgttacattttctattaaatagaagcaactgagacctgagatttactttacaatgtatcaaaaaaataagatggattgatggatggagaggggaatggataattatgtgtaaaacaagtaaaatggtgatggcaggatttcgatggtgtatgggtgtttactggaaaattctttcaactttgctgtacattggaaatatttctgtttcctttttggggagaacggggtctcgtcatgttgcccaggttgatctccaactcctaggctcaaacgaacctgctacctctgccttcctaagtgctgggattacagg

SEQ ID NO: 18138 - DNA, 1034 bp, Homo sapiens
caggatggagtgcaatggcatgatcttggctcactgcaacctccacctccagggttcaagggttcctcctgcctcagcctcccgagtagctgggattacaggcgcacgccatcacaccctgctaatttttgtatttttaatagcaatgaggttttactatgttggccaggctggtctcgaactcctgaccacaagtgatccaccctcctcggcttcccaaagtgctgggattacaggtgtgagccaccacacccggccagtcacccaggattttaatgatttattttgtttattgtctatgtgactgcactagaatgtaagttctctgacagcagggacctttctttcctattttgttcattgctctgtcctcagcatctagaacagtgcccagcacatggtagacagtcaaggaatacttgttggttgaatgaatggatctgtgttacataacctccttcccagatcagccagcttgccaaacgctctatgggcaagtaaacagaactgaggctggacacagtggctcacacctgtaatcccagcactttgggaggccaagttgggaggatcacttgaaaagttcgagactagcctgggcagtgttaagagaccctgtatccactaaaaaaataaaaaataaataactgggtagcgtggtgcatgcctgtagacccagctgctcaggaggctgaagcaggaggacctcttaaagctcaggaggttgaggctgccgtgagctatggttgtgccactgcactccagcctgggagacagagcaagaccctgtctccaaaaaaagaaaaataaagcaaacagaactgtttccaaaaaaaaaaaaaattaagggaagatatatgcttacatataatatataaatggataaagaccgcctgtaatctcaggactttgggaggccaaggctggtggatcacctgagatcaggagttcaagaccagcctgggcaacatggtgaaaccctgtctctactaaaaatacaaaaattagctaggtgtggtggcaggcacctgtaa

SEQ ID NO: 18139 - DNA, 1030 bp, Homo sapiens
tcaagagtagcccaaatcattgttcttcctggatgttccacagagggtgaagccagaggaggaagtgctggggtcagggagcaaaaacacttaagttgtgactgagacaaaggtcctaagtttgacaagtcagtagaattaagcaccccctggaagcagcaaatcctgtggtgaagaaacctgaactactcctatcctttaaaagtcacattctgatttctgtagacatattgatcaaactcagcagcagtagcatgcatttccccaggctgtggaagcttgctgtgtgactgacttctctgggccttgtttgtgcagttgtgtccgtgatggcagcagatactcttgggaaacgttggggaaaaaaggaatagcaaaaacaatagaaggtttccttaggctggggtcttgatgcagctcttaatccttacatttttggtagcttcttaaattaatattgaaaacaacagtaatgtattaaacccaggtactgtgctaaatgcttctatatgcatttttggttgaggttgtcagaatctttactgaacaagtggagaaaaagtctcagattaaccaattttcctagggtcacatagctagtaagtgcatagtcaggacttgtaccctgatggtgtgtctgactccagagcaactctcctgccctcaaagctctagttctccatacacaaaagtctagtgtttgcatgtttaagttcatacatcaggtggagacagattctgtgtttgtctttgctcatttctacctgctttgcctcagagagctcctcaacgctgacccagttccatgaatattcattacaaggtggcagggaactaacaagtattgaaggctcctaaattccaagcaccacaccaggttttttacaacaaacattgttaaataagttaatgttttgtaacttttttaaacagcctctggcacctagcaggtgctacaaaagtatggaatgaacaaagactaagactctttaacagcaacttataagggatctaatgacagattgctatt

SEQ ID NO: 18140 - DNA, 1035 bp, Homo sapiens
gggctgtgtgaaaattcaacccctgctttgctcatattaagtcagatatgcctcttggatactaagaggatgtgtcaagtagacagctggcttagagggtacgtttgggctggggagtatttttggtgctgagagctttacacagccttcatttgggatgctctcccagagagtagccaggagatcatttcatagcatagttctgatcacataaacaccttactccaacctctgccaagggcaaagtgctttcccacagcacttagaagtgctaactctttcccctcatggatcaatccatgatcaaagaccaatcccagctgggcacaatgatttacacctgtaatcatagcactttgggaggccgaggcaggtggatcacctgaggtcaggagtttgagacctggccaacacagtgaatccccgtctctgctaaaaatacaaaaattagctgggcatggtggcacatgcctataatcccagctacccggaaggctgaggcaggagaatcgctggaacctgggaggcgaaggctacactgagccaagatcacgccactgcactccagcctgggtgacagagggagactccctctcaaaaaaaaaaaaaaagatcaatccaagcttctgcttcctgctacttctttatatgccatcggcctctggatatgagagagaaaactaaagttcaaaggactcacccaattcagctaagaaatgtgacatctaaatcaaggctgtgcagtgaggttattcattcaggttctgttctttacatggtctgggcctaaccttcaccgatcaaatgaagtgaaataaggtgcagaaccctagcacagtggctgacaccaaacaagcccatcaagaataattgtcaaggacgaggctcagtggctcgtgcctgtcatctcagcactttgggaggccaaggcgagagaatcacttcagcccaggagttcaagagcagcctgggcaacataatgaaacctcgcctctacaaaaatgaaaaaattagctggggatagtgttacatgcc

SEQ ID NO: 18141 - DNA, 1033 bp, Homo sapiens
tgagtgttacagctcttaaggtggcgcgtctggagtctgtcctttctgatgttcagatgtgttcggagtttcttccttctggtgggttcgtggtctcgctggctcaggagtgaagctgcagaccttcgcagtgagtgttacagctcttaaggcagcgcgtctggagttgttcgttcctcccggtgggttcgtggtctcgctgggctcaggagtgaacctgcagatcttcgcggtgagtgttacggctcataaaagcagcgtggacccaacgagtgagcagtagcaagatttattgcaaagagcgaaagaacaaagctttcacagtgtggaaggggacccgggcgggttgccaatgctggctagggcagcctgcttttattctcttatctggccccacctacatcctgctgattggtagagctgagtggcctgttttgtcagggcgctgattggtgcgtttacaatccctgagctagatacaaaggttctccacgtccccatcagattagttagatacagagtttcgattggtgcactcacaaaccttgagctaaacacagggtgctgattggtgtgtttacaaaccttgagctagatacagagtgctgattggtgtatttacaatccttgagctagacataaaggttctccaaggccccaccagagcagctagatacagagtgttgattggtgcactcacaaaccttgagctaaacacagggtgctgattggtgtatttacaatccctgagctagatataaagactctccacatccccaccagactcaggagcccagctggcttcacctagtggatcccgcaccagggctgcaggtggagctgcctgccagtcccgcgccgtgtgctcgcattcctcagcccttgggtggtcgatgggactgggtgccatggagcagggggtgatgctcgtgggggaggctcgggctgcacaggagcccatggagtgggtgggaggctcaggcatggcgggctgcaggtcccaagccctgccccgcggtaaggcagctaaggc

SEQ ID NO: 18142 - DNA, 1057 bp, Homo sapiens
acttaaaattgcaagtatgtgtatatttttgtgacttattttttcactttcttatataagctcagaactgcgctatgccacaagtgatgaagaattcaagaaagaattaaaatccttttttttcccccaaatgaaaaaatacttggacagcatagccagagccaaacactgtgctaaaggacagagtgtttcctgtccctttacccctcacttaccctgtggaggcagactggagtcaggcatgagttaacaatgcttcaaggatagtcagccagctaagccggacagacactgatggattggcgtccttctctgaactgccttcgagagtctggaggcctttgcagctgaataccaaagagacttcagaaaggatttctttgcttcctcataatctgtgttgaaaccccaagtgtttgcttcagtttcacagaacactagaatctctttcttgtgctggatataccaggagtctttatgtttctctttgaaggtgccctagaagaccctaatagcttccagtaaaaagctctgttgtgtagaccctctgaagctttgttaaaattttaggattatcctgtcctatggggagtgagtatttagtatttgcaatgaggattgccagtaattggttattaaatcaaagctgaagccatttaatctgttttaattgattcccctcatggatatgagggtgcctgtcactgtacacattgaaatctcacataaagaggttattgggttgagtttatattgtttgtgggaaaatggtgaatggtctgaatatttacgcctatgctgtgcttaaatgcaaggtgtgcatggtgaaatgtctggactgagttgactgcattgtaaaatcttagaatgtgaattttgaatccttagctgtcaagctctgttgatggagttggtctggccaacttagaaaagattctgtgttcatagatcctgagcagtggagcttttctgattgtttttggtagccctgaatgccttgggtctttgattacccatttcttttgagaatggctggatgcctagacctacagtttgg

SEQ ID NO: 18143 - DNA, 1028 bp, Homo sapiens
atcactcactttcctatccacatgtttctacttttacagattaatcctagagatagagcatcagtgtagcttttggagcaggactggtttgagcatttgcaaaacatggagatttttagcctggagaagggaagatttctgtgaacagatacgctgtgggatttttatatggaaggaaaggaataggtatagtctctggtgtaatcaggcacagctacgccttagaagttgagttacagcttagggagatcgaccttcctagcttgaactgtttaagtccttatcactgtcagtgtttaaattgctgttagggttgttataggaagagacataaggaaggtgtgagtttgaactgagtgatttgaaagccccttagctttagcaagctgtctcagataaggttctggtgggtctgcatggtgataattgacatgttttccttcagttagagattaattcggcatttcaaaacttagaatgctttgacctttgttataacagtggcttaagtcaggctgaattcctaatctgattccacctcccccccttaaaaaaatccatgctttgaagtgggtcgaagaggaaggtgttaaacccatcttcagatgattgaccgccccagccttcttttgctttgatgctaagtgcctaaatggaattttcagggaaacttcagatgtttgaaattagtaatatatctggagtgtacatggtatgtaaagatatctaccacataaaaaatacttggtttaattttttccctaatatacagcacataagccaaaaatctgcagtttgacctgcatgggaaattcatactgattggcattcctttcataatattagtatgaagtgaaaacattttcacaaaagtggtaaattttgtgactattggtgcagtttgaggttttaatgaggaagtagtatctttatttcctaagattagaggtcacccaatccaagatggcaaggcagactttcagctgaattttacatttttttcttccttttgagattagagctatttt

SEQ ID NO: 18144 - DNA, 1031 bp, Homo sapiens
gttttccaaacccattaaccattacaccctgcagtcagtctattggcagatactacccaaaactgtcagagaagataacagtgtggggccttggatccagacaaacctgggcttacatttccatactgacactcattaaccttgcaagcgtgggcaagttcttcaccccttctgagtctgttctttatctgcccacctgtctcaaagagtacctgggaagtacaaaagaggtaactcatgaagccctcaggcttggaacgtaccaagtccttggtagatatggctcctccctgcttccctctttaaatcacttgtttgttcaagaatttaactgaatgttcttatttgtattagtaggtggcaagtgggagaaaccatcagaaattttggaaatcaaaggacagaactgggaagaacaagtgaatagtctgcctgaagttttcagaaaagctggttttgttatcgaagctttcaccagactaccatacctgtgtgaaggcgacatgtataatgactactacgttctggatgacgctgtctttgttctcaaaccagtataaacacgtggaggtcgaagtcttcagagtccgcaccctccgggatgtgcccttggaagagggtctgtgttcacaattacgtgaagggaggacccttggggaccgccattctaaatatcatgtaggaatttaaaaagccaaaatactaattatttctttgtagtgtgtaaaggaatgtttttaaaagacaaaaacccaactctttgtggatttttatcaactctttactcagagccactctccaatgcaggtcacactccaattatgatggaagatattttttatacttaattgcagtagggactcattcccagacaaagcaatagtcacgacttcatggaaccaatcaatggattgttttttgaagactggcaataaagctgtccattcaattccaaatactggttttaaggtatagccactgatattctttcatgtttagaaattctttctgttattattcaagaaaatgtt

SEQ ID NO: 18145 - DNA, 1313 bp, Homo sapiens
tccctaataatcttaacgggaccaccatcatatatgtggtccatcattgaccaaaaacatcattatgtagtacatgactataccttgaatttcgatcttttcctaggctagtgatatgcagtacatgagataatcaatgcttccttacaaaatgggcttatgttagaagacttttgcccagctgcaggctattgtaagtgttctgagcacatatgagataacctgggccaagctatgatgttcgatacgttaggtgtattaaatgcacttttgactgccatctcagtggatgacagccttctcactgacagcagagagatcttcctcactgtgccagtgggcaggagaaagagcatgctgcgactggccagtgacatgcagaggatccagattgcacaaccggatccagaggccttgggaagcattagggagctctccagctgtctcactcaaatctgtagcagcatatggacccacaaatggaggccaaagtgggccctcaattggacactttggcaaccctgaagagacttcttcccttcagacttactgttttagtatgttccagagaagggagtggcattcttcttggggaattcaggaagagggagacacgctgttactctatccattaaataaagctttgatgttcacagccccccgccaccactcagaaaaaaaaaataattgccttgctctctaaaactgacttctgccttttattggacaggaacaagctgaaagctggatacctaatgtcagtggagtcttctgagtgtttcctggaagaagtcgggtcccaggctctagttgctggttcttacatgccaccatccacagtccttcagcagattgattcagtggctaatgctgatatcataaatgtaagtaaatgaaaacttaacgatttaacaacagagaacttaaccttaatgatccaatttcagaaggatgcataagcgtccttgggcagtgtattattcttatgtttggtgctcatctacttaatgtggaggcaggagggctcattcccataagatccgcaacaagcttccctgtcagctcgagtatatgtatcttcctccttcaaataaactaccattaggttaaactgtgatgtcagtaagagggctgccatccactgagatggcagtcaaaagtgcatttaatacacctaacgtatcaaacgttaggttaaactaatggtagtttataaaatgggcttatgttagatgactagaagtaaagaagagtcaaatattagcagtttcatatgatccaacctaaatagtgaagtttgctatttttcctct

SEQ ID NO: 18146 - DNA, 1083 bp, Homo sapiens
aaggtccagagtgtaacagtgacaatgtgtggctgatgtgggatcgaggaagtgattgttttttttctaaaagttttccttgccatctcaggataccactccgttaaatattatggctagaaagaggaataagagatactaggaacataggaaatttttaaaattcttatctagcatgtatttcttaccttacatatgtcaggcagtaaaccccccaaaacataaaacgaatgggacagtatgttccttggtttaccgttgtgcttgagcttgtatgctgtacagtctcacctgagcaggcagatgtagtcctgagttaaaaaaaaaaaaaaaaaaagtgcagagttacaccttccaaatcaatgaaacatttacaagaagttcaagtaagatctcagtggtgacaggtctagcttatttcaagagctgcacaaaagccacttaacctggcaacaaaaagttaatgtgttggttccctttggtgtattatattcagtctattaaagttttgattgtgatgttttcattgcagtttttataccggataaaatgtattttagaagtagaacttttggagctgaaatagtctgcagaatgtagcttgaaaaccacggcagtgaactactaagggaaagtttcagaattcaagtctagacttcatcacttcgtagctctgtagctttagggcaggttctttagcctctctttgtctccgtttcctcctgtgtaaagtagggataataaaagtatccatctcactgggatattttgataattaactgagttaacccatgtcaaacatttagaacagtacctgacacacagtaaatgctcaataaaaattacatattgttatattgctgttctagtttataagaacaggtgtcagaatccagttttgaaatgaaagcccagaactgtgagaaatgatgtttttctctattagatgttctaggaaataaggaaacatcaagaataatacagccatgcttagaacaagttaaatatatgtccctcttggctttggactttctctgtcacttccgtgctgttcttcctcttccagtctctccatactctaat

SEQ ID NO: 18147 - DNA, 1054 bp, Homo sapiens
ctgtctgttgatttgcctattctggacatttccaatcatagaatctatgtgatcctttgtgacaggcttcttaaacttagcataatgttctcaaagttcatacatgttatgacttttttttttctttaagagacaggctcttgctgtgtttcccaggctcaaactcctgggatcaagcaatcctccagcctcagcctcccaagtagctgggactatagatgcacgctgccacacctagctatgtatttcttttttattgccaagtattccattatatggatagaccacatttatttagccattcatcagttggtggacatttggaccactcagttttttacttccaagcataaaagtctatgaagataaagtgattaaagatgttttttaaatgtgattttttaaaaagtgacattatcagtataatctatttcagcatatcaagtaataattatcaataaaaattcaaaaaccggtctttttacagtactcacaggacatgcttaaagcttgagatcatttatgatactgtgaattcccagagtggactagattttccaataggaaattagatctcctgaacaaagcattaatatttcctttacaaccttagttccaaacatcatctcttttatcattaccaacagagatggagccacttcagaattaagactataaataagcctaaatgtttttggagaaggggaatttaggatgaagaacatgaacagcaggcatgagtaaatggaaatcactaaaagaaggaaattcagaagaaaaaaaattagagtaaagactgctgatgcatttgttagattggccatacttattgagtccttccttatttggctgccagaacccctttcaaattttgcatagtaatagttacatatatcagttctccactgttctgcttagtgtgaccaaaaacatcattgtttaatccctttcctggtaaatactgagtttgtattggagttgcagtatagtaaaatggttctgtaggatttggagtcaggcatatctctatttgattcttggattccttttttat

SEQ ID NO: 18148 - DNA, 1610 bp, Homo sapiens
taactgggttatggatgtaatctgtagtcctagggtagatttccctgactggctaggtatgtaaaccataaccctaacctcattagttgaggttagtcactatcatggactgaatgcacccctccttccaaattcacatgttgaaatcctgacccccgatatggtagtattaggcagaggggatttggggaggtgattaaaaagaggtctagcccactttgtgctatatgaagatacagtgagaatttaccagtttgcaacctagaagaccctcaccagaaccggaccttgctggcaccctgatctcagatttccagcctccaaaaatgtaagaaatgaattttaattgcttttaagccacctggtcctttgttacagcagcccaaatggactaagacagtaaccaagtgtcagtcaagggttgtaaatgtaaaggatgattgataatcacaggtagcctacaagataatttatggtataatcttattcatcttcttatgatgaaacgtaaaatgtgagactctgtttttttattctgtagacaaaatactttgggtttaaaaattttttaaattgagtcacttaagaaaccatagcaaagaatcttactaagacaaatgtagacagtcatatatcagcctactaaatcaccttttagactcccactctggataagatttagtggattaggattagaagacaaacccttttatgttgatatgttgctaatataggactaatcctagaaacctcatactctttctgaggttcttaccattcagtaggtagctattatcgtgtaaccatttagaattgcaccattagttaagtaagatgttggctttaagtggaccaccctgtattgaagatttaattatcctttattgtgactatcttgacagttatcagggatgttggatacattatgggttttccctactgtgctatttcttttattttttgcctctgtaagttgctgggcactgctttttttctctttttattagcctagaattaactaaaagattgtatctcttatccatcacctcctactgtgctctgcccttcctctctaggagcctcttgtggcaaatctccaacttggccattcaagcagttcatacccagatgaaaaagttcaaggtacagatatcagccattctcagtggtcagtttccattgtctttaccaatagctctctgctgtgctcagctcctgtttctctgagcttggggttttactgagttttttttagaaaatccgtcaacttatctaatgaagaagactcttgtcttttgactgtattgatacaggctacagaggtacttactccttttctgtgaacctgttttctcttgtatagattcaagaaattcttcagtgattctgctttgttgatggtattcttgtcattttctcatgctgctatagaattttgtacaaattatatatatatatatatattttcttaagaaacttagtttatccaacaaaaggactataacactattttacattcttaattctgatataaagcacattttcaaattagttgccaacctttgttttaaaattatattgaaatcctggatctagatcttctagacagt

SEQ ID NO: 18149 - DNA, 1050 bp, Homo sapiens
atatctccaaatgctatctctcccccctccccccaccccacaacaggcccgggtgtgtgctgttccccttcctgtgtccatgtgttctcattgttcaattcctggccatatcatcaccatgaaaagcaggcagctgaggaatgtgggatttgagtgcacaggaaagctaaagggacacttcaacccctattaatggctttattgctctatttaaagactagagctattgctctggccaacatggttcttttttgttttttaaactttagtaatacagtcgattctcatgtggtagttatgttctgtaaagtcactgcaaacattgaattagtgaatactggatcattgcccctgggggaaatagggttaggttcctgcaggtctctggtcacatttcatcaactgatcaatacataacctcattgtatgtctctgttttaggacatattatttaatatgtattgattcaattacattaatattatatattaataatcctgtacaagaatatatgtcaacagtattgtgccagaagcactgtaactcatgcctgaacgaagtttccctaacacacatattttctctgaaagggaaaatccttcttgcacttaggaacactagacggcacttgagcactataattgggaccattttaaacagtgaaatcatcagtaaaaggcacaaaaatgtgaaagacgtggcgctgaagagaccacagaaaagacatgcacttactataggagaactgagacaacagagcattgccatgctaagctgcatatgggaacatggctgtcatgtgactcaaatttttttgccactctacacgtggattacgtcctcagatgaccacaaaagtgccacaactattgatttggagcttgcagataaattttagtgagtaggcatatttgcaagtatggaatccctgaataatgaggatcgactatatatattaatgcattctacattttaaaatgaaaagttaaaatataggactcgctcatccctacctttttcaccccctcctggcatctttcctttctggaa

SEQ ID NO: 18150 - DNA, 1050 bp, Homo sapiens
actatagctctctctgggggtgtcaagattagcccaaccgaataataataataaaatatttacagtttgctgctgattcttccttgtgtggccttttgaggagcctcctggggaattggaggattaagacatggtaagatttagatgttcttgggttctaagattaaggggtttccttggaggtgagacttgaagtactatgtctgggaaagttccaggcaaactaggataagttggtcaccctaccctatcttcacatcatctaaatcttctcctgatttgtaacacagattagaggtttttggggggttattttctataaacattaatgaataggtcaattggaaattgtaatggtagatttatgctgagctgctatggtggaggggacactttttctatttggtaataccttaggaaaaggtaacacagtggctttgaaaacaacatgggttcaaaaatactttattttgacttattcttctatcatctctattctagccactatgagaagattataggaaaaacaccaagactagaggactctgggttccttttatgcaaagtcaactcttctgggtcacagttacccagcaacaaaaataaaggtagttatttataaatggtattaaagatagaaagcacaatgtatattttttaagagttttggttcttttcccaggagaagaaaacactgtgggttggtattttcaagcacattcaagggttttacaaatcagccccagttccagtcacacacaatctaagaccacccaagataacatttcaagaagagatttttcacaagactataaaatttcagtgctggatgaaatgtcaaagagcatgtccagtgttttcactttccaggtgaggaaatcgaggcctcagacttttccaaagtcactcaactagatatcagcagagcactcgtctttgacatgtgggccttggacttaagaccaacattcatattctctagccattgaaccagtcttccttcaactggtctccattcactctgatccatccaaatcaattctgccaaga

SEQ ID NO: 18151 - DNA, 1046 bp, Homo sapiens
aagtaaagtatgattgtctgcatttcatagttgaggaaactgaagcactgagaagccttcatggagcttacgttctattgcagaagacaaacaacacctgagcaaatagaccaggtagttccagattaagatgagacccaccaaggaaagaaaacagagatgtggtagggcctgggaggaggctgggggaggcttttaaaatagggtggtcagggaacctatcctctcctgcaggcggtgatgatatttaataaaaaggagcaaccttggaaatccctgtgggagaatagatgatgtgcaaaggacctggggtggactggggcttgccttgttggaggcccagcaagtggctaccagcctggatggtgaggggaagacagagacaagattatgtagggccttaggtggctcatggaaaggagtttgggttttattttatgtgacagtggcagttgacaggtcttaggcagggaaataatatgatttactttttttttttttttttttttgagatggagtcttgttccgttgcccagactagagtgcagtggcaagatctcggctcactgcaacctctgccttctgggttcaagtgattcttctgcctcagcctcccgagtagctgggattacaggcgtgcatcaccacgcctggctaatttttgtattttaagtagagacggggtttcaccttattggccaggcttttctggaactcctgacctcaggtgatccgcctgcctcggcctcccaaagtgctgggattacaggtgtgagccaccgtgcctggctttgttttccccccagtagagatcgagtctcacactgtgacccaggatggagcgcagtggtgtgatcatagctcactgcagcctcaaactcctgggttcaaccaatcctgctgcctcagcttcccaagtagttgggactgcaggccatgccaggctaaaatttttttttaaagagagaccggggggcggggggcgcctcactatgttgctcaggctggtctcgaactcctggtctcaagcagtccttccacctaag

SEQ ID NO: 18152 - DNA, 1082 bp, Homo sapiens
gctatgtgactttgggtcaaaatgcacacagtatctctgagttccagtctgttcattataaaacagtgacaatcaccacacctcatagggtcattgtgttgaatacaggacagaagagtgtgtgaagaggtcatttttagaccaaaaacacagaagagtcatctcactcaggattcgagttaaagtcagcttgaaaatcaaatatcagagagctttggactgtctgtcttcctgttcaacttctggctcctctttaaagcgtccccagggccctcagttctccagtgttttaatcatggctgggaccagccaacctctatccttctgtctggcagtgaattctctgtgagcagagaagaaaccattaaagccagtcatttgcctttccccgcaggtgcagcccacacttgttggcttggtctacccgcttgcacccgctgcttgagtgtttctttttttctttatttcttctggctgatggggtatagggttggtcatccattgttgacttcaatgtagatgtagaaagaaggtcagttggttggttgtgggctccccctcccagtgcagggcctgttgcagaataggcacaaggaaatgttggttgaacgactgatggtcccagtctctcgccctcctttgcagatcgagctgaaggactgcgcggctggctctcctctagtatggccaatgaagaggatgacccagttgtacaggaggtaactgctgctctctgtcccctgccgccggggctacaggcagtggaattgggtcctttccatgtgtcctcaggccagtctgggacctgttgatgttctgggacccctaacccttgctgttccctctgcctggtcccctctgctgtcccccagacccctgcgtggctgacctctcccttccttcaggtctctgatctggcatcacctcatcagggaggccttccctgactgcccttccacacccagctcccctcctgcaccctcccgtgcctctctctgcccttaccttggcggtaactcatacttggcctagcccccgtcatcccctagatatcagttgattgctttctttcccgtccactg

SEQ ID NO: 18153 - DNA, 1028 bp, Homo sapiens
actctgcactctggcctgggtgacagagcgacactccatctcaaaaaaaaaaaaaaaaaaaaaaaacagtaaagtgcttaagtatttagtctcaaaagcaatgaacgaaactaatctgaacacttaggaaacaaaatgggataggatcaaaagtagtgtcatataactcgcgcgttctgtttagaacccatgtctcaagcatgtaattcttgaaagccacatcccttgcagcgggagggaaagtcatgatctttatcagaggccatgtggacactccacccagttctagcagggcctcttctccagccacagtggcactagtggacttcctagtggaacgggtgggattttggcgggaaaagatggaggataagaaggagaggaaatccaggtgtgtggggcgggacagtaaggctgagctggccgaggcctggagggtaaacagcagggcgaatttgatgaggattagctgcctagtgttgcaaagcgagcagctggggagaggggcgtggaaccagactgggaggtgggactgaaggaagtggcttcgaacagaagagtccaggttcctgtcctagtctgggctgtgtgcttgctgtgtccagcaggccaggtggaggtggggatggtccctggcctggtggtcccaagactctaggattgggggctgcagcgggaatgggaggcggtttgatggtgggcctaggccttcacgggacttggtgactctcttgagccaaactgggtgggtttctagagttgagtccaagcccttcttcctccgccaggtgagctccacctgacacctttacatggcatcctgcagctgcggcccagcttctcctacctggataaggctgacgccaagcaccgggagagggaggcggccaacgagggtgagcccgggatccccagccctgctgcctgcctgccttcatcctggtgggatggcttggtcctgggaagagggatgggatgataggatgtttagcaggatccctggcctctacctactagatgccagaagc

SEQ ID NO: 18154 - DNA, 2086 bp, Homo sapiens
acttggccagcctgccccccggccacacactcttcagcggcatctcggaccgcatgctacaggacacggtgctggccgccggttgcaagcagatactggtgcctgtaagtagagccctgcctgccaggggcatggggggtggggggtggggagaaccagctgttgggaggccacgtggggacacgggaggccatgcttggtgagcatctgctctcacgtgggcctaggtgtgacatgggcaagtcagcctctctgaggctctattctcatgaaatgggatcatgttgggttttatgtcacaggactgtggtaggggctaaatacggtgtctgaaggcccggcctattgcctggcctgcagcagggcctagtgaaacagggcccctgcctggtttctcaccctgtcccccaccaagaacacctgtttcctactagctttgccattgtttggaatgatttaacttctaagatcgtttgatcttctttgcaatctgcagatgaagaaactgaggctccaaggaatgaaatgtacgtttaaaggtcactacctaggaggtagtagagctggaatttggacctcagtatagtggcctggagttttgaatcctttctgctcagctaagatgagctgcttccccacagctgcgccacgccccagcttgggcctgggtcctggcggcctccctgtgcatcagaagcaagctgaccagctcagcgctgtgctctcagcacttccagtgccaggccttgagtgtggtattgcaagcctcctgccccttccccctgggctgcttttctgtcactgggaggggccctgacgggggagcagagtgcttgctggggaccgtttccctgcgctgaggatagagagcgccaggtgctgcctgaggcacgcctttcccgtgctccttttccacaaggctctgcccagacctggcagcaaaatggggtgaggtggggctgtggtggtctctaagaaagcattgatgttttcattgccaaggtcaggagcgggcctgcagccttgggtgatgatctgaggccaaggcccatccctgtgtatgaggaatagaaactaggacaggaggccttgtggagcctaggctgtctcaggggatcggccctgctggcaggcagccccctgtgggaggtactggcagagttcggagctcctgcccacccagcacatgggtctgggtctccacaagctcacctttcttcatgagctgggccaggacaggcaggacacctgcctgacattagttgttttgggccgctggagtggacagaggtgaggggtgggacatggccaccctcagacaccctcacccctccttccggaccccctctgtccatgttgctttggggtggggccagcgtctccaggagacaccatggccctaactgtaatgctctccttgccatcctgacaaggagactgtattgtagtcacatccaagacgtaagagacctccgatcccagccacctctgtgttgtacatgagggagctgaggtccagggcaagtgaatagatcgagaacttgacttgaactcctggttctgctgcttattagctgtgtgaccatggacagtgagcaaacctctctgagcttacttttccccatgtactacctccccagtttctaatgctcaaatgcaaatgtgtattggaggcctcacagggcttttactggtagtaaccattattgctacttgtgtgatggaaccaggactggaaactaccatcccagatgccccctcccctgtccccttctctccaggacccaggcctgtgtcacacttgtcctggtctacctttggaccaagtggcctggattgcttgggagtcaggcagtgcctctaacccacactgacatggtacatgtgggaagcagttgaaaagaacccccagggtaccccaagagttatggggaagggggcgcccctccatcagggttggcatcttcaggagggaggactctgggtgttaaagcacagttgagttggtgccaggctgatgggaaacagacgcagcttccccactgtacggaggatatctgcagactcgaagccgggcatttcactg

SEQ ID NO: 18155 - DNA, 1075 bp, Homo sapiens
agtgctaggatcataggcatttacatcaccaaaagataccactaaaatagctgcccccatttaaaaaaaaaaatcagcctgtcattagcaatgggcttcccattgtggtggatgagatttagctctcaactattttaggagactgtagagatagatatgttacgccagttttttttttttttttgagatagatagcgtcttgctcttgctcttgctctgtcatctaggcctggagtgcagtggtgccatctcagctcacgcctcttgcgttcaagcgattcttgtgcctcagccacccgggtagctgggattacgggcttgtgctgcctcacccagctaatttttgtatttttagtagagatcgcggtggtaggggtcggggggtggtcccaccatgttggccaggctggtctcgaactcctggcctcaaatgatctgcctgccttggccttccaaagtgctgggattacaagcgtgagccaccacaccaggcctttacctctttttaattggctatcattgtttatagcattgtcacagaatgaactgaaaatctatccattgtagagccaaacatcagtaatatactatgattgcatttccttgttcactgcttcctgttttcacttgtgtaattttctgaacacatgtgtaccgagggtgatactttgcttaattaagcctggttcccgggaagcctctccctctgcttctccagtgagactcgctcttccccatgtctgttgctgaattctggaatctctgcttcttccttgctttagcttctgaagagacagaggagttgtctgcattctttcatgtcttaaaatggattacaatacagtattactgtttgtctgggactagaattttaagaggcaaaggatacttcatgtagcagtcagctgtttacatgaaccatagcaaaaaaaaaggagaatcaaatccatctcctcttaatgtttgcagaaagatgcaaacaaaaccagctaagtatggaacaatgtgtgaggttatcaaagtttctatttttacgtgatcaaatgatttgcctctcaaaattctagtcctagac

SEQ ID NO: 18156 - DNA, 2357 bp, Homo sapiens
ttcctttatgccaaactgcagaatttttcattattctgtatatcagtcagtgccatttcagctgtgccctggtgcgggtcattattgtactagacaattgagttcttataaaatcctgtgagttgttacttttttttgtttttttcagaattcttatgacagatattagacatactgaatccaatcttttccatttttattttggggtgtaacgtattttacggcatcctgtttcatggatgcagtggcatgtttgtgcattaagacttcacaccaattttgacaccctcttctcatctccgtgcagcttagattgtcgcttcacctgcttgctaagtccgatgcacgcctgcattttaccatgcagaaatatgttcaagccactcatcctctcatgtctcttcaccagttcttttgttatgctggcatatacctttgtttttatttatattcaagtttccagacatagcattaatgcctttacttttgtgtttttatttctgtacactgtcttgctgggtctctagagatgacttggctcatctttaaccagaggtgctgcgtgagggtttttatcagagactgcaacacaaagtcaggtgcatggcttgggtgtcttgtttggggatgtttctctttttagatcactgtttcccatcataacgtgtttttgctactaaagcatcgacaggttttgcttgaaattttttccaaaaattaccgggtacgccgaaacatgatccagtctcggttgactcaagagtgtggagaagatctcagtaaacaggaggtggataaagtactaaaggtacatccattttgtgcataacaaacaatatcaaaggctctggaaggggctgacagtgtgtagaagggactctagtgtctttgtgtatatgaaatcaggcttccttgggaccactccccagtcagtcttgtcttgagcaactgttaatgattgattgattggcattggttggggaagggggtatgtgccagaggactgaccccttcaaacaatatagtcacagtggtgtccaagggaaagaatacagccatggatgctttgtttctctttctggttgggccaggccagtaatgcccctttcatccctcttctctgcttgtcactagagacagaaactaaaaaccatggcttcaggctgctaagagcctaaaacaatagaacaacaaaaaaatatggtaggttggatgagcttggcagtgggtaggcgtcttctaaaatgatagggcctagttgagaatcctcactctactctcccttgaattttgaactatcttctgattgttgccatagccacacacatgactttcagtagaatccattcttaaatttagtttaaaaaggaatatgatctgtttactatatgaaagcacctaatgtacaacctataatgcttttctgaagtgactgtagtacaaataccaaccatatttgcagcaacactgagagacagaaaactgatgacaatgtcttgttttgattaaacatccagagccatataagtaatactgttttttaagcacccttgttctgggcatgtcagtatctgtatttcgtagacccccttttttttttttttttttttttttgagatggagttttgctcttgttgcccaggctagagtgcagtagcacaatctcggctcaccgcaacctctacctcccagtttcaagcaattctcctgcctcagcctcctaagtagctgggattacaggtgtgagccaccatgcctggcccaccctcacttttaaaatgcccctgaggaatggccaggcgcggtggctcacacctgtaatcccagcgctttgggaggctgaggtgggtgggtcacttgaggtcaggagtttgagaccagcctgaccaacatggagaaaccccatctctactaaaaatacaaaattagccaggcgtagtggtacatgcctgtaatcccagctacttgggaggctgaggcaggagaatcgcttgaacctgggaggcagaggctgcagtgagccaagatcatgccgttgcactccagcctgggtaacaagagcaaaactctgtttcaaaaaaaaaaaaaaacactacccctgaggaaagggtggctggtagtagccatggtggtatggttaggcagtttttgatttcccatttgtattctattcactaatcataaatcgagtgttgacattgtggacagaatgtaattagctccttttcctgcaaaaatctgtgcttaccctgtttctctctcataggactgctgtgtaagctatggtggcatgtggtaccttaaagggacagtacagtcttgacaatagtagcaaactactaacccagcaaatctaa

SEQ ID NO: 18157 - DNA, 1033 bp, Homo sapiens
gcaaggccggttactctggtgaatcgtaattcatacctggacacttgagtgaactctgggcacccacttagaagtctagagaatttcctcttttatggaggatttgatgtcagaccgttttggggcttagttagatttgaatatattaggaacattaactttttaaataaatgtaatttcctgtctttttgatcaatggggggagggcagctgtgcctaatttaggattgatttattctaacctctcttactaaataaatgcttgtattcagagtctgtttggaatttaacccaatgcttagaactccttaaatatacagaaatatattttaggggtaattgattcatggaactctcctactttggagcacaattgtattataattgtccggaaactggccagataatgtagaacgcacaagttgttgagaagcccttttgtttcctgatagttacatgtaattccagcagtatttggaaataatttgctaagatgttagaatgtaacatttgaagacttgttagaaaaatcaataaaattatctttggctaatgggtagtacacatcttagtctgtttaatatgcctttccaaaaaaaactgtgtctgttgagaattggtgtatataactacatgactttaataattagtgcctgagtctagaattgagatgtttagtcgtaaaaaaaaatattgttcgataaacagcgttgacttgtcttgtaccacttaagagtttgtgagtgctttaaataaaattagttgattaagtatttttttcctatgattgacatgcttagttttgcctttttattgaaatgtgtaaaatttggttttctggcatcttaacaaattaggtggtaaatgaatgacaatggattttctattatttttcagtattgtgatcagtataagtatataagagaatttagtaaccttttagaagaataaagtgcccttcccaaatagtcctacagcttttggaaaagtgtaaattgtagtttgtagttctaaataaatagagaagagtcgc

SEQ ID NO: 18158 - DNA, 1059 bp, Homo sapiens
gctgtttcatttcattctctcttctgacttatagcaacacaggaaagtgttggataaaggaaaacctgaagatgtgatgccatctgttaagggggcccaggtaaggcggatttctttgtgagcattctgaaaatgaggcagccccaccgtctgacttgaggttcctccaatcctgtcccttctcttttttccctgtttttttttttttgagacagagtcttgctctgtcacccaggctggggtgtgccaccacacctggctaatttttgtatttttagtagagacggggttttaccatgttgcccaggctagtctccaactcctgacctcaggtgatctgaccgctttggcctcccagtgtgctgggattacaggcgtgagccaccgcgcttggcccccttctctttttttctgactgtccctccatctcttaccattctctcgtgccttcaggagcgcctgccaacggtaccgctgtccggcatgtacaataaatctggaggaaaagtgagactcacctttaaactagaacaagaccagctgtggattggcactaaaggtatgttcttcctcgcctccttgctggcccactgcctgcctctggcacccagcagcactcacattttagagtgcgatttcacccctccttctgaaacctctctctccactgtgctttgcttgcttctggcttttaaatttgcttttagatgctcgccttttgtttggaccgttttccctcattgttttcagtctgatcttagggctgatccaccaaacagtggctcttcagttgcacacagatttgggggtcccaaacacgtggcccaagggccaaatctggtccacagaaaaatgttttgtgggatgacacacaatctgtaaaaattgggagatttcactaatctgattttttttttttttttggcttctcttgaaaactcaaatgatctggccctttggggcctgcattctcacatggcatcgatccactagagccgagtggtggtttccagtgggccatactacagtcttcatggtcccatttatcttagaagtagc

SEQ ID NO: 18159 - DNA, 1421 bp, Homo sapiens
aaattgaaatgccaaaaatgcttgagttttctatcaattttatgataacttgctattttcttcatttcacattcaactctaactgcatggtcaaagcaagttttgcagaatatctgagggttccccccagtttttgcaagggcctttgaaccctctgctagatcattctcttctgtagagcctgtccatcttccctttatcagtagtaagctgcccagcctctgtcaactttgcaggtgattttgcttagttctgtctcatcacattcacttgctgaagtgcatagacttcctgcctcttgctggacctctacttttgcttgtgggcagcctcattgaaggcagttgctacggctgacctggaaagaccctgccatgaagataggtgcaggcagagaagtctggatgggaactaagtctgtaagtgctcattggttccttggggaatatttctgtgtcaggaagttgtatagggaacacatcataactgcaggaactgacagaacaagaacttcctgaccctgtattggaagttttctttttgctagtaggagcagccgccttcctgctttggcctaaagggagagctgtagaagaagctcaatatgttggggcttctgagcccttgaaagcctccttactcaccagtcttgttgaggagcatggccatggactactcatgttttctagggttgaacaaggttaagattttcattcccacccatagcactgtacctctggagcccaaggggcaggcagtcttgtcacttgcccagtcctgttacctaagtgtcataagcactcataagaggacagcttgttctgggagttggctgctagccactggcttcgtctttctgctggcaagaagaagcggctatggaatgaccatcccagcagcgagttggcctcttcgtggggcgctttgctgagtaagtgacccttaagggctgctactcttgactaaactctgctagcttgtgtaggaggaggcagttctaacagcctcaaaagaatgagaacaagctccaggcaggaaaccggaagccgctggaggagagcatgtaccctgctcgtaggaaagttgaatctggctgaaggtctgatgtagtgatcaggagtgtgggtccagaattgcccaatttttggagttttcaagagaagccagaaatctgttgtatatttttgtgaaatctccagacatttcaggatgaaaggtgttttaaaagtttccatcttaaagacagctgctgcccaggtcctgctttagggccgactgttgtagagccactagaagtccaaacctaaataaacatcttcaggtcccttctccccagcccccatttttcagatactgaggcccacagaactgaagtaaaatgtcttaagtccccagctagaccagaacgctggtctctaaat

SEQ ID NO: 18160 - DNA, 1935 bp, Homo sapiens
aagcctcttactactgggtgtactgggttccaactcaatatgtggatgcaatcaaagacactgtgctggggaaatggcagtatttttgaaagcactttcacctctggcccaggagactgacccaaagtgaaggacattgccgggagaggcctgcagcatccctggatttcagagttctggaactttgttcataaaaaatctatattcaatctgaggtgatgtggtgactgaagccagaggtgatgtactttcaccattagcttaattttaacttaaaattaccagttccctttcttgcagtcagcttcataccatttttaaagtcaatacgatggaaatcaataaatctgaattccgaacatgttgtgtggaatactcttaagtgtgtttgagagtagatctgccaattatgttgacaagggaatgatcaaaagctttgttttttttaaaaaaaaaaaaagcagtttcaattgaaatattttcatacatctttggttgcaaacatttggactgcattgcaatgagttggggtgttttttttttccttttttgtataaaattgtatgcaaaatgggggtgggttagtaagccacatatttctgtccattgattcagatttaattctttccctttttcattctctcgcttcctcaatttgagtttttgttttaagaacccaaagatgtcagttcttcttttggtacctcatcaacgcttcctttcctgggctccctcccgccgtgctgctgctgcctgtgaacgcacggtgggagaggaagagctgctcagtcttgggcaaggagctctcacacttgctgtggtgttcgttgagcagcagagtatctcccagtgactcctgtttaaatgtcttgccctttgggcccccatctccaaggagttccattgctggttggatgattgtctgcacccctcactgagcttggcctagaggcccagcctggcatggttgtgcctgggctgtgccgctcaacagccccagctcccaagcagacaaagacctcttccaggaggagccaggtagaagatagttatacagccatatagctgcagatccagataaccttctttctttggaagttttcaagaaattcttaagcagtccaaggatgatttcaattatgcttctccattgggtccttctgctcatgcattcagttcaagtgtcctttatcccaggttcagagatgctgcctttctgaagaagacatctgaccctagcaggttggccagtgttattgaacaacaaaaatgggataaattgctttcatgattagctcaccttcttctggttttagcccttctgttctctgtacacgtgaacttctgtcatctccttctggcttggttgcctctgaaaggagggaaagtctcttggtaaattatctcttttgtgctgtttgctgtttctctgctgccgtctttgcagttctcctctcactggttgcaggctttcatagtaaggtttggcgagaaatgttccaaacatcacattttggattctaggctgtcacccctcattctgtgaaacgtattagcatgtgttcgcccaagatgactattccttgtgagccagttaatgatgatattctacgcccttcccttctaagctgtagttcaggaatccagcccacatagacagactcttgctttccatggtgtagtcaatgccaagtgatgcatctaggcaggaaaatctactctttgcttttttgggggcaattagtacatttgtgaagtgcagcatccaagaaacagcctgttttttcatcccttgagaaaggagcagtcattgcagcttttctgtccttgtcggcctgcagttcctggggaaaagagtacatctgagctacttgtccaagcctctgtctgcaggtgacaggttttgggggaaatgagatgcattaagtagaacat

SEQ ID NO: 18161 - DNA, 1049 bp, Homo sapiens
cccttttgtttgccaatgccccagtcctagagacttgtcctgacagtgccgcacacctacttttgatctctcagagcaggtggctccatccccagactagcctggctgctctccgaggcccctccacctgctccccttattgccccattcttgtggcttgccgggccacttggcctcccttcttgccggtgacagcgttccatcatctccccgctccccaagggccaactgcttctcactcaggctggtgtcatttcaggaggaccaaagcctgcgtgagcctttttattttcagtaaaatggtgcttttttccttacttcgagatactatatataaataataatgtaaatgacaccttttcgtacggagctgtttgagtattgctttacagagctcactaaatcagcttcaacaatcttgagctctgtggctcctcaccctgtctgcatggaagaccttgctggacgctctcgggagagcagacatagcaccagaagccactgggagaagtgttttcgatccgtgtctgggccacagtagtattcactgtttagtctttgagttccgtaagcagtctcttcatacatttcttacagtctggagtgtactgactaaatctgtgtaagcaaattgaaatactctttcttttaggtagcgtcacagtggttttttttttcctcaggataatttctatacaatttccttactgtcagagggaccagatctttccctcactgtggcaggggccgtgcaggtggataaaggaagagctggtttccggagagtgactgtaacagcgttgactcgaagctagagatggagggggtggccgtctcttagacattggacacctctcagagcctcctgagggcttctttgtcttctagaatctctaccggtggtcctcctgcaggttctggctcacagacatcatcatgcctttttttccctccctgaggcgccttggcagaagagcgtgaccctgtgagccaggccccccttagctctgcttcagatcacagaacacagacagactcgcgagttgctg

SEQ ID NO: 18162 - DNA, 1502 bp, Homo sapiens
ttagtgctgtgtttaggtcattgatccattttgagttaatttttttttttgttttttgagacggagtttccctcttgtcatccaggctggagtgcagtggtgcaatctcggctcactgcaacctccgcctcctgggttcaagtgattctcctctctcagcctcccaagtagctgggattacaggcatgcgccaccatgcctgactaattttgtatttttagtagagacagggtttctccatattggtcaggctggtctcaaactcccgacctcaggtgatctgccagcctcggcgtcccaaagtgccgggattacaggcgtgaaccactgtacccagcttgagtaatttttttatatggtttgaggtaggggtctaacttagttcttttgaatgtagaaatacagttatcctggcactgtttgttgaaaatactattctttccctgttgaatggtcttggcactcttctagaaaatcaattggtcatagatgaatagatttatttgtgaactctcaattctatttggttggtctgtatgactatctttatggaacactgcactgttttgattaccatagctttgtaataagttttctggtttttttttttttttgagaaagagtctcactctgtcacccaggctggagtgcagtggcacgatctcagcttactgcaacttccttctctcaggttcaagtaattctcttgcctcagcatcctgaatagctgggattacaggcatgcgccaccatgctagagacagggttttgccattttggtcaggctggtctcgaactcctgacctcaggtgatccgcccgccttggcctaccaaagtagtgggattacaggtgtgaaccactgtgctcggcctactataataagtttttaatcatgaattatgagtcttccatgtttgttcttttataagattgttttgcctattgagggctgtttgcttttttttttttaatttttttttgggggagggggatggagtattgccctgttgcccaggctggatgcaatggtggaatcttggctcactgcagcctccacttcccaggttcaagcaattgtcctgcctcagcctccccagtacctggtattacagttgcgtgcctccatgcctggctaatttttgtatttttagtagagacggggttttaccatgttggccaggctggtcttgaactcctgacctcaggtgatctgcctgcctcagcctcccaaagtgcttggattacaggcatgagccaccatgcctggctaccttttgctttttaaagatgtttaatttggcaatattttgggtatacaaaagaatatatgtgacatatatgtcataaagcataaaattaaatcaacaccagtgaaccctatacccaactgaagaattggaacataatctgtatacaataagtactatttttatgttcctcccctattcctatttttgccaccctccaagagaaaaccgctgtcctgattttgtgtcttat

SEQ ID NO: 18163 - DNA, 1008 bp, Homo sapiens
gtggaaattataactcatgagcctactgtcaatcccctggaacattatagggcaggttactaaaaatgtgatctgtgagcattttcaaaggaagtgggaatgaacaaacgttcattgatttttatttggtacctgctcttttagctttgaagatcttgcccctcctgccttggtttttcctttcatatttctttggtgtactattgcaattttgaactagtaatcatattcattttcttcaatattgtataatttttctagcctgaggtttctttccttgctgggaacagtcttgctaagatgataaagttcaaattatgatctgtagttctataaaccttgacccaaagtacatcatcttgacctttctgtgttcatcttcttttcctcttctagtgttgcattctttcctttacatattggagaccatgtctttattgaggaagattgtgtggtcaacgcagcacagattggttcctatgttcatgttgggaagaactgtgtgattgtgagtatgatgacttggctggcaaagcagcttcactttcccttcagctcccatccctcacttcggtgggaccctgtttctgtgactaagcagggtagcagtggtttccagtcttcccagagttggatttttcttgacagatatggaattttttcagctgggtgcggtggctcatgcctgtaatcccagctttttgggaggttgaagtgggcagatcacttgaggtcaggagtttgagaccagtctggccaacatggcaaaaccctgtctctacaaaaatacaaaaattagctgggcatggtggcgcatgcctgtagtcccagctactcgggaggctgaggcaggaaaatcacttgaacccaggaggcggaggttgcaatgagccaagattgcaccactgctttccagtctgggcaacaaaacgagacactgtcttataaataaataaataaataaataaataaataaataaaaagatttggaatattttctagacatta

SEQ ID NO: 18164 - DNA, 1042 bp, Homo sapiens
gcaaaagccctgaggttggggtccatcagactaattggggtcatatgctgacctgttattgtttccaggcttggggtttggtgtgtgggctggggggtgaagcacatggatgagatggggatgggagggttaccgaggaaaatacaggttctgttaccagaagaaaggggaatggatgctggacaagcaaaagcacaaatgtccactaaatcaaagggaaaattcaacagagctcatggaagactgaaattcagtctgtaatgtctgagacagtttgtcctgcctctagcatacagccttccccccgaaatgtacacaaacacacactctcacaaccttgctgcctccttctcgtcaggtaccacctgaagcaggaagttgcaaccaaccctcttgtcaccgtccctggctattacatggtatcatgaatggggaaaatagaaaggagcctttcacacagtagactgatccatttcctattaacaagattttaatttcaggggcgccgatgtgtgttgaaagactgctgcaaaattcttgacaacacagtattacctccagaaactgtggttccaccattcactgtcttctcaggctgcccaggtaaccttggctgttgattaattttattttaacttcctaaaactcagttgtattttccatcgcaaaagtaatgcttacgattcctatctctggcaatatgttgatagagctaacttagaaattcacctgtacaaagtacctagaaatgctacctaacatataacaagcatctgtttaaatgcataattgggttcaccagaaaataaggaaattatgaagggccaaacacaaagaggaaactaagcccaagctgtgagattgcacgggttaatgctgtcttcataatagagtgatttgaggggtgatactcatgtcgggatggaaataaagccttggatccacacatggcagagagatcctcaaatactcttaaaggattccctctcaaggaaaagtcgatgtaaaacaaatctgctgccaacacagggaatgtacaaga

SEQ ID NO: 18165 - DNA, 1050 bp, Homo sapiens
tggaatttaaattcttcggatattggaaccagaacaggctgtaactgattatttttgctgtgattcgtgcttactggagcctcgggaaagagggagacaacatgtaaagagaagcaatctgtttggaaaatgaaaatacagttaaattgctaatgaacccttgtcaaaatcaaatgtctccccttagaggctgatgattgtctagtctaatatgcattttttttgagtgggtcaattggactctaagaccaacaagataaaaaggcagccttgcatgtcacttggaccacagctgtctggccatgcagcatgccttcactgctgctgaagaaaagcagctgcttgttgagaatctcaaattctcagatcctaattgcctggccctgactctaagctgaaacctgctactgtctgccttgagctgttttagcctcaacacgagctatgctgaactgaaagcaggcacaggctcaatgaccaggactcagacgttggggccgttggagattaaggaccccctccgtggagcgctaaactatgaaaacgtcctggaacctggctgaaaagggcttattctctaatgggaccatctaagatcaagctgctgataggctctttgtctctaatacagaggctaattgcattcctaacttctaatatttgccaaacgctccaagctggggaagggcacatcgcaaggactatgacctctcctcctgcttttgacagaccagactcaaaccttctctggggcttctctcactgctgttgacttgttgcattcagcttttgggattagttgcagcttgcaacagtggactgacagcctgactctacttccctcacttttctcccagcacacacagcttagtaaggtaggtggattattaaaacgtagctgtccccagaaaggtattaggcttttctagtctgctcattgaataatcaggacaaaaggggtagaagattatgtaaacacattttgaaatttttaaaaattcagggtttcatcctttattagtttgctaaggataccataacaaagtacca

SEQ ID NO: 18166 - DNA, 1062 bp, Homo sapiens
atgcttttgtgcctcttacatacaacccttccagaggaaaggcctagctgagagtaagagatggttgaaaaaatgcaatgttatgattgctgaacagggcacgactgtttttgtaatattggagaaaataattaaagcctggcacctggggaggcttgatccctggaagcctcctcttgctgaaggaaaattcccagtgctgcctttccatgtgctgtgagtgctttgagttcagactgacaacagagtgggtctagcttctatgctttccatgaagatctcccacaaatgtcatccatgctcatgagatggatcaacttgtatcctgaacaagcaaaactgtttgggactcactgccttcaggcagtcccttggaagccaaggactctgggaacttttcagatgggactggaaacacttgggcaggagttcccctggtaggaggtctgttcacctgtacagcctaatggatgtcctgcttgaggtgccctaatattgcaaattctttgtttacaggggtaccacctgtgcccctgggactgtgcttctgtacatgaccacaactctcatgatgtcccctcagccctggaaagcatttgggttagcttccgcttactggtcagagttatactgtgcctgaattgatgcctcaggtcaggttgaaaaaaaaaaaaaaggttcagacagcaattaagggctgggcacggtggctcatgcctgtaatcccggcactttgggaggctgaggtgggcagatcacctgaggtcaggagtttgagaccagcctgaccgacatggtgaaaagtaaaaatacaaaaataaaaaaattagctgggtgtggtggtgtgcacctgtagtccctacaaaaataaaaaaattagctgggtgtggtggtgtgcacctgtagtcccagctactcgggaggctgaggcaggagaatcgcttgaacccaggaggtggaggctgcagtgagccaagatcacgccactgcactccagcctgggtgacagagcaagactccatctcaacaacaacaacaaaaaggaattaaggaggaagccac

SEQ ID NO: 18167 - DNA, 1022 bp, Homo sapiens
tgtcacctgagcatggcagctgctgctctagtaaccaggcactgattcagtttccccaaagcagtggtagctaagagaatttttctttcggaagagtttcagctgtggcaggggagtcccgtgcccttcccaacgcccctgtttttgtcaccttcctaggcttggagaaccccctgcctgagcgtccccgggaaaaagaagaaccagtggttcgagagacaggtgaggtggtcgactgccacctcagtgacatgctgcagcagctgcacagtgtcaatgcctccaagccctcggagcgtgggctggtcaggcaaggtgggtactgcggggccctgggcggggcaggattgcttggggcatctggaaaaggcaggaggaggcttggccaacaaagcactggtgacttgttcaggccctgtctgcataggaccattggtttccccatttcctgatatccaaggccctgcttccgtggctcctgccgccttttctgatccgtcttttttactctagcacctcgatgtgccaccttcatacgctgtttcttttgctcagtaagttcctattgtatcttcaagacccttgaaataacagacccagatgtactgcagcctcagggctttctccctggtcctggcacgaaagcacttcttccagacaccacatggctcacactgtggcctccttcaagtgtctgctccagtgtcagctctgtgagcatctccctggcccctctgctggtgcttctcatcctcttgcccactgcatagttctccataacacttctcacccaacatagtccaacatgtccttctttgtttattggatttaaattaaggggtttgttgcatgcactgaacgtaacattttgatgtgtttgcaactggcttctgtcttcacagtttcttaattactccaaactggaaaactagatgcctctgactcttaccatgatagaagtcactgatattttgcccatacttaaattgattagtctttgcccctacaaccacagtgtaagc

SEQ ID NO: 18168 - DNA, 1050 bp, Homo sapiens
tctcaaactcctgagctcaaacagtcctcctaccttggcttcccaaagtactgggattataggcatgagccactactcctggcctcatacaatttttatttgatataaacatatatagccatgagtgaactgggtcaaaatgtaaaatgtgtctcttactgcaggtaactgtcaatgtagttcgaatatcactgtgaaatatatagagaagaggctctgggggctcatgaacttggcccatggactgttgaggctttttttttaatctttagagatgatataaatgtagtgctttgaattctttataattagaagttttattcttaccccatcaccatgtcccaagataatttttattatcatctttcagctttaacatatcacagacaaaagttatttttccaaatagaattttaagtatggtataagaggtttttagaaatggaatgattggttttggcggaactgcctggcctgacctgtcactcgggtgaagtgtcagagagctgtgtcgaatgctggcggagaactgtccctctcctgcagagagaaggagctgcttatcctgggggataatgtgggttgagaaagaagtgttttatgagcagaatcagcacagagggagggaggaggaggtgtttaggggctgcagagagccgccagaagatgtgggaacagtatgccagcacggaggtgggtcagatccccatggtgggactctgctgagggttgcctccagccgagacttccaagggctgggattcagtgtgtgtttatgttctctggtgtgcctgataggtgggggcccacatgacagctggcctctctgtgtttcccttctggccgtctctgatttggggcccaagggccataggggggccagggcactccagatgggacgaaaagtcaagtccaagaaaaaaatgaaatccgggctaggcttgtccctgcttgaggatgtgagagagagagagagagtgtgtgtgtgtgtgtgggtgtgtgcgcacgtgcgtctgcagtccctagaaggatctctattcattggacaga

SEQ ID NO: 18169 - DNA, 1278 bp, Homo sapiens
cctgcttgtggttggggggtatttaatctgaggccttagggtccttcggtgtctttgagtgttttgtgtgtacatattttgctcttaaagtttataaatatacgtatattgagagtgtccacgtctcctcgctgaaccttaggaatcccttggcaccatgtcctgtgtgcattataaattttcctctaaactcaactatgataccgtcacctttgatgggctccacatctccctctgcgacttaaagaagcagattatggggagagagaagctgaaagctgccgactgcgacctgcagatcaccaatgcgcagacgaaagaaggtaagggccgcttggtcttaagatatttggtggctggagagagatactagctagaaggtgcctggcaggaagctaaccgccattatgtctctagtggggactgttcgttctagtactttggatacaactttcattgatagccaaggtttgcagcagttggccttggagtttcactggtttattttatttctgcatacttgggtcatctgtaacaggctaacccaaaacgtggaagcctgattattcttctcgctgttttttaaaatgagggagggaggagagggggatagctatctagactctttgagtgcttgtcttagggcgttttctaacttattttccatcaggagggcaggagagcctgtgcaaagcttgtttgttcaatcagcaaaaaaaaaaacaaaaaaaaaaccaaaaaaacaattttctaacctaacaacattgtggagtttgatggcaaattttatgtcctgccttcctccctcctcgcatttatttatttggagttgcttgcctgtgttgtggataagggatctgaactttaatatttttgaggatttaatcagtattggaattgtttttggatcttgaaatgttctgatgtcaccgctcttgtcttgtgtgtcaattccagaattagtaatacggcaattaagtagttaaactgttagttcatcacattactcttaagctttatcaattcggtgaagatcaaaagtactgattttttttaaagtagtagttgctagattttacgtgactgttgatactaaggtactgaaaaataggctgctaccatagagtacaaataagccactgataagaatcgttagattctttctccttttcaaaagtattttgataatattgggaacttaacagtagataaatgtgacaagcagtctttcctgactctgaacttgttttggtttctttttctcagatcagtaatgct

SEQ ID NO: 18170 - DNA, 1050 bp, Homo sapiens
aattatgtgcatgtttaggtcccttaaatcttttttttttttttttttggagacacatcctcacaggctagagtataatggcacaattttggctcattgcagcttcaacctaccaggcccaggtgatcctcccacctcagcctcccaagtagctggactacagccacacaccaccatgcctggctaatttattgtaatttttttttattttattttggtagagatggggattttgccatgttgcccaggctggtctcctgagcccaagtgttctcctgccttggcctcccaaggccatcccaaagtgctgggattataggcttgagccactgtgcctggcataggacccttaaatcttgataagactgaaacgcttgggtcagaattccatggattttagacaagaatcctgcttgtttctagactgtatttcaaaatgaatatcaagtaatctttgttatatatgagaaacttttctgcacaccgacccctaaaaaacaaaacatccttcgttctgaaattaaagtgtgagaggtttggaagctgaatatgaagtgtttataaatgacccttgtcacctttcttactctccatttctcggattcattctgtttttcatttcatccatgcctttcatgtctggggtcaaaaaaactggcaagcagaaagggtcttttgaagccaacagactacttgttaaggaggtattttaaatgaaatacccccaaagtgtctttattacccctagaaagatactttgaggggtaagaaatcattgtaattcaggtatttaaaaagtcagttagaacatctgttttgaagggcattgaggcaccttttagtttgacacagtacggtgctaatcaaattaataagctgtcttggaaagctcttgtgagtgcattgagttgttacatattcagaaacttcctgtcaggtgtttgacacaaagttttatttctagaattaacttttaaaaaaatctagtcaccccatgctctcagtttttctgactcaaagcttcctcggaatttggggctatcatgaact

SEQ ID NO: 18171 - DNA, 1049 bp, Homo sapiens
ttaaaatccttcagtgtcttcctgttgcacttcaaaacaaaatataaatcagtgtatggtctatacctttctgtcattcttttcttttattttcttaggctcttcaagccgtttcgtatcatttttctacatgctttttttatcctttgcctgaaatagtcctcaaccagtttttttcctgtatctggctgggttctcagtctttaagtatccagtagaagttcctccaaggggctttcttggaatcaacattctatctgaagttgtattccactattcattccttattagaaaaccattttctctttattcataacgtcataatttaatttttagtctatcttcctcagtaataatttctgtgaatgcagggattgtaatactcaactaacgtttagggactaggagagacagaatatcttcattccgaataacggctttttcaccattcacatgttcagcatttcagactaaactaaagaatgacggtgttactgagatttggagttccacaaaagtagaagtgctagagccaagaacctgctgatgatattggttgtcctttgaaaagaagccctcttagggctttggatgtttgttctgacaatatcagtaatctagttgcaaggaacttgtagttattatatttaaagtcatttcccatgaaatttatatttgaagttttctaattcttggttacgcactcaaatccccaaatggaaattcaattctgtctttttatttacagaatatactgatgataatgctctgattcctaagaattcttctgtaattgttagaagaattcctattggaggtgttaaatctacaagcaagacatatgttatgtaagtatcaaatctcatgtatttctcaaaatagactttttttagtttttttaattttgtgagaaaaaactgtattttagaactgaactcattactttaaccttaatgaatacatcttctcaagactgtgaggatagtaggtttctttgttcgtttgtttttgatttcctcccccagttaaattgacttagcctgttgtga

SEQ ID NO: 18172 - DNA, 1202 bp, Homo sapiens
gtgattaaattaactttcttcaaatattagagtccatcataataagtgacagctctgttggccttctcctcagggtgccattgttttccctttttttgacttaacatctttgccctgagaaagctgtggtttctttgacaagaagctattactctttgtatgagagaataaacaaacttactcagactgaagagtatgttttcaaaaattaaagaagtagcaattatatgggagctgttatttattaaagcaattatctgagcccttaaagggctgtttgtttttacaatgttgtataatggccttgcaggaaaattagatttcttattctctcttccagtgtacattgtcttgagtattgtcacatttagagaccatagggagatatgggactcctagtattcagtcgacactctgaacagattttctgtgtgatacattttttcattttaattgagtcccctcttcctcccctccaactgatagctttttataactgtgtgaaatatctagagaagaatgaagtaggctgagctacattttcaagcttaacattctttagaaaactaagaaaatgcccaatatttcaacattaaggtgtcaataggggctaaatgatcactttaagatgttttcagtttggaacttgaatgtgtgtttaattttttgtgaacagattgatgactcttccgcgtctatttctctggcccagcttacaaaggtatatatatatatatattcttgaaaatataagtttttttctaacatcatatttttttatgtggaacggttttttaagaggggttgggggaggacatattttgcaaaagcattgtacatattattactatcctgtaaagagtagttgctgttttgagaagataggggaatactttgtcagcctcagcgtattggagtattgttcatcttcaagacagaagaaacacttgaagctacacttaattattttttttccctcatacattttgtttaattatacattggaaactaacaaggttctggaggaatttcctggttttggctataaattatgtggaccttttttaagcagccaaaacagaagatttcctttacacggacgattgcatggttatttcttgaatatttgacttgatcccatgaaggtcaatattttaaatgtgatgcagttgtttctttatgctatagacttgtagtctgtc

SEQ ID NO: 18173 - DNA, 1095 bp, Homo sapiens
taaggtttattttataaaccactagttcagatcaactatagctctataaaacaccttaatgcctttttttttttttttttttttgagaccaagtctcgctctgtcccttaggctgaagtgcagtggcacaatctcggctaactgcaagctccacctcccaggttcacaccattttcctgcctcagcctcctgagtagctgggactacaggcgcccgccaccacgcccggctaattttttgtatttttttagtagagacggagtttcaccgtgttagcctgaccttgtgctccacccgcctcggcctctcaaagtgctgggattacaggcatgagccaccacgtctggcccttaatgcccatttttaatgtgtattcagattttatattatgaaccagtttttaatgaaatggacagacatgaaaattcagtggcagggttcaactagataacctcccattttatctgcttttattaatgtagtcagttacttttttgattaccttcaacagttgtgatctcacatactatacagcataatattaagtgttctttggactgctgttctctaactttgttgagcataagaatttcctacaaaagtatgttaaaaggctggccaggtagagggaccttgggcaaaaaaaaaaaagatcctggttgctccgcccccaattttgatttagaagttatgtgataagaccctgattctacatttttaacaggttgtccaagagattgtgaagttaggggatcctcagggcatcaatttacagaattaggtgttcatgttctcagtgaaaaaatacatacatatataagaacagttcctcagcttcatgctataaatattgttgaagtgtagtgtagtgagcaggtggggatgatgatgaaaatagctatgccatagaatgatattgaaaagatcttgtgtttttgaatatgtacttcagcaaatagtgttttcgttcacagataagaatgttttcctaaactcccaaccctgctcacttcctcaacttcacccccatctattttttatcagtcaccatcctgtgtttttgtggttcatcattgaacagtctgttgttatgct

SEQ ID NO: 18174 - DNA, 1046 bp, Homo sapiens
acaagagagaaagggataaaccaaaagcaaagggtgataaaaccaaacggaagaatgatggatctgctgtgtccaaaaaagaaaatattgtaaaacctgctaaaggaccccaagaaaaagtagatggagaacgtgagagatctcctcgatctgaacctccaattaaaaaagccaaagaggagactccgaagactgacaatactaaatcatcatcttcctctcagaaggatgaaaaaatcactggaacccccagaaaagctcactctaaatcagcaaaagaacaccaagaaacaaaaccagtcaaagaggaaaaagtgaagaaggactattccaaagatgtcaaatcagaaaagctaacaactaaggaagaaaaggccaagaagcctaatgagaaaaacaaaccacttgataataagggagaaaaaagaaaaagaaaaactgaagaaaaaggcgtagataaagattttgagtcttcttcaatgaaaatctcgaaactagaagtgactgaaatagtgaaaccatcaccaaagcgcaaaatggaacctgatactgaaaaaatggataggacccctgaaaaggacaaaatttctttaagtgcgccagccaaaaaaatcaaactcaacagagaaactgggaagaaaattggaagtacagaaaatatatcaaacacaaaagaaccctctgaaaaattggagtcaacatctagcaaagttaaacaagaaaaagtcaaaggaaaggtcagacgaaaagtgactggaactgaaggatccagctcaactctggtggattacaccaggtagctgagtgtagggggtgggtgtggaactttgttgggagaaggattttcttcagttttatccatgcttgtgctttttatattaattatgaatgctgatctagggaagtaggctggttttatgtagtcttttgttgtctttgaagaagggaattgccaaagacaaggttgtaaatagattttgggggtgagccacatttgtgttgatacaatcataatcttaaattgtgtgtcttccttagggcagaat

SEQ ID NO: 18175 - DNA, 1749 bp, Homo sapiens
gggctgcagccccgcagctttgtgagtccccctccccccgtcctctcccctcccccatccggccccggcgcgagcctctgccgcagcagctccgttttcacgcgcatctcgtttttgtgtgtgtgtttttgttttgtttttgtttttgtttttttgtttcagagaattggaagctaaagctaccaaagacgtagaaagaaatcttagcaggtaagatgggcgagctttccgtctcccgccccacgataatcgtatatttctactccgattcgccttttctgggttgagaagttcccccgtgacattttcttccgcacccggagagcagacattcgggagaagcggcctgggggaatactggagggattgcggggagatgcgtaattacgcgtgtgtttctttctttaaaaaaaaaaaaaaaaagcgcaaagcaattcttgtaaacttagttaaagcattctcacccttttagaatttaattaggggacttgtgcattaattactattgtaaatggttgcaggcattgtgtgactcatgattgaggcggcccttatggcgggctgtcaaactgttttggcttccccgttattactttgtagctcaaattgttgcttttataaaaagatactatgtgttcgcattcccccccgccccccccccccccccatacattgtagtcaggcggattctgttgcattggacacagttttgtccttgaactttaccaagcataagctgcgttttgttttccttcgaaactccatttctgtccatgttcggtgtgtgctctttttatcagctggtaaaataattaaaaatcttttctccagaagaggttatcgttcctgttgggccctgctgcttttgcatcaccgtgaagggagaatttttttttttttttaaacgatgtctttatggaatggaaatatttagcttcattgagctgtaattgcttaagcatcaaggaattgtactgtatttaactccttttcacattcattttctttcctaccgtcttttcctttcttattcccctttttcttttgcatcatattgggacactcagggaaacttagccaattaaccaaatccgtgaatagctttctttttttcttttttttcacttgttgaaaataaaatgaaatttctcctatctcaggttttaatgtagtttgctcttgatgattgcgggttttaggtttacattggggtttttaacactcacatttcaaatcgtctgaatattttgcaccgcgtagaattgttccaaattgctggcctattgagtttcataagatactaatctgttcaggtgatcgttaaagaatgtgttcagatggtgaaggataggcatcattggtttacccagtaagggattctctgttactcaaaataattatgggatcatttaaaggaaattaagtctgacatcactgactatttgtggtatatttacataaattttgtcaaaatctagtaaggaaatgttaagatatgaaaccattaaagaaaacaggttgagccattaaggtgtaatatcagcagaacagagcttagaggtctgtttctccttccatttttgttttatcaggtaactatatcagtataattcctatgaaggtgctctagtacttaattaaaaattgtctgtgccacaggtataattttaatattaggtagaactcgagtctgggttggctatttatcagagtttgaattccagctctgctacttgcaatatgaccttg

SEQ ID NO: 18176 - DNA, 1637 bp, Homo sapiens
aatgccccattgaaattagagtggcacggtgccaccagaccaagggttctcatcccgatgccacagagggaccacaggtgttatgaagtggtttgcaaaattgaatgtatgccaaaataaaataataaaaataaaaataaaaccccacaacaaaagcagatatggtctttagtgctcattagatctcaaagggtcattactcctcaaagattaagaaactgcttctttatgaggaggttgtcagaggagctgaatagtatcaataagaggaagatgtttgagattcaaaaggaagtaatattcgactaaggcatagcttctttccatcttaaaaaaaagccacccatgaaaataaatatagtttaaatttcctatttaagatgtcttattttaaaaatgatttgcatactctgtgtgtttgagttggctatgaaggagaaatcctagcatttccactcttgtaactagggaaaagcattttgaatttttagcagtagtatattatgtgatgatgactcagctgacttcccgtttcaaatggaatgttcaaaacagattgaaacctggttgaagaattttatactttgaaccttacaagatattttctgcaaacagtgactgattggattttgtataataacaaacaagattaagccaactcagttgttttgctgttcttattagtggttttcagtcagggagcacttattgagcagtttgctgcaataatattgaatatttttagagttatgacgtctgtgttttgttgactttggtcccttctttctcccattcttttgaagtttccctaaaacatgtgtgcacagacgggagagaatggtagttaagtgtgtgctgattttaaatgtccttttaaatatcatttattccttgataattgactgtataactgatgtaagagaaatatgttttatatgttattccacttgtgaatctctttgcaatgtgaggcatatagtgaaaatcttacaaagatagggtcataaaatgtgcattctctacactgctgcaggttaatcgtcctcgagccacgtttctgaggcctgtcagtcactatttcttagaaacctttgttggctccttcccagtgactctggaattaaagcccagactcttgttttttgctcagcttatcaatttagcactgtcccttccaccttttgccctgtccctaactcttccttctctgaatgtacctttcagtttctctcaacttttaaataacagctttattcagataaaattcccatatgataaaattcacccttttaaagtccacaaagtgtatgatttaatggtttttagtatattcacagagttgtgcaatcagcaccactgtctaattctagaattttcaccccttcacccaaaaaccccataatagcagccactccccatttgtcccttccacccagcctctggcaaccactaatctactttctattataactctatggacttacctattttcgtttaagtggaatcatactatatgatacttttgtacgtgacttgtcttatttagtgtagtgttttcaaggttcgtccatcatgtcgcatatatcctttattcctttttatgggcaaataaatttcattgtatggctattgcccat

SEQ ID NO: 18177 - DNA, 1044 bp, Homo sapiens
aatctttttctatttatttaggtctttaattgttttcaaagatgttgtgtagttttcagtgtgtaatcatgcttcttttgtggaatttattcctaaaactttttgatgctattgtaggtggaattgttttcttgatttactttttgggttgtccactgctactgtatagaaatacagtagattttttttaaagttttttaaaaattgtgaaacacgtaaaatttaccatcttatccattttaaatgatgtagtttggtggcattgtccattcacattgttgtgcagccatcaccaccatccacctctgcaactcttcatcttgtaaaatggaaactctgtacccgttaaatcataactccctattgccttcagctcttggcagccacaattccaccttctgtctgtatgcatttgattattctagatacctcattagtggagtcatagagtgtttgtccttttgtgactggcttatttcacttagcatagtgtcctcaagatttgtccatattgtagcgtgtgtcagccaattgatttttgtatgttgatactgtgttctgcggctgtgctgaacatgttcattagttccagtagtctttatgtatctggattcattaggactttctgtgtacaagagcctgtcatctgtgaatagagacagttttacatcttcttttccaattttcgtgcatgcttactcacacacgcactctcttttttctgactggaacctcgagctcagtgtcgaataggaagtggcaagatcagacatccttgtcttgttcctaatcttgaggaaaagtatgcagtctttatcattatgtatgttgtgagctgtgggcctttatcaggttaaggaagttttcttttattcctgttttgagtgtttttgtcttgtaaaaggatactggattttgtcagatgctttttctgtgtctcttgaaatcatcatgtagctttgtccttcattctattaacatggtgtatttcgttgattttcatgttaaaccacccttgcatatctgggataaatccactttgtg

SEQ ID NO: 18178 - DNA, 1363 bp, Homo sapiens
ttcccactttttgagatccatactgtcatctggatccttactgctacctgtttgtatgctattctccttccttcctaaggggaagacatgccagctaaagctaagctaagaaatatacagcattgctgccactctgtctgttgtcctcttttgtgctcatactctgtcacaaatatatattttttattaatttgtatatgtacacgtctccagaatttctttatgcacgtacaaggacatgtaaatatatatatattcatatccctcccaacacaaaaagatagcacactgagccttagattttgttttgtttttccagttaactttaagccttcctgatcctttcacatcagggtgtagaggagacctttgttttgcagctgcataatattccattttatggatatatccattttatttaactactgtatttgcagataattgtcagttattgtaaatagcatgttccccacccttcaatacgatgacccctttccacttccagataactattagttgtccttactttaaaaaatatgcaaaacttcattttatcctattctcttcattttacagctgaagcttttgaaaaaccgatccaaatctccaacttccttacctatttttgctccagttcagttttcatctctactgtctggtgaattctatagttttgaaggttgctagtgacttcctgttgtgtagtgctagacaggttttggtgattaatttaggtaggaggataaaaatgagaaaaggaatggggggtggcaatcaaatgggaaaagaggaagactggaaggaaatagaagaaggtgggatctgcatgggagaaagtaggagaacagaatgttttttggcagaagatgtaaagtgtatttttatttctagcttgtaacatacagctggcttctatgtgaggatgagctagcttgtggtgtgttgctgactgataggctagttgggccctcaggaaagttgcttcctgttttctgtctcctaaagcaaaatagagacacctaaccccttgtcccattattgtcatttctccctctgttgcccagggtggcatgcagtggcacaatcatagctcactgcagcctccaactcctaggctcagttgattcttgggcctcagcctcccatgtagctgagactacaggtatgtaccatcccccccccccccagctaattgttaggatattttgagttatctcagatttattctttgcttgcttttttcactgccaccatgctagtttggggaactacacattcacttagattttcgcaacagtcttctcacccttgtttttgccaatttattgcctattcttacccaacattttccctccctttttca

SEQ ID NO: 18179 - DNA, 1048 bp, Homo sapiens
tcacttgaatgatgtctttaaatattgtatttttgtgaatataattttaaagttgtaacatatacagcaatggctctaattgttacaagtaaatctttacattcttgtataatcaaatctctaaatcaccaagtcagtataagtggtcacttatgtgtaggcagcttataaataagcctgtaacacatgagtggtgattattgtgccatttgacttctcaccaaatctgaagtgacagcttttcatactgttgcccacttcattcctgtctcaccccatggttccagtctctcacctcaaccatgtccttactagaaccatcatcagaagcttagggatataagaagtttttccttcttttgccagatcttcagcactgatagggtattcctgtgtgtctcatagacacatcatagtatctacccactgaacacaatataaaggaaggtttaatacctctaataaatgttaagtttagcaggctaggccgctactgtaaattagactgttctccaaatttcaaataatcagcttacaactgaatttgaatacaacctgtcggtgaagtgaggacagctggtatttccatagagtgttaccagatagctcttgaaaagaaaagaaaacccccaaatgacacacttatagcccatatgaggaattgtgagtcacagggtttttaagacaggtttcctggaacttgtcttttgtcgctagtaggagccagcaggtgtatccaggcagatatctacatgagccaggtgggcaggcccatttatataaatgttggcacataaactcactacagtaaaaagtattttatgtaatttatattttcttatttttgaaaaaggccagatattatctgttctaatacatttgttcatttttaatataaggaacctaagcatcagaatgaattaagtgattgaccttggttttatcatggtgacagaaccaggaatataattgaaatctctctcctccagctggtgctttgccaaaaccctgtgccatgactttatccttttcatgcagaacattatct

SEQ ID NO: 18180 - DNA, 1117 bp, Homo sapiens
gcactgttaagacattgtagatgatcagaaaaaaagaaaagcaagacctggaagggatgaatgtagagtcagcttatttccaacagtgagagccaatactgagccaaagcatgggcagataggctgaagatagcagccgccagcgccacagcagcagctgatgtctgctgaatgctttctatatgtcaggctttgtcctaagtgcttttatatgagttaaatccctttaaccttacaactctgaggtgggtgtttttgccacagttctatagatgaggaaactaagctttagagaagttaacacatttgaccatggtcacacagtgtaagtggcagagccaggtaggcagtcaggctttagatcctgaggtcttaacgaagtgtgcttcaggaccatgttgttgggacaagcagtgcagagcctgacaggcaaagcaagtggagtgctgtgctctgccactgcactgctgtcttcagtaatgaaggaggcagttgtgatcattgctggtggaaccatagctcagattttttttttaaagaataatgtattaaaaatggaaatcattttgcttctagattggccagaatcttttaattatctgtatgagaggatttacagtgatacttcacatttgaagtagtgttgtatagtttttcaaaaaaaatctttcacattttattatttgaccctcataataaccctgaaaggtaagcaggacagttattttgtccatttgagagattaggaaactgagacccagagggtttaaatgatcagagcatttcaaagtaaaaataaccagattaattttaatatattttatataacctaatatagctaaaatgttactattttgacatgtcagtataaagtatttttaataaggcatcttgtgttcttttaaaaataccaaatattagaaatttggtgtgtattttgctcatctcagttcagactagccacatttcagtcagtggtcggtagccacatgtggcaagtggctgttgttttggatagtgcagacaattactcttaaaatgactgatcccacctggaaaattctttttaataatttgaataatatactaggtctccagaccagcccgcaaaaacctg

SEQ ID NO: 18181 - DNA, 1739 bp, Homo sapiens
cataaatttggcaggccaaaattggtcttttttctttgacttgtatttatttgtttgccatgcataatcacttgtacttttttctttttatcttttttttttttttttttttgacgtgtagtctcactctgtcgcccacgctggagtgcaatggcgcgatctcagctcactgcaacctccacctcccaggttcaagcgattctcctgcctcagcctcctgagtagctgggattacaggcgcctgccaccacacccagctaatttttgtactttcagtagagacagggtttcactgtgttgaccaggctggtgtcgaactcctgacctcaagtgatccacctgcctcggcctcccaaagtgctgggattacaggcgtgagccactgtgctcggccacacttttttctttttatgaatttcccatccttactatttgcccatttagttcttggacctagagttttatttagcagtttacttgagctctttgtataataaactcattaacatttcatcagatgtatttgatgcaaatatttcccacattgtggaccatatcgtatatatgaagtcattctgaggatgagatacgaggcaagaatatctaaattttgcctaatcccaggtgccccattgggaatacatacgctgaagatgcaaatacatgttcagaaggaggaaagcacaattaaatcacatttgtactattagcttggacttcagtcctaaactctagtgtgttgaatgcttctctgtattagatttagtatccttaaactaaaacatatctttccttagattagggaaagtcgaggtgaggagggttgggaaggaacagaatggatccctttaatttgttctaaaggacaggtattttccagtttcccttttaaattggaatatacacatttgaaaaaatacacatcagtattttatctattttatcaaatttattttttattcttaaagttcttgactaattgctatgctgagaaaacataccatttttccagatttagaaaatagtttgcccatgttttgcaaaagcttttaaaatctctagcattttatagtattaattgtttaatttagctgaagtttatttttatactgtatatttgggacttttttcctaatttaaaaaatcaactaaccattctgtatttcttaactaatttatatcttcagtgatttaatgacagtttctttattatataactttagggaattaaaaactcagtgggaactaacttctacttgaatgttcaggtattatgtttatgttttttcttatttttaaattttgagtcacaaatggaagctgaagctctctagagattgctacagtgtcttccagaactgttttccagacttactcagacatgagaaccccatgtgatacttgtttttaaatatatggattctgattagtaagtgtaaggctgaagaatcttttgcttctaaacagttctaataagcaaatttgaagagagccattctgtacttttatgttatggaagagagattaataggcaatctgaatttttttcttttaaaaagtgtgcctgggccgggcgcggtggctcatgcctgtaatcccagcactttgggaggctgaggcgggcggaccacgaggtcaggagattgagaccatcctggctaacacggtgaaaccccgtctctactaaaaacacaaaaaattagccaggcgtggtggcgggcgcgcctgtagtcccagct

SEQ ID NO: 18182 - DNA, 1063 bp, Homo sapiens
agagtttcatcagaatagaggagggcaatctggttgtcataacataacatgcttctaagatacgcccagtctgggggtgggggaaattagatgttttctaggcaaaaacgacaaaaatatttgcaagaaaggtatcaaggcattttgagcaaaagaaatagcgtgaaagaacgtgatacgttttggggaattgcaagtatttggtgtggtagaagagaatgcagtgagtgtggacatagcaggatatgaatctggaaaaaggtagagaggggccatgccaaggagtttagaaaggagttccaaaagtggttttatgatacagataacttggggcaggtagatgatagatttcgggatgcgtgaaagtgggtggggcagggatcaagacttgagccaggcctgcagtcccattaggaggtttttgtgagagtaaattgttgagggcctaaatcaaagaagtggcgttggagacacaggatgcatttgaatttgaggtattctgttgggcctgttgactgactagatacaggggagtagggagaaattgaggaagaaattcctgcttgagtaactacatagatagttaagccattacctaaaatgaagtttctctcccgtcactctggcagttatgacttattcttgcctttacttccctccttctatctgctgcttaaacccattcttaggttttgtcatttcttcctctacaactcttttctcacctgtatgttgaatcttaaatccatatttttaatccaaacttttttgaactccagaaccatatattcagttgcatcccgtgtgtgcatattctgtagcaatggttctcgaagtttacctgaggacaggatccctaggaggctcctcaaaactctttcatgagatccatgaggtcaaatcaattttcataataacaggaagactttatttgcctgtttcacttttattatgagtatatagtggagttttccagaggtgacacagtgtgggataccacaacaaattggatgcaggcgcatatgtgataatccacctaccttctgttaagccagatgttaga

SEQ ID NO: 18183 - DNA, 1097 bp, Homo sapiens
ctgatcagaagtacagcagttacttgagttcatgccttcatatagatcattcacagtttttgtatataggttttcttctggttctttgataaataaaaagcatcttcctgctcctttctcacagactttgtttggacctaaaactgtcacaattttttttttaatgtttagatttttaaagtaatgaagtggcaacaaacctgtattacagcagcaggtagctgccaccttaagttgatgttcaattgccagatgccacactaagtccagtactaagcatgtaaaagctgagtaagcatttttatgttcctcataatgttacatatacagttgtcccttggtatctgtgatgcattggttccgggacccccaacagataccagaattcatggatgttcaagtcccttatataaaatggtgtagtatttgcatataacctagacacattcttctatatgctttgaatcatctctagattacttacaataccaaatataatgtaaatgctgtgtaaataattgcattggtttttatttatatttttatttttggtttgtttgtttgcttagtatttttgatccatggttggttgaatctgtgggtggggcacacatggatgtggagggctgcctgtactttatcttccttaggtttcagaggtactttagaatattctagtgccatatggtcttcatgaagtgtttttgatagccagtgtctgcttattactgcatgaggtacacgaaggaatatacgttattgttacatattagaagcattatattgtctgggagacaaaattttcacccataattaggcctagaaagcactttgccccaattatcagtaagagactcatcagtgagcatcaagaatggaaaggattataaacagtagatggaatatttgtaattattcactgtaattcttcctgaactacaatttgtattactttagaaaaatggaagtcacatggaaaaaaaaaaagaggctaagatcatatattatattaaaaaagtataaatgacatagactaaatttaccagatgttcagagaagaaagaaaatggggagatcagtttgttaggtgaagggag

SEQ ID NO: 18184 - DNA, 1030 bp, Homo sapiens
cctaatggccaagctaatggtgacactgtgaatgcaactctaatgcagcctggcgtaaatggtcctatgggcactaactttcaagttaacacaaacaaaggaggtggtgtgtgggaatctggtgcagcaaactcccagagtacatcatggggaagtggaaatggcgcaaattctggaggaagtcgaagaggatggggaacccctgcacaaaacactggcactaatttacccagcgttgagtggaacaaactgcctagcaatcagcattccaatgatagtgcaaatggcaatggtaagacgtttacaaatggatggaaatctactgaggaagaggatcagggttctgccacatctcagacaaatgagcaaagcagtgtgtgggccaaaacaggaggtacagtggagagcgatggtagtacagaaagcactggacgccttgaggaaaaaggaactggggaaagtcagagtagagacagaagaaaaattgatcagcacacattactccaaagcattgtaaacagaactgacttagatccacgtgtcctgtccaactctggttggggacagactcctattaagcagaatactgcctgggatacagaaacatcacctagaggggaacgaaagactgacaatgggacagaggcctggggaagctctgcaacacagacttttaactcaggggcatgtatagataagactagccctaatggtaatgatacctcatctgtatcagggtggggcgatcccaaacctgctctgaggtggggagattccaaaggctcaaactgccagggggggtgggaagatgattctgctgctacaggaatggtcaagagcaatcagtgggggaattgcaaagaggagaaggctgcatggaatgactcgcaaaagaataaacagggatggggtgatggacaaaaatcaagccaagggtggtctgtttctgccagtgataactggggagaaacttcaaggaataaccattggggtgaggccaataagaaatccagctcaggaggtagtgaca

SEQ ID NO: 18185 - DNA, 1039 bp, Homo sapiens
ctcatgtctcaatggagtttgcgtaccacccataccccaaccagccgcagagagccagccctaagcaggaggaatcccaggttcaacttctgctagagatgttgtgttcttggcaacacaaattgaaattttaaaatactttttcatgtggaaaacacatggtgttttttcagtaggatgcatatagcataattaaattaggggttaagttggcttctttggactaaccttagaacctagtcactatttttttactttggtttggagtgagaattccagaaatctaaattataactaatcttacagttctccgttactcagaggccctgttttcatatttgtgggtcatcgaggccttttgcttccgtcttttccttctgactgcttgcctttagagatttctctgtacattacagctataccagaggactggagcaaaggaagttgaaaatcaaataagttgatttttaattattaacaactctgataagagttgattggaggagaaattattggctaaaaatgagaattggggattgtcttaagttttattaatccgtcactatacccagataaacagagatggccatggcatcttttctactcttttattttacaaagggaatgatgaaaggtggaaacaaacaagaagaagcgtggataaatccatttgttaaacagttttcaaacatcagtttttcggtaagtatgttttcttagcagctccttcctcttttaatggtggtccatgatttatcttgatttcactctttttaagaattatttttcatcttcgagtccttaggaatgtacttgatgttagagtaaaatcggcctccaaaccttcatttttatggttttagctaaaaacttcaatcacatgtcttattttaaaacattttaaaaattacattaggcagtgaaaaatgaagctttatgatccacttgaatttcacagataatgaaacacagtaaaattcttcattttttatttgttttcattgataaattaaggtctgctaacatgctgcattttctt

SEQ ID NO: 18186 - DNA, 1026 bp, Homo sapiens
taccagagggcatgctggtagatgctgccaaccactggcgaggtgagcattgtaggtgccttgttgctggcaaagctgctgtgctgcaggagacagcagaccagaactaagaaaccaaacctctcctcttgcaccttctatttacaaaatgtcagtgctagctggcgaaggaaaaaaacctataaagggcctaagtccattttttttcacagagcaatccaaaagggtaaaattggagctagaggaaataagtcagtcatccgcacagatcatcccaaccctttgactactcaccttccatatgtactcttctgcacgcatttgtccggtacaatggcaacgcaactctgtatttctgcttaacaagatacagctttctttcttgcaagtgaagaagtgttcatcctctctctaaactgaggagatgaacagccccaagggtcattgtattcatcactggctatataatcaccccagaaattcagtcacagtttgttacctaaagactgaattataaaacctaacatgtaataacttgtgaataaggtaaaaacaggaaaaaaaatgcttggcctatacaaattaacacatccatatgagaaacaatagaaaatatgcaaatctactaccattgttatttctgtaattgctcgtaagccatcattggtatctgtgccttcctcccttcactgcctattctgtacttaactcactttcaggttgaacctcagctgctcttggttctttagctggtggagttaagtaacccaaaccttcattcacaaaggatctgagcccccagttgtccttgccttttatggttgccattgtttttcattggccttcactactgggtatggaaatactaagaagcatcccagagaatcccctgggttcccgacagtcttcactgccttcatttcgtaatcacatcagttaccccagccagtagactagttttgtttgtttgtttgtttgtttgcctgctagttcatacctcaaggagtgcaaaatgtccctgtagca

SEQ ID NO: 18187 - DNA, 1053 bp, Homo sapiens
gcaggaaaaaagtttccaggagagaagatcattttttattgcagagcagtcagaatgaggagaggagcagacagagcaaagcctaagagaggggaagatgttaccctgtctggtgtccagtttcctcatctgctaaaagggcgataacagtagagttacaaacattaaattagtacacataaagcattcataggccaggtgcggtggctcacgtctgtaaatccagcactttgggaggccaaggcaggcagatcacctgaggtcaggagtttgagaccagcctggccaacatggggaaaccctgtctctactgaaaataaaaaaattagctgggtgtggtggtgggtgcctgtaatcccagctgctcaggaggctgaggcaggaggattgcttgaacccgggaggcagaggttccagtgagccaagatcacaccactgcactctagcctgggctacagagtgagaccccttctcaaaaaaaaaaagaaaagaaaaagcacttataatggcgactgacataaaccaggcatttattaaatggtggtttatcacagtgggtgttgattgtttttattacttgttaatggaaacttacctgtattataaaactcagcagattagagatggctaaaggtgccttaagttatgtaacctaagagtccttttaaaacgaggccgggcctggtggctcatacctgtaatcctagcacattgggaggccgaagcggccggatcacttgaggtcaggagttcaagaccagccgggccaacatggagaaacctacatctctactaataatacaaaaaatagtcaggtgtagtggtacactcctgtaatcccagctactcgagaggctgaggcatgagaattgcttgaatctaggaggtggaggttgcagtgagccgagatcccaccactgcactccagcctgggccacaaagcgagactgtctaaaataaaaaagaaaaaaaaagtgaggttatcagccagccaccttctgtttactagtctatttcaagttaattatttcagtaaaataacagtatctccta

SEQ ID NO: 18188 - DNA, 1012 bp, Homo sapiens
ctactgaagtcttccccagatggtaccgtttgagattattttagctcctatcaatgagaagatctcaaaaagatgcagccttttgtggctcactgccctcctctgtggtgaactgggagccattctgagctcactgtcgccagaggcagagccccctgccataggagttaatgcctggccatggctagggcgagctgaaattctgggcctagggagaaagcctcccatgtagaagtgcaaggaagtgaaggaagtcaagaggccaggtgatctgctaagtaactgtagttgggctctttcagtcctggaaaactgacttgtcctttttttccttgtttaggttccagctggggtgagagcagctcagggagaataacaaattggcttgttctaaaaaaccttacacctcaggtaaggataccagatacgctggtttatgtggctacgccagggagcatgggaacagaggttcgggtctgtatgtgagacaagggctgctaggtggtagtgaagccgagcagaggaaacagcagaggagtggtctgtagacctcaggcaggctgtggtcgaatctggtggttcacgctgtaatgtgcctgggaaccaaccaagcatacagattcccaggcctcacccagagattgagtcagtagatctgggctaggggctgggactctgcatttgtatgagggcctgcagatgaatttgacacaggtggtccttgttggcacatggagaaatcctggtctgcccctgaggtgagagcattttcttagcccctggcctgcgccctcctctggaggctgggtgttgagctcccacctccctcctccctcagggagcagaaccttgatggatgctgtcctcagggcagggaagagagaagacatggagccacagtggggatctggggagtgtccaggagtctagaggccagagcggtatggctctgggagcagtggaggtggggaagatggctctgcaccccgtcagagcaacgtcagagtgtcag

SEQ ID NO: 18189 - DNA, 1025 bp, Homo sapiens
ttgtttacagatttttttgtttgttttttgagaaaaaaaaatgtttactcttccatcatttaaaaaaaatgtaaaagacaaaaaaaaaatggaggatgatttaaaagatgctttctatctctgggaaaaaggagcagcatttggccatgttcttttgtttttctattcctgtcccaaatcaaagagcatggttctcaggaaaaccagttccccagtttaaaaaaaaaaaaaaaaattccttgtagtttcttagaggaaaaaaagaaaaaccccaacttttagcactgatactacatattgctctgttaaagaattttctctgccaaaaaaaaagaaaaaacaaaaaaacgcttaaagctggagtttgacattctgctttcagatgctgtctttttattagtgagtgatgatggtttgctaataatcaataggtaataattttttgtaatcccatcaagtggctccatatgtttctgctctctcgtgactgtgttaatgtttaactgttgtaccttaaagccgaaatcagtaactatgcatactgtaaccaaggtattgggcttacagagttgtttgttgtataaagaaaattttaaatgttgttgcaaactaacgagttacaccattttaaactttctttcctcccccctttttttgcccacaaatggtattataatgcttgcttagtcaaagaagagagactaaacaagggtaaaaattttaacagtacagaatttgccatcatatcattgccttgattctaactgtttgtgtcctaagatgcaaaagaagtcagtggcttttaactgtttacaaatagaatgtgattgtaaaatgtacagtttggttgtgtttgaattatgaaatttcttcagatataataaaccatgactttttggctgctcaacattaattgtctcctttttgtgaatttatttgtaggctcttttttataatgaaagtttcaaagttgctatgtatgagggttctcatagagcaaccgattaaaaatctaagcaaatatt

SEQ ID NO: 18190 - DNA, 1031 bp, Homo sapiens
gaggcaggagaatcacttgaacctgggaagcagaggttgcagtgagctgagatcgtgccactgccctccagcctgggcgacagagcaagaggctccgtctcaaaaaaaaaaaaaaaaaagacattattgtaagattggccactaggtgtcccagcttcatctgggttacgataacaatagctgaattttttccagcacttcctataaagtcgtgttattatcctagttttacaaatagggcaactcgtctcagaaagcgtaagtaacaaggtcacagcttataaagtctagactcttttttatttcattgagctataaacttccatatgataagcctgtgtccggccccatgttgcctgggcctggggctctgggggcctgactgctcacctctgggcctgtgtttccttcgtagatcaagtggcctgtgcagatccagagatctgccagaagatctgcagcaacccctcaggctgttcggacatcgcgtatcccaaactcgtgctggaactcctgcccacaggtaatgtcccttcactcctgaatcaagtcccctggagcacccagaaaggagatcaccggatgggctctgatccaaggcagggtcaagaaaggagggctggtgggggaggaagactctgggctccccaagaaaggctacgtcctgcaggaagctctgccccgccgtcctccctgaggttctgcctcctccagttgagcccactgggatcggctgctttggcagaaaaggaccgaggcccatgacctcccttccgcccccagggctccgtgggctgatgatggctgtgatggtggcggctctcatgtcctccctcacctccatctttaacagtgccagcaccatcttcaccatggacctctggaatcacctccggcctcgggcatctgagaaggagctcatgattgtgggcaggtaagtccccactgggtggggctggggcagggggaagagagagctgagcccacccagaggcaaagtccaggttcagccagcaacctatccaggctga

SEQ ID NO: 18191 - DNA, 1050 bp, Homo sapiens
ctaccaaagtgttttttacatagtcctagatccaccaccaaaaaaaggaacttggatccttgtcactcccccgtttccatccatttctctgaggggaaaacagccctgggccagtggggaagcaaaagagggtgcctgtttggagtccgattggagcgctgttggggacagcacaggggctcccctccccaggaggcctgcttagggtagggagggagtgctcggggcctgaggctgtggaggtccgcttcttcaggttccttcaggaggaacctggaaataggggccacacacacctgacaagaatccagtagctctgggtcctagcataacttcataaaagcttgtagctaggtatctctccccatttctctgtccattcacagaataggtcgggcggtaagatagtgttaaaactaggagatccacttctgcccatggccatttttcttgatctaatgtgtactagggcaggttgtattacagaggaaaatcagtttctttttttttaattaaaaaaaaaatttgattttgaggcagggtctcactccattgcccaggttggagtgctatggtattaccacaactcactgcagcctcaacctcctggacttaagcgatcctcactttagccttctgagtagctgagaccccaggaaggcacccccacacccggctcatttttcctgttttttgtagaggtggagtcttcctatgtttcccaggctggagtttctttttctttaaaccatctgatttggattccttccatttagaaatgatacatcccaggtgtgagtcttggaagatgcctggggcattgcccatgactgtagcccctgtgtctgcttgtcttattaaaggaccaggggcagggtgcaagcacaggtgtcaggcgacgaaaagagagttggctcccagccccacacagcacaacagtacaggtcacacaagagggccggcgtgagcagtgaagagaactccccaaaaccgagtgccagcttggatggtttctttttcttcttcagccttacagcaggtccaggttct

SEQ ID NO: 18192 - DNA, 1066 bp, Homo sapiens
tgcaacctgggtgatacaatgcaacgctgtctcaaaaaaaaccagcaacaacaataaaaaaaaaactgattaggacgataaagtatataaacttaatgaggcagataattaaagcttgtatccattagcttctgcgctgtaacaaactgctgcaaagcatgtggcttaaaacaacaaccatctatttagctcacaattctttgggttgggttcattcaggtggaacttctcagctgggctcattccagcacctgcctggatttaatcacttgtggtcatcttcacagaagacctctgctgtgtagcaggcattgggctaggccagggggtccccacctttcttgcttcccagtaatttgtctcagtaatgttttcatagtacccctgagccaaaaaacacactcagcagttctttttaattagttgggtttaaacagctgaagtatttatgtcctaacaacttattagtcatttgaaaaaaaagtacacataaaatgaaataaaaataccatttttacttcattcttaaacacccagaattgcttcctgagatgcgtgccctgtagggcactttacagcttcaccttggaatcagattggacaccacccctgtgttccacatccacattggcacaatacttgcttttttctttttttgagacagagtcttgctctgatttgtcacccaggctggagtgcagtggcacactctcagctcattgcaacctccgcctcctgggttcaagcaattcccatgcctcagcctctcaagtagctggcattacaggtgtgcaccaccacgcctggctaattttgtatttttagtagagattctggccaggctggtctcgaactggccttcagcaattcgcctgtcttggcctcccaaagtgctgggattccaggcataagccactgcgcccggccggtctgtttctttagaaagttctgtaagtatcacacaaaatgatttcagttgccttacatttttctctcacgaaatagaatgtaggaaaagaagggattgtagatctcattttggcaaccaagttatctttcccaccag

SEQ ID NO: 18193 - DNA, 1047 bp, Homo sapiens
tctaaggggatccatgagccacatgtctaatctcctgaaagagccctccatacaaatgaatactttgcattttgcatctttctgaggtacaagaaaaaaggttgtccagccacacctttagttttctctccatagcatacttttctgacagtgaatctcctaattttagaatcttctgcaatctggataggctgaaaatcatccaaattgccaagtcctggttcccttttccttaacaattcttccctcagtctgtctctttcctctcacattttactttaagcagcaggagaaaaacagaccaaatcttcagcactttgcttggaaatctcctgagttaaatatccaagttcatgtcttacatattctgctttccacagcactgtaggacacaattcagctaagattctactgctacataacaggattccctgggctccagttttcaattacatgttcatttcctgagtcctcaccagtggtgcctgtaacatctatatttctatcatcggtctgtataggatgatttctctaagatggtaaaagtgttctatacactcaaggtgttcctcacttcctcctgagccctcaggagttcacaggttctagggattaggatgtggacatctttggggagcccttattcagcctactgcaataactattaggtttattggtcaattatcaaagctttattgattgcttcccattttcttagaactacattggatactatataggctacaaggggtagtatagctaggctgaccaaacatactggtttgcccaaacagtcccatctatatatatgtgtgcatgtgtgtgtgtgtgtgtgtgtatctccaggctagagtacagtggcaatcatagctcactgcagcctcaacttcccaggctcaggtgatcctcccacctcaacctcccgagtagctgggactacaggcatgcatcaccatactcagctaatttttgtttattttttgtagagacagggtctcactgtgttgcccaggctggtcttgaactcctgttctcaaccagtccttt

SEQ ID NO: 18194 - DNA, 1079 bp, Homo sapiens
tttgtacttttagtagagacacggtttcaccatgttggccaggatggtctccatctcttgacctcatgatctgcctgcattggcctcccaaagtgttgggattacaggcatgagccaccacacccggccccccttttttttgagatgcagtttcgctcttgttgcccaggctggagtacaatggcgtgatctcagctcactgcaacctccgcctcctggcttcaagcagttctcctgcctcagcctcccaagtagctaggattacaggcataccccaccacacctggctaattttgtattttttttttttttttaactagagatggggttccaccatgttggtcaggctggtcttgaactcttgacctcaagtgatccactcacctcggcctcccaaagtgttaggattacaggcgtgagccactgcacccggccagcattttcttatagtaaagaaagtgaaaccacgggttgttgaaagaaggaagaaagagcgtgaatcttggtaggaaaaagaaggaaagcaaaaggaaacaaaagcttccagctgtctggcttgtattggcatttacaatgtttgctggtgtcccactttgatcagtgaaatgtggctgggaggaaccctgtgtcactttttgttttttctttttgagactcactctgtagcccaggctggagtgcagtggcgcaatcttggctcactgcaagctccgcctcctggattctcaccattctcctgcctcagcctcctgagtagctgggactacaggcgcccgccacaacgcctggctaatttttgtgttttcagtagagacggggtttcactgtgttagccaggatgatcttgatctcctgaccttgtgatccgcccgcctcggcctcccaaagtgctgggattacaggcgtgagccaccacgcccggcctgaacccctgtcattttttagcagaaactttcagagtcagtaagtggccaggcatttctcttttttttgtgccacaggactctggatgtttccaatgcagactaatccaaggctgctgtggatgtgtcctatgggagagaaatcgactttgtcta

SEQ ID NO: 18195 - DNA, 1035 bp, Homo sapiens
tgtgtgcaggtggaacatggtgatgtgtttggtttgtttttttgtttttgtttgtttgttttgctttaatgccttttttttcctgagcgaagtgggtggatttttcttcttaaaaatatgtcttgatgtctaatatataatgcgatgaattcctgtctgtgttgtggttcttcatattttctttgcttggtttttaacttcttttttctttggaatcatagtactgatagactttttatactcttcttctcttgcctccccaccccctggccatcctaacacacgggcacacgtactctggacttcttaaactttgttcctgaactacttacggagagtggggttgggggatattggaaagaagtctgtgaaatatagcctgactcctgatcttcacctctgcccccacagacaagttcaccgattcagccattgccatgaactcgaaagtgaatggggaacacaaagagaaggtgcttcagcgctgggaggggggtgacagcaacagcgacgactatgacctcgagtctgacatggtatagcctccttccctgagaacttgggagctggacagacagaatgggttgttgacagtgaggttcatttgagtggggagggaaatatttactgttgcccattgatggtagtcagataacaaatagaaaggtatagaaaatagcaaagtaaaaatatctattcttagctgggtgcagtggctcatgtttgtaatcccagcactttgggaggccaaggccggtgggtcacttgaggcaaggatttcgagaccagtctgggcaacatggtgaaaccctgtctcaacaagatatataaaagctatcaaggtttggtggcatgtacctgtagtcccagctacttgggaggctgaagtggaaggatcacttgagcccagggaggtcgaggctacagtgagctgtgatcataccactgcactccagcctgggtggaccgtgtcacacgcaacaaaaccaaaacatcaacttactctcttactatctataattaaccactcctagc

SEQ ID NO: 18196 - DNA, 1034 bp, Homo sapiens
agtcccctcagagcagcttcccccagccagccgctgtgtatgccatccaccaccagcagctgccccacggcttcaccaacatggcccatgttacccaggtaagagcccagctgtcccacttctgggtctgtttgccagggcccgtctgccatggggaccatcccattgccaagtccctggtgccacccttgccatagtgctccctaactctggctctcagagtctgtttcaggattctgtggtcttcccggctacttttttgttttccacaggcccatgtccaaactggaatcacagcagccccgccccctcaccctggggctccccacccgccccaggtgatgctgctgcacccaccccagagtcatggggggcccccccaaggcgcggtgccccagagtggggtgcctgcactctcagcttccacaccctcaccctacccctacatcggacacccccaaggtgagcagcctggccaggcgcctggatttccaggaggagccgatgacaggattcgtgagttctcattagctgggggaatttggcatggaagagctgaggggctgcaggtggggcaggatgcacgggttctgggtggggagtgaggggtcttggaggcagggctgtcccacagggcgcccgccgacctgcacctgtctgtgaagtatgtagggtgggcagaagccacagtcgccgccgccaggggcttgctcctggctctgtcctttgcttccctccgtcctcgctcagttgtgatccagcagcccccctccccactgcctccccagctctcagtgaccccgactgtctcctgacttagccgaggtaaggtcagtgcagcagacagggccagactggggtgtggggggctgagctgggcacatgagtgagggctctggcttactgggaaacagcgattgacctgtgcttctgacagcccccgagacaccttgaggaggccgctccttcccagacacacccccacgcccccactggacggcattggaggaagggacagctgcttgggttctaat

SEQ ID NO: 18197 - DNA, 1010 bp, Homo sapiens
gtccccgtggttgagctggtccccgtggttgaattggaagaggccatagccccaggctcagaggcccagggcgctgggtctggtggggacgcgggggtgcccccaatggtgcagctgcagcagtcaccactagggggtgatggagaggaagggggccaccccagggccattaacaaccagtactccttcgtgtgagccaaccccacccgctccaccctttttaaaccccccagccctgctcgtgagattgggctgggtagggacagaggaggccgaaatccctcccccatgcttcctgacccttgttggccaagggcatctttgatggtacaagcagaggctcgggagaggctcccgtcacacactacaggtcccctccccagggcaggggatttgggctccatgagctccttgaggggctcttctggtcagccccaccctgggggccatttccccattaactacccccagcccgaggcagggtgagggggaagggctgtcagttacattaaggtggttgttgttgttgttttaaacaaaatggagaagcataaataaataaaaaggtttatctcggttctatcgtgatggctatggccattgtttgctgtggggactggggacagttgggttgggaaggcagcccactcagtgcccacaggccagagggctggcccaggccagtccccatcattctgcagtgctgtgctttcggagccatccctgtgtctgacagccttgttcgtggagcactaaatgatgctcttggggtctcctgcgagtttttgtcatgggacagtgctgtgaatggcaggcatggtgatctccagcggcccttcctgagttatggctttgtaccctagagagagctggcagtgagagatgggaggcacggtggctgtgctggaagagattgaacgtggcagtcacagggtagccgcagaggggcccaatggcccccttctcaaagccaggctggagggatggcagagggcactagcttctgtcct

SEQ ID NO: 18198 - DNA, 1147 bp, Homo sapiens
ttgagacggggtctcactctgtcgcctaggctggagtgcagtggcacgatctctgctcactgaaacctccgcctcccaggttcaggcgattctcccacctcagcctcccgagtagcttggactacaggtgcccgccaccatgcccgactaatttatgtatttttagtggaggcagggcttcaccatattggccaggctggtcttgaactcctgatctcaagtgttcccctgtctcagcttcccaaagtgttgggattacaggcatgagccaccgtgcctggcctattttattttttaaacatagagatgggggccaggcatggtggctcattcctgtaatcccagcactttgggaggccaaggtgagaggatcacttgaggccaggagttcgagaccagcctgggcaaaatagtgagaccttgtctctactaaaaataaaaaaattaaccaggcatggtggcacatacctgtagtcccagcgacttgggaggctgatgcaagaggatcttctgagtccaggagttgggggctgcagtcagctgtgatcatgccactgcactgcagcctgggtgagagagcaagaccttgtctcttaaaaaaaaaaaaaaatggagatgggatcttgctttgttgctcaggctgatcttgaactcctgacctcaagcaaacctcccgcctcggcctctcaaaatgctgggattataggtgtgagccatcatgcctgaccaagtgctttaaaaatatacgagtttgttgtcacctttgtgatgggtgatttcatacaaaggtccagatttctggccgggtgcagtgcctcacgcctgtaatcccagcacttttgggaggtgaaggcaggcagatcacctgaggtcaggagttcgagaccagcctagccaacatggtgaaaccccatctctactaaaaatacaaaaattagctgggcatggtgccactgccttccagcctggatgaaagagcgagactctgcctcagatctcacctgagatcaggagttcaagaccagcctggccaatatggtgaagcccgcctctactaaaaatagaaagaaaaaaaaaaggtccagatttctggcttctcttaaaaaataagaagatgtggccaggtgcggtggctcacacctgttat

SEQ ID NO: 18199 - DNA, 1138 bp, Homo sapiens
cttctggagcctagaagtctgaattgaaggtgttggcagggcctggttccgtctgagaatctgagtggaaaccttccttacctctttctagcttctgctggtggccagagttccttggcttgcagctgtgtcactccagtctctccctctgtgatcacacggtgttctccatgtgtctctgtctgtgttcgtctctcttcttggaaagacataggtcatgttgggctagccccactctaaccaagcacaacctcatctcaacttgattatatctgcaaagtccctactttaaataaggttacattcacatttactaggggttaggaccacaaagtgccttttcaggggaatacagttcaacccttaacacactgttctctagcccccaccaaattcatggccttcccatctgcaaaatatatacatcccattccaatatccctacaagtcttaacccatcccagcatcaactcttaagcccaaaatctcatttaaatataatcaactcaagaagtcccaatcttattttctaaatcattaaatcagttttggatgagacttggtatggtccattctgggacaaaattcctctctctctctctctgcggacccgtgaaatctagaaaataagttatttgcttctaaaatacagtgatgggacagacataggatagacattcccatttcaaaagtgagaaattgggccaggtgcagtggctcacacctgtaaccccagcacctgtaatcctagctccccaggcggctgaggcaggaggattgcttgagcctgggagatcaaggttgtagtgagccatgattgcgccacctttattggaaacttttattccagttaccaataacacattcctcatttcctccagagacctcaccagaaacacctttaatattcatatttctagcagccttctgttcataacaatatatgcatcctgttaagatgataggagatttctctgcacctctcctctttgtgagcctgcagggacattccctttaatgtccatatttctaccagcagtctcttcaaggcagtctaggtttttcctaacatacacctcaaaattcttgcagctttggccaggcacagtgcctcacatctgtaatcctaacactttga

SEQ ID NO: 18200 - DNA, 1062 bp, Homo sapiens
ttcttgggcaattgcagataattccaagaatgcatatttgggctgggtatggaggttcactggtaatcccagcactttgggaggcccaggcagaaggatcgctgcagcccaggagttcgagactagcctgggcaacatagcgagacctcgtctctacaaaaaaaaattaaaaagggggctttgggaggccaaggcgggcagatcatgagggcaggagattgagaccctcctggccaacatggtgaaaccccgtctctactaaaatacaaaaaattagctgggcatggtggcgcacacctgtagtcccagctactctggaggctgaggcaggggaatcgcttaaacccaggaggcggagattgcagtgagccaaggttccaccactgcactccagcctggcgacagagcaaggctccactcaaaaaaaagatttaaaggggaaaaaattgaaattttctttgtatctaggggtatccgtcactgaacagaaattcttaattttggctaggcgtgatggctcaggtctgtaatcccagcactttcggtggccggggtgggtggatcacttgaggccaggagttcaagaccaccctgaccaacttggtgaaatcccatctctactaaaaatacaaaaattagctgggtgcagtggcgcatgcttgtaatcccagctactcaggaggcagaggcaggagaatcacttgaacccgggaggtggaggctgcagtgaacagagacagtgccactgcacatcagcctgagtgacagagagactttgtctcaaaaaaaaaagaaaattttaattttaatgtagacagtatgaattatcttgttctgcagttggttgctttttgattgcttatttaatagagttgttaagatattttacatcttctcctgttagctgttcagcttttcctttcatattgagaacactacacagtgctgaagtccagctggtacacaccggggtgacaccttggctgcatctgttctcaacagtcagacacttcttctaattggttgatgctgggctgtactggttgctaaatattgcacatc

SEQ ID NO: 18201 - DNA, 1050 bp, Homo sapiens
actcccctggctttcctgtctcctctccctgcagatctctgaccgcctgcgccggaactggcccccctccttcttgtccgagttccgggctctgcagttctcgctcatgctctgcgcgtttgttggggcactgggcggcgcagccttcctgggcaccgccatcttcattgaggccgaccgccggcgggcacagctgcacgtgcagggtcagttaggagctgtgcccggcccagcttcttgatctgcctgtctgtctgtccatctgtctgcccactcctgtgcacctggcagctcagtccacagccctccccttgtttggcctccagtctgtctgcatccacccctggggtggctctgtggctgccccatccatttcccgctgcctgtttgcccttctctggctttgtctgtctgtccatccagctcaccctggctctgaccctcccccctcaggcctgctgcacgaagcagggtccacagacgaccggattgtggtgccccagcggggccgctccacccgcgtgcccgtggccagtgtgctcatctgagaggctgccgctcacctacctgcacatctgccacagctggccctgggcccaccccacgaagggcctgggcctaaccccttggcctggcccagcttccagagggaccctgggccgtgtgccagctcccagacactacctgggtagctcaggggaggaggtgggggtccaggagggggatccctctccacaggggcagccccaagggctcggtgctatttgtaacggaataaaatttgtagccagaccccaggtgcctgctctcgtctttctctgggtggcctctgatcttgcaccccgtcttcaccccagggctcctgaagactgtgggtcattcctcagggctctgggtgagtctctgcccttctgggctgggcgactgagatgggggactgctcttctccgagtgagctggctgagtgtgaccgtgagtcacgcccctgcttccctggagcctgtcccttgcctcacaggcctggctgaggtgggggtgggcactgccctt

SEQ ID NO: 18202 - DNA, 1052 bp, Homo sapiens
cgaggctctgagactgagtgctttgctcaaggccaaggccacctgggccggcaacgtggtcaggtcctgctgcggggatgctccgggggtctgctcttggggtgtccgccacccccaggggatgccttattgcttgcctgagccctatagactcagggtccagggtgggacgtgagaatgtgcatttctggcaagtcccctgggggtgctgctgctggggccccaccttgagaacccttgttagaggcagcctctgggccacacagcagggaggcgggagatgggaggtgggggctgggaggccagggagtgggggcagctgtaacaaagccgaggctctgtgctctcactgctagagagtggggtgggggcatgggaagcccccggggcaggcaagggtgtctgggttgcagccccacccaccccgagctgcaaggccacatcctgccatctgggggtgctgtggaccccatggggagtgtgggagagctcaggctgggggcctcagactctgacagtggaagcaccacctgccacaccttgaacttgggcacatgcctgcctctgtgcagaagcctggcctcatctctgctgtccccggcagcctcttggtcaggactcagggctggacaaactggctgaagcccactgtcagcaggagaggaccatgagcctggaaaacggaggggaagagatgggagaacgtggccactgctgcccctctgctggggagctctgctactctcttctaaagtggatctgtggcctgtggacagcagctcctgccctccctggcaggaagccaggccgagtcagagtgcagacaggactggggtctggggggcaccaggcagtgcaggggggcagagctctgcaggaagactcctttccagctcctggggcccagaatcaagttgtggttccgaacctactggggccttccgccatcctccttccccagacctcgctggggcagggacctcagctccccaggtgcgcacgtgctggtccagtggggcttcctatggggtgggtcagtttgtacagaactt

SEQ ID NO: 18203 - DNA, 1105 bp, Homo sapiens
taaacgaactggatgatggccgccagctactaacagacctcaacttgcttacccctggaatgtggtgatggatggttccttgcagggcatttagggtggaaggcagtgatgtggatgtacctcgcagagcggatgttccactgtgtagcctggcttctaccctctacaagcttaagagggaaaacttagggaactatgacctaagcagtcaagcaagaaaccacacatatgcacatacccagaatcgaacaccactagaactacccaaaaactgagatggttgggggaggtatcatttattcatattactttctcccatgtactttttgaaagacagcttattctttcccttttagagatgagggaccagatttaagagcttattttgtgctttacattcattaactcacttgatctccacagcaactccatgagaagggtgctaatattaccactgggtactgagtagtacctctctttcactagttgcataataagaattaacccagagagtgacctgagggcgggattttggacacacttgacaagagaggaagaggctggagcgcaggaggtagctggtgctgggctcctagtcttggcagaggagcccaaagcacttggctgccctgcgtgtcactcatctccctttgcctcccagctggagtccctggatgccctagagcctgaggagaaggctgaggactgctgggagctacagatcagcccggagctactggctcatgggcgccaaaaaatactggatctgctgaacgaaggctcagcccgagatctccgcagtcttcagcgcattggcccgaagaaggcccagctaatcgtgggctggcgggagctccacggccccttcagccaggtagcagcccactggactgggggagggcgggggcgggggagaccgggtacccccgagaccctgtcccctatcgatcctgtcccgccaggtggaggacctggaacgcgtggagggcataacggggaaacagatggagtccttcctgaaggtgaagtcacggccctgcccctcctctgcctgtcctgcgccccgcgcccctctctaacgtcgctgtctccctccctcctgtgt

SEQ ID NO: 18204 - DNA, 2035 bp, Homo sapiens
cgccacccccgccagtgtcggcgcccgcggccgaggccgcgccccccgcctccgccgccactatcgccgcggcggcggccaccgccgtcgtagccccaacctcgacggtcgccgtggccccggtcgcgtctgccttggagaagaagacaaagagcaaggggccctacatctgcgctctgtgcgccaaggagttcaagaacggctacaatctccggaggcacgaagccatccacacgggagccaaggccggccgggtcccctcgggtgctatgaagatgccgaccatggtgcccctgagcctcctgagcgtgccccagctgagcggagccggcgggggagggggagaggcgggtgccggcggcggcgctgccgcagtggccgccggtggcgtggtgaccacgaccgcctcggggaagcgcatccggaagaaccatgcctgcgagatgtgtggcaaggccttccgcgacgtctaccacctgaaccgacacaagctgtcgcactcggacgagaagccctaccagtgcccggtgtgccagcagcgcttcaagcgcaaggaccgcatgagctaccacgtgcgctcacatgacggcgctgtgcacaagccctacaactgctcccactgtggcaagagcttctcccggtgtgcacggggcctcggccgcccgctaggccgtggggagggagggacgcgacggaggtggcctggccgtggctggcggggagggaggcggctgctgaggctggggaaggggagccactcccagggcggagggaggaagcctctcccggttaccagggagcaaggggtggtcctttgtcgaggaggtgggccttggggttgacggaagcttcgcgtgggaggaggcggcggcggcggcagcggctgctgggctccaggggagggatttcctgcttaagtgtcgctgtgacggcctgggctccgggaggaggcgcagggatcctcggaaaggcctgtggtgcggtttggtggatttggggcgcaccacctccgccctaaccccaaccccaacgtgtccccaggccggatcacctcaacagtcacgtcagacaagtgcactcaacagaacggcccttcaaatgtgaggtaggaagcccgcctcctcctgtcttggttttcatgattttgatcctcatggtagctgtctgagtcagtctctcagaccccctttttctctctcttctttttgcctttttgctccattttctcatcccttcttcaaggcctcatcatgtcactcccatttcctacagatcaaagatccccaaggctctgattcctttaatctcttgctcccccctccccagcccaccaagctttaactctcctgtgacaccccccacgcccctcccccctcctcagaaatgtgaggcagctttcgccacgaaggatcggctgcgggcgcacacagtacgacacgaggagaaagtgccatgtcacgtgtgtggcaagatgctgagctcggcttatatttcggaccacatgaaggtgcacagccagggtcctcaccatgtctgtgagctctgcaacaaaggtacatgccgagggctgccgggagggccaggggcagagggtgggcgcctggccagacgccttgccacggatacgggttaagggtgctgtagccaagagctcgtggcgtctagattcctacaagaggtcaagggagcagcggggggacacctgaatgaacatcattagactctaagaagtcctggttggaagagatgatctgccagagaggttgaacctcctggtaatgtgtggggaaagcgggagtggaacttggctgctctggggaaggagtagtcaagaaagccagttccaggggtcacaaggcaaggtttccgctgcgcagccacaaggtcttgtctccagctcctggggcaggtggagtacacgggccgggctttaccagcacgcaccctgcacgggtagcagagaaagctgccttcagtcagactcaccggttaactgggttgagaccgcggggcactggagggaaggggacacagc

SEQ ID NO: 18205 - DNA, 2536 bp, Homo sapiens
ttgagaactgctctgtctgggtgaggatgcaggctgaggcctctggggtccagataggaagtgagcaacggctgtgtcccaggggaagcaggctgggaaggtgtggggtgagggcaaggctcttgccattcagatcgcgctgtgatccgtggtgtttctcctgtgcaggtactggtgaggtttgtccaatggcggcggcagcggcagcggcggcagcggcagcagcggcagcagtagcagcccctcccacagctgtgggctccctctcgggggcggagggggtgcctgtgagctctcagccacttccctcccaaccctggtgagctccaagttggttgcgggggagaggggagaatggagtagagtcccttggtacaagctcctctcccccctcttttcccaccaactcctatttccctaccaaccaaggagcctccagaaggaaaggaggaagaaatgttttcttaggggaattcgctaggttttaacgatttgtttctcctgctcctcttctgtcagacctgaccccacacaaacctgtcccctcggttgtgttgaagtcccctggacagtgggcaggggtggcagaggacacgagcagccactgcccgtaccccctctcctctctgtaagcccatgccctgtcttcccagggacttgtgagcctcttccctcgacggtcctcttctctccttccagtcctctccccctgctgtctgcagcccctccccggggagttggtgctttcttttccttttttttttttttccagggggagggaggagaggaaggagggggatcagagctgtcccaaagagggaaagcggtgaggtttgaggaggggcagaagcagggccggcaaaggttgtaccttcataaggtggtatggggggttggggtcaggccctgaacatcgtcctacttgagaatctgtcaggggaaaaagtcaaggggagcaggaggaagagccaggagggccagaggcagagaagagatggagtcttaggggccagggtgagcgaggggtccagggcctagaggtgcttcctgggggcgggggaatgcagccagtgtccccctcccctcttccaccccagctccagccctggtcttgtcttttcatccctcttccccacgacagaagaagttgtggccctggccatgtcatcgtgttcctgtgtcccctgcatgtaccccaccctccaccccttccttttgcgcggaccccattacaataaattttaaataaaatcctgtttctggctctggattgaatgaattgccctcactaagaactgccgccaaccccaagggtttcttctcggcctggtgtccgtcaatccagccttgctctgccctgtgaggctgtgaggttctggctccgccctccccaggggcagccttactggcggcagcacagatacagggcggggccaaggctgtggctgtggagagcaagttccaggtctctggggaattcccaactcggacaggcccagaatagcccctggaggtttgaagaggccccgtcagaaacccaaacagagctgccagacgggaatgccgccctcccccgtccacactcatggccgctgctcagcccccagccgcatccctccccacgcgcgtcacggccctgaggccatggtgggtggatgcggctgcggaaaggctggggagtccgagccctaggactgggagcagcgaggtagagaatgaaagctgcacctgtccctcatcctgggcatgggccactctgtgtttacacgggctcctctgcccagctcctcctgccccttggaattccctttcctgtccccgctccgtcctttccagggccccttttttgagccttccagcgccagtttctgccgctcctttctgcaggctccattctctccaaaccccaccctgctcctcctctgcagcctccccgcgtcttgccccatcttccttgccctcctgctcgtagagacgcctccacccggtcctgcctgtctcactggtcccgtctcctcgcagaaccctctccgtttcccccaaatccccgtctcttccaggaatcccggtgaccgttggcgggaggggccggggacttaagaaggaggcgtctctcctggaggcgcgcgtgagaaggggcagggagggggcgcgagtggtccccgggccggttgcctgggtaacgcgtggctcccttgggctggcgggaggggccggaggctcgcgaggggcgggggcggcgacggcggcggagcgtaggggaggggaccggagaggaggggatgagcacacgggagaggagaagagggagacccgccgcctccctccctccctagctgacttgctccctcccgggctgcggctgctgcaaaagccagcagcggcagcgggagctgtccggaggccggcgtcgaggtgagacccgggcagactgaggctgcgggtaggagtggaccgaccgacggctgacgccgggcggactgcacgggaatgcgggtgtctggagggctggtggtggtgctgggcgggctgaacc

SEQ ID NO: 18206 - DNA, 2089 bp, Homo sapiens
tggatagttgtagtagctcctaactgggctctctgcttccagcttctgcaattcagatgaaccttttaaaacataaatcatatcactttttttttctttgagacgaagtctttctcttgctcaggctggagtgcagtggcatgatcttggctcactgcaatctccacctcctgggttgaagcgattctcctacctcagtctcctgagtagctgggattacaaggacacgtcaccacgcctagctaatttttgtattttctagtagagagggggtttcgccatgttggcgaggctggtcttgaactcctgacctaaagcttcccaaagtgcctgcctcagcttcccaaagtgctggaattacaggcgtgagctgctgcactcagccataaatcgtgtcacttttccacttaaaattttccaagggattccatcttgccagggaagagcatgtcaaaggagaatccaagcgcttttcccgccacctccagttctctgcactcttttttttgtttttgtttttggcgagtaggggagacggagtgtagctgtgtcaccgaggctggagtgcagtagtgcgatcttggctcattgcaacctccacctcccgggttcaagcgattcttctgcctcagcctcccaagtagctgggattacaggcgcccaccaccacgcccagctaattttttgtgttggccaggctggtctcaaactcctgacctcgtgagttgcccacctcagcctcccaaagtgctggcattacaagcgtgaaccaccatgcccggcctgcactcttctttgaacagaactctgttcttgtcctggggcctctacccttgccattcccctgcccagtatgttcctccctgttcttcacattacctgtgccttcctgtcaatcaagatctttgcttctcaccctctctgaggtccaaccctgaacctcaggtcctccaagacagaggcctggggacctgcatgtttaaccagctccccaagtgatgagtgaggtccaggcaggtatggtgtacaccacctccatcccttccatgtatcttaccttcctcttctccaggaagctcagcccggagccagaaacgggaggcccgcctggacaaggtgctgtcggacatgaagagacacaagaagctggaggagcagatccttcgtaccgggagggacctcttcagcctggactcggaggaccccagccccgccagccccccactccgatcctccgggagtagtctcttccctcggcagcggaaatactgattcccactgctcctgcctctagggtgcagtgtccgtacctgctggagcctgggccctccttccccagcccagacattgagaaacttgggaagaagagagaaacctcaagctcccaaacagcacgttgcgggaaagaggaagagagagtgtgagtgtgtgtgtgtgttttttctattgaacacctgtagagtgtgtgtgtgtgttttctattgaacacctatagagagagtgtgtgtgttttctattgaacatctatatagagagagtgtgtgagtgtgtgttttctattgaacacctattcagagacctggactgaattttctgagtctgaaataaaagatgcagagctatcatctcttaaaaggaggggctgtagctgtagctcaacagttaggccccacttgaagggagaggcagaattgtactcacccagattggaaaatgaaagccagatgggtagaggtgccctcagttagcacctgtcccatctcgggccctccaactcctcccagtcccactccagtgcagccagctggctccaaggtagaaacccatgagcactcagggagcagtgtgccttcagctgcagcagaagcagcccggaggataaaatgagaaccagctgcacacgggccctttaactcccaagccccacccctgggcttggcctgccttgccctgccgggaagtgatccccaaggcagggtgagagttccccatctgaggcgtttgttgcagctacctgcacttctagatgtgagtacattgtactagccccccaaaccccaaatcaggggcagatctttgtatcccttga

SEQ ID NO: 18207 - DNA, 1050 bp, Homo sapiens
caggtgcaccagcggcggcggaccctcagactctgccctcccctccctttaacccccttccagccggacgggaggcggggcagggctgagcatttgtgacacctacatttccgtggctcccttcttttcccccgacccctgtttatctcttcgccttccagaagttcttttccatcaggccgtcgcaccttgcgtgggaaggagcaccccacttggaagcaggaggcggggttcagatcttggccctacccctcctgtgttaaagtccgcgagcctcagtttccctcacagtattttttgcctcgccttacccggttttgaggatctgtacgagaaagagaaaggaagtggacatttgttgaattcctgcatggccaaataccacgcagactgcttcatccgccacgtttaatccttattacttggtgttctcagaactcccatttcatggattcttaagctcacagagtcagtgaataacagaaagggattcagatctagccgtttagctgcacagtggagttcttctccagagtcttcccttgtctgggctctggctggaactattcctcagccaaatcctcgccccagaacagtgcttcctgtttctccagctgagaagtctccctttcagtttccttcttccagcacggagtacactgctctgcctccacttagattacttcagaaatgaaatgcagcaaatatttatccagcagtgcagggagttgaacttttggagtcgggaaccttggattcttgttctggctctgccacttactgtgtggccttgggaagtcctttgtcttctctgagctttcttttctctttgcgtaaaagcggtgctcttgtcccattctccctccctgtcttccagcaggctctccccggaggctcagccccctctgctccccatgggcaactgccaggcagggcacaacctgcacctgtgtctggcccaccacccacctctggtctgtgccactttgatcctgctgctccttggcctctctggcctgggccttggcagcttcctcctcacccacagga

SEQ ID NO: 18208 - DNA, 1022 bp, Homo sapiens
ggagggaatcagcttcacaaacgtagcagtgggtgggggtcatgttggttaaccagttcacacatcagctcactaaaggaaaaaatatttctgcaaaaaatcttcacttgtcagaggggggtgcatgaaatttgagagccatgtgttatgcatccagctcttgaactggtctcagcttcagctggctgcagtgccctaggaagttactatgggaaaagtggaaatagttgaggcccagggaactgatcaggccagaggaagtggaagctcaagatcaactgtgcttattttgctgatggctgggcctaaatgccccaaccacctacttgggacaggaaatgacaggaccctctcaaccttggactgggaaaggagggcttcctggcccctgacagaccctggggtcctgaggctaccttagttgggattaaatgcccgtattggtctctagctgtcactccctctgctccttcctcaatttctgcacacatctcagagcttcctctagcagctcttcgacctgttttgttgttttattttctttctccccaggtgtgaatcaacttcttgggccttggctctgagttggaaaaggttttagaaaaagtgaagagctggaatgtgggggaaaataaaaagcttttttgcccagtggcgtgtatggtgtttattgggggttggattgaggtggggattttagggtaggcaggcttagaagttttgggggactctttcctgttgactctctagtttggacacaggttggcatagggcataggttacttgagctctccccatggttgacttggctttggtaaacacctgtcttgttttcttctacgaaataaaatggataattacagttagttgggcgggtggggtgtcaggtcatggaaatgctgtgacataaatgcactgtgaccttggcaagtcttgcaacctgcagcgcctcaatttccgtaagagatttgaccgattgagttttcccagcgtcgacgcgcaaagattcctcgcacttggag

SEQ ID NO: 18209 - DNA, 1032 bp, Homo sapiens
ggctcagagcgaaggcggggcgagcgcatgcgctgcagctctgtccaccgccagtcgtgggacagagtgccgggctcctccccttgcaagtctagctcttctccccgcctcctccggcctggggtccgcgtggcggggcgggcgcgcactcgggcttggcggctgccggtctcccaggccgcggcagtgaggagagagggcggggctgagtcctctgcgcccccgccccctttagcccggcgtccctaccgcgcctgcgcgctcccgcccggtctccatcttggaattgggaggaagagggagagggagaccgggacgagaccggggctgtggtgcggagagaggctgagacggagaagaggagaggcagagagggcgcggggaccgtcagcagcaccttagctacaatcgttcagctattctcggaagagagaagggagagggaggaggccggggcgggagtgggggctgtcaccctcggaccccggcgtgagaggggccgtgcggccggacgtcctcggggtgggcccccagtcggtggccgaagacctacagctcaggcccctgggtcccaaatttccaggctttgcccctcctcctttctcagatacccgggtaacagtcctcatagtccagatatccgggactcgggtcccaacctctctaaacctgggtctctgtttcatagaatttcaaatatcaggttcaggcccctgcgtgcaccagtatccggggttcattccccgggcgttcaaatatcggattcagtctccatcccgttcagatattcggggttcagaccccacaatcagaaatccggaattcggcagctgtcgccctcgacgagggggaggactggaccgcgaggtcagattaggttgtcaccccctcccctccaggggaggcttcccgggcccgcccctcaggaagggcgaaagccgaggaagaggtggcaaggggaaaggtctccttgcccctctccctgcttggcagagccgctggaggaccccaggcggaagcggaggcgctggg

SEQ ID NO: 18210 - DNA, 1064 bp, Homo sapiens
tgtgtctggttggtgggggacctcaggtgacagggtctctgatgtcaccggcgttcacaccctagggtgcttcagctaatcagatggatttgcacttcagtcttctctccttcactttgcccctcacagccacctctcctccctgatatgtcccgttctcctggctattctgtggttttgattcccatgcctctgattcccatggtgggtctgcttatctgcttttcaggcctggtctggttggatttcttgtccttgcaaggaagtgtgtgtatatgtgtttgtgtgtatgcgtgtgtgtgtgtgcttggaggtgcctggcaatgttttcccccagctgcagttaccttccaacctcttgctgtgatggtgtcaataatctcatccatttgtcaaacgatctgtcttttacaaagtgctttgacagccattctctcatgtgacatccccgcattcaccctgtgggggcctcttttattggcatcttcccattttacagttgagaacgttgaggccgagagaggttgcccaaggtcacacagtggcagaaccagaatttgaactcaagtcctcaatcacatctttccctgatgcatgcctggttcttgccatctcttttcctctgagtttgggctcggccaggggtccctaggagtccaggctggggtgaggtttaagaatggggatgagatgagcttcctttccaggagggctctactcagaagcttttcctgatgggagcctctggcttttgcctctgcctcatggagttttctatccactgtgaccttcatctttaccccaatcccagggtttggcctggattcctgagagggctctctcctgacaaatggtagcactagtggcatcttttaactgttcaagccaagctgttggggtagaatgatcccccaaaggattaaagctttgtggggaccttggaggcagggaaggaaaaatccatatgctgagtgtctgcatggtgttcctaagtatgagatctcattaaaatcttaacaacagctccatgctgtaatccatttcactgaagagaagaccaagaa

SEQ ID NO: 18211 - DNA, 2020 bp, Homo sapiens
gctattctgagccctctgcaccctgggggcccactggagagtcaggctccctccttgccctccagcttccagttgggctgagacaaaattaacaacacaacaggaaacaatgcatgacagaataaattacatgctaaaattgttaggtgcttttgagtagctagaactctgccccaggagtccagctctgctgaaggctcctttgtgcctaaattctgacaagtgcttaggctggagcctgtcttggaatctccttgagggttttggttctggtatcctgcaggaactttctccgggtgtttggttgggtgccctaggtgctcttcccaatggctggagtggtcaggacaggcttcctgcaagaggggagctgagcttggggtgacagctgagagagtaatggatacaggcctaaccggggagccgaaggtcctgttctctgaccttggagaagtcctttttcttctctgtgcctcagtgacctcacctaggaaatggtgatcatgattctgccctgcctgtttcgaagggctgctctgaaatcatagtgatggaggaccagctttggacaaggcacttaaccttgctgagcctgtttctttatctgtaagataggggaaatcatagtacttgcttcataaggttgtagtgaggactgaatagagataatgcacgtaaggtactcagtaaatgttatttgtaccctgcaaatgtcctgtacctgtgtgtgatgcttatgcagttggacaggacaagtaaggtggcccagagcacagagaggccctcatagccagatgccatttatatccctattcttcccattctagatctccccctgacttttttgagagtgactttgcgggctcctctgggccagtacccacttctaacaatggacggatttccaccgcctccggcctggccatttcctgttctcttccagggtgtgagaggttgagggaggagggggcctcagcgccaaggggaacagaaaggtgcctggaaacagttggggtataggacttatgggacaggacacttggggctctggagtgctggctgggaagcagaatgttttatccttgaggggagatacaggggctatagggaaatgagaacttgttgagcactgaagggggtggtgaggatacttagcttcccagaatcttcctagcagttttagggactccagggacccagcccgcgtgatctggttgccagggcaacttcattttttggagctttgatgttgttcctaatctccccctccccttcctcagcagtgcctcctcctcatcagggaatgaggggaggagatggcagaaacttgatgggtcccttcctctccctgaaggctcaatccttgatctctaagggtcccatttccattcctcaggccaggccccactctcagggcccccaggggccaccatgccagctgggggccgggccgggagcctgaaggacccagatgtggctgagctcttcttcaaggatgacccagaaaagctcttctctgacctccgggaaattggccatggcagctttggagccgtatactttgtgagttgggtcttgggagggtgtaatagggatggggactcttcctatccctgtggacttcccaacagcccttgcacactactccatcacactggtctttcctgccttctcttgctgggccagcaagtcttcccatgcccggctctcaatggggccttcaacaccttctggtctggtcctctaggcccgggatgtccggaatagtgaggtggtggccatcaagaagatgtcctacagtgggaagcagtccaatgaggtgggccaggtgcaatacagccaggttggggacaggggactcctgtctcaagatgcaagctgggtaacctctgcctaccctgaccccctagaaatggcaagacatcatcaaggaggtgcggttcttacagaagctccggcatcccaacaccattcagtaccggggctgttacctgagggagcacacggcttgggtgagctg

SEQ ID NO: 18212 - DNA, 1050 bp, Homo sapiens
caacacaatgccaggcacaaaacagttgcctaagagttgctgttagtttctcttatcaacagcctcctgcagtgatctctccagtctcttctcccttccagtctgtcttaagtactgatgccagagaggtctgcctaagctcagtgctgtcatttcactccctgtttggagccatgagtggccccctgttgccttcaagactgaagccatccccatccttcctcccaccaacctagaggctttgcttcgtaaatgctggccctttccttcatgggctccaccctctgagtgtgtcatgaactcttccacttccttgccttggttcgtattgggtcctctgcccgaggtcagagatttggacgagcccttctcctccatcttcacagtctccatttaccattagatgccaggcccagacagttgatgaaaaatgtaagaaacggacccaagtataagaaaaagctagatctgtccattttatttctagtttttggaagagatgtggatacagagaaatattactctactattgaaaaaaatatatatcagtctgattataaatgtcaactcatactaagtcaatatcagggaagcagtgtggagaaggatgtggcaaactggagattgctgtttccatagaaagagggcagctaatgcttatctccagaccattgttatgcagtaatgtagactccatttcaccagatttaattcttaaggagaaactggaaacttgtattattatttgattattacttttggcagttaattttaaaaatcaccgtttaggccaaaacaacatgacatttgtctgggctacaagggactcttagcgactcttagcttgcacttacctttctaatctcagggctttttacaaagcccttctctgaattccctgaagatatgctagcttgaaggctcactgcatactctcaacttcccagccacttccctgtttccctcttataccagttaatactttgatgttattttttcagtcctatttaatcttttagactggaggttccttgagggtggggcctaatt

SEQ ID NO: 18213 - DNA, 1742 bp, Homo sapiens
gctgactccagcccttccagcccaaatctagagcattgagcactttatctcccacgactcagtgaagtttctccagtccctagtcctctcttttcacccaccttcctcagtttgctcacttaccccaggcccagcccttcggacctctagacaggcagcctcctcagctgtggagtccagcagtcactctgtgttctcctggcgctcctcccctaagttattgctgttcgcccgctgtgtgtgctcatcctcaccctcattgactcaggcctggggccaggggtggtggagggtgggaagagtcatgttttttttctcctctttgattttgtttttctgtctcccttccaacctgtccccttccccccaccaaaaaaagaaaaagacaaacacaaataaaatatctgagcggaactgtgcctttggcccaggctgcctctgtctgctttgtcctgccgcctagcctccccggtatgcccccaggctgaccctcggcccggctccatgacctcttcaccccatctccgttatctcagccccctcactcctccagcctcatgctctctgccttcatagcttcattgcaccatgaccaccaccggctctggggtctgggcccctgtagaacttcaccgaacttcttggtcccacagagcgcctgtttgcgggttccttccagaggtcttagtttccaggcccttggtctcctcatcccttgccttttctcccaaccatggctgcaggggaccaaattgctctcctgcatcaggcattaccctagtgggttgggggacggggctgcagaccctccacagtagggggtgctgagctgggggcaaccaggcggagtatgaaggctgtggcagcaggattgagtgtgggcctggagtgggagctgagtgtgtgaggggccgggctggaatgcggatctggtcagggtggtagctgctggccggttgaacttgtcaggccctttctggccacctcctttgcccctttctcctctgcggcccaaaatggggcagccccttcttacccatttctcagctcggtgcttctcctccttccctgccttcctccctgagctgctggacctgggacttcctgtgtctgtccttagtcgtgttgctttcttcatgggtgttttgtgtgactggttcttctcgcttgttctcgtgcacgttctcatatttgctcacgtgcttctgtctctaggtcacagtctctccctctttgcctggtcagagcttccaagatcctcagttccctgtccagtaactccgatgttctttctcgtgggtatcgcacccaactccgtgcacgtgctcttggaacctcttgtcttctctgcatctcttgcccatcgagaccttcctgatctctctcaacacgatcccacctctccatgtctgtctgtctgtatacagctccccccaccccctctgtctaacatgttttctgtttctctccctctccctgtctctgcttctgtctcctctcctcttctctctcttctccccatttcccctggttgttcctcctcttcctcttcctcctcttcctcctcctcttccccgctgcccccatctccccttgatccgtccactgcatagtctaaggagctgcagatcaagaagcagttccaggagacgtgtaagatccagactcggcagtacaaggctctgcgagcacacttgctggagaccacgcccaaagctcagcacaagagcctccttaagcgg

SEQ ID NO: 18214 - DNA, 1120 bp, Homo sapiens
tcggggctgcccccttctctctggtataggaacggggccaggcctgactgaggagagcaaagcccaggacagcatcctgctgctgcccggcccttctgtgctcgggagccccgggagccgcactcatcaccatctcttttgtttttccatcctccttctgtttgcatttcttcccccaccctcaccccggtccattccgcctcccatctccatccccgctcccgcccgcagctggcctcctcccgctaccccccattcccttctgactacctggccctgcagctgcccgagcccagtcccctgaggcccaagcgggagaaacggccccgcctgccccggaaactcaaggtaccctgacgtgggggtgctagggaggggcaggacggcaggaggacagtcacctgagggaggctgaaggcgggggcctgtcagagaaccatgaacagttaatttggggacccagtcagcacttagcactgaggggtggatcacagaagtctcggcttacaggcttgtatggagacaaatcagggcagaaccagccttggaggacccggtgtgcagatgccagggatcccgccctttcatggctgcagtgtagcggggccaggctcattttcccaggggggcgtgttgtgtgatgccaggtagccccagaccgggtcaggattatgggatctagagtcaagtcaagactgcctgttagaaaccacgtggccttgagcaggtctctgctaccctctaggcctcctaggcttggcacctatagggcgagtggtcctactcgatgtgaccagcaagcgcccctggagcgcctcctgttacacggcagtgcacaaagcagaccagtgcctgccctcacagagctcacagtctagcaagataggcagaaaacacaccagaaaagtaggtacttgtggagaagaacagagcgaggtccagagcatggggacgccagggggacgaggctgacacttagggcccagcagtctgggatgttcttgatcagagacttacaggaaatggcagcaagctgtgtggctcctgggcagtgtttctgtcgggcagagtctgtgtttgggagaaaagtaagcagggaattgggtcccggagcaggtca

SEQ ID NO: 18215 - DNA, 1840 bp, Homo sapiens
cccagtacaagaaggacggagctgacttcgccaagtggcgttgtgtgctgaagattggggaacacaccccctcagccctcgccatcatggaaaatgccaatgttctggcccgttatgccagtatctgccagcaggtgggcctgcaggtcctcaataggcaacctcctacctcatttggttccagtgttgttaatttgcctattacctgccatgatgcctacctccccaaaagcaagcattagctttggcccgtggaggacactcaagggctgttgaaggcagaggggccaaggagggatggtgggtggatctgaggcggctcttgtctcctgtaatctgagggctttgaagcctgagtccctggcatcatcaagatacggtcttgaccagtggctgtggagagatgtaggtgggactctgggttaggaggcctcacagtgaccctgtccctcgccctgcagaatggcattgtgcccatcgtggagcctgagatcctccctgatggggaccatgacttgaagcgctgccagtatgtgaccgagaaggtaaatggctacctgcctgaccagtgcaaggtggctggccggggaccctggggctaacccctatcctctcctccaccccactacccaccgtgcgcctgctctgctccaggtgctggctgctgtctacaaggctctgagtgaccaccacatctacctggaaggcaccttgctgaagcccaacatggtcaccccaggccatgcttgcactcagaagttttctcatgaggagattgccatggcgaccgtcacagcgctgcgccgcacagtgccccccgctgtcactggtgaggcccacactcatcttgatctctatgcagtagataagctccacccacaaccctatgcccatttggacggatttccatggcaacttccaccagctcctgccagcttcctgggtctctgaccacagcccctctcgcctcacccctgctctacagggatcaccttcctgtctggaggccagagtgaggaggaggcgtccatcaacctcaatgccattaacaagtgccccctgctgaagccctgggccctgaccttctcctacggccgagccctgcaggcctctgccctgaaggcctggggcgggaagaaggagaacctgaaggctgcgcaggaggagtatgtcaagcgagccctggtaaggataggcaggaggtgggcagggtgcctgggtggatgggactcggagaagagcccttctcactccacccctctccctgcttaggccaacagccttgcctgtcaaggaaagtacactccgagcggtcaggctggggctgctgccagcgagtccctcttcgtctctaaccacgcctattaagcggaggtgttcccaggctgcccccaacactccaggccctgccccctcccactcttgaagaggaggccgcctcctcggggctccaggctggcttgcccgcgctctttcttccctcgtgacagtggtgtgtggtgtcgtctgtgaatgctaagtccatcaccctttccggcacactgccaaataaacagctatttaagggggagtcggccgtccgtgtcttgtggtgtctaatgcaggggagggcctggggaggtagcagagcccagaagaagaaagagcccctgttctctgttttttctgggcagaaaaggagtgaaaggtggaaggaccttcctgctctgttttatacttggccagggcttcaagaaaggctgagagcttgtgacattttcttccagccactgcaggctctgccccttcacctaacagcataagatagggctaacagttggggagtatggttgtaactgct

SEQ ID NO: 18216 - DNA, 1036 bp, Homo sapiens
gcagtgtgaccgcttctcccaggaggaggtgagtggggaccggggcggggccggagcagcaaaggggctggggccggggagactaagggcctgtgcgagacgcccctacgtctttccccagatcaagaacatgtgggcggccttcccccccgacgtgggcggcaacgtcgactacaaaaacatctgctacgtcatcacgcacggcgacgccaaggaccaggagtaggggcacccgcgggcctccgctgcccgacgcttctgttcggcccgacctccaccccggctcccaataaaatttaactgatctttgtttcttatgggcggcgccttcagagtgtctgcgcgagggcctcaggtgggagcgccccacaaatgaatggatgcggcctggaggcctgcgggggtcggccccacaatctacgcccgccgcctttttccgcaaggaaggagaaggctcgcgtggccgcgggaagctcagtttttattgaagacagagtctgggagaagaagggggactccggaagacagtgatgcggtcggagattgtgcaggccccgggccgggaagtgggcggtgtctgggtgggcgggaccagcgccggggcggggctacggactcaggctgggagaacctccccctagcccgcgcgagggcggcacccgcggaggtcccggggggcgctgggcagtgtggggcgcggggattggacaagaggccgactgaaggcggagccgaggtaaggccgggcggggcgtggcctcagagggcgtctgactgctcgccctgggcctggctctgctgcatttgggcctgcatcttctccagcatctcttgcatgcggcgcagctgtgcagggcgagattgcaggcggtgacctggcgaagccagagggggacctggggcatcggtcggggggaagcgaggtgcgtgctcacctcttcgtctttctcgcggatcagcttctcggtgtccgccagaggcagcatgggcagcgggatctctgtggcgctctggcgggaaagcttactgcgggaca

SEQ ID NO: 18217 - DNA, 1024 bp, Homo sapiens
ggcgcgtgccaccactcctgactaattttgcatttttagtagagatgaggtttctccatgttggtcaggctgatcttgaactcccgacctcaggtgatccacccacctcagcctcccaaaatgctgggattacaggcgtgagccactgcgcccagtcaagagttgccttctcttagcatccttgccaatacctgtcatgttttgtcttcttaataacagccattctaactaaggtacgataatatctcattgtgtgcttttttgtttttgagtcagtctcgctctgcagcctaggctggagtgcagtggcgcaacctcagctcactgcaacctccccctcctgggttcaaccgattctcctgcctcagcctcctgagtagctgggattacatacgtgcaccaccatgcccagctaatttttttgtttgtttgagatggagtctcgctctgttgcccaggctggagtgcagtggcgcgatcttggctcactgcaagctccgcttcccgggctaacgccattctcccgcctcagcctctggagtagctggcactacaggtgcccgccaccacgccggctaattttttgtatttttagaagagatggggtttcattgtgttagccaggatgatctcgatctcctgacctcatgatccacccacctcggcctcccaaagtgctgggattacaggcgtgagccaccgcgcccagccacccagctaatttttgtatttttagtagagatggagtttcaccatgttgggaaggctgatctcaaactcctgacctcaggtgatccgcccacctcggcctcctaagctgctgggattataggcgtgagccaccaggccggcttcattgtagttctgatttgcatttccctgatgattagtggtgttgagcattttttcatgtacctgttgaccatctgcatgttttattttgattctccttctattatgattattattattaattatcattattattgagacaggttctcactctgtcacacaggctggagtg

SEQ ID NO: 18218 - DNA, 1204 bp, Homo sapiens
cagcacaacctgctaatttttgtatttttagtagagatggggttttgccatgttggccaggctggtctcaaactcctggcttcaagtgatccaccgtcctcggcctcccaaagtgctgggattacaggtatgagccatagcgccaggcctgaaacaaactttcaagtaagactaaaactgttccgtgtagctgatgagttgtttttcctgccactcattataaaaatacaaaaattggccgggcacagtggctaacacctgtaatcctaccactttgggaggctcagatagacagatcacttgagcccatgagttcaagaccagcctgggcaaaaccccatctgtacaaaaaatacaaaaattagctgggcatagtggcatatgcctgtagtcccagttactcaagaggctgagatgagaacgagaaacacctgagcccaggaggtcgaggctgcagtgagccgtgactgtgccactgcattccagcctaggctatagtgagaccctgtctcaagaaataacaagaacaacaaaatgctcttgctttcaaattattttattgcccatcaaattgtaaatgtttcttcaagactcttgatcagataattatgagaagtcacacaacatacaggagatgactgggcttcaatcgactttacttgtcaataacagagtacaactgaactttaagtgggagctgaatttctttctttcttttttgaaacagagttccactcttgttgcccaggctggagtgcaatggcacgatcttggctcactgcaacctccgcctcctggggtcaaacgattctcctgcctcagcctcccgagtagctgtgattacaggcatgtgccaccatgcctggctaattttgtatttctttttttttagtagagacagggtttctccatgttcgtcaggctggtctcaaactcctgacctcaggtgatctgcccaccttggcctaccaaagtgctgggattacaggtgtgagccactgcgcctggctcttttttttttttaatagtgtcttgctgttactcagactgaagtggcgccatcatagctcactatagcctcaaactcctgggctcaagctatcctccttcttcaccctcccccaccatgctcggctaatttttaaaatttttagtagaaatgaggtcttgctgttttccaggctcgtctcaaactcccaatctc

SEQ ID NO: 18219 - DNA, 1098 bp, Homo sapiens
gccttgatttcaactttaatcacaattaatttattctttctttaaaaaaaaaatgtaatcccagaactttgggaggccaagtcgggtggatcacctgaggtcaggaattggagaccagcctggccaacatggtgaaacctgtctctagtaaaaatgcaattagccaggcatggtcgtgggtgcctgtaatcccagctactcaagaggctggggcaggagaatcgcttgaacctaggaggcggaggttgcagtgagccaagatcatgccattgcactctagcctgggcaacaagagcgaaactccatctcaaaaaaaaaaagaggctgggtgcagtggctcacgcctgtaatcccagcactttgggaggccgaggcgggaggatcacgaagtcaggagatcgagaccatcctggctaacacggtgaaacccccgtctctactaaaaatacaaaatattagttgggcgtggtggcgggtgcttgtaattccagctactcgggagactgaagcaggagaatggtgtgaacccaggaggtggagcttgcagtgagcgtagcttgggccactgcactccagcccaggcaatagagacagactctgtctcaaaaaaaaaaaaaaaaaaaagaatcctccggcattatatctccagctactgtggcccaagaatatatctttatcaaaaaatacaaaatccagggaacatgcaaatatctgaagaagaaaaaaacactgcaatcactaatgcatacagtgaagagttggcccagttccagagtccgctatgtttgatagtttgtgcacttgcagaatgagagtggggggggagttccccacctgaggccactgtcctctctatggccacctctaggtcttcaagaccaaggaacacctacactccaggtgtctccttgccagatgtttcacctgcattggtaaaaggcagaatcctcggcaggggtcggtggctcacgcttgtaatcccagcactttgagacgccgaggcgggtggatcacgaggtcaggaattcaagaccagcctggccaagatggtggaaccccgtctctactaacagcacaaaaattagctgggcctggtgg

SEQ ID NO: 18220 - DNA, 1056 bp, Homo sapiens
ggcaggagaattgcttgaacccgagagacggaagttgcactgagccgagatcgcgccactgcactccagcctgggtgacagggcgagacaacgtctcaaaaaaaaaaaaaaaaagccctaaaggaccactcttggatctgatcctgagaaagtcccttagaaaacatggcgacgccagcctcaccacctgtttccaaaagcagtgtgacgcccttcgctcccttagtcaagctaatcttactaaataaggaacaagcttcccctgaggcttgcccttcagcgcactggcactgcccacccgaacgggcgtcacggatcctggtcagtctctaggatcgcgctcgctgataggacgcttctggtcgaacgtccaaacaaggtgtgcggtgattgggccgcggagggcggggcgtttgaacggcgcgtgcgtgggagttccccaggccggcgtcattaggatcctggtgggcggtgggacttgggttcaaagaagaccaagcaggcagacgtgttcgggggcccgcgggttccgagactggagactggacctttggctgtccccacgtgcattctaggtcaacggtgcggtggcagaaccctggggctctcccccgcggaactcggccctggccgaggccccaaccacgctagtaggaggaggccgagcatccctcctcgaaatcgcgaaatcccggcccgacaatgtagccacggagtcgaaagccgcgtgcgaacttggcactcacaaagcctagataaccgtctattttctcctgtaaaataggagggatggacccccacagatcattgtaaaaggttcttacaaagaaaaatcctcctggactgggcacggtggctcacgcctgtaatcccagcactttgagcggatcacacttcgagaccaacctgaccaacatggagaaaccccgtctctactaaattagccgggcgtagtggcgcatgcctgtaatcccagctactctggaggctgaggcaggagaatcgctttaacccgggaggcagaggttgtggtgagccgagatcgcgccattgcac

SEQ ID NO: 18221 - DNA, 1073 bp, Homo sapiens
gtggcttatgcctgtaatcccagcacgttgggagtccaaggcgggccaatcacttgaggtcaggacttcaagaccagcttggccaacatgatgaaaccccatctgtactaaaaatacaaaaattagctgggtgtggttgtgtgaacctgtaattccagctgctcaggcggctgaggcacgagaatagcttgaacccaggagacagaggttgcagcaagctgagatcgcaccactgcactccagcctgggtgatagagtgagactcagtctcaaaaaaaaaaaaaaaaaaaccacatttctgcccaggcgcattggctcatgtccataatccagcgctttgggaggctaaggtgggtagatcacctgaggtcaggagttggagaccagcctagccaaaatggtgaaaccccttctctactaaatacaaaaaattagctgggcgtggtggcaggtgcctgtaatcccagctactcaggaggctgaggcaggagaatcgcttaaactgggaaggcggaagttgcagtgagctgagatcgtgccattgcactccagcctggacaacagcgaaactctaaaaaaaaaaaaaaaaaattagccgggcgtggtggcatccgcctgtaatcccagctactcaggaggctgaggcaggagaatcacttgaacccaggaggtagagcttgcagtgagccaagatcgcaccattgcactccagcctgggcaacaagagtgaaactccatcgcaaaaaaacataatagtaaggccgggcgcggtggctcaagcctgtaatcccagcactttgggaggccgaggcgggcagatcacaaggtcaggagatcaagaccatcctgactaacacggtgaaaccccgtctctattaaaaatacaaaaaattagctgggtgtggtggcgggtgcctgtagtcccagctgctcaggaggctgaggcaggagaatggcatgaacctgggaggcggagcttgcagtgagccgagatcgtgccactgcactctagcctgggcgacagagcaagactccatctcaaaaaataataataataataataataataaata

SEQ ID NO: 18222 - DNA, 1029 bp, Homo sapiens
gtgtcaggtacagagttggggatagggcttaagccacctcccagggcagggcttggtatataaagatgggatgttgatgtcagaggcttgaagttcaattcttaaatgcagaacttagtgttttaagggtgggctaattcccctgtgcacaaagttgagcatgtggggaggggctgagacactgcagccaaggaatatccacctgtgaccctctcctttcctcagccccagatcctgctctggagctcccatccaccccaccaccgtccagccttttacgcccccgcctcagtccctggggcttggccccgctcttccgttccgtccgctccaagctggagagctttgctgacatcttcctcacgcccaacaaaaccccacagcccccacccccgtcccccccaatgaagctggagttgaagatcgccatctcagaggccgagcagtctggggctgctgagggcactgcgtctgtcagcccccggcccccaatccgccagtggcgaactcaggaccacaataccccagcacttctccctaagccctctctgggccgaagctactcctgccctgatctggggccccctggcccaggtacctgcacctggccacctgctccaccccaaccaagccgaccacggccgcggcggcacactgtgggtggtggggaaatggcccgagccccgccaccccctcggccctgtctccggaaagaggtcttccctctcggaggagtgggagcctccccttctctcaccacatcttgctcgtccacggcatccacttccttctccgaaccagcagaacccaggtagtgctctcaaaaaacccccttgaagcctggctgcagcctggtcccagcctccttccctgagtatccagtgggcaggagacgggggataatgcagtgaatcctgtttgtccctgagccttgaccttcttggcaggttgggttcaaccaaagggaaggagccaagagcctcaaaggaccaggtgctttcagaacctgagaccaaggtaggcattcag

SEQ ID NO: 18223 - DNA, 1649 bp, Homo sapiens
gagctacttctggttctccacggaaacccagagtggctgtggcactgagatgggccttcttcccatcttagaatgaagatctagattcaagtctgagcagagaccgcagatagagtagtgaggacactaaatcattgtagtcagtgtagggactcagcccataaaggtgtatttgagtttatccttaggggcgatttgcttgttgtgagatagtatgtcctagaagttaatgcgctacccattgggcccatgtaagtaactcaatttgcactccctgatgtgtgtcttgtttttgtttcaaaagttggctggataggactgtggtgaaccagagggttcttgtcaatttccgtcatccatctctatctgtctaggctgattgttgctacgagaacagggggcccattcttgaggcaatctgcaagcctgagttttaatgaggaatctccggattcttaaatatctgcagttggtttaaaacttttaccaacgctggtggaccaaataaatctgtaagcgagggaggcctgtgggccagcagctagtgacctctgacgttttggtttggtttgcctgcttctctgctgcttcaacgctgcctccatttagtcctcttggcctatcggattcttggggtcagctgctccactctgctttttctccaagctcagccccctagagcccagtctttgatggatctcagctaaactgaaggaacagacttgccactaccaccagttcctagcagcctccagaggctatttggccttcctgggtggaggcctggcccacccacaacctaactctatcccttgcccttcttccccaggtctccgatgatgacctcgacccatcctttactgtctcaaccagcaaaggttggtcccaaggtctggggctggaggcacgggagggcagtggggtgagcatgagcctcaactgagcatgtctgccatcctgccccacagcctcgggcccccacggcgccttcaatgggaactgtgaagcaaaactctccgtggtccctaaagtgtcgggcctggagcggagccaagaacagcccccggggcccgacccgctgctagtgcctttccccccaaaggaaccaccgcctccaccggtccctcggcctcctgtctcaccccctgcacccctgccggccactcccagtctgccacccccaccccagccccagctgcagcttcgggtctcacccttcggcctccgcacttctccatatggcagcagcctggacctcagcactggcaggtgagtggtcttgggggattgatgcggtccggaagggcctggtcagtttggtggcggggacacaggatggtacctgtggggtatgacttgaaaaaggattctgagactgaaaagtttgagaaaaacaaatggaaagagatgactgcaggacttatttgagtccgttacacattcccatgcaggggaatccaggctgtgctgtttcccagttgtgtttgctggtgagaacgttttttcaggcaggcaagtctgctcggaatagtgttctttggaacatactttgggaaatgctgacatgatggttaagagcgctggctttggtgtcagacccagattcaaattcttgctctgacgcttcctggctgtgtgatttttgacaa

SEQ ID NO: 18224 - DNA, 1072 bp, Homo sapiens
gcggaggttgcagtgagctgagattttccagcctgggtgacggggcgagactctgtctaaaaaaaaaaaaaaaaagcaagtcactactaaactgggctgtcagggctgttgcctacctgagctcctatagaattgactgagtgaccttattctaagtatgcctgctttttttcttttttgagacagggtctcactctatcacccaggttagagtgtagtagtatgatttcagctcactgcaacctccacctcctgggctcaagcagtcctcccgcctcagcctcccgagtagctgggactataggcatgcaccaccacacccagctagtttttgtattttttgtagaaacagaatttttccatgttgcccaggctggtctcaaactcctggactcaagctatctacccccttggcctcccaaagtccagggattacaggtgtgagccaccacacccagacttgttttgcttttgaggcagcttttgagcaaaacaacagccggtctgttgcccaggctggagtacagtggtgcaatcacagatcacttcagcctcgaactcctattcccaagtgatcctcctgcctcagcctctcgagtagctggaactacaagcctgtgccaccacatttggctagctttaaatttttgtagagacagggttcttgtcttgttgtccaagctggtctcaaactcctggtcccaagcaatcctcctgcctcaacttctgaaagcgctggaattacaggcgtgagccactgtgcctggcccataaatgtacctgttgccttaggaaagatgcagccaacattccctgccaccaccacacatatccaggatgtctagggaaggctcaagcctagattgctccaacagaagtcagaaacaagtgaccagaaggtgaacgttggcttgcagacaagatttcacatggaagttcttgttttcagcttctcttgaaaaatccaaaaatctgtggtcactagacctgcttacccccatggctttcctttgaaatggggcataatctcaccagattgcgactgtcccctccacttgttgtcttggagtag

SEQ ID NO: 18225 - DNA, 1029 bp, Homo sapiens
aaagcacttggtttttaaggtaggtgtgaggattatagaacacatcaaacaggtactaaaagtatcttatacatagtaagtgctcaagaaatgtaacctgtaatttctgtgtttctctttattcagtgttatttctggttttttaaaaatactttttcatcccctttaactgcatttctgtctttttttttttttttaaccctactttaggtgctccagaggctggtggacctgagcggaggctgggacgccctggtgggccccgggccctggaaggcgggtcccggtggccggtggcccagaatgaggccagctcccagcatgccctgcagccggacgccagcccctcggccagcagtactggtgataacaacccagtcattcttcaggcatccaagggggagcctgggagtgggaccatgcagagcagcccctcccctgctcaccctcagctcccagtcctacagacacaggtttgaaagtgggaagagttccttctctgcttctgctttgtggattgttgagtgtgaggcagaagaaatgtggcaggggaatatttgtggagagttttggagaatctttggtgctcgggggctgggctgtagtatatcaggtctgttggatactcacattccatttaacattagtgtaatattatctccaagagtgtaaaagcgcctcgttacctgaaaaaggttgaattaggctaggctggaaatggaggtcgtggcaccatgcttctaataccatacgctttaagaatagtttaacttctatcagtactggagtaggataagcctatggatggtgtgtagtgttcattcctttctcataccaaggaagggtgtggggtaggaaaaaaagcatgacttttaaacacatctaggtgtgtgtacagtcagctttctattttaattttttaaatttttctataaaaagggtttctttattgtgtcatccttgcacaggggccatgctaatcttttctgtatcctcccagttttagtatatgtgttgccaaagtgagca

SEQ ID NO: 18226 - DNA, 1049 bp, Homo sapiens
ctaattttctgtgtttttagtagagatggggtttcaccatgtaggttaggctggtctcaaactcctgacctctggtaatccacccgcctcagcctccaaaagtgctaggattacaggtgtgagccaccgtgcccagccctgttttccaccctccttccctccctccctcccttccctccctccctccctcccttccctgccttccctccctccctccctccctccttccttccttccttccttctctccctccttccttctgagtgcaatggcacaatcttggcttactacaacctctgcctcctggttcaagcaattctctgcctcagactcctgagtagctgggattacaggctcacgccaccacacgtggctaatttctgtatttttagtagagatggggtttcaccatgttggtcaggctggtctggaactcctgaccatgtgatccgcccgcctcggcctcccaaagtccaccgagcccagcttccatttcttaatgcttttgcagtaccttgtaaagtgacgtgttgggtgtttgagaacattggctatgcctgcagcccatgcctgtccagtgaagaggttaaggtggcctgggatttattggtggctgttgaatttagtggtagctcacatttattgcataagtgagtttgccacacttgttctgaaaatggagggtaaatagggagttgtttatgtgcatgaaatcactgaggctctgaaacgatcagaatttgaaatcatatgctatatatatatatatatatgtatgtatataaattttttttttccttttcctttccgagacagagtcaccctgtcatccaagctggaatgcagtggcgcgatctcggctcactgcaacctccgcctcccacgcctcccaggttcaagcgattctcgtgcctcaacctcctgagtagctgggattacaggctcccgccaccacgcccagctaatttttgtattttcagtagagacggggtttcaccatgttggccaggttggtctcaaactcctgacctcaggtgatccacccacct

SEQ ID NO: 18227 - DNA, 1474 bp, Homo sapiens
cccggcctatatatatatatatttttaagtttgggaactgtgtaaatgtcaggacataattcttgcatgtcaagcatctataaacttggctctgccatcttgagtcccttattaaaactttatcccaaggccgggcgtggtggctcacgcctgtaatcccagcactttgggaggctgaggtgggcggatcatgaggtcaggagatcgagaccatcctggctaacgtggtgaaaccctgtctctactaaaaatacaaaaaaattagctgggcatagtggcgggcgcctgtagtcccagctgctcaggaggctgaggcaggagaatggcatgaacccgggaggcggagcttgcggtgagccgagatcgcgccactgcactccagcctgggcgacagagcgagactccatctcaaaaaaataaaataaaaactttatcccgaacgtttgtgtttatgaaaataaggtttataccttactctacacagttttttcttgtgaagatcggatgaaataatgtatctaaaacactcagcacagtgcgaagcatttattttctccatcattttcctcttttctagatggtgtcggacggcatgacaggcagcaatcctgtgtcccctgcctcatccagttccccagcctctagtggggcaggcggcatctccccgcagcacatagctcaagattcctcactggatggacctccaggccccccagatggtgccacagtgcccctggaggggttcagcttatcccaggctgctgacctggctaacaagggcccgaagtgggagaagagccatgccgaaattgcagaacaggccaagcatgtacgtattagaaaggcttatgaagattcttgggagttatcttccgtaaactcccacgtcctcttgagtattttatgtttcttttcttttttgtcatggatttagggtataggttctgccttaatgtatatgatcgtgagcaaactgcttgaatattgagtctcattttccttgctgtaaataaaataggaatgatataatagtttataggctattaagaggtttaagttataggagcaaggccaggcgcagtggctcacacctgtaatcctggcactttgggaggctgagacaggcagatctcttgagcccaggagttcaagaccagactgggcaatgtggtaaaaccccatctctgtaaaaagtacaaaaaattagctgggtatagtcgcacatgcctgtagcagtcgcagccacccaggagcctgagttgagaggatcacctgagcccaggaggtcagggctgcagtgagccacgattatgccactgcactccagcctgagcaaccgagtaagatcctgtctcaaaaaaaaaggagaaaatagacacaaaagcactttgtaaactgtgatgctcttaagatttactggtttctatttatttctatcgtgcagtctgtattacatttatccagtggtaagtgt

SEQ ID NO: 18228 - DNA, 1105 bp, Homo sapiens
ttgcctcggctcttcctcagctgcctccagtcctccaccccctgcttctcgcctggatgatgaaggtgtgtgttctctttggtcctgttactcttcctcatgtaccctttccagagctgaaaaacccaccctgtggcttgcagggcccgtggactttgtgaccttgttctcctgctatagatggggactttcaaccccaagaggatgaggaagaggatgatgaggaaacgattgaagttgaagaacaacaggaaggcaatgatgcagaggcccagaggcgtgagattgagctgcttcgccgtgagggagaattgccactggaagagctgctccgttcccttccccctcagctgttggaagggccttccagcccctctcaaaccccctcatctcatgatagtgacacccgagatgggcctgaagaaggtgctgaagaagagccccctcaggtgttggaggtataggcagaaggagcagagggagggttcagagggggaacagagggagaggttcagggtctgagttccgggctgtgaggttggttatgagttttaggagttctgctagtaatggacatttgggctctttggggatgactggggaagaatctgtttggggcaagttgcattttgtgattggcaggttttggcgctatagtggaagagcgtattgcactttcctctttaaattgctgtgtggtcttgaaaaagtacttcctctgaccgttacttgccacttctctgaacatgccctaatgttcccttattggcttacaggttggaagctggcatggtacccttaagtcttttctgtttctccatatgtctcaagtgcatggggaagtgttgggtgcctttatttgttacctggcactttcacagttccttccccaggcagtggggccaggatttggtagctggtgctgagagaaaacccttgattgtattcttgccctgggattataccagtggcaactgtcactcaatgggacagtgattctcctgtgacacctttttcaagtttgtgccattcttctgctactgtaaccttagacccttcccttttttatcttttgccatacagataaagcccccaccctctgctg

SEQ ID NO: 18229 - DNA, 1762 bp, Homo sapiens
cttggcaaaaacctggtctggatttgattggcgcctctgtatcctggtcagtgatttgaagaaggctatagtcctggagttgagtgttacgtaggaaaatacccacaaatcgtccattctataaacttgttggaattgtagatcttaattttgaatattcagtcattctgctttggtagcatacaaggaaagatcagttttctctaggagagaagttacttaacataacttctgagaaagaatagttatttaacataaaaaagaaagttatttaacataacttctgagaaagaatagttctcattgataacttggaaaactacaaaaagcatagtgtatttttggatcccatggtttctatatatttatttccatctgggaagaacagtcaggttttgatgtggactctgagggtgctgattacttcctctttttctctcacccccaggactccctggaggaaaagcggaagcggcagcggtctgaacgcctggaacggattttccaacttagtgaggctcatggggccctggcacctgtgtatgggactgaagtcctggatttctgtaccctgccccaacctgttgccagccccatcggccctcgttctcctggccccagccaccccaccttttggacttataccgaggctgcccaccgggctgtactgtttccccagcagcgactagaccagctgtcagaaatcattgagaggttggcagggctaagtgctaatggggagtgggtcttggggcctcagagtggatgtagtgcttagggctggtgaaggtgttaacttctggggcatttcagagtcccatcttttacactgcctgcttcttcctttcacaggttcatctttgtcatgcctcctgtggaggcacctcccccttccctgcatgcctgccacccacctccttggctggccccacgtcaggcagccttccaggagcaattggcctctgagctctggccccgggctcgtcctttgcaccgtattgtgtgtaacatgcgcacccagttccctgacttaagactcatccagtatgattgcggtgagtttgttggccagtgtaggacccttgacttctcttcttttcttagtattaagactgttgtatcagagggatgctgcacttaagttctcttgcgatttctgtaaagctttagatggttttttaggttatgcttatgggcaagatagagaaatgtaagccttgttagattcttgacattcataaatatgactttcttctttttttttattttgagacaaagtctcgctcagtcgcccaggctggagtgcagtgcagtggtgcagtctcagctcactgcagcctcccaggttcaagtggttgtcccacctcagcctccagaatagctgtgattacagacatacgccaccatgcctggctaatttttgtatttttagtagagatgggatttcgccatgttggccaggttggtctcgaactactgacctcaagcgatcctcccgcctcagcctccaaagtgctgggatcacaggcatgagccaccatgcccggccatgaatttgactttcatgaaagttgaaaatgtgctgctaactccttcattcagtgatcattttgtgaacatgttacattttgctaatcatttgggatacaatagcaagtaagacagtgcagcatagagtttttatttagctgtatgggaaaagatgtctggtggtacaagactgcacagtaagtaaacagtaaattttggtcttggaaaagac

SEQ ID NO: 18230 - DNA, 1380 bp, Homo sapiens
cctcatcttcagccacttcctcgcctgagggtccttcacctgcccgacctcctcggcgtcgcaccagtgctgatgtggaaattaggggtcaagggactggtcggccaggacaaccaccaggccccaaagtgcttcgaaagctgccaggacggctggtaactgtggtagaggaaaaggaactggtgcggcggcggcggcagcagcggggagctgccagcaccctagtgcctggggtctctgagactagtgccagcccgggaagcccgtctgtccgcagcatgtcagggccagaatcctcccctcccattggtgggccctgtgaagctgctccttcatcctcactgcccactccaccccagcagcccttcattgctcgccgtcacattgagctgggggtgactggtggtggcagccccgagaatggagacggagcactgctcgccatcaccccacctgctgtgaaacgtcggagggggaggccccccaagaagaacaggtctccagcagatgctgggagaggtgtggatgaggcaccctcatccaccttgaagggaaaaaccaatggggctgacccagtccctgggcctgagaccctaattgttgcagatcctgtcctggaaccacagcttattcctgggccccagcctcttggaccccagccagttcacagacccaatcccctcctgtcacctgtggagaaaagaaggcgaggacgaccccctaaagcacgagatttgcccatccctgggaccatttcctctgcaggggatggcaactccgaaagtcggacacagccacccccacacccatcacccctaaccccactcccaccactgctagtttgtcccactgctactgttgccaacactgtcaccactgtcaccatttcaacgtccccacccaaacggaagaggggccgacctcccaagaatcctccatcacctcggcccagccagctccccgtcttggaccgtgacagcacttctgttctcgagagctgtggattggggaggcgacggcaaccccagggccaaggggagagtgagggtagttcctctgatgaggatggaagccgccccctcacccgcctggcccgccttcggcttgaagcagaaggaatgcgaggacggaagagtggagggtccatggtggtggctgtaattcaggatgacctggacttagcagatagcgggccaggcgggttggaattgacaccacctgtggtctcactaaccccaaaactgcgctcgacccggctgcgtccagggtctctagtccccccactagagactgagaagttgcctcgcaaacgagcaggggccccagttggtgggagtcctgggctggcaaagcggggccgcctacagcccccaagtcccc

SEQ ID NO: 18231 - DNA, 1026 bp, Homo sapiens
gtctgtctctgcccatcagttctttttctggtcagaatctgaatgtccgatgcaattggtataatgcaaaccaactgcaaaggtattttgaaagagaatgatttgaattccaaagatttaaaagaggcccttggaaaaaattcatgaaggcttcgatatatttacagaaatggccctctgcaaaagtcagaggggacgtaaggatgtctattatgccatcctgcagccatgcagagtgcctacactccccaaaacagcacctgataatgttactttgaggactgatgcagagtgcaagtataacctcaattttgaaagtattatttttaattgacacataattataacctcagcttttaaagacgaaacttcaaaataaggtcctattcaacctttgtgccacaaaaaactgaaattttggtccattttctttatagattcactttgagaggcctttttcaggcatagttactctcaacaagaacctcctataaattatattgtcacaagaagtctcttatttttgccataattgccccatcatggcataatgcaggtatttcagctgccaacacaccaggccaaactgccttgttggagtgctgtgtttctagaccctttggtttgtctgcagagatctatctttagtggcctcttccacaatattttgtatgagcactggtctgttttctcagcccccactgtgggatgcagctgcctcctatgcccctccttcccttaggatgcggaagggagagctgtttgactatctcacagagaaggtggccctctctgaaaaggaaaccaggtaagggttgagcctgaagccccaggggtgagcagggggtgggacagggcagggaggagccgaggaggagactgcacccgcctccccttcccccaggtccatcatgcggtctctgctggaagcagtgagctttctccatgccaacaacattgtgcatcgagatctgaagcccgagaatattctcctagatgacaatatgcagatccgactttcagatt

SEQ ID NO: 18232 - DNA, 1279 bp, Homo sapiens
tgcgccacctgattagtagtcttcaaaaccacaaccaccagctaaaaggggacgcccagcgatacaagcggaagcttcgagaagtacaagctgagattggcaaggtgagaaggggcctgcctgggaaaaggtttggctagactccagtgaacaccatctgacttcatccctcttcctctctgcctttgcagctccgggcccaggccagtggctctgcccactccacccccaacctgggccacccagaggattctggcgtcagtgccccagccccagggaaagaggagggtgggccaggccctgtcagtacccccgacaacagaaaggagatggctccagtgcctggcaccaccactactaccacttcagtgaagaaggaggagctggtcccctctgaagaggacttccagggtataacccctggggcccagggcccttcctcccggggccgagaacctgaggccaggcccaagcgggagcttcaggaacgggaaggtcccagcctaggacctccacctgtagcctccgctctctcaagggctgatcgggagaaggccaaggtggaagaaaccaagcggaaggaatcagaactcctcaagggtctccgagcagagctcaagtgaggctctgttcctgtctccttcctgaccctgccaggtggcctccagtcccactcactaagacttcctcctgtaccttcttgccaggaaggcccaggagagccagaaggagatgaaactgctgctggatatgtacaagtcagcgcccaaggagcagcgggataaggtgcagctcatggcagcggaacgcaaggctaaggccgaggtgagggcagctggggcttgtggggcattcagaaaggcagagcagagtcctagctcagcaggaagcagtgtcaagagagtttcttcttccctgtgctataggttgatgagctgcggagccgcatccgggaattggaggagagggatcgaagggagagcaagaagatcgcggatgaggatgccctgcggcgcattcggcaggcagaggagcagatagaacacctgcagcgcaagctgggtgccaccaagcaggtgcggcccatgtggtgccctcgcgtcggagcgcagggagttcccttcataccctgtttggtgcctctagtgcctgcaggaccttgatgatctgggtcccctctgtagttctttgcttcgctgcgttttcccatggttcccccacagccatcctgtccacttcccacgttccatcttgtctctgcccacttgctgcaggagga

SEQ ID NO: 18233 - DNA, 1036 bp, Homo sapiens
gcgtgagctcttttttaaatgaagttggtgtctgttctggggcagcaccgttcatgattgattttcatcctgttgtaggaattaggtgatttagcacagctctgaactaactagatgtccaagtttgatgctttagtttggaattcccagaaaaagtttcccaaatggagattcagtgcagaggagagggaaaatcgtgcattgtgcactctggaatcaggcagttttgagttcaaatcagactctgacatatactcagttattaacctgtttctttctttctttttgttttttggagatggagtctcactctgtcacccaggctggagtgcagtggcatgacctcggctcactgcagcctctgcccactgggttcaagcaattctcctgcctcagcctcccgagtagctgggattacaagtgtctgccaccatgcccagctaatttttctattttttttttttttagtaaagacgaggtttcaccatctcggccaggctggtcttgaactcgtgaccttgtgatccacccaccttcgcttctcaaagtgctgggattacaggcgtgagccaccacacccggccctgttttttttttttttttttttttttgagacagtttcgctcttgtcacccaggctggagtccagtggcacaatgtcggctcactgaaacctccgccttctggtttcaagtgattctcgtgcctcagcctcccgagcagctgggattacaggcgcctgccaccacaccccgctaatttttttatttttagtagagacagggtttcaccacgttggccaggctggtctcagactcctgaactcaagtgatccaccttcctcggcctcccaaagtgctaggattacaggcatgagccactgtgactgattttttttttttttttttttgatacggagtcttgctttgttgcccaggctggaatgcagtggcgagatctcggctcaccacaacctctgcctcccgggttcaagcgattctcctgcctcagcctcccgagtagctgggactacagc

SEQ ID NO: 18234 - DNA, 1029 bp, Homo sapiens
ttgtgggattcagagcaacccttgggctgctcatggagcgaccttggtatcaccctaagctgtcttccccaccctctgagtgttactgtcctcctctccaaagccagctgtaatttcagggtcccactggccctgggtccagctataacagtcacaggtgataacagctacatatcagtgtctctcgcgtattattttgctctcccaagagtcctgcgagggaaagattcttagccccattctgcagatgcagaaacggagacttaaggaggttaaatcagttgcttgaggtcacactcccaaaaggagcaaactcaggatcagacccagcttgacccgtgggtgctgcacctcatccgtcacctggccagggtccctagaaggaagggtctttcccctgttgttagctttcggggcccctgatgtcccctctcccccaacagcccgtgctcccacacacagctgtgtgcctcttgtgtggggaggctgggaaggaggacacggtggagggagaggaagagaaatttggtttgagcctcatggagtgtacaatctgcaacgagatcgtccaccccggctgcctgaaggtgatggccctgggaccccggcgtctggggtggggcagattgtcagggagcagagagtgggggatcaccctggctctgggcttcctggccaaccccccactcactgccctcctgcctacagatggggaaggctgagggtgtcatcaatgcagagatccccaactgctgggagtgccctcgctgcacccaggaaggccgcaccagcaaggtaggggctgggctgggctgagctgtgggtaggtgggtgttggggagctgtgcaggtcctcacccccagcttctgtcccgcctaggattcaggtgaggggcctggccgccgtagggccgacaacggcgaggagggcgccagcttggggagcggatggaagctgacagaggagccaccgcttccaccgcccccgcccaggcgcaagggccccctgcctgccgggccccccccgga

SEQ ID NO: 18235 - DNA, 1118 bp, Homo sapiens
ggggacagcagggtaaccctcaggtgagtttctgacccaggagcctggatgggcaacagcatcattccccaggctcaggaggagcagtttccaggaaggtaaagagctcagatgactgacgtgtgtggtgtgctcaggacgtgtgggtctgatgctcaggagaaagatacacgtttgggagttctcagcctgtaggtagcaagccaagcagctttgatgaagagggcaaaagatcatacatcagtacttgtgagttagagcaagagcctagccagataattggaggagctcatggccagaggtgtgcccccgagtagagaacgaggcaggagggaatgtggtaagccaaggaggatgctggtgagaggccgtgggagatcaaggaccaggaagtggtggttggattttgctaccaggaggccttagtgtcctcagctgtgctctgggggttgggggtccaaagccagattgaatggagtcgagaacatcagcttccaggcagggacttgattcgtttgttcctgttgtgttcctggtgtctaatggcacctggcggacagtgggcagtgagatcatcttcgctgaatgagtgaaggacaagagagcaggatgcagtgtggaaggatgtacagagggtggcgctggagaggcgtgtgtaggggacagcaggaggctgcaggctttcctgtctggtggcttccatcttttcttggaactgaaagggaagtgatcccttaagagtgaagagtgaagagtggagagagggcagcagggaaggcgtgcaggggttattgagatgcaaggaagagggttggggcttttgaggacatggacagagagaaggcagcaaggaagggactggaatacaaggtgatcatggtcgggtagggtctggaggtggacagattggagggcagtggtagcatcggggcccagagagctacaagaggtcggaactggcagtgcttggagccctaggggccgtgagccttcagagggcagtaagggctggtccagctccctgttcccgggggcttctgcaagagggagggttaggattggaattgagggtttgcaggtcggcctagtaggagaggactcattgcggggtggctgga

SEQ ID NO: 18236 - DNA, 1033 bp, Homo sapiens
cacaggatatgggagccaggggctgggggaggtggaaggggcggggggcggggcagacagcagaccaccaagggttcagggaacaaagaccagttacttggagtggggggtgggggtggggccacaaaaggaaaaccggaggagcaattggggatccaggtgtcagaggtaggggaaccaggggcaagctggggctgagctggaggtggggatgagagcaggtgtggggacagcaatacccccttgggggtcacctctctgcttcccccctccccaggcttcagttccttccccctgaccctgactccttgaacgtcactgaaaacggcagctattgcaaggagtgggggccgcgggcagccgctcttcagctcgcggcccaggggagtggcgaggggcgccccaaccccctgcccgcctctccgcacaatacttgaacattcatctgtactgaagtgttacttgaaccgggggaatctcggacctgggggagccggggtgtgaggggactggaccagcttggactgagacctgagaccgggccggtgggcgcccatttgggactgcgccacccccaggcttgttcttgttttactgtattgagcggcggcacccgccggacccgcattatggctgggggcgccagcccaagaatggggaccatgggactcctccagcctggctcttcccactctttcatcgtcatggaaacttgtatcccatttgcccagggaactgccactcctggttgccatggaaatagcagccaacggacacctcccgatgccagtgctaaggctggaaatggccccctcttagttgccatgggaacctagtaacagactctgctggccctccttccctgccccttcctcgagcgcggggtggggcttcgggaccccggggatgagccgggccaggtcccgcccctccgcgcaggcctccggggggccggggcttaccatgtaggggaggggagatctatccacatacctcaggtaacagggaggtgcgcgggtggggggagggctgg

SEQ ID NO: 18237 - DNA, 1048 bp, Homo sapiens
ggaggaaatgggcctctggctcctccaggctgcacagctcagaggagacaggtgatggaggcgagtggagagaggccgcaggccctgcaggccaccctgggtgggcaggggagttgaggggacagagaagcaggcacagatgggcctgggaggcagcagagctttgtcctggctccattccttgctggcttgcagtggacaaggcccttagctctcttcaagctttggtcttccattttgccacttgtgaagtgggaatggtggctatttcttaagactggtgggcgaaatgacagacttttgagaaaatgccgtgcgggggctgggacaggtgtgaccaagatatggagcagcaagtagatgcgttctgtattcctggggtccgggagtaggtctcaggcaggagggaatgcctgggttctgggcgctggggctcagccccactgctgcctgcagccattccagaacgcggccaagcagcaagccaaggaggaggataaagagaagacgaagctgaaggagcctggcctgctgtccctcgtggactgggccaagagcgggggcactacgggcatcgaggctttcgcctttgggtcagggctgagaggggccctgcggctgccttcattcaaggtactcagaactgtcgttttgtggggtagggtggggagagggagagggggcccccttccttggggtaggggtggtcaggaaccatgagtgtttgagttttttcttttttttgagatggagtcttactctgttgcccaggctggagtgcagtggcctgatctcagctcactgcaacctccgcctcccgggttcaagcgattctcctgcctcagcctcccgagtagctggggttacaggcacccgccaccacgcctggctaatttttgtatttttagtagagctggggtttcactgtgttggccaggctggtcttgaactcctaacctcaggtgatctacctgccttggcctcccaaagtgctgggattacaggagtgagccaccgtgctctgcctgagtgtttgagctctaaacag

SEQ ID NO: 18238 - DNA, 1068 bp, Homo sapiens
agaaggagacagaggtgtcggatggtgagcacaagacagtgaaatcgactttgggctcggaggaggggttcggctgcctggctagcccttttctgagcccacatgaccttcctgctgggcttgtgggtcacctttgccttctgcaagggcatctgtttgggccacattcttaggaacccttggccccttgacagcaataagctcagtgctcaaaatgctccctcctgctccctcttctgctgagacatagctgtccaaaaggacagcctggcagaacgctttttttgttttgttttttgttgttgttgttgttgttgttttgagagagtttcgctcttgtcgcccaggctggagtgcaatggcgcaatctcggctcactgcaacctccgcctcctgagttcaagagattctcctgcctcagcctccgttgtagctgggattacaggcacccaccaccacccccagctaattttttgtatttttagtagagacagggtttcactatgttggccagactggtcttgaactcctgagctcaggcgatccacccacctcagcctctggaagtgctgggattacaggcgtgagccaccacacccagattttttttttttttttttgagacagagtctcgctttgtcacccaggctggagtgcagtgatgtgatcttggctcactgcaacctccgcctccctggttccagcgattttcctgcctcagcctcccaaagcgctgggattacaggtgtgagccaccacacctggctaatttttgtatttttagcagagatggggttttaccatgttggccaggctggtcccaaactcatgacctcaagtgatccacccacctcggcctcccaaagtgctaggctttcacctgtgagccactgcacgcagcctcttgcagcagtcttgactgatttccctgtctctctttctgtccttctccctctgttccagtccattttccaaactgcttatagaatctctttcctaaaatgcactcctgaccctgtgacttccctccataaggtccttcctggcaacttgttctccacagggtgt

SEQ ID NO: 18239 - DNA, 1040 bp, Homo sapiens
ccgggcctgctgggggtgggaagggcacgggattctgagacctcactctttacaggatgaaaagctcgtccgctacttcttggacaagacgctgacttcgaggcttggaatccgcatgttggccacgcatcacctggcgctgcatgaggacaaggtggggctctgggacctgagacccacctgggaacattaagtgagacagaggagactgggctggggatccgggtcaagggcctgggggctgaggctgtggggctggtgctttggggcagttccgaagttgccagcatcttggggtggggctaggggcgtgggtagtcctgacctcctttctccggccagcctgactttgtcggcatcatctgtactcgtctctcaccaaagaagattattgagaagtgggtggactttgccaggtgaggcaagaatggctcagggggtgggcagacatctggggcagggaaggcttgggtctgagcccttgcccggggcatgatctgcggggagcagggtttctcaaccatggcactattgacatttccagccagataattctttgtcacaggggctgccccgtgcacgttaggaagttcagcagcatccctggcgccagcagtactgcctagttgtgacaaacaaaaatgtctctgcacattgccatatgttacttaggggggcagaattgtttccagttgcaaaccactggtggaggggcccctgactgaaccctcgctcctatccgcagacgcctgtgtgagcacaagtatggcaatgcgccccgtgtccgcatcaatggccatgtggctgcccggttccccttcatccctatgccactggactacatcctgccggagctgctcaagaatgccatgaggtggggtggcttgatgtgctggcttgggggcggacaggaaccggggtgcttgtacctactggtctttcccctctgcatagagccacaatggagagtcacctagacactccctacaatgtcccagatgtggtcatcaccatcgccaacaatgatgtcgatctgatca

SEQ ID NO: 18240 - DNA, 1090 bp, Homo sapiens
ttctgggctcaaatgatccttccaccccagcctcccaaagtggtggggttacaggcatgagccactgcagctggcccatgagtgggttttgagctgggaagggatgtttctggttggagtccctgagaggattcatgtccacgtgatttcttaagaaagtgctcccagaacagagtaggggaagtaggaaggggaaggggaggaagccaagcaaggatgtgacctcaggcaaaagcccagaaccagtcaattatgcctcagggttgaaggtaagagagctaaacctcagagttactgattaatttctccacttggcagtcactggttaaagtcagttgggaaagtgaacagctctattaacctaaggatggttttttaagaagagcctcaggtgctggtgtgggtctttgaaagcacatcaaaggtaatctgggcacacagaaacagcaagaactcccagaggatctgggtggagcacctacattgtttttttgtttgttttgtttcgttttgtttttttaaacggagtctcaatctgttgctcaggctggagtgcagtggctggatcttcgctcactgcaacctccgccccacccccccccaaccccaggttcaagcgattctcctgcctcagcctcccgagtagctgggattacaggcgcgtgccaccacacccagctaatttttctatttttagtagagatggggtttcaccacgttggccaggctggtctcgaactcccaacctcgtgatccatccacctcagcctcccaaagtgccaggattacaggcatgagccaccatgcctgtcggatgtttcttgatttgtaacctctgagagacccatccgcaggccctgagcattccactcctctcagaattgtttccaagcccaataaccacattataaatcaaacaagattcagagaatagccaaagggaatgtttactgagtacctacccggtctggcactttgcaatacacttgtatattgctaagacggatagttcaaccgttacatagttatatgattgatagttatacatgcttaactgctggggattggttccaggaccgcctgtgaatac

SEQ ID NO: 18241 - DNA, 1664 bp, Homo sapiens
agggactttacctacttcctcttacttacttttcataggtaagaaaacagacagagggtaagggcttcgctgcagtctcacagcaaggaaatggcacagctgggactagaactcaggcctccggcactggtagcctcttttgtctcctagtagctgtgtcttagtagaaaaaatgacttgaagttcagtgggaaagacgagaatgttattcggcagttgctatagccaagcaccctgccaagtgctgtatatgtataagctcctcaaatccttcccaacaattcaacacacaggaatagttacttttttggtaggtgaggaagcaggctgagagagattaagtaacatgcccaaggtcacacagccagtaaaacggtgggctggaattagaataataatgccaaacacttgttagccggtgagcagaagtattcagctaaatggtttttgtgtgtgtgtgtgtgtgtgtgtgtgtgtgttttgttttttgtttttttttttgagacggagtcttgctctgtcgcccaggttggagtacagtggaatgatctcggctcactgtaaactccgccacctgggttcaagcaattttcctgtctcagcctcccaagtagctaggactacaggtacctgccaccacgcccggataatttttgtatttttagtagagacgaggtttcgccatattggtcaggctggtctcgaactcctgacctcaggtgatctgcccacctcggcctcccaaagtgctgggattacaggcgtgagctactgcgcccggcctaagctaagtgttttaatacatgacctcactgacatttcacagtaggcctgtgaagtaagcatgcagaagagctacagataagtttagggacccagacaggaatttgatcaaccagctaaattgtgctacctcagagccagaggccttagcaatgattttggtttttttcttaagagacgggagtcttggtgtgttgctcaggctggacttgaactcctgggctcaaatgttcttcctgccttagccttctaagtagctgggactacaggagtgcatccctgtacctgccttggttttttcttgtattgatacttaataattgtacatattattgttattttttttttttgagacagcgtcttactctatcgtctaggctgagtgcagtggcacaatcatggctcacttcagcctcaacctcctgggctcaagcaatcctcctgcctcagcctcctgagtagctgggaccataggcacgtgccaccatgcccagctaattttttatttttttgtagagacgggatctgctatgttgcccacactagtctcaaactcctggtctcaagcgatcctcctgccttagcctcccaaagtgctgggattacaggtgtgagccactgcgcccgaccaagtctcagtttctaaatttataaaaatcaggagtgcacaccagagcaagatttgtcaaagtctccagacacccagacatttgttactttcagctattgcagcttcatccttctgagtacatgagttagtgggcaagcccaacatttaaatttctttaaatggaagaaagaaagtggataagatagaaaaatcagggtgttgcactttattaagtgtaggtattgttttgagaagcttttatttcacaccc

SEQ ID NO: 18242 - DNA, 1027 bp, Homo sapiens
tactctgtaaaattgaaataacgcagctgggtgcagtggctcacgcctgtaatctcagcactttgggagtgcgaggctggttgatcacctgaggtcaggagtttgagaacagcctggccaacatggcgaaactccattgctactaaacatacaaaaattacctggatgtggcggcatgtgcctgtagtcccagctacttgggaggctgaggcaggagaattgcttgaacctgggaggcggaggttgcagtgagccgagatggtgccactgtactccagcctgagcaacagagtgagactccgtctcaaaaaaaaaaaaaaaaaaaaaagaaataacactctatgtaagggttactgaaaggattaaatgaggccatataaacatataggcacagtgctttgtggagggggttctgggtaaagcactggctccttcctcccttctcagctacagggcagggccttgtctgccctggtgtaggtcatggaccgtcttgggtcccccttccattgtcaggctgtactgggttcctcccacagggtctggcctaggagcaggatgtgttgtgagtgtggtgtgactcttagtctctgctttctaaggacttgaaaaatagaggaacccaggtgggcatacttggacagtgttgccctgttgaccacttctcgctgaacttgggaaggagggaatgttttctggatgggaagaatccagtcaggcctcctggagggggtggtaagaatctcaagccttgaaggatgggaaagagcacaataacaacagtgacaaaggatagatcacaaagcatcatggactcacctgactcatgctccgtgccaggctgaggaagtgttttctgctggcagtgagagaaggaagggcattctccaggtagaaggagctgtttgtgcagaagcatgaaggccgctaaaagggggctgctgatagcaatgaggaggctggggctggaggcagggagtctgaggcggcctagtaaattgtccagacctgagatggggccatgact

SEQ ID NO: 18243 - DNA, 1029 bp, Homo sapiens
agccaaccacgcctggtctaaatttcttttttctgagatagggacggagaagaacggccgcccgaggccacaccctctcctggtcctctttcccttttcctgcgggggaagcgccgcgtttcctgtgctgggaggatgagttgatcttgttcgtgtatcttaagtggggcttttcaaaagcgcttttgttgctttttgttcgctgggggaaggcagggtaggtgagaaaacggaaccatctggagtcccagggctggggactcgagtacctgttgactttcgcctcctaaggcgagcagttgcatgatctctgtcatttggggtccaagggctcttttgattctctggctttgcactaaaaagcccacttcatctccgggattggtcaaagagtgaagaatggccttttttgagactttcttattctgtgggtctgggctgagagagcagaggccacaatctgaacactgttcgaattcaaacctgtgccactttggtagttctgcgacgttgggagagttagtctcttgactcctggcgataatggctttctcatagagtggatgaaacgaatgcgcgatgttttagagcaatcactgacatgaattgggcttgcagaaaattgtggatgtccaccaagaccttggtttttccaatggttaaggcttctgggactctgtagaaacttgcattttcttcactttttctttattgtaagaacacttggctgataacgccagtttgttcctcttctcaaccagtgtctcatggaggaattttatgccctttgttgcaacatggtcctatttttatttttttttttgagatggagtcttgctctgttgccaggctggagtgcaatggctcactgcaacctctgcctcccgggttcaagcgattctcctgcttcacctcccgagtagctgggattacaggcgtgcgccaccatgcccggctaattttttgtatttttattagagatggggcttcaccatgttggtcaggccagtctcgaattcctgacctcaa

SEQ ID NO: 18244 - DNA, 1026 bp, Homo sapiens
gaggatcccttgaattcaggagtttggggctgcagtgagctatgatggtgcctgtgaacagccactgcattccagcctgggcagtgtgttgaggccccatctcaaaaacataaaaaaaaaaacaaaaaacaaaaatgtttattggtttgtgattctgtttccatttattttctttggcttttaatttttttgactcttcttattttccatcagcatgaaagagagcatattttctaaaggaagaaccagttttaggccaattctgaaatggagaaaatggttttgtttgaaaatgtatgaaatcatgtgatacataaggaggtgggatttgccccaaggtcctgaagtgtaactaagaaaggtggttgtcctgtagatactgcacgcacagctgcatattacagtgctgttaacagggatccttgggcctgggtttagagggtggtgctggagatggtgttgggattggcggggtgaaattggaactgtactaaagagttggtagaagttgaagcattaaatttaggctttgaaaggagggtaactatctttgcctatgagttgcaacatcactaacagcttctgagaggctggctttatgagtataggtattatgttttctttaacccattccttacattttctctttcctggtggcttttgtgactccctttttcttatcctggtagcaggctatggaactcagtcaactccccagggatatggctcgactggcggctatggcagtagccagagctcccaatcgtcttacgggcagcagtcctcctaccctggctatggccagcagccagctcccagcagcacctcgggaaggtacggtggtgttgatgtcggggaaggcttgaaaagaggggtgaattgatgaggaatgataaagggaccagcagtaggagcagttcagaggtgtaattggggtaggggagcctgtgttgggtacagagaatggactccactaaaagtgaaaggaaattgggggctatgctgggattgtgattgtgttttttg

SEQ ID NO: 18245 - DNA, 3803 bp, Homo sapiens
tattctcctgttttagcttaaaagagggttcctgtcttgtttcctagctgtctttttactttcttttgtccttcattgcctggcacttgtcaaaccttttcaaaccttttagtgctactttacaatctttttgttttttttttttaatcattctttcttttctcacaggtaactatggccaagatcaatcctccatgagtagtggtggtggcagtggtggcggttatggcaatcaagaccagagtggtggaggtggcagcggtggctatggacagcaggaccgtggaggccgcggcaggggtggcagtggtggcggcggcggcggcggcggtggtggttacaaccgcagcagtggtggctatgaacccagaggtcgtggaggtggccgtggaggcagaggtggcatggggtaggtgtctcatgagccagggagtatctttggtggggagtgtggaggattgcatgaatctccctgaagccagtccctagtgcatggtttagtattcttgttgtctagggatctgtgagggctttgatttgggggcagtgactttctttttacatccccattttatttttgtgagaacttgggagcctgaactcccatccataccactgaatagagattttgagtaatgatacttgtttccaaaaaaaaagaaaccatacatagatacgtatggattggagtcattaatatcctaggcaagaaacatggaagtgaagacttctttctctgcaagggaaaccgatgatcccactcctgggaaatagtagggaaacttggtatgtgtattcccatgtgtcctctagggagttggtaatggttaacctgacttcagcttccaggaattggctactcttcccgttttctatagtcatttgaatccacgagcttgatttgcactaatttgaccgacattgattttgtgtgtgacttggtttatggggccagctgactgaagtaagcagaccttttgggcaaaaatatgctttgacagtggtctcccacctatttgttccactgtctgccttcccctggttacttaaaattcatcagcttgtccaactggaccttctttccttcctgctgaagttgatttgaagtaaaaccttagatttgatgttaaaacagttgtcaaatctgttggtaaataagatttgaaggaccctactctgtctcccttgaaaaaggggaggaatgtcagtgttactgtttttggaaaaagtagatttttaaaccgagtttggaaatggtaagtatgcagaggtgggtgggggcaatctcaaaaacgtgcaaaaatgaggaaaacaaaaatgaggaaatgtgtgcgtgtgtttaatgcaaaactttaaaaagaaaaacaactgttatgtgactgttaacttgctctgcattttatgtgccacaggtatgaaaggtgacattgcaaaatactccgctcttctcgcagtgtagaaggggtgaccccgggggttgggggagatcaaaaacagctcagtagttaggacagagcttagctaagtttgtcttgctttaaggggaagttgcctttggttttgactttttatggaatggggttgggtctgcttgctgctttcaaagcaaaaaccacaaaaatgtgttcaaggctaccccagcctggtgtgaaatgtcttctgggtaaattggggtagggtttttaaaccaactacttggttgtcaaccacttgcgacaagaggaaaaaaaaacatctgctccatcggaagaacgaccaaggaaaatgggttattttttttccagaggaaatagataacgtaaccttttaaagcaaaatctttataaactgtgtctgagaaattgcacacgtgtgtgtgacatgctcaaaggtcagacaaggggtggtcaggaagggatgtattttagtagccacttgtatctttttccaaaaacacctacccatgtttggggaatgttaaacaaaatcaaaaaacaaccttttgtagccgttggaagcttcatgtcctttcttctaacttgtcttctccagcggaagtgaccgtggtggcttcaataaatttggtggtaagtgaacagagtttccaaaattcccaactcccagcaatgctttgtctgattgttcatttgcagatgtcttagcgtgttaatttaaatgtcaaaggttttgaggtgtccagaaccacctccagaaaggggtagggtagaatgccacctgttgcctggtgtgtgctaacctggagcaggtaggggtaagactcaatagtcatcttttaccaaatgggtttgccccaggttaataagaggggtctagtaggccttggactgggccgttgccacacctggcacttagtgaccatcatcatgagaaactggagagtgcgtgctggaacacgtggtgccatcttggctttaggatccttttgatcgttgtgtccaaggcttgtgtgtgtgtgagtgtgtgggagacaactccgaatgtttaattctggaagagggatgtaacattgccctgaggatggtgaagttggtatacatttataaagtacggaatggtgtcaatgaatgcaattctatgtatatggacttaactgagatgggcaaatagaaactagctctgggaaggaacatgtgcactacttcaagaaagattggaagcatgtgtggctcatgggaaataaccaggtcttaaacagcacaaactgaattcgtggaccaggaaggtcttaaacagcacaaactgaattcatggaaaaatgacaaatttgagaagtctcccagtaagctggaacttttctggtttggttaacaaaaggtttcttgatttgtttcaagatttaaagccaaaggtgtgggttcatgacttaggtgtcattgcgtgtgggtacaatatttatatatggcgaattcagataaacattggtcaaagatggtctctggaaaaacaaaatagaggctgcattacggaaataagatttctggtctgttccctgggacatgcttaaaaaatacaatagctattatgtatggtttttattttcatgtggtttcggggaaacaacacggttttaaggatggtttctaaagatgaaattaaaaattgttccacaagggttaagtgtctggtggtaaagttgggagaaactggatggatgcacatcgcatggctggtggcgagcccatctctcttctctcgggtgagagaaccgggccaagctgagttggtttgttcactttaatgggtctccgtttcccctgccacctgtgctgaggacatttcccagcctgagctgggggaggcagcatttgctgaagtgtggagttgtctctgtggagactcaagttacagatcttaaggggcctgcctagaattttctcctctgggcaggcgacccaggaaagggtttggagtgaggctgtgagcacttacttgatattttacaagtttggatttggtgttaatttttttccttgtccgttttttcctgttgactaacggctcatcttttccttgtttttgttttttttttgttctttttttccatgtcactaaaggccctcgggaccaaggatcacgtcatgactccggtgagttcacacgtggtggcatgaaaagagtggctaaagtggtatcaagactgcctggatgttctttgaaactattataaaaaggaaactgaaaaaaatggggatagagaaggaagggagttaggtgtgtccttagttagcagtgagaagtatttgttacgaagtatttctcagaaatacctggcttgtgggttccacccccagtgatttaggtct

SEQ ID NO: 18246 - DNA, 1030 bp, Homo sapiens
caagttggtgaacaaaactagtgaaagacctgaccacatgaagtaaagcattgaactcctgtttaggttgtattgatgtttgtgtactagatttgaatgtaaaatgggtttcttatttaattcggggaccttcaactgaaagttgataaatactgatggacttttctgtgtggtcttgttgggcatttcactcctgagccctggtttccatactgtatactgggtgttaacatgtttcaaaggataattgtcaaactgaatctgaaatttatcagcatggctggcatatagggactcaaaagggatgtggatttctttttagttgtcttccataaaccaaatgataccagttgcttgatggatactaggtgctttaggttttttcctgtgttttttattttaccttttcacatttgcattttctctgttcaacaagcagaacaggataattcagacaacaacaccatctttgtgcaaggcctgggtgagaatgttacaattgagtctgtggctgattacttcaagcagattggtattattaaggtacttgtggagaggagtgggagctttctgtcagtgttgtaggcttgtggatttcacacattagtaaaagcaagtctttaatggttgccagcagtaaaaacaagtcttagtggttgttgccagcttaatttgttgaggaaagagccttagttactgttttctaaaagagaagttctatcttaacacaaaaagtataacttatcagagtaccctaaactcttgagatttgtactctatagtaacttttagttttatctttcaatattggagtgagagacagttttctttaatggaggtttacatgtgaggtaggaagaagtaactgggaagaggggagctgaagtttgggaattataaacctcatgttctagaggaagaagatggaaagggagtactgtagcctttaaaattgatgttacctcattttgctttcttcagacaaacaagaaaacgggacagcccatgattaatttgtacacagacaggg

SEQ ID NO: 18247 - DNA, 1471 bp, Homo sapiens
cgaggcggctaccggggccgcggcggggaccgtggaggcttccgagggggccggggtggtggggacagaggtggctttggccctggcaagatggattccaggtaagactttaaatcagaataaaaaagtagagcagttgaacagaggccataggataacagggttttgttgagaaagtggtttcattttgagggctaggtggaaagacctgaggttgtaaccagtagtggagagggaaggaaaattaactcagggggagtgaatctgtagacccacttgagataagatactcgctgggttaggtaggaggggcagataggatatctaggcttggagaggctggtaactcaaatataatggatacttaatttttttttttttttttgcaggggtgagcacagacaggatcgcagggagaggccgtattaattagcctggctccccaggttctggaacagctttttgtcctgtacccagtgttaccctcgttattttgtaaccttccaattcctgatcacccaagggtttttttgtgtcggactatgtaattgtaactatacctctggttcccattaaaagtgaccattttagttaaattttgttcctcttcccccttttcactttcctggaagatcgatgtcccgatcaggaaggtagagagttttcctgttcagattaccctgcccagcaggaactggaatacagtgttcggggagaaggccaaatgatatccttgagagcagagattaaacttttctgtcatggggaaagttggtgtataaatgagaaatgaagaacatgggatgtcatgagtgttggcctaaatttgcccagctatggggaatttttcctttaccacatttatttgcatactggtcttagtttatttgcagcagtttatccctttttaagaactctttgatcttttggcccttttaatggtgaggctcaaacaaactacatttaaatggggcagtattcagatttgaccatggtggagagcgcttagccactctgggtctttcacaggaaggagagtaactgagtgctgcaggagtttgtggagtggagtcaggatctaggaggtgagtgactcccttcctagctgccctggtgaacagcgcttgggtagatacctgctataaggagactggtctggctgggttactttcacatcctgcctgtactcagagggcttgaggtcattgacattatgagattttaggcttgatccctttttgattggagggtggaaggccctcctaagggaatgataagtgataagagggggaaggggttgcagccaatgagttaaaaccttagagcagtgctcctcagcctcttaccatgtggttgtaaacttgcacgtacctgccaaccagttatttagcatgctttttattttagttacacagagcgtaacattaacccaagagcagaaaggttttatttacagggttttcgaacttgg

SEQ ID NO: 18248 - DNA, 1185 bp, Homo sapiens
gatgccctcctgttaggagtggaggaggtcgaagctccttgtaagatatgattactgggaccattagtgtcaagttcctgtgtccttcaaatggcatatgtgattggccttgaccttaaaaggaaatagggtcccaggtgactgtttagtgggtaggtccagtttggggggatcttccaggagaatggatagagacacctagcagcagagagaacattggtgcctctcaagccaacctcccacctcagcctcccaagtagctgggactacaggtgcttcctcgctaccacacctgggtaattttttttttaattacttttttttttttaagaaacagggtttcactgggttgcccaggctggtcttgaactggcctcaagtgacctgcctgcctcagcctcccaaagtgctgggatcacaggtgtgacccactgcgtttggccagaatactctattcttactgaatgattgaaatctgtcttgaagcattaggtgtcccatttttgtgagttggaattgggacaggctaagtaggaagtgaggagggtggggagagctgtgctgtaggtctgtttgtcccttccttgatgtagccttcagttagccctttcagcttttttccccatcttgtgccgggccttcctgggtttcagtacttggatgtagggctgcagttatgtcagtggtgggtagattgaccaggaattaaggtctagggtccagcccatgtgagacttgactcactgatctacctttaggcatgtcttccttccagtctcatcctttttaaattttttttttttttttgagacggtctcactctcacccaggctggattgcagtggtgtgatctcgaccaactgcaacctctgcctcccacccgcaagctatctgcccacctcagcctctggagtagctgggacgggactacaggcacctgccaccatgactggctaatttttttttgtattttttgtggagatggggtcttgccatgttgctcaggctggtctggtctcaaaactgctctgggctcaagtgattgtcccactttggcctcccagagtgctgggattaaggtgtgagatactgtgtccggctatgaaaattttatttttaattaacttgtatatatttatggggtacaatgtcctatttctgtacatgtacacattgtggaatcaa

SEQ ID NO: 18249 - DNA, 1031 bp, Homo sapiens
tcctcggcggtcaggttctccagcgcatccaggatggcgtcgcgcgcgcgccccatggctccaggatccccggccgctgccgccgctcaccccgctgcagccgccgaccaggaggaagtcggctccggggcggaacctggactccccgccttcctcccactctggtctcccgactccccgccccggtccgttgccctccagcaaaaggcgcttccttactacacccttggtcccctcccacccaggcctctggattggggccccaggccgtcgggggacgccaggatcgcgccctccagctggcctgcgaggtgggacccgggagggggccgcagaggggctcatgggtggcgcctgcttgtctctgggcttgcaccagcgggtacagaccggaaacctgggctggctctcactgggtttattggagcacctaggcttagaacctcggatttctagaaccccgaaacctccgcggttccccgaaccttaggatcctctcccacatgtcgtagaatcttggaatcatgacagctagaagcgtgaagctccctcaattccacatactggggaaaaatgagttgtacaaaagggcagagagtgcaaatctctctgagcttcagtttcattttctacgacatggggataaccctccggtgcttataaatattccagcataacatggccaacccgatggctcccgaaaccttgccagatgcttcctaggggagccagaatttgatcccaacactgattaaaaaaaagaaaaaagaaagagagacagcctccaggagattaaagaccatgaacttgaagccatacagttctttgtttgaatcctgactctacttcccaagggggatatttggaatcctttatttttccctctcatctgggttgtaacaatcactgttccttgtagtcatacgaccctgacatattatacgtttatatgcttattggacattcatccctctctaaaatgtgaggcctatgagcatcggagaccttaactgtcttattctttgctgaat

SEQ ID NO: 18250 - DNA, 1099 bp, Homo sapiens
tgtttatctccagaattttctcatcttcccaaaccaaaactccaaaggaagagttttaagcaggggtgcgatgtggggagatcctggaatccccccagcccttgtcctcccccctcacacatgcctccccttcccctccccacccccaggctgcagaagatcctggcagagtctcccccacccgcccgtctggacatccagctgccaattatctcagatgacttcaaattccaggtgtggaggaagatgttccgggctctgatgccaggtaccgggagggactggctcaggtttgtgtgtgaccaggcagttgatgggaggccctagccaccctggagaggcctcccagtcccaactggggaggccactgaaggaggtacccattgcccctttgcctctggactgccgctgcagtcctctaacctgtgttgggaggagggcctttgagagcatggggtttgcagtgggtgactgacatgaaaatgctgctgctgttggtggcacgggacgctggggcctaggtctgagccactgacttgctgtgtgatccttggtcagtctctgcccctctctggacggtggagatgataaatcctgccaattggggactgaggctctgcagagctcctggaaccctggggactggcctgggtcagagagtgactctggcggcctgtggctggggaggcccaagggctcagttcctccccccaagagctggatgatgcaggttacagagctctgggacatacacattgctggggcagcccttcctgcctcagcgcaggtgggaatgcagacagcctcattttattcaagataaaactaaggctcagagactgggtctaggctgatgtgaagatcaggctccttgaccttgggccttgggccttgtctgggcctcagatggtgagtcccatgccttgtatcaatttagtcctgttggccaggctcggtggctcacgcttgtaatcccagaactttgggaggccgaggtgggaggatcacttgagcccaggagttggagaccagcctgggcaacatagtgagaacacctgtctctacaaaaacttaaaaaaattagccaggtgtggtggca

SEQ ID NO: 18251 - DNA, 1047 bp, Homo sapiens
ttcctgggagaccatcccccacctttctccggcctctgagactttgagtccttgggaggagaaggccctccttgctatctgggctgagtggccagggccatccagcttcccaccctccactgactgccatggggccctcccctgagcacatggtgcccaactgtagcccttctagggcaggggctcattggcagcacttgcagcttgctggcacttaaaagtcattagtgcggttactgagagaaatgaggaaaaaataattgttaaaaaaaaaaaaaaatctctcctaaacttactgtgtaacatggaagaagtaacagccaaaatttcttgggtactaactttaccaggatgattccaagtgctttataagcattatttcctataatcttttggaccccttgtaaatgtcaatactttccatcatcatcgttgcatagacaagaaactgggtctgaagttacctgccctggtttgcctggcacatagctggtggatcccaaacctgccgcagccctcatactccttggtagccactaaactctgtgcctctttaagcataagtgtttacttttttgtagaaatgattttcttgcccttctctaaatataaggaaactgaggcaagggtctctggctcccaaggcaggcctggttgcctctcccatcttggcgagctggaccaggtggatgtagcctgaggcttttgtgggcatggcctctcaccctcccagccttggtccctcccaggtacacagcaacttcagaatggcagccacatggggcgccatggtagtcagggaggcatcgtcatggccatcagtcccagtgaggagaccaagctgcagatgttcatgtggagccgcatcatcttcagcctgggctttgtcattagtggccactacaaggactttgccagggatgtggcagcctccatagcattcaccaatgacctgaacggtgagcacccgcacaaggcagcggacatggagggtctgtacacgctggacacagcagaggtggatgaccgcagctactgggtcaggtt

SEQ ID NO: 18252 - DNA, 1033 bp, Homo sapiens
ggacaatctctcttccactttggctgtagaaaacgaatacatttccacagaaagtgtgctagattaattggtcaattacaaacattcattaaaatatcaggtcctctcttttgcagtggaggatttgtgacagtggatatctgtgttccatattctactgctatctggatgtccgactttaatgccaaatgttatgagacaggacttggcacctcctagaagtgttcacatatactaaatgatctgctattatggaaataattaaatgacatgtttcttgctcgaaagaggtattttggccttacctgttgaagtataaagtgtaagtgccttacagtttccttcctttctataaaaactgttttgagtgattttgctattttcctgaaacctgttaggtcactgaacatctgactggctgggcacctgctcctgtcccttcagttgaggtaggattggcagcactccccagaaggcgtgcagtgccaggagagtggaggaaggtctgacgtttgctatcctggggtaggttttagagctcgctagatgcttgtggagagctgatgagatgggaagaaggcaccccacctcgatggacctgaaagagagagcctgcgaattgagaagcgggtgtgtggaataaccctgactaggcatagaagacctcagtcttatttgagcctgcaaaaggaggtcattgaaggcccagttagttcttcctggggagcgcccccttcaggtgtccctgaggttcacagcagccatggagggagccctttgttactgggagaagctgcagagttctggaaagcaggggattcacaggcggatgtggtcgaggttgggctggaagggagattgggaagctctttctgagggtggaattgttagtgtcctggggctgtttcttgacttggtcaaataaaacatctggatataggtaagaagtgccttaattgtaaaggagtattgcaagaggaggaaagcaccaactgtaagatatttgtggatctcacagttgaagcagaaaagg

SEQ ID NO: 18253 - DNA, 1054 bp, Homo sapiens
ctctaactctttttgtatactctttagggttttctgtatataaaatcacctaatctgcaagcagagaaaattacaattcttcgttgctgatatgagtgccttttatttcttttttttacctaattgctcttgttgcagggcaggtgagcccccagattggggcttatcctgggaaggttcacggcttcactcaggaagaattcaagtgcaagatagtggtagaagaaaacagctttattgagctggcagtgttgcagctctatgactgctcctgtggagcgaggctaccctgtaggcagtgtgctgagaggagcagttctgcagtcatgtacttatatacccacttttcattacatgcaaactaaggggcagtgttttttcccttcaattttttggaagaatttgagaaggatggacattaattcatctttaaatgtgtgatacaattcacccatgaattcatttggtcatgggctttttctcattggatttttttataactgcttcaatctcctttcttattattggtctgttcagtgtttctgtttctttgtgatttaatcttggtgagtcattcatttctaagaatctgtttcttctaagttatccaatttgttgtcatataattgttcatagtagtctcttattattctttgtgtgttgtcagttgtaatgactcatccttctttcttttatgtatttatttatttatttatttgagacagggtctcactctgatgtccaaaccaaagtgcagtggcatgatcataactcactgcagcctcaacctcccaggctcatgttattctcccatctcccaagtagctgggactacaggggtgtaccaccatgctcagctaatttttgtattttttagagagaagggtttcattatgttgcccaggctggtctccaaatcctgggctcaagtgatttacctgccatggcctccaaaagcactgggattacaagcatgaggaagtgcacccagcccacttataattttttgagtcctctctctttttgatcctttgcttaatctggccaaaagttt

SEQ ID NO: 18254 - DNA, 1015 bp, Homo sapiens
atggatggatggatagttagatagatagatagatagatagatacatagatagacgattcagagatagataatgttccaaactcttgagggccaagaactggtgacatcttgtatcaacacatctaggtctacaatcttggtttctaaacaacattcattaaaaggacccaagggttgaagttagaaaatacaagttgagctagagtatcttgtaaagccacaaagaaaaaagtgcttaataaaaatgatggggacttttcaaagggagccaacctgaaagacctcccaatggtccaagctccaacaatatgagcaataagttatgatagctttggattatggcccacagaataaagtaatactcatctctactgtgtgaataaaagagattaaataaggaaagaaggaatgaaatctacaatatttaaaatacagatcaatgtagttggataatgcaaaataaatcaacactagaacatcacagtaataattaccatagggaagattccccgaggaattcaaaaatttcaggaaaaacttaaacactaaagagtgtatttgggccagtctcggtggcacatgcctgtaatcctagcactttgggaggcctctgcgggtggatcacctgaggtcaggagttcaagaccagcctagccaacatggtgaaaccccgtctctattaaaaatgaaaaaattagtcgggcatggtggtgggtacctataatcccagctacttgggaggctgaagcaggagagtcacttgaacctgggaagcagaagttgttttgagccaagatcatgccattgcactccagcctgggcgacaagagcagaactctgtctcaaaaaaaaaaaaagaaaagaaaagtgtatttgcatattttaagtatctaccatctaatatttattaatacaattttttcttaatttcttagacttgtgactatttgaaacaaattataacactgtattgtaggatttataatttgtagttgtaaaatttataacacatgga

SEQ ID NO: 18255 - DNA, 1065 bp, Homo sapiens
gcagaatggtctttctgcttacttgggatcttcagtcgcttctagaatagtttgactagatttctataaaaataagtttacagggcatcagttagccattccagctctgtctttccatgcccctggcatcttcagacctgaaactgattcagagaccatgggggctggaaaccaaccaggcacacacatacattgagcaggccggagaatctcaacattcccttcatcctcttgcccaaatgcccatgaatgtgcagaaggtgcatgccacttccctgcgccaccagcacctaaatctgcagctgtgaattctgaacccaggtcctgaggttctccaggatgtgtgagagcagccttcctgaagggctgtctcctctagttttcttcacagcaatacacaagaattgcagagccaggttgattccacctggggtctgcacataaaggctggtctccacctgggatccacaagacagggccagactttggactcaggatatatagaaaatccaggggacattttctgcattgtgagagatcaacatggactttgtaaagccctacttttggagtgaggccctcagagttttcaagaccttgtccagtgagctacagcagttctgtgagtggttcctttttataaacagaatctcgtggcagaatctgtaagtgtaaagcagcaccttagcagagggagggtggggccaccactgtccagagccatgagtaaagctatgcctacctgtgagctgtgttactggagtagggtaatcttgtcctttcttgtacccaagagtcagctgatcaggtataggtaataacatatctggatcctggatctgtggccctactatgacaactcaattttctattctggttccacaaggacaacttgagtctttcctgcctgaatcactattgggttttcatcacacagttaccagggactctcttaccagcacctaggggacacttggttatatatcctgtgcaggcaggggacaggctgacaacgggctaatcttgcttccgtctcagagggagaagaatgagtcatcagggttt

SEQ ID NO: 18256 - DNA, 1034 bp, Homo sapiens
ctccccttggcctgtgagggcctgcttgatctgactgttcttccattgatttgggggctctgggaaagtctgtgcatgtttctacctctatgtgaaaccacttctaaagttctggttttgcctcatgtcagaagtgtgtgaggagagtgatggacagtggaatttttttcagaagtctcaggaattctgtggatagatgtcacatattttctgatacattaatttttaatcgtattgtggtttccaaggtgatcctatagaaattaagatgcagtaattttatgaaaatacaaggcatcttcccaaatctaagaaaatctaatcttatgtttcacttcaacttctcattttttctcacctgaactaagatgagaaatttaaactctataggcacaaattccacaaatgtaaaatagtttaatgtgtattacttattatatagacttcttatctaaatttttgtctatggggagcttagaacattgtccagtatataataaactctaaactgttgccttgtatcttaataactatcattctataattttgtctggttcagtatgaagcttactgagaatgtgtcctttagttccttttttttctttctagacatatgattctttccacaatataaatattatctatttaaaggttacatcttgatgatttgatatacatacacattgtgtaatgactaacacagcaaagttaattaccacatcagtcatctcacattagatgccaatttttgtgtgtgtggtgagaactcttaagatgtacactgttaacaaatctcaagtatactgtagtgcaggggtctatagtactggtctgtggcctgtgaggaatccgatcacacagcaggaggtgtgaccattgggccagcaagcattactgcctgatcgctgcctcctctcagatcagcagcagcatttgattctcataggagtgtgaacccttttgtgaactgtgcatgcaaaagatctaggttgtgtgctttttatgagaatctatctaatgcctgatgatctgag

SEQ ID NO: 18257 - DNA, 1054 bp, Homo sapiens
catgaatgcattttttggctcagcaggcatattggtctatatgtctgtttggtgccagtacaatactgtttagtttactgtagctttgtcgtaaattttgacgtaaggtattgtattgtctccggatttattctttttgctcaggattgttttggctattcagggtcccttgtggttccatataaatttagaatttttttttctatttctgtgaagaatgctggtgactttttgatcagagttgcattaaattcatagatcatttggggtagtatggccattttaattatatcttttcaatctatgaacacaagatatcttttcatttattcacatatattttattttttcatccatgctttgtagttttaatgtaggaatatttcatcttcttagttacgttcattgctaggtatcttaattttagtacttagtagtagatgtcttttacatctaaattggaaacgaggaagttaaatggttcctgttagagacaaaaagatcttacatttacaaaacctgaacacaacaccaaacaccaaaaaaacaaaacaaaacaaaacaaaaaaaacccagaaacaacaaaactgttaggagtaataaattcattaaagttgcaggatataaaatttcataattccattcacaatagctacaaaaagaaagtcagttcatttaaagttcatgtttgtatatggtacaaagtgaggtccaactttattctttcccatgcaaatttctagtatttctaacattctttggtgaggagactgttctttcctcattgtgtgttcttagaacccttgttgaagataaatttactatatacatgaggatttatgggctctctaatctttacatcatctataatacttgtctgtctttgagtaccacactgttttgattactatagctttgtaatatgttttaaaatcagaaagtagatgtctcctttttttccccccaagattgtttggctatttctgatttcttgaaattccatagatattttagaatattttaatacttctgcaaagagatctattgatatttt

SEQ ID NO: 18258 - DNA, 2393 bp, Homo sapiens
ggcggtgagatcccgggcaccgcggtccgcctctggttcgctgcccaaacgtctgggctgccccgcgcccgccacgcccgagtggccgccggtccctcgcagctgccgtgcacgggtcgggcggtctgcctgttcgcacgtgggcgcgaaggttcgggagtggtgagcccatcggggggtgttctgtagtgtgggtgtatgggatgtccggttcgccgccccaccacccccctcccaccgccccgcgctgctccctccctcccacaagccgggtcgcccgccctgccgcgcccatcctcgcgactgggacgccgggctcatcctcgcgaggcctggaggccgctttctacctacttggttgatcctaccagtaccatatgcttgtctcaaagattatgccatacatgtctaagtaggcagggccggtacagtgaaactgcgaatggctcattaaatcagttatggttcttttggtcgctcgctcctctcctacttggaaaactgtggtaattctagagctaatgcatgccgaagggtgctgacccccttcgcggggaagatgcctgcatttatcagatcaaaaccaacccggtcagcccctctccggcccctgcctaggggtcgagtgccaccggctttggtgactctagatagcctcgggccaatcgcatgcccccctgtggcagcaacgacccattcgaacgtctgccctatcaactttcgatggtagtcgctgtgcctaccaaggtgaccacgggtgaaggagaatcagggttcgattctggagagggagcctgagaaatggctaccacattcaaggaaggcagcaggcatgcaaattacccactcctgactcgaggaggtagtgatgaaacataacaatacaggactctttcgaggtcctgtaattggaatgagtccactttaaatcctttaacgaagatccattggagggcaagtttagtgccagcagccgcggtaattccagctccaatagcgtatattaaagttgctgcagttaaaaagctcctagttggatcttgggagcgggcgggcagtccgccatgaggcgagccactgcccgtccccgccccttgcctcttggcgccccctcgatgctcttagctgagtgttccgcggcccaaagcgtttactttgaaaaaattagagtgttcaaagcaggtccaagccgcctggataccgcagctaggaataatggaataggaccgcggttctattttgttggtttatggaactgaggccatgattaagagggacagctgggggcatttgtattgcaccgctagaggtgaaattcttggaccggcgcagtttggaccagagtgaaagcatttgccaagaatgttttcattaatcaagaatgaaagtcggaggttcgaagacgatcagataccgtggtagttctgaccataaacgatgccgactggcaacgtggcggtgttattcccatgacccgctgggcagcttccaagaaaccaaagtctttgggtttttaggttccggggggagtacggttgcaaagctgaaacttaaaggaattggtggaagggcaccaccaggagtggagcctgcggcttaatttgactcaacatgggaaaaatcccccgggccggacagggacaggattgacagattgatagctgtttctctgttccatgggtggtggtgcatggccttagttggtggagtgatttgtctggttaattccaataaccaacgagactctggcatgctaactagttacgtgacccccgagcggtcggcgtcccccaacttcttagagggacaagtggccttcagccacccgaaattgagcaataacagatctgtgatgcccttagatgtccgggactgcacgcgcgctacactgactggctcagcgtgtgcctaccctacgtggcagaggcgggtaacctgttgaacctcattcgtgatggggatgggggattgcaattattccccatgaaggaggaatttccagtaagtgcgggtcataagcttgcctgaagtccctgccctatgtacacactgcccgcctctactactgataggatggtttagtgaggccctctgatcagccccgccgggtcagcccactgccctggtggaacgctgagaagacagtcgaacttgactatctagaggaagtaaaattcgtaacagtttcggtaggtgaacctgtggagggatcattaacggagaagagcctcgaagccgcggcggcgaagccacggcggcgccgccgcgtccttcctccttggcagaccctgttccccgtgtggcgcgtgcgcgggcggggtcgtgccctttgtttgttgcatggccccgcctgccctgagagccggagaactcgggagggagagggggggaga

SEQ ID NO: 18259 - DNA, 1071 bp, Homo sapiens
aagaaaataagttgattatctggttgcccagagaagaaaactgtacaggtcttgagaaaagcaacttatgaaattgttttgtaggattctaaagctgaaagtggataaaaacaaaatggtagccacatccggtgtaaaaaaagctatatttgatcgactgtgtaaacaactagagaagattggacagcaggtcgacagtaagtattctgtagttcaagaatgcgtcatttgaaaatgtagtccttttgcttgtaaaagtcaaatattttcaaatatgtaaactggctgcttcctaaattccgtattacatgtggaccaggtatgtttttattgatgtttctaacctatgattccatgaatctatgcctggaaaatgattctcaagtctgacaagaggcccaaaagagaggtctaagatcatttctcttctcctcatatttgatcagttaagatgtctaattttatttgtgatccaaaacatgcccaaatactgaaattgagaacaggagaaaaattaaccttgataacacttcttaaaggagaacctggagatgtagctactccaccacggaagagaaagaagatagtggttgaagccccagcaaagggtaagttttactaacacggtactgacgttgacattttatgcagtgaacagcccagtgctgctctagcagcttgcctgacaggagtccagttttaagtacattctgactgtgaatcatttgataagaccagttttccaagcaatcagtaatggaagtaacatcgttattgggtaattaagaatatggctggtctggcacagtggcttattcctgtaatcccagcactttgggaggctgaggcgggaggattgcttgagcccatgagtgcgagaccagcctgggcagctacagctaggtatttgtcttaaacctgggcatggtctgatgggaagtccctagttgtataacaagtcagctggttggctgtttgtgattggctggggattatttttgtctttcggaggttcttttcccccgacaaaagaaatgtttccaagttaggttccagtttgcttataagagc

SEQ ID NO: 18260 - DNA, 1604 bp, Homo sapiens
gggaaaccattttaggtaggaggggagacggggtggggggggctctgcggaaagttggttctgttccccagtctctttctccgtgtctttggcctttagggtctttgccaatcctgattcccggaagagagtcggcagaattccttcctttaggcccctctggagccttggccgaccagccacttctgtggtctggggacagtcaccgaggtggggaaccagagagttgggcctgtcgggctttggtaagggggccctgggactttcttcatcttggtggtcggccggctggctaggatcttggcttgagtttatagcttcatgtaaggtgagcccacagccaggaaggatttctgcctccccacaaccaggatgtctggggtgggtgatagaggggtccctaggacctaggagagagttatagcctgggtggaattcaggaggcagagccaggaggggttatcttaaaaagtaaatactcctaagatttgtaagaagctaataatcacctagctgcttgctagagagagtctgactgagaatagaagtgggaaggagggttccttgatcttgccctcacccgggtcactagtgtcccatgaatgcatggcagtaagcttcagggggatcatgacacttggtcccattccagtggggacttgggggttttaatgagctcctgggcctcctgagaccttgttgagacactcagttctgctgactcaaaacagtgagctggacaagtcagagtccagtctcctgcggactccttgcagggctaagtttaaagctggccgggaggaggctggctttgtttctgtgcctccctggcccagaggtgggccgggcagagaacacaggctgttgatgtctggcaggctggagctggccctccttgacgcaacagcctccctgctaaaacacagctgggattaacgcgttcctggtttatcacgttacagctgatttctctggttcctgagctggcaggggttccaggaattacctctgccttttgctaaatagcaactcctgtgctggctccatgaggcttgaggatgatgaggacagaagggcactgtctttgccttgaggaatctgactgccacgttgttctctgagcctgagtccccttccccggattctttaagaatgtgttgggattttttagcaggcagaatacgtgagagccttccaagtgggagcagtgctgtgagcaaccgcaggaagttggggagttctgggcatttggggaagggggctggtgctgtagtggaacactaacagagggatgtgggaggtgaatgagacagaaaaggtggactggagtcttgtgtgctgggattaggatgtcatggtgcgttttggctggagttgggaaccaggaagggtttccagcaggggtgtgtattgatgattgcaggtgggcaaatttcttggtcactgggccagggacatctctgatttctgagacagaagctccacacccccatatcctactcctgagttagttgagtttttttggccacctacattctgtggtagtttcattcaagcgcatcccttctcattctcttctcactgtgagtctcagttccccggct

SEQ ID NO: 18261 - DNA, 1043 bp, Homo sapiens
ttttgaaaaggccatgtcttctaaagttgcttttattcacacattgcatgaaaaggagaaaagacaagtgtcacaagcacagagttatatctgtaaaatttgtatttggggtacctttggggaaggggcagctggagacaggacaaaggccaggccctcccacccgggctgtggccaccaccttgctgagcccgtttttcctcccactgtgaccctggtgaccttgttcctgggccggcttttgtaagatgatatttgtactctgctaagggctttcacactgtttgtttcaggtaatcctttcagctgccctgggaagtccttgaacctgttgttgactgcatttctcccagtggctgattgggtttatcagggaaatgtgcaggattcccacgtttccaggtccctgtaattctctatgtcaagctctgctttcgcctttgcagcagccatggtgtccttctgtcacctccccagtgatgtcacaagggtcttggacttctctctgtgatctctcttctgtgctacacacattgctcaggcagtggcctcaatttgctcttcagtcagtctttttaatccctgatgcttttttttttttaatgtgaaaatcagcccagatttttcattctgcaaagaatgggttgcaagaaaatgaccctgaggattccctgctgatccatgtcttccgatggggagggtgtcctcagtgtccctggctagtcatttagaccattgcggtagagctgcgcctggggcaggatgcagaggagtctgggaccctgtgtgcctgacatttggcatgttctgctgctgacccctgcctccctcccacacatctggcccggagctgccttttagacttccctgtgtggtggcagtcaggcagcggagcagcagctgttcgggatgcttgggcagccagaaaagctcttccagcccttctggaaagtgggaggcagaggaggagcatagtggttaagaagagtgaccttggaatccgtcttcctgtacttatattcattcccagcacttacattaat

SEQ ID NO: 18262 - DNA, 1045 bp, Homo sapiens
gaatgctggtgtgtgtgttggtttttctttgatacagcactgctgtgtacctttaaggcctgagaggaaaatgtcatattcaaaacaaaagcaactaaaccaaaaaaaccactaatttccagaagttgaaaagcacccccaattttgcatatttttctttaaaaaaaagtctgcagtcctgcctgttttgatctttctgggccgctgccttcatatgcccccagtgctatttggacacagggaacaagggctcctctctcctcctttgttgagataaattgggtcagggccaaaatgcattggagttggttgtggaatctgtttctcgggaacatcaaatgatgcttcagtcagctgaaaacaccccttgaattcccgagtgcagaaaatgggtgcagctggcgataccactggcttgtttaccccagctcctgggagtgtgggggataaagattcagtaggaaaataacatagagctggcttctcaatcctggttgtacgttagaatcacaaagggaactttgaaaaatgtcaaaattgaggccacaccctaggatctctgagatatcggtagcctgtgctgccgaggctgagacccactgcctcagaagcatggtgcccaagctgcggggccccacttcagacacttggatgtaattgggccggggtatggtttgagagtttgcatctctaacaaattcccaggtgatactgatgccgggcccaggaccacacttggggtagcaagttctgcaacatcttgggaaagacactgtacctagtccacatcacagagtcaacacattcttggccaggtgtttacataaatcttttcacctgactgagaagaagtcattgtaccagagaagtctcctgctctgagtaaagaggtcattttctattaatctgatatattgacataagtaatttttataaagaataactttatgagtgggcaggacctggccttgctcccggggtcttcactgtgtgagagtcagtcagctgtgagaagagggtctctggaaaatagaaacccacctgt

SEQ ID NO: 18263 - DNA, 1100 bp, Homo sapiens
ggcgcctgccattatgcccggctaattttttttttttgtatttttagtagaaacggggtttcaccatgttggtcaggctgatctcgaactcccgacctcaggtaatctgcctgcctcggcctcccaaagtgctgggattacaggtgtgagccaccacgcccggctgaatgaaccattttttaaaaggaagcattttattgtcaatatttatacacttaacagatttttgttgtgtctctgttttgctattgtttgggagtgttaacattttattacatgacagccgaggaaagcaggttgttgcgtttggagattgttacttactgtctgtgtcccctcctagttcatatgttgaagccctaacgtacagtgtggctgtatttgaagaggagggccttgagggaagtaattaaggttaaatgaggccgtatgggtgggtccctgatctgaaagaaatagtgtcctgatgggaagagatatcagagagcctgctgtctcttcatgcacaggcaccaggaaaggccatgtgaggacacagcaagaaggcagtcatctgcaagccaggaagagcatcctcatcagaaactgaattggctcctgccttgatctgagactttagcctccagaactgtgaggaagtatgtctgttgtttcagctacccagtctatggtattttgttgtggcaggctgaaccagctaatacagagattataactaaggaaggtagaggaatttaaaaagaaccaaacttttatgtgcagaaactatttgtagtaaaatataatatggatctttacagggtgcaaatatggctacagcaatggtgacatttagtgaaaaacaatcaggtgggttctcagtatatgaagatttcagtgtttattacacaactgtagggttttttttagggaaggaagagaggaaaattgtaatttttaaaaagtgcattctgttagtctgctcaggctgccatggcagaattacagtgtagctatagactgggtggcttatagtgtagaaatgtattttctcacagttctggaggctggtttctgctgaggcctctctcctggcttgcggaccgttaccttctcactgt

SEQ ID NO: 18264 - DNA, 1049 bp, Homo sapiens
ggaccaagcgctcaggtttggctggctggggcgccgccccccacccgagtaccttgggtggtgcttcgcctcaagcgccttggcgggaggcaggtgggggccctgggaatgaacctgtgccccgagttcctccttagaaagcaggtggcggccctggccttgtttctaatatcttcctccacctctaaaaattaggtggcagagccagctccactctgcgtgtgcccccgactctattccgcttgtgagccccactcggaaagtaggcagcggtccggacttcccttagagtcttctaacttaaaaatcgggcggcggcacattcctgggaaagggaatgtgtcttccctgtgaatgtgtctttcctgtgaatgttctctgcaaaagtcagatagcttaatcagaccaagtcagatgtaactacgatctggctgcagaaagccggcgtctgggctccttgctttatgtcttatatcccttttacattccccacaggttctaagcagtagacctgtcatctatctagcagaaactgaaggagactgggcctcagatattgaagagtatagttagggcccagaaagaaaagggcttcttaagtggccccaggttgtgtggtttccaaacccgaaagcatagaggtcagaaggtgccttgcaggcagttttaacagttccaagtgtcccgaactgacttgttcaaattgcaacgtcatgacttgtggcgttattaaaacttcctgtattcctggttggctggatataatcttgaacaaaaggcatgcacttaaacaggaaaggtgaaaggcggaatgcaggttttcagctaaggagcttcccttttaaagaattgatgaagtgtcattattgggggtgggtgtgaaaggtgttagctaggaaaattaactttgcacttgcattgatattaagaaattattttcggacgggcgcggtggctcacgcctgtaatcccagcactttgggaggccgaggcgggcggatcacctgaggtcaggagttcgagaccagcctggccaacctggtaaaacc

SEQ ID NO: 18265 - DNA, 1656 bp, Homo sapiens
actaaaaatacaaaaattacctgggcgtggtggcgggcgcctgtaaccccagctactcgggagtctgaggcagaagaattgcttgaacctgggaggcggaggctgcagtgagtggaggtcgcaccactgcactccagcgtgggcgacagagtgagactccgtctcaaaaaaaaaaaaaattattttctcacctaatatgttctccttacgttttgggcttttcctatttatgaagttcttagttgtctgttgtgcacactgacttttttttttttttttttggagaaagtaaatctaatttctgaaaatctaatttcagaaatcatacaccgaacactctgtttttttataccttacaaaaagttcagctttatatacttagggttatagtaaaattaccatctatgaagtatgagataattttttcaaaaagtagtccttagtactactaagaatcaataaagtgacttggaatagtcacatgtatttgtttcacactttttcttaaattgtttttgtgtgatatagaaatactgagttggctactaacgatgtggctatctggatataaaaagtgttattggattggttatgtctgaacaaagagaataactggagttttcttacagggacctgagtactgcccccaacatatatttttgcaacatttctctttaactttcataagctcatagagttgattttcttcgtcagtctttgtttcctctgaaatgcatgtcataacagtaagctttgaaaaccttaattctcttttcttagctgagaaaaaaaattctagtgttaactgttgttgagtgcagttatttaaatccacttttatgtgcaaagtgcatagtatcaatgttgaatgttcctgtatgtttacatcatagtagtaaagagataccacttgaagttattcctccaaattaatagttaaatttgaggtttcagattcttgtaagtatatgaagtacagaggataaagttaataactcgagttaataacttcctgtatcattaaaagcaatcaacttgattctgtttgttacttttagaagaatatataaatggagctttgttaaacacttgactaacctgactccagtatagagtcctccccacagagttctgagcattgttacatagtagcataattacttcactgcacaacagaggatactacttttatgtaatgtctaataagtggatattatatagtttctatctcatccatatgagcaagtgtaatttatcaaagcaaagaaaatcacattttcaagtcataaaagagaaaataaaattataatgatcctcagttactgcctttgttgcatactgcatcatgttaataactgctcacactgctttcaattaatttaacactgattgcttctaacctttactaaacagttttaaaattgctatagcttagcctgcgacgcttatgattagagccaacaatttgaaatggcctgctcacctgatgcagtcgtctctccgtcttccgctttcttaaggtctggtaagtgttgtagaccccaaaagggtcacttggtaattttaaatacctttgtttctgaaggttgatttcactataagatatcattatgtctttatttcttctttggtgggcccaggcctgagtacccggct

SEQ ID NO: 18266 - DNA, 1049 bp, Homo sapiens
tgcagcaggagcatgtctttaaggcacagatccctcatgctattgttgtatggcttaagaatgcctttaagcggttttaggccctgggcgggccaggtgttccttgccctcattccttaaacccacaactttccagagtgggcgttatggccatcatgaacgtatcgcagtgctgcagagattttgtttatggccagttttggggctggtttatggccagattttgggggcctgttcccaacatcctcttttgtaggtgttattactattcccttttgaaaaactcacagcacagggaagtaaagtaacttacttaaagtcacccaaactctggcagaccctattacccagccactgctgccttccttctcttcatctatagtgcctagtactccataaataaacaacagtggttactactgatgtcttcttgatgtttattgttcttctttcattcatttctaattaactgatgtttattggacctctctgatgtaggaagtttgtaataaataatagtggttgagagagctaatagcctgatggaatttatgcagaactcaaggcgaccagtgcttttgtatacattcactctgtctctctcctggattcctccagttgtttcctactgaactttgctactagagccataacctctccttgtacaatcaccctagtcaatgcacactattgttgcctgggtgatttttctaaaatgaactaacccttaagtggttacttaacaccactcatcagctctctgtctcctgcagggttgaagtagggacttcaaggaaagcctctctggaagtgatatttaactcctagaaataggaatcagtggagaagttggggtaaggaggactctaggctgaggatcctggggctagatagagctgggtatttaaagcgtactgaaaaggccattatgggtaaagcattgtgaatgacaggaatgggtgagaggaaggcctgggatgggcagggtcttgggagccttgaagatgtttgaattttattataaatggaagggaaggtgaaaatttgaa

SEQ ID NO: 18267 - DNA, 1069 bp, Homo sapiens
gataatgtggatcactcagttcagttcataaatatttaccgagaacctcctatgtgccagcattagagatccaaagttgagaatgtattggatgacttgtcctttcgctagtttgtatcagtgaaggagtaaatcggaattttaagaagaagaaattattgcctgaagatgatgtaatttaaatttcaaaactgcttgaaaatatattgtatcttgtatagatgagtcataggacaaacatatagactgttgttctatgggaatgcttgctgtctcagcagctcaaatattaatgccttaataatttacttaataagccaaagatgtagtttgctgatagactgtatgttcatatacaagcctctttcctctgctctcccatgcctaccccgtctgcaacctttgtgccctcgtcaccctcctgtgtgcatgtatgagtacccggaatatacaaacctcatggaactatgggactctttgacctctatgataaaagatcttcggattatgcttacttcttgattatctttttggggaacatcttggcctagggatttggattattcactgcttctttgtacatacttcttagtttgttaacttctgcaacacagtcttcaaaaattgtacacctcaggctttcagagatttattcctgattctgaaaaattactgttctttacatgtcccataactggaagattatctaatcacaattagctaaggcaggagaagaatctgaagttggaaattagaactggtgaacctcaagttgctcagttcccaaaattagagaatcattaatgaaacacaggtggtaaacactgactgattccttccctggggtaagattctattttcacagatttggtgtatttttctgctagaacccaaaacccaaagaaatctgaaagtatgttgtttgtataatatttttaacttccagtatcagtatccagtagggagtgctatgtaaaatgttttttaaatcaatatattgcttcaggcaatgaggatttttgcagacattaatgcaactatccataaagctctattatctaagctattt

SEQ ID NO: 18268 - DNA, 1028 bp, Homo sapiens
ccatattgttaatgtaaacactttaggtttacatttaggtttagcccctcttgtgagagaatagtggaaaccctttcatgatctgagtgtccacatatcagccaaggggcaaccttacaaacaattctttctgtggttagcagtctcaggcctactatattaactcttttcaggacaatctgcataaatgaatgtactggtttccagtctgcttccaactgtgtgatgttggacaaattatttaatttccatgtgccccgtttttttcctctgttaaatatggataccagtaatactgcccttattaggttttgtaaggattaagaaataactcatgtgagtgagtcagtgttttgcaagaaagccgccttggcgcagtgaaggtgaaggccagcgcactccctggctgaggtgggatcccgaggcctctccagtcccctgagggtgcaccactggcccatctcacccagggcggtgccccagaggtggagcaccagggcacgtgttaggacctgaaagatgatgaactgtgcctggtcagggcaaagctggaggaaactagtggaagtccctagcagtcctgatgtgtaaatcgattggtcatccaacctgggtataggggtgaaagactgatggaaccatctagtgtctggttccctccaaggtttctctcaggatggctggcactcttccaaaacccaccccacatggtttcatctgtaaagtgaatgattggaggttttacgacccaaaggatctccacctactctcacactttagttgggtaagaagcccggcttgctggcgtgtggagccgggtatggaatgtgagtgcctagtgggccgcttctggtaagcagacctggctctgcgggatgaaccgaatgccggattaaggtgcccaatgcccacacactcatcagaccccagaaaaggtgttggttgatacaggaggagggcggccacggaagtcagagtgggtgggggtggggaagggcagagaatgtatagagaacatggtgtctgcc

SEQ ID NO: 18269 - DNA, 1030 bp, Homo sapiens
tgcattaaaaaactgttatggtaggattttaattcataaatgtagaaataaagagggaaatagaaaataacctttaggcaagaactggtgataattagtgtaaacaagatccactgataaatgctgaaattagtacataaaattatgaggagaaacaggatttatacatagttccaaagcatttccctcaagatatttattaactaccaagggaaaggtgataacattacaaagtaggagctactataactaagtgatcatggttgttaccaccagcaagaagatacattgacatcatgaatcctgtgctatggtgctttaagaaagtcacaacattatttctatgatattcttgccaaaaatgcattacttttgtccattcatgggaaagtattagacaaatcaaaattgagggacatgtggcagaataacataaaatttattgaggtcataagaaatgaggaatgagtgaggaagaaataagctaaggagaaatgacagtgaaatacaaggaggactaaaattacttcactttgggtatcagggagagagtttttgaagtaaatcaaggttacgcaaagctttgttgttcctgagcagttactcactgcaggtagggctcggttacactaaagagtgtgtgaaatcataaaaaccttaagcatttagctgtacaagacacaggggagaagaccttttaatcagcacttaccttcattaagacaaattaactgacaaatatctttttgaaacttggggaagagaaatcctgaaatgtttctagtggtaaaggaacagtaaatggaaatcatttgtatagtacccagtattactaatttaacatgtataacaaaaacttcctttaaacttagcatttgtgcttggtctgaattgttttactttagtgaacattcagtggtcatttataaactcagtatctccttatctaatttctccataataaatttcttgttaacaaattatattaccatagatgtttttaggagcctatccctcagaattgaggagt

SEQ ID NO: 18270 - DNA, 1057 bp, Homo sapiens
aatcatgctgctataaagacacatgcacacatatgtttattgcggtactattcacaatagcaaagacttggaaccaacccaaatgtccaacaatgatagactggattaagaaaatgtggcacatatacaccatggaatactatgcagccataaaaaatgatgagttcatgtcctttgtagggacatggatgaaattggaaatcatcattctcagtaaactatcgcaaggacaaaaaaccaaacactgcatgttctcactcataggtgggacttgaacaatgagaacacatggacacaggaaggggaacatcactctggggactgttgtggggtcgggggaggggggagggatagcattaggagatatatctaatgctaaatgacgagttaatgggtgcagcacaccagcatggcacaggtatacatatgtaactaacctgcacgttgtgcacatgtaccctaaaacttaaagtataataataataaaataaaaataaatttaaaaaaatgtgaggtcatgttatgattgtgtttgggtttctaaatagcttgctgttgccagagatttgaataactagtggataataaattaacatatttgtgaattttactctagttcagatacagtatttgtttctgtcttttgtttgtttttgttgttttgagacagagtctcactctgttgctctggctggagtgcagtggtgcgatcttggctcactgcaacctctgctcttgggttcaagcaagtctcctgcctcagcctctctagtagctgggattacaggcatgtgctaccaagcctggagaatatttgtatttgtagtagagacagggtttcgccatgttggccaggctggtcttgagcccctgacctcaagtggtcttgcccaccttggcctcccaaagtgctgggattacaggcatgagccactgtgcccagccttgtttcttttaaaatgccacatttagatgacaatttccaaattcatcccatagctgtttttttataccattaaagacagaaccttggactggctacattgtgtttctaagt

SEQ ID NO: 18271 - DNA, 1056 bp, Homo sapiens
actattattgtcttgctgtctacctctcttcttaggtctagcagaatttgtttgatgactatgggtgctccagtgttagctgcatatgtatttagaattattatatcttcttgttgaattgttctgttataatataatgactttctttgtctttttatttaaagtctgttttttctcatataaaatagctactcctgctctcttttggtgtccattcatgtgtaatatatttttttccatatctttccttgactctacaagaatctttctatgggttaggtgggtctcttgaaggcagcagatgtttggtctgtgttttttaaaatccattctgccaatctgtatcttttaagtggggcattacaccatttacattcgaaaatagtattgatatggagctactcttgcagtcatcatattgattgttacctagttgctttgttttctttactgtgttattgttataagccctttcatttatgtatgtgtctatatatgtatttatttgttgggatggagtcactctgtcacccaggctggagtgcagtggcatgatcttggctcactacaaactctgccctcccaggcttaagcgatcctcctacctcagcctccccagtagctgggacttacaggtgcacgccaccacgcctggctaatttttgtatttttagtaaagacgatgtttcacccatgttgaccaggctggtcttgaacttctgacctcaagtgatccacctgcctcggcctcccaaagtgctggtattacaggcatgagccaccatgcctggcctagccctttcatttagatgtttagaactccattgagcatttcttatagagctggcctactggtgacggattccctcagcatttgcttttctttgaaagtctttattttgccttcatttcttaaacttagttttgctctgtgcagaattcttgtctgacagctcttctgtttgaggagactaaagataggacctgaatcccttctgccttacaagatttcagctgagaagttagtctgatagtttttcctttatcatttatttg

SEQ ID NO: 18272 - DNA, 1020 bp, Homo sapiens
gctgtacaggaagcatagcagcttccaggcttctggggaggcctcagggaggttttcctcatggaggaaggcaaagcaggagcaggagagtgagggggagggcctacacatttttaaacaaccagatcttatgagaactcactgtgcagtaccaaaaggggatggtgctaaaccattcatgagaactccacctccatgatccaatcacatcccaccagtccctaccttcaacactggagattacaactagacatgaaatttgggtggggacatagatccaaaccatatcacatagtttgtttctttttattgctgagttgtacgccatggtatggtggtacctttgtttaaccattcacacattgaagaatatcctacaggttattcgaacatttcttagaattccactttaattattcataatgttcatttataatgttttttcatatatcactttttaagttttcattagttggttgttctaggaattactgtatacatacataagttatcaaaagtgcagtggtatcattttgccactttaagtgaattatagaaaccttacttcttccattagtttcccttaccttcttcatttcttaaacataatttttaaaaatatttcctctgtcttcattgagcagcacatcaaattgtgtgaaaatttttgcttcaaccataaactttgattaaagaagttcatgggatgatggatagtctattgtactgacctcagtttttaccatttatgttctttcctttctgaatgtcccagccttcttctgttatcattttctttctgtttggagaccttcctttagacattatttatgggtaggtctgctagcaacaaatttcttagttttcctttgtctgagaatatctttatttcaccttcattactgaagggtagttacgttggatataggattcctagttaacaattgttttacttcagcactaagaaatattgtgccacttcctctggcttccgtagtttcaaatgagaaattccctgtc

SEQ ID NO: 18273 - DNA, 1023 bp, Homo sapiens
aatctataaactgccttatttattgttattgaaatatcatctgtattctgtatgttttcatttgctttttatttaagaatcccacaactgtcctgaagattgtacataatggcctattctaaggttactcatccttttaaagcagtaaatactagatctcatccaagagaaatagggcttaattttttcatttgttagaaatcttgatgaggctttgaaaacaagttttttctcacccttttggaaaacatttaattgtgaggtctttatcaagtaaaaacagaatttataacattttaaatgggtatttgtttttgttggattgttaaatcacattttctcttacacattcatttaaatcacatgaaagtctgcgtgaaatggcactttgacgatgattctgggaaccatccctttgattgtatggtatttactgctgatatatgtatgctggtgtttcttgccttccatcatacataaatttcagtgttatattgaataccatagagaggaactgattgatgataaatcaaatattttacagcatattattgggactgttggatccattactataaaagagttatgtttgatcagtattttcagagctccctaatactgtaatttattggtgcttcttaatgttctctgttaattatatacaggtttcaaaattgggttcaatttaacaatgtataatacatgttatagcgaatctttatcacacaaaaaatgagtagcaaatatccaacactgtctttgattagaactattaagtccaacagcttgcatttaatgaatataatgtaattacatagtcaactgggtagttcatgctctattataagaattatatattagaataaagttattttgatgtataaggtgccaaaggaaaactggttaacaagaaagggaataaccttatatgtggttaagatgtcaaatgaacaattttaactatcattttttttttacagagaacacataaattgggtttttatttttagttcctcctcttcc

SEQ ID NO: 18274 - DNA, 1030 bp, Homo sapiens
atatatgtaaagtactaagaatagtgcctggcatatggtgaagtattatgtaagtttttgatgtgatgatgatgattttatgtaagtctttcagatgactgattgattgacagatagatagatagatagataatttaatcaaataaagagctccctctacattgctaatggtctgtataaattcagtccagtctcctccacctgctgtaaaataaatccctagtaatatgaagtgagttaatcttctggacggctggcatgattgttccccctgaggccattcttgaactgtattttgtaggcttttttaaaaaaggaggccaagtgcattggctcatacctgtaatcccagcactttgggaggctgaggcaggtggatcacttgagcccaggagttctagaccagtcttggcagtctctaaataaataaacaaataaatagattaacatttaaaaaaaagagggggaaaacacattaaaacaaatgtagcgtgattacttttaagaataaagtttgaaatcgttgaactcaaagtggtgttcagcataacttgcgtgtacccagagaacctgctagagtacttctacccctaagtagtctaagttattcagggttggattgtgaactgtcttgctacataagaattttgttggctctttggcactcatggttgagcatcctgttcatcttagatactgtgccattacatcctacctcattctgtttgacagaatgcgctgcagttcattaaacaatattggaaaatgcatggacgtccacttttccttgttctcatccgggaagacaatataaggtaggttgataaaagaagtaaggtacgtgtgtctcactgacatgaacacagtgagcccttgggaagaaaggcctccttggatgtttttgtatccttcttagtatgtggtggaatactttgtatatataaggggcacttagtattagattattaatttaccattctgttgttaatctgtacattttgtttatttatattttttagaggtagccggt

SEQ ID NO: 18275 - DNA, 1077 bp, Homo sapiens
atcctcctgtctcggcctcccgaagtgctaggattacaggcataagccactgcaaccaacctcattgtggctttgattcgcatttctttgatgcttagtgatattgagcttttttttttttttaatgtttcttcctgtgtgtaggagaaagattcttgatgaattcacttataaggtgatctgatggcaaaagctcctttttgttgtagaaagcctcagatgccaatatttggaattcttttctctaaggcttttcagtctgcccagaaagtacatctctaacctcatgaccaaaggacataaactttgtttccatgtcctgaaagcagggtggaggaagggaaccagggatcccactgtgaagtatgcagtctccagccaaatccactgtttaatccttgtatctcctgctctccactgtgccttatactcttgagtgcagtgtctttaaccagagaaaaagccttttgtctctcaaaaatcagggagctggaagcagatagtaactccctaagtgtttagggaatggaaaggaacttttggacccagtcttcctatgtggagcgtctgtgaatcccagcagtgtctggatcttagggtcctgaggctctttcctgttctctttgtcctaatggatttataccttagtgggtttataccttaaacatttttttccactatcatttttgggattttaggaaaaacaggagttaaagatatgtcttggtcatattaaccagaaatctacttttgattttatgcttaagtgtccctcccattccaggatgtacctaggcatttttctattccttttaagaaatatgtgggcctatatggaaaaaaaagacctagataattttgaagagaaatataagatttgaataaataatgggctataccatattcttggatgaaaagactattacaaaaatgtgagtacctcctaaattagtctactagtttattataatcatggtaatttcagtggagtagagcttttggcaatttcatatggttaaggacaaaaatcagagttcagggcccaccagggaagagggatttcaataaatacttcag

SEQ ID NO: 18276 - DNA, 1068 bp, Homo sapiens
tgttcttgctttatgtattacactttatgcatttcagataaatcattaactagcaaacatttagaatgctgactgttatgtttggaagaactcctggaagttttatttactctattttcccttttatggctttccactgacacacccaggttggcggtgcgctacggggctgcatttacccagaaattttcttcctctatagccccacacattactacttttctggtacatgggaaacaggtaacatgcacagaatttgaaaacccaagctgcttgaaatgtgtgggcttatttgcactctgaaggttaaatatgtcttttggtcttatagtgtgtgggtgaaagcttctctagaagtaggaagtgtttgtttcactaactttattagttattgacttaattttcttttagtcatctatgttgaaattaaggaatataaatgctttttataagtcagcttctgtggatatcctgaaatacatgaagattgcagccagtttcaaacctacatttttatttctctatctaaaagttccacgagaatttttacttttgagggaaaaaaattgtcttatgtattgcatgtgctgtactttaaaaaaaaaaaatctgttctccctaggttctaagactttttcagtaatataaaaatagcagtgtgaattccttcccccaacattatggctttatcagtaaaaagaaatactggtatttcattgtagcactttctaaaattcagtactaagtgaatcctctaatccagagatttggttatctaggcaccaaaagaaacatgatttaaagtggttatagaaataggtcacatgtactagtgacagatttagtaatgaacttgttaatgcaaaatcagaataccctcttaatccctcctatacaccctccctccctaatcaaaataataattaggttttctttttttgctttttatatcaatagtgtcatcaataatatttttgtcacagcttggtggcagggatgaggtggagggatccctccctaattctgaatggtcctgcagtctgggaaatttcagctgttaggttcaat

SEQ ID NO: 18277 - DNA, 1075 bp, Homo sapiens
ccgagtgttttcatttaattgatttagaggtagaatggaagagaatctgtggtacctaccattatacacatttagttgcccagtttacttaaactttaatgaaagtagaaagtagattaaacatttaaattttatttctttcctaaatagaaaaaaaaaaggcccatgagtttgagcccttgccccaaagagagttgtttttctgatcaatcttactggagtttcacctgagaagatagatttgtcacataaaaaatgcagcttatttgtagtgttttgaaaggatgtaagaaaggatgagtggcttcagtattgagtcaatcgatatcaaatgaatggatgtgtgagcacatggaaaaatctgctgtcagtcacatttctcataacattgaggtacagtgccgagatcttgcataagaaattgtatggatattagttggcaaaattgaaatgaatgagacacagttgggccctaaagaactaaggagggggattgacaaagaatagaattaaactacttgactcaatatgttaagagagtttatgaaaagatagtcgtgaagggtgaagctaatttgtaaaactaatgcctgaaaaaaacgtaagcatgaagtccatggagagggaattgagagctgacacttcataactggagaaactggaaattaaagaaagggaaacaaaagacttaaaatttttgtttgccgaaatttttacgaaagtaaactgtgttgtagttttaagaatttttttaaaaaatctgattagctgagcaaagttaccagaaaactgctatcctagttgaaatcaaacattacttgcaaatgtgttttctgagtgttagcttcctgcttaaatgttacatatgcaaaattctgaagttttcctgtgctactcctgaaagcattcagaatctgtgacacgtattgacttcatgctttgagattcaaaatttattgttctgaaagttatatttagaatcagtaaatcttgatattcacctttacaaaagccaatgcctgttttcttattagaaaagcaaaaaataataagaattagaacacagaactcatat

SEQ ID NO: 18278 - DNA, 1027 bp, Homo sapiens
cagtggtacgatagaaacaaagtctccaggaaagtgagagggggtgggacccaaagcaccagtgaggaaatggcttttgttgggagaagggataccttttgcaggatattatgtagaaagggacaagaatattgagttatttataaggaaaagattataatgatggggctaacgtgtgtgagctgcacaagagaggagtgaagttagggcagagctgctgtatgatgggaatgtgctggagttcatggcttgagtacaggcgagctagaaggataagaaatgatggtcaggggtttcagaggtagcatggtttctgttggtgataagtacctggaagagggtggctgagttcaggaggcatttaaagaactgagaagccaggttctgggagagcatcatgccttcactgaagacacccagggtgatagcaggggctggggcagaaaggaaggagcagagtttagaatcttcctgaatgtcagagacagtgaagagagagtcaggatggtaaagccagctgccataagcaggggctcagaagggtagaagaataaggcctgaaagttgcaaggcagcctcttactgactaaattttaaacttagtctctttgagcttgatgtcttcctctgataaatggtggtaagcatgtgcacgttatcacagagttcaaatttggtgagtcagtgtacccactgcattgcccagtaatactaaaaaagaaaaaacaaatactaatttctgcaactaccatactccctaaaaacagagacctacccccaatcaccaaaaaatccccattgtttttctaatccaaattttgtacatatttaataaccttataccaccacttactatttttttactttcatcgaagatgaatctacaaaaatatattaatgtcaaaaaatattactgacctagcaaactggcagttgggaagtaaggtaagaaggcacacttttattaattaataatatcttttgtattccctaaacagattgaaaaatgatggattagttcattctt

SEQ ID NO: 18279 - DNA, 1136 bp, Homo sapiens
tttttagatttcaccagtttcacatgtatttgtgtgtgtgtgtatatatataattgtatgcaattttatcatgtgtagatctggatagccactgtaacagtctatagttctatatacagagctactccatcacctcagggctccctatgctaccactttatagccgcacgcacccttccagcaaccactaatctgtttgcatctctgtaattttgccattttgagaatgttatataaatggaatcatacagaatgtaactttggctttttttcttttaccatacttcctttgagagccatccaaattgctgcatgtatcagtagttcatttctttttactattgagtagtagtccatagtatggctgaaccacacaatttgtttaaccatttacttattgaaggacataccagaagggtggtttccagttttttggctattgcaaataaagctgctataaacattcatgtatataaatatttttatgtgaatataaagttttcattttgggggaataaatgcccaaatgtttggattgtatggtaagtgcatgtttggtttttagagaaactgctgaactatttattttctagaatgactatatcctcttatattcctatcaacaatatatgagatatccagtttctctgcatccttgctagcatttagtgttaccacttttttatttgagcggttctaatatgtgtagtgatagcctgttttgccttatattaatcaataaaaatagcctcatctaatcttaactttttttattttaaaacatcttggcagtattgaactttctcaatgaaaaatctctaaaattgtgacttgaaaggctttaattttccagtttttctttggttttactcttagcagtaacattttaacttttttttgtctttgaagtaattttcagtgtttcctttacatgttgctttttcttagaaactagttactagcatgaagtagatctttagcctcgttttctaaaaacataaaaaagtaaaactgtggggtttatttcaaaattgagagtcctgtcttttcatatgaggatattttatagtctgttggcttggctatattttagggagtaaacctgtggttagtggtttgttgttggtggtggtaaa

SEQ ID NO: 18280 - DNA, 1022 bp, Homo sapiens
tttattccagccgggtgcggtggctcacacctgtaatcccagcactttgggagaccgaggcgggtggatcacctgaggtcaggagtttgagaccagcctgaccaacatggagaaaccccgtctctactaaaaatacaaaattagccaggtgtggtggcgcatgcctgtaatcccagctacttgggaggctgaggcaggagaatcgcttgaacccgggtggtggaggttgcagtgagccgagatcttgccattgcactccagcctgggcaacaaagcgcaactccgtctcaaaagaaaattttttttttttactttatcccaaatgtttatatttactttggggcttatgtgaccagtttaattttcatttgtaattgacttgatagaacacactaatgttcagttaagatttcttatggtgtggtgaggagtaggatttttatgtaaataagcccaaaattgtatatatgaggttaatctgatatttgcagaagatattcatgcattactgtaaggaccactctgcttattcatttgaccgatttgttacaacatggttagaaatcatcaaggtgtttgagatcaaaggatcttcagaggtgatttactccaatccttttttaaaaaattaataacttgagcctcagagaagttaagtgacattaccaagttctgctgttagtatagtgactttatctttacctgaatccagggtttcttagccctagtctgtaatgtgtcctagtgtgcctctagaatctggtcctgtcagcccaagtctgttaaatcaaataaaaccagggcttggtgcttcaccttgtcttctgccataccgttgggtttcctgtggaccatgcagataatgatgatgggctcagtgggcttgatagtgataactcctaaagcagctccttctaagtgcggttctcaatctgaggaagttaaaaaaaaaattagtgactagaacccacttctcaggtactctgataaaatacatttgtaggggagtgatagttttcact

SEQ ID NO: 18281 - DNA, 1034 bp, Homo sapiens
tacttagttcttcagcgatgtatctctgctgatcagctacatgatatctacttgagctgttggattttttttaagaacagtgcatttttgaatgcttttgaaaaattgtagtaaaatacataaaacaacatttaccttgtaagcattttaattggtacaattcagtgacattaagtacagtcccagtttagtgcaaccactgttactgtctagtttcagaacgtttttgccccagatggatactctgtacctgttgaacattcagtcctcatggcccaataatctttatgtctgtatagatttgcctattctgcatattttatataaatggaatcatgtcttttgtgtctggcttcttttacctagcatagtattttcaaggttcatccatgttgcagcatgtttcaatactttgttcctttttatgtccattgtatggatatgccacatttcgttaatgacaattcttttgggtagctacattttaaaacattatagtagaatacatatagcatacaatttactatcttaaccatttaagcctgcagttcagtggcattaaatacattcacgttactgtgcaattatcaccaccatctgtttgcagaaacttttcatctcctccatttgaaactctgtatacattaaacatgaactctcccttctccccttcctccagccctggcagccaccgttctacatttttatctttctgacagagattttactactctaggtacctcacataagtgaaatcaaccagtatttatccttttgtgaccagcttatttcattagcttaatgtcctcaaggttcatccatgttgtagcatatgtcaacatgactttccttttaaggttgaataatattccattgtatgtatatgtcacaatttgtttctccatttatccatcactggacatttgggttgcttttacctatcggctgtcttgaatcatgttgctatagctgtacaagtatctatttgagtttctgctatcaattctttaagtatatgcccagaagtggaattg

SEQ ID NO: 18282 - DNA, 1097 bp, Homo sapiens
tgttttgttttttgagacggagtctcgctctgtcgcccaggctggagtgcagtggcgcgatcttggctcactgcaagctccgcctcccgggttcatgccattctgcctcagcctcccaagtagctgggactacaggtgcccgccaccacacccggctaattttttgtatttttagtagagccagggtttcaccgtggtcttgatcgcctgacctcatgatccgactgcctcggcctcccaaagtgctgggattacaggcgtgagccaccacgcctggccaaatttttttttagttgagatatagttaacataaaattcagcattaaaaatgtacaattcagtggtttttagaacatattcacaatgttgtgcagccatctccagtaattctagaacatttccatcaccccaagaagaaaccctgcatttagcagtagtttcttctaattcttccttccctcccttaacctctggtaacctctaatctactttctctttctatcctgatagaattttttttgttcccccatcctgatagaatttatgtgtcaattataatgtaagttaccttttaaaatcaaagtgaatttgtagtgtactgatttgagatctaaagcaggcttacctgtttgagtttaactttattaagtgtaggacatgaaaagtaatctaaatattgtatgttgttgatgatgaccatgtgtcaatatggaatcataaatcctcctgtgcagaatctccctgtgtgcttttttggttcctagagcagtatgctttggaggacagaagccaagctagatgtcacagacacagggagatggagtgttggggactgagagaatgtgactctgacatgctgggtagagtgccagggccagggtggagacctgcagagagacgtagcattgtcatggcccatgcagcccagaaataggtggagctcagcccactgtcgcgggaagtccacccccacccacaccagtatgtttggttagaatgatcactgatttgtcatcacagactctcagagattgaaccccttaaacccatcatcttgtgtctggctgaagccagggactaggacctaggttcctcac

SEQ ID NO: 18283 - DNA, 1075 bp, Homo sapiens
atcaaaagctaatggttccatttatactatggtatggctctccaactctaactccattgatccacctgatttctctacctacatatgggctaaaaacttgtgggggagaaactgtataattgtgcaacttggcactgatatgcatttatggtttgccatttcagctaggccctcacaactctactcactaacctttttccttcttacccaatgggccttcccattctcaagacttctcttactccccttattttccatttaaatatttcttgtaaagtgtaaaataaaatcacctccatttcttttgctgtgtcaagtgtcctagtatggccttcatcttcaggcaatgactataaggatgaagaaaaacagctttttaggaaaacacatgaaggcgaatatcaaggaaaagagaaaactgtcaggagtttcttggcaagagaaaatgaatacaaatatggactactggaatataatttttcaggccaaaatgactaaatataattattagcattttgagaggattctgtgagctggggtacttattactggtgatgttatttccatgcctgatcaaaagctatatacatgtttaagaaggtatttggtaaataacttataaatatgtaaataaatggtatctgtttttatcagaaaaatccctgacgagaagacaggaaggagttctagggattactgtgcatgaacacagcaatattctcagatagcagaggattactgtaaaataatcaaatgctacagagaatgtgaaagcttcccaatcttgctcttcagagctaatgcacccaggaacaagagacaaatatatcatggacatcaatcaatgatgtcatctttctttgaaaggttgtgagttatttaaccaattcccaatttctaaaaattataaacaatgtaaccttatatgtaacttttgtattttttctagaataaattctgagaagaggaactgctatattgaaggacaaagacacttgacattttgaaacacattgccatattcaccaaatgaaaaatattcaattttcgttagactattaattcattcagatta

SEQ ID NO: 18284 - DNA, 1036 bp, Homo sapiens
agctgtgagtgccttttacactctgatctcgggacacccctcacttattttataagctgtacctcctccttggccaaggacaggccacaggtgacagctcccttgtgtgttatggccctttggcagagtccccgatctcaactgagtcctttctggccccagatcccagccatggctccgctacctgcctggctggacaccaggtctggggtggtgggtattgttctggtagaaatgtgaactggtgctttgctttgagtatattaagacacaaagtccctgtggttaacagcaaattaatcacagtgttaaggagggcctgtctcgggtagacatgacttcatgagcttgtcataaaactggcctctgccatatttcactccccaagatttttgactttcagaaaaggaaccgcagatagagttaccaagttttacagaaatatttttactgggcagaagattgctttatggcgagagccagttatttcaggagacaagcaaagagccctttattctcacgttctgtgggaggaaaatatgatgccagaaagcccgcttcttggatgggccctttgagggggtgggctgcatttttttggagttgggagtgggtgacatgaattggcttgcgaaggcctggggggcccctgagcacccgcctaccttttcttaaccatctctggggatttggggcttattttgcaagcacacggaagcctaagggtgttgaacagggaagagacgtggttagcactgggcttgaaaccaggaccgcatatcagagaggggaagaaactgagagtggtaggccagcctatggggggccccagctggagacacaggaagtccaggttagagctggtgctgccatttcccagccatgtgattctgtcatttcttgttgtaaactggggataacagcaggacctgcctcatgggctttcaggagaattaagtgagagcatctgtgtcaagcgcttcctcatttattcagtccataatgtctatggtgatcgttggcagcgagagagggg

SEQ ID NO: 18285 - DNA, 1050 bp, Homo sapiens
tgtgtactccagaaaatctgcagatggagggcacaacagggaccttgtgactctgggtgggggtggactagagggtgggatggaggagaggagtaagagacaggtgtggtacttcataggtccaagcccaggtgggggtccggtcacctaggtccatgtcctggccctgcaccggattagctgggggatctcggacaggttgttgaaactctgctgctcctctggggataataagagtagctgctcagagtgatgtgtgaagtgtgatcaggcagtgttgggcatggagtaagcattacacacagtgcctattctgtttcctccatcatgtcactctcttggtgcatgagtgtgcacacacacacacagccagcctttcacctctctcctctgttgtccttcttcctttcttaagatggggtcttgctctgtcacccaggctggagtgcagtaggtaattgtagctcactgcagcctcgacctgggctcaagtgatcctctcacctcagcctctcaagtagctaggactacagttgcatgccaccatgccaagctaatttttaaatttttctgtagagatggggtcttactatgttgtccagactggtcttgaacttctggcctcgagtgaccttcccaccttggcctcccaaagtgctggggttacaggcgtgagccactgcacctggccactgcttgctttcttcatggtgaagtgccgtgttgtagagagaatcaggacgcttaagcgtagagggtctgctggctgctggtgtgctggtttgactttgggcaggccaccctacctttctgagcctcagcttccacatctatagaatgggaacaagggcctttgccctgcttggctcccagagttggtgccaggaacggatgacagcgtgaagcagagtgtttcctgaatgggagattttaaattcagaaacagggaaagaaatcaccaaatggggggctgccttataagagtaaggaaggacctctctgctgagaccagggcagacagctggctggagagctggggggccatggtgc

SEQ ID NO: 18286 - DNA, 1042 bp, Homo sapiens
aggagggaaatggaggcacagttcgtatagaggactgttcctccccaccctctccaaaggccaagaaggaaatgaatgaagggtccagagttcattctgggggcttcctagtagcctatgcgcttgcccccacctggtggttggtgttatcccactcacttgcctcccctgccgtaggttccagggtgacagccgcctggagcagtctggctgctaccaccattgcgtagatgagaacatcgagaggagaaaccactacttagatctcgccgggatagaaaactacacgtcccaatttgggcctggtaagggactcaagcaccctgcaatgggcgatgagggcagggcgtggctggacgggccaggcgggccgtgcgggtggtgttcactgctaccccaggcttcggtaagacaactattatgggacaggtcaaagacttcttggagaaagtgacgttaaaaatggtttcaaaattaaagtaatacatgcacgaaatcgaacaaaatccaatagtatctaaaggcttagcacccaatgacaaacaacagttttgtgccccatcccagcccacccaagccctgttcccggggcaaccactttgacctctcctggctgtttcttccagcaagaacctcggtttccctaagtacagcactactgtgtctttatcagccttgacatatgttgacctcttgctcaatttcactcccacaactcccttctcccctttctcttcatatgtttaattcctctatgagttacttctgtatgtttttagcaatatacttagagttctttcttgccccagtgaccttagatagttttcggggtctctgctgccatctgtctttctcggctccctctcggagagtatttttgaagacctaccaaagaaccagttcttcccacttagcagatgggaaagttccatttcagagagttttcctgcaaggcagtgaggggcagtcagggcattggggggtagctctggttttggagaactgggggcgggggtgatgtctggggtatagcgcaagcccc

SEQ ID NO: 18287 - DNA, 1045 bp, Homo sapiens
gtcatctaatctaatctaatgtactgtggagaagattcttgctggataacctgtgagatcccttttagttttgagaaggtgtgattgatcagggatcaggactctagtcagaaatagattgctcaactttacatttagaagaaaaatcaagcaatcttttattttgcctctaacaagtagcacctagtgtctgctgtcaggtaattgacaatttctgttgataacagcatcaacagtttcatccccctgctgttagtggaactctctgtgatacaggctagtgcaataaagccaacagtggcagtcagagatggtgattctcattgagcattatgcaagtctgattaaaatgtcagaaggcctgcaggcagactgtagccaggaatgtaccaggccctgagttagacgacttaatacttttttacattcttaacaaacttataatgtaagtcttaatgatccccatttcgctgataaaaagctggggctcggatggacaacaattaccaaaatcaaagtaaatagtagagccagaatttaaatccacacctgtctgattagaaagctgtgctcttttcagtacctccccaccccaaatcctatctgtatatttaggatgtgaagacctgcatagaaaaccatacttctcagtctcacatgtatacttgggaatattgtttccatggagatatattttgtctctaattctataaaagctgaattttgctatagcaaggatcacaattgaataagcaaactgaattgtttttttttcaggtcatttcaggtcctcagtttcttttgttgtaaaaatgaaagggctaatactagatgattcttaaggttccttttagcgtgcactgtttgcgcttcctgttttcctgttgctgaagcaagtaatcaatgcttgtttttcaagttagggcatgctttctgctttagtttttagctttacagcaacagcacattaatttagttggaggtataggattcaaatgatagctttatttcaattttacttcttcaaagtgtgacatactttgct

SEQ ID NO: 18288 - DNA, 1044 bp, Homo sapiens
aggcagggagactggggtatatcctcgactctcatacctcattattgagggttgtcttgctaactgtctgctgtgcacaccctgaagccagaaaataacttaaagcagaagtgaaaggtagcccagggcatctggaaatgtctgcaggtaacctcgggtgagctgaggagtatgggtggggcacccatagtgtctccaacaaagtgtttctgactttgctttctaagatgtgcaactcataccacaaggggtcttgtgagatggctttggtgtggcacagagagagacatggtacccaagagcacaaagtctcagaatgggaaagggatttttcccttttgagctgtctctttgatcctgctctgcccgcctctcacccctggggctgccctctctccccagagcaggtgctccacccacgctggcctttcacttcctccaacttgtgggactgggactcttgcttctgactgcagccaacagaagtctgggcaaagtactagaatgctactgtaacacttgattgtctcctctttcattggaaagacagcagtcctccagttcagggcatttaagaggcaacagtaagtgtgaccatttaataacattgttaaaactgtaacaatctaataacattgtttgctgttatgtttatctttacagtttccacctgtacatggcttttcatgtatggtagtaatataacgtttcccttaaaataaatgtatataaatcgtgtgtccatttaaagaaaaatattaaataagagtatcaatggtatgaggatagaataaaatataataggccaggtgcagtggctcatgcctgtaatcctaatactttgggaggtacacgcagggaggtcacttgaagccaggagttggacaccagcctgggcaacatagtgagaccccatctctacaaaacattttaaaaattacctgggtgtagtgatgcatgcctgtaatccagctactcaggaggctgaggtgggaggatggtttaagcccaggagttcgaggttacagtgagctatgatcatgc

SEQ ID NO: 18289 - DNA, 1049 bp, Homo sapiens
cacccgcctcggtctcccaaagtgctgagattataggcttcagccaccacgcccggccatccctataaccattttcatatctatggttctgtgatattaaatatattcatagtgatgtgtaaccatcaccactatccatctctagaattcctttcatcttgtaaaactaaaactctgtacccgttaaacactaactttctattttcgcctccccgtagccctggcaacagccaatctgctgtgtgtctctatgaatttgactactctgagtgcctcataccagtggaatcagatagtatttgtttttggtgactggctaattttacttagcgtgatgacctcaaggttcatccgtgtcgtagcctatgtcagcatttccttccttttaaggctgaatactattccactgtatatgtttatgtaccacagtcttatccatttgtctgttgatgttcacttggattgcttctacctcttgactgttgtgaatgatgctgctatgaatgtgaatgtacaaatatctctttgagactctgttttcaatatttttgaatatatatccagaagtggaactgctagatcatatggtaatatggtttggctctgtgtccccacccaaatctcatcttgaactgtattcccataattcccacctgtggtgggagcggcccagttggagataatttgaatcatgggatggtttcctcagtactgttctcgtggtagtgaataagtctcatgagatctgatgggtttatcaggggtttttgcttttgcatctttctcattttctctaactgctgccatgtaagaagtgccttttgcctcccaccataattctgaggcctcctcagccatgtggaacaattaaacctccttttcttcctagtctcatgtatgtctttatcagcagtgtaaaaacagactaatacagtaaattggtaccagtagagtggggcgctgctgaaaagatacccaaaaatgtggaagcgactttggaactgggtaataggcagagattggaacagtttggagggctcagaagaaga

SEQ ID NO: 18290 - DNA, 1027 bp, Homo sapiens
gggaaaagacccacacatttgttaacagaagtattctgtgggcagaaacagatcttaggagacatattttggcaagaagggtttttttcttttttttattaaccactttttctggttatcccttccctgtagcctactcacacgcccatcaacatggataactgagaggcatacgcaaggtgcggcaatcagtttctagtacagcagtttgttattacagttgctcaagaaatatgtgtgctgggaaaataaggagtgtcactctacacctccaagggggagacagtgtttgtctaaacacaggtctttgtctctacaacatgctaccccacccacccctgctgcccaagtaagctgggctttttgagtcattcgtgatgtgtttttgaacacaacgagggggaagagctcccacagtctgttcagttcttgctacaagaaatacaagctgggtttgactgaatgacaaaaagaaatctgttgagccaggaagcgtagtaaataccgtgactctctgcaaatgcgcacagcccaaacagctttttccagtctggaaaaatgaagagatttgtctgtgcaaaaaccagccaagtctccacccctctccctttctactcctccacccccacctcctggctaggccttccaccctgccccagacattcagtcatcagctttcatcctctgtgacttgcattgccccaggaaataacatgcccggctctggggagatacaccagcctctcccaagcatctttcagggatgtctgtctggttgggttttgccagtcatctctgaccttggccagtgctggctcacagcaaagttattcattacgcaaagtgggtctggtgtcttattccttgtttattcccttccttctccttcccactccagtcttcccccttttgctttgaaagaagctttgtcccatccctacttccatcaggcagtgtttagagagaagatttgccaaagatgagattttaaaagcatttgctctcagctagtacagggcatggaggc

SEQ ID NO: 18291 - DNA, 1056 bp, Homo sapiens
cattgatgctgatttatccagtattctggggctgggggctgggttctttctgctttcaaggggataagttcccattccataaagacacacaaggccacaggctaaggaacaggcagggacctgttctttgcttcccagataacacacacccgctttagcaataaccttctgggaatcatgcccgtgacttttcttttttctattccattagtgattttcaaagaggaagtttcagtcagataaaaggagcagatggcactgtacgaggcctcctgccgggtaaatattttggaggagccagggcttttctgtgagttgctcctcttgcctggtaagctttgatttcccaggttattgaggtgtgttctcctaaggaaggaatcaggccttacttaaccttgataattaaaatcactgttctcattgcccttccttcataaacaaggaaattggaacagagctaagagaagatttttcatgcagtttaggaaagaatgagcaatggaaaaaggaaattgagagctttggggagtttatagcagagagcatttgagtttgaaataggagctgagaatccatatgtttgagaggaaagaaaagaaaagaacagccacatgcccagagcttcaaggggacgtgcggaaattgttataggaaagggggcagggaggcccacgtgggtctccctttatcagacccagatgttcaggcaacggttctcaagatgcccatgaaaaggtctagagtctgctgagctagactcactgttttcttaactaccaagaggcacatgaaatcagtggcctggagctttccaccgtgtgctcaatggttccctgaggccctcctggggtctgtgccgcaccaattatacacagactgggctgccttagggcaggacttgaaagtgaataggactgactggctcactgggtaactgtccctgcctgtcagcccctgccaaacagaggctgccaaacctccctctgttgcctcccgccccagactaaccttggaaggcaggagacattggaaggtccaggttcagctctcaat

SEQ ID NO: 18292 - DNA, 1015 bp, Homo sapiens
tgttagagtctataatgtaatggagcataaaacatttaagttatgaatctgcataaaatgtgtaaaagatgaaaaaacatactttaatgtttgtcagtacttattgatcagtgaaagaacattttcattaatgcctcagcctgtgaatggatgtcaataaagatgagtgagaaggtatttcatatacacacacttgttcaatatttattatatgtttattattcataatgtattattatttatacgggaataataatctcttctgtagccaacacagcacctaccctagtatacatacatggtgtaagtatttaaatatgtgtaaattaagtaaattataacaaagtcacaaaactggtgagcccaatataagaaatgacagtgccactacaacaatcttcaaactttaaaaattatttactgcggaactaattttatgaatataattaaaatattatctttttgtctcaacgtgttcatatgttagattcatatatgtggatttaatgcgtacaatactgtaacaaagttggaaattgctggctgggaatcccttttttttttttttttttgagacagagtctcactctgtggcccaggctggagtacagtggcacaatcttgtctcactgcaaactccacctcccaggttcaagaagttctcttgccttagcctcctgagtagcttggattacaggtgtgcaccaccacacccagctaatttttatttttttgagacggagtctcgctctgtcgcccaggctggagtgcagtggagcgatctcctctcactgcaagctctgcctcctgggttcatgccattctcctgcctcagcctcccgagtagctgggactataggcgcccgctaccacgcccggctaattttttttttttttttgtatttttagtagataacagggtttcactgtgttagccaggatggtcttgatctcctgacctcgtgatccacccacctcggcctcccaaagtgctgggattacaggagtgagccac

SEQ ID NO: 18293 - DNA, 1008 bp, Homo sapiens
ttactaatttgacccctaaattctgagattcagagccaacctctgcaacattttcccagagtccccatattcagaaaccacagttactgagaatacctccaaaatttaagacagaagtgaacaccattcactgaccagtgaaaataaatgtcacaagaacttatgtacttaacacaggagaaccccacagaaaatctttctacaaaacctgagagtctaagctaataaaagtttatcgatgtccaagttcataatggcatagacgcatcaaaaaagtaggaaagaaggttgttaggtagaagaatagagaagtgtcagcccagtagtgaggaaggagatagcaaaaacagaagttcaaaacaaaacaaaaacacaaaaaccagcatcctagaggccatttattatagggacaaattttgcatattttagagaacattcactgattaaaatggcatacaataatgttgataattatagcactgctctttaatgaccaagcctaagtaattttcagagggctgcattcaagaaaacacgaacgttctctatcagatgatggggaggccgctcaagtttttcatttaagtgggatgtcattctgctgtgatgtcagatagatgagatgttactggccttaaatttgactcaacaagttgaatttgcaaactaaagcactatccaaataagtggtgtggggggccccagagataaactctttctgtgcattcttggtctaatatgtggttgttataagtatccttcagggaatcaaagttggaactgtaaccgccctttcagcagggtttcttcccagccctgtcagtatctcagctaaatagagttatgctgatccactctggagggccttcatggggaatataaagaatgaaattacttggcaaataccactgtgtataccgcagccattccattctggctaggcataaacaagcgcagtgtcgctccttagcggaggctgaaattcaagagatttctgtcaactgtgaa

SEQ ID NO: 18294 - DNA, 1034 bp, Homo sapiens
ttagatataacaggcttggatcttggtaagtcgacaaggaatcttaatctgtgtttttagttttataggtcgatgagagggaaatagataatttttgagtacttactatgttttaggactttgaatatatatattttttcttctttgagatggagtttcatcatgtcacccaggctggtctcaaacttgtgggctcaagagatccgcctgccttgccctcgcaaagtgctaggattacaggcgtgagccactgcgcccatcccgaatattttctttctgaactctgcaacctttctaaaccctgtgatatagatggtccaatgaggaaacagactgaggtttgtttgttttttgtagagatgggactgtgttgcccaggctgatctccagcttctggtctcaagcaatcctcccacctcagcctcccaaagagctgggattacaggcatgagccactgtgcccagcttagactgagaggttttaagaaccactcaaggttacacagcttagaattagcagttagaatttgaatccacacctaagctccttcaactatgccatgactggctcatatttgccagatatttgtctaattgattggtgaatctaatttattttctaattaaacagtcaaatgttgtcttagtccattttatgttgctataacagaataccacagactggttaatttatacagaaaagacatttattagttttggaggctgggaagtccaaggtcaagaggcctgcatctggtataagatggcttacaagcattcacaagaaggccctctgatgcaaggccttctgctgcatcatcctgtagtagaaagcagaggggcaagagagcaaggcatgactgaacttgattttcttttctgtaacaagcccactatcttgatgactaacctactcctgtgataacattaatccattcatgagggcagaggcctcatgacctaatcacctgttattaggccccacctcgaaacactgttgctttgaggactgagtttccaacacctaaactttg

SEQ ID NO: 18295 - DNA, 1080 bp, Homo sapiens
tgtttcatggcatttgacaatctgtaattatttgattcttcaaatacatattatatacataatatagtgtatatcatatatacatatcatatatagctatctaaggtccaattgcttttgtaaatgacagtgccaagaaagtggaccattctctttttagtttctattctacctatatttattacaaattatcgcaaaactcttacaaaaatgtgctatgggattcaacttttatgagatttttgttaaaaaaagggttattggtcacttagacagatattcttagaagattgtattgtaggataaatttcctaggatttttccccctaattacattaagtgaaagtaagattttggaagtaatttttaaaaataatataggaaacattgagtataattagaattagaaatagtaataacatttgctttatttatttatttatttatttatttttttgagacggagtcttgctccgtctcctaggctggagtgcagtggcacgatctcagctcattgcaacctccgcctcccgggttcgaacaattctcctgtctcagcctcccaagtagctggaactacaggcgcctgccatcatgcccagctaatttttgtatttttaatagagatggggttttcaccttgttggtcaggctggtcttgaactcctgacctcaggggatccacctgctttggcctcccaaagtgctgagattacaggcatgagccaccacatccagcctgcacaatatttttaaaagtggttttacccacattatttgagttttttagtagtacattggaatatatatagatatattaatataaaagttggtattatttcatggaatttacagatttgaggtgttgagagggaaagtaacctctaatgtagatagctactaatggtttagtagaaacttggctctaaatttattatgcattctatggtacctaactgccttttactcacagcaaaaaaataacaaaagttcatagagcacctattgtgtattaggttggtgcaaaactttcagtggcaaaaattgcaattattttgcaccaacctatcaggtattgtg

SEQ ID NO: 18296 - DNA, 1113 bp, Homo sapiens
cagcttaaacaatatcagaaatgtcaatattatgaatttctttaaaatatctgtattgaaagtctcattttttctaatcttttattttgaaaaaatttcaacttatcagaaaggtgaaagaatagtaccctttacatatattcactaattgttaattattttgccacatttgctttctcttactatttttatttctaatttttctttggctgaaccatttgacagtaagttgtagacatcatggagatgttgcccctaaatattttaacatgactccctttagaatgggaacattcacctccatgaatataagacttttaccacaaccaagaaatataacataaaataacattatatactatatagtccaaattcaaaatttttaacttgtcccaataatattctttagagagatatctggtttaaatttcaggatccaatcaagggtcaggcattacatttagttgttatgtctctttaacctcctttaacctaatacaagtgttccctgtcctttctgttgttccatcctaacatgacatttttttaaaatacaggtacaagccagttacctgtatttgtttggttattcataattcaggttaagcagtttttttttgtttttttttgtttgtttttttttggtgagaatgctgtatatatgatagctattggatcacattaagacacatgatattagtttgtcccattattggtgatgcttgattttctcagtataggtatcttttcacctttgtaattaatcacggggatttttatataaaagagttagattcatggattttttaaaaaatcagttgtaaaaatcagtgtgttaaaaatcattgtactataatatgttataaaaatgtgtttataaaaaatgtgttataaaaattaatgtgttaaaaatcaatgtcgtaaccgattgccatcattattctttttgaatatttggccagaggaagccctgtcaagccaactctgtgctattttaacagatgctcattaatctttaagtacttctggtgcaagaactttgtaattaccctgccttagacctggaatgagccatttcttcaaggagctcatttgctttttgattgaccttgt

SEQ ID NO: 18297 - DNA, 1022 bp, Homo sapiens
ttctagttgtcagatatctattttgcagatatattttctcccagtctgtgggttgcctttttttttcttaacagcatgttttgaagggcaaaagttgttaaagttgatgaagtctagttcattacttctttttgaaaataaaattgtgttttgtttcatgtttaagaaatctatgcctgcccaaggtcagtgaagattttctcttatgttttcatgtagaagttctgtgtttttcttaaatgttggtacagttcaccattgaagctattcagaaattttctagatgggaatatttttaattataaatttaatttctttaataggtgtaggtctccttaggttatctgtgtctttttgagtgagtttttggtagttcatgcttttcaaggtatttttcccatttcattcaagctgttaaatttatcagtataatgtttttcataacatttccagcctttgagtatctatacaattaattatgtacatttctgataatggtaattagtgtctccttttcttcctaataagtatggctataggtttaccagttttatggaatttcattgggttttctcatttttctgctttatagttaacggatttatgctatcttcattatttctttcttttgctttgtacttaatttacctaattttattttttttttttaagacggagtctcgctctgttgctcaggctggagtgcagtggcgcgatctcagctcactgcaagctctgcctcccggattcacaccattctcctgcctcagcctccagagtagctgggactacgggtgcccgccaccatgcccacctaattttttgtatttttagtagagatggggtttcaccgtgttagccaggatggtctcgatctcctgacctcatgattcacccgcctcagcctcccaaagtgctgggattacaggtgtgagccaccgtgcccagccaaatttgttattttttttaatgtggaagctaacaaacatcattaagatctttcttcttattctattataggc

SEQ ID NO: 18298 - DNA, 1074 bp, Homo sapiens
aaggtagtatataaacatcagaaacctaccacctaggtttaacaaatgtcgtatttgtttctttcctttttttaagaaataaacattatggataaccattgaaaacctcaggcccattgacatttttttccagagcaaaccactattctgatattgtcttatttttcattgtcatcttttcagtatatgtttctgtaatttcatcataatgctgtatatccataaacatctaggagagaaaggggaaggaacagggaggatggttatatctgtaacaggttatttatttaaaagacagagatttgaagcaaaagaaggtaaatattaacatttattcccgtttaatgagtgtcagtttattttctctgtcttaaaaatgttatataattaaacattaacaacaaagcaaaatagtagctttggagttaggcaaccttgggtttaaaactcctttctaatgccgagtacagtgactcatgcctttaatcccaacattttgcaaggtcagagtgagagggtcgcttgaggccaggagttcgagaccagcctaggcaacatagcaagaccctgtctgtacaaaaaatacaatacaatacaatacaatacaatgcaatacaatgcaaatacatctcctttctgctacttaacagccatgtaaccttgggcatgtttgttaatctttccaaactttagtgtcctcattcataaaatgtggataatattggtaccatccacacaagattgtttttcacaggtacctggctaatttttttttttttctttttttttgagacggagtctcgctctgtcgcccatgctggagtgcagtggcgtgatctcggctcactgcaagctcctcctcttgggttcatgccattctcctgcctcagcctcccaagtagctgggactaaaggcgcccggcaccacgcccggctaattttttgtgtttttagtagagatggggtttcaccatgttagccaggatggtctcgatctcctgacctcgtgatcctggctaatattttttgagtgcctattatgttctaaactctgtacagtattctatttaatct

SEQ ID NO: 18299 - DNA, 1029 bp, Homo sapiens
ccccacccaaaatctcatcttgaattgtagttcccgtaatccttatgtattgtgggaaggaccaggtggagataattgaatcatgggggtggttttccccatcctgttcttgtgatagtgagttagttctcacaaaagatgatggtcttataagaggattccccctttgcttggccctcactttctctttcctacctctacatgaagaaggacatgttttctttccccttccaccatgattgtaagtttcctgaggccaaccccagccttatagaactgtgagtcaattaagcctctttcctgtataaattacccagtgtcaggcagttctttatagcagtgggagaacagactaatacaaatgccaagtgaagacttggagagggaaaatccacaataaaatctatgccagattaaacgagttttgaaatggaacaaaacagagttaataatgactaggtggagaaggtctacagtcagtggaaaaattaaaactagaattcagaagatgtgtatttcgagagtatcaacaacaaagtgataagtgatagttgaagctatgagacaagataattcaagaagaaagtgtagagggagaagccaggtgcagtcactcatgcctgtaatcccagcactttgggagactgaggcaggaagatcacttgaggctaggagtttgagaccagcttgggcaacatagcaaaattgtctctacaaaaataaaaattaaaaaattagctgggcatggtgacacacacctgtagtcctagcaggaggctgaggtgagatgatctcttgaacccaggagttcaaagttaccgtgagctatgatcacaccactcactgcagcctgggcagagcaagaccctgcctctaagaaaaagaaaaaaaagtgtagagtgagaaaatgagagttttggccagagtcttggggaacctgcatttgtgaggcataatgaataaagaagaaccaaggaattaaagaaagataatcagatttaagactttgtaatgttcctgaattcatag

SEQ ID NO: 18300 - DNA, 1027 bp, Homo sapiens
atgaaatgtacccattttaagtgtaatctgatgatttttgacaaatatatacaattaggtaatcattaccgcaattaagatataaaatgtttttataaccctaaaaagttccttatgccccattgcaggtagtcttcctcccatccctggccccaggcaatcactgatttactttctgccactatagattagttttgcctgtttttaatttcatataaatggaatcatgctgtacctacttttttctttatggctttttcaccatttatattattttaaacatttatgtcttctcatgtatcagttcatttctttctcattctttctttttttgagttataatttacacacagtcaaaagtcactctttttagtgaacagttctaactgacagatatatacatataagtagctacaccagtaatcaagataaagaataattacatcagccctcaaaatttcttcctacctctttcaaccaccactgctggcagcctctgatttgttttttgctcctatagtttttcctttttgagaatgctatgtaaacgttatcatacagtttgtagccttttgagtctggtttcttttattcagcataaggcatttgtgattcagtcatgttgtctaaggcagtagtttgttcctttttatgactgattggctttccagtttatagatacaccacaatttactcatatgcctcttgatggacacttggagtttttactaatttatgcctattatgagtaatgcctctaagaacattcaagttcagtctttttgtggatatatgttttcatttattttgggtaaatattgtcagaatggggttactgggtcacaagtttatgtgtagctgtgtaacaaattgtgacctttcaaaagtggttgtactcttttacattcccaccagcagtgtatgagagttccagatgttcctttctctttagttcttggtattgtcagtctttttaaatttagccattgattagatgtgtatttgtatctcattatgattttaattt

SEQ ID NO: 18301 - DNA, 1133 bp, Homo sapiens
tacccaatattcatctgatacactttttaggttttggactaaaactgtgaaattattaatagtttaaatatttattgcccaagttatgacatagttaaataaaacagatacctttttattcttaacaatagtttctaaagaaaagtaatgtagtaataaaggtattcctaataaaatatattttgcccaacctgtgaaataatttttttaaaaaacagacatctctttattcttaatgatttccaaattaacataataaaagtattactaatatttgttgtttgaaattgtaggaagtagaactgtaggaagattgtaagcctgtggcaaatggcaaattataatcttcctctaattaaaaacaaaataggaaaagatagtacattgagtgtcatgttgaaaatttaatatacaaaattgccaactctaggggtaattattttcaaaaacttttcttcaaaataaattatataaatctgattcttgtggttcattacagaaaagaagatcaaatcgacaaattaaaagaaaaaaatacgcagaagatatagaagggaagcaatctgaagaagaggttaaaggttctatgaaaataaaaaagaattcagctcctttacctggtgaacagcctttacaattgtttgtggtaagcatatttgggattatgactgcaaaacattttaaaccgacataaattctataaatacttgcattgtttttcctactaaaaattgctctaacttatccttccggattccatattattagttaattgagtcattcaaattagaaacctagggattcattctctcttcattttcctttgcctcttcattcaggttgtcactacactttctacctcctaaatatatgttcttgaaattcttcaaactatcttttctgcagaatatttctaaattacaagtttaatcatattatttttctactgaaaactcctctaatagtttcctaaaccttacaaaaataacgatacctttttagcagtgtataaacccctttgtctggattttctggcgtcatcttctgctacttctccataagcacttagtcctctgttttatgaacacgtttgcctgaatgccatatgtgcttccctcgtctatgatttttta

SEQ ID NO: 18302 - DNA, 1071 bp, Homo sapiens
actcagctgatttttattttttaatctgttgatcagcactgattaattctctactttaaacccaccttccattcctggttaaaaaaaaaaacaaaacctacttggtcatgatcttattgcccttatatattgttaagttccatttggtaaaattgcattatgaatatttgcatctttgttcgtgagggacattggtctgtagttttctggtgatgtctttgtctgattttggtatcagggcttcatagaatgagtcaggaaatataccttcctcttcagttttctggaagagttgtatagaattaatttgacctttaaatgttaggtaaaagttaatcataacactgtacactgttatgcctcttagggttatttttaaaccaatgctttttgccttcagtatgatatatggaagatttaaacaccattcattctttgtttttccacaaaggaccgtcctccttctaatatttggaagaaaatagatcaatccagggactataaaaatggcaatcaactcagggaatatcaactggaaggactcaactggctcttgttcaattggtacaataggtatgtagtatatcttaataaaaaaaatttatttttttaatgtgtgccaaaatgtgtcaagtaaaatagatactgttgttgctatattgttattgttttgaagtcttcattatttaaagtgaggttacctcaggaacatatgtaaattgcaacttaggtttcaactacaattgttttctttaaatgtataccaatcagaatagaagaaagttggtatgttgattaatacttaaatttgaaatacctttccaagagtcctaagaaaccttctgtgttatataatgcttttcagcttatcaacccgtactactgtctgccaacaatcagttcgagttagtgagttatgagcaaggtatacttataggaattaaagctctatcatttaatgtaaattatcaaagaagtaggttgtcagcaatagataaggaatggaatataaaatatgggaacctgtaattaattaccccatttttattatctgtttttcaaggttttcaa

SEQ ID NO: 18303 - DNA, 1044 bp, Homo sapiens
cggtcttactctgtcacccaggctggagtatagtggcacaattttttaattttttgcagagacagggttttgctatgtttcccaggctggtctcaatctcctggcttcaagcactcctaccaccttggcctcccaaagtgctgggattacagacaggtgtgagccaccacgcctgcttatggtataatatttttgaacttcaccaaagggaatctgtactcaaataacttgttgcagaattgtaatatatatatacacgagaatatgtatgcatagcacatacacatatgttgaactagggttaaatccatagactcttgagctatttgatctccaaaggtctgatctaattattaaaattacactttgatgttgcacgcttttctaggatcgtgtgatgatcaataggttggacagtatttgtcaaacagttctgaaaggaaagtggccttcagctagaagaagttatgatgctaacacagtggcttctttctataccacaaaactgctggacagccctggagcagctacagaatacagcgatcccagtgtacccactcccccaggtgccggtgttaaagaagaacatgatcagtcaacacagatgtcaaaggtgaagaagcatgtacgagaaaaggagtttacagtgaaaatcaaagacgtatgtgtatttttattgccctagggcctgattgcgattgcggtgtgcagcatgcttttcctgcaaatggctgcctgctcttactcttccttccttcacatacctgtttcttggtatttggattattttctttctgatatccaggttattaaacttgaatattctactagagggatcgtcattaaatatgtttttctctttatgcttctgaaaatagttctaatcaaaatgctttcttaaacagtgtggcaatttctaattgttttggttcttttatatagtatttaaatagtatgtcagtgtactttctgttttaaacatttagcatgccctgttatcagtattgtttcatttttaaatgatttttgaagcttaacttatta

SEQ ID NO: 18304 - DNA, 1053 bp, Homo sapiens
atactaactcatacattattttcaaattaggtgccattcaattatatcttagattaattataattaataaaatattccatgaatttgtgacagcatttttcagtttgcaatttttattttgcagtacatgttgcaaatttctcagatgcttctcaggttagaacagaaaatcaatactgatttgtttttacattaacctctaagataccatttgaatgatgccacaaagagtaatcaaatatatgagcaaatatgtaaggatattcatcatgatatactagtaaaaaattgagaataaattaatagttcattaagattctggaaaactatgcaattttttttctttttctttttcttttttttttttttttagacaggatccctctctgtcacccaggctggagtgcagtggcgcaaccttggctcactgcaaccttcgcctcctgggttcaagtgattctcatgcctcagccttccaagtagctgggacaataggtgccaccaacacaccctgctaatttttgtatttttagtagagacgatatttcgccatattggccaggctggtcttgaactcctggcctcaagtgatccacccacctcagcctcccaaagtgctaggattacaggcctgagccaccattcccagcctaggcaactattttaaagagtatatcttagacctagtgcagtggctcacccctgtaatcccagcaccttgggaggccgaggcgggtggatcacctgaggtcaggagttcgagaccagccggccaacacagagaaaccccgtctctactaaaaatacaaaaattagccaggcagtagtcccagctgaggctgaggctgaggcaggagaatcacttgaacccaggaggcagaggttgcagtgagccaagatcgcaccactgcactccagcctgggcaacagaggcaagactccatctcaaaaaaaaaaaaaacatatcttagaagaacatctaaagggagagaaagttcacagtatattaaaatcagtagtatttaagctcttgggatagtaaagcctacacgt

SEQ ID NO: 18305 - DNA, 1070 bp, Homo sapiens
accaaatctgttgggcatgggaggactcctgacaaagcctacggaatctgggacagaagacaaaaagggaagtgactctaaggagtcagaaggaaaaacagaaaggacagagagccaaagttcagagaatggtggagaaaactctgtgtcaagttctccttccacatcctctactgctgcattaaatacagctgcagctgccaacccattagctcttaacccactattactatctaatatactttatccagggatgcttctcactccaggccttaatcttcatattccaactttgtcccagtccaatacttttgatgtacaaaacaaaaacagtgacttaggctcgtctaagtctgtagaagtaaaagaagaagattccagaattaaagatcaggaagacaaaggaggaactgaaccaagtcctctcaatgaaaacagcacagatgagggttcagagaaagctgatgcttcatctggatctgatagtacatcgtcgtcatctgaggattcagattctagtaatgaagactgattcccagactctgcacttaaaatatgaactgattttggattttttctttaataattaattgtaaataccccagtgttgagtgcatcaataacttactgaccgaacatttcagttatttgtttagaagtgcaaactgctttcagagactttttgcatgtaatatttcttaagattcataagtttctgaactcgtatgtactatcaaatacataaaggtgtaaaattacaacaaaaggcattataattttgttgggggttaattttatgaaaattatgctcaataagagttgtatatttaatatatttgcagtgaacacagaatactttatgcatattactgatttaatttgaatatagttttacagcctccttgacacctataatttacagatcaaaactcagcaataatttgggcagctaatgaatgtcatgaaagctgtagaatctacatcaccatccattgctttaattacatgaaaatgctctagtgttgtgatgcactgctgatgtttccaattcaggtacaagtatgttttaa

SEQ ID NO: 18306 - DNA, 1024 bp, Homo sapiens
ctcctttgattcattcatttagtcatgcagtaaatatctgagtgccatctgtatgacaggaacccttcaggaaatatagttatgaagctacacaggtaaagccaccgtccagatgaagcatattttctaatgagagacaatagacagtaagcaagtaaataagtggatatgtgatagaatttttggtagtaataagtgcaaaggagaaaaagcagagtgaagagactgggtatggccagaggggcttttttttttttttttgctagagtgttctaggaagtgctttttaaagagatacttcagcatagaccagaattaagtaaatgaaggagccaagggaaaatctaggagaagagtaagcaacgtcagaaggccagaatagaggagagtgagcagcacaagaggaaatgagcatcaaagtgcatagacaccggatccctgcaagcatttgcattttgttccaagtggtatagaaattttgccattacatctgagctctacattaaatgatcacattagctgctgtatgaataggctgcagggaggcaagaacagaagtaaataaaaaccaattaagaaactattctaattattccaggcaagtggtaattatagcttggttaaggatgcgagtgtcagaaataatgaaaagtggcaagattgggaatatatattaaagttagagcagataagagtttttcatggcttggctatgcaggggtatgggaaagtggaaagaattgtaatttttaagtatttttgtctcagcagctagaagctgacatcaactgagatggataggactaaaggaggggaatgttagtgaaaatggattgctgtaatcaagaatttgtttgggagcatattaagcataaggttccaattagagatttcagtggacattttgagttttggtgggaattcaacaatggaatacagagaaggaatgataaatttggggtgtgttctgttcatatgcatgctatctaactaatgcctgtgactagatagaatcacttattaa

SEQ ID NO: 18307 - DNA, 1049 bp, Homo sapiens
gactaatttcttgtctaaatatttaaaaatatttaataattattcagtgaaccaagacattttttatttcaggtgatagaagtattcattagagcagaagatggcctttgtagagaggtggtaaaacaccttaatcagattgaagaacagatcttagatcatttggcatggaaaccagagtctccactctgggaaaaaattagagacaatgaaaacagagttcctacatgtgaagaggtttgtgaaaataacatctttttatgagaaaaatacatcaatatctaatctattaataatccttttggggatgggagggtggcaattaggtttaatatgttataattacaccttgttatgagaaaaatcttggactgtaacgtccctctctacccacaaattgggaaggtgccaagagaccaaagaatgactcagacaagtccagcttggtaagtagataacgtttattaagacttacatatggaggaggcagaggtggtggggaaaaataaaagacttatatacagggtactcctaggtagcagcaggacagctctagagatcctcgccacctcccatcgctaagctgcttttaagctaattttctggctctttgcctactatgtgtgtgcacgatgggactgttttccttggtagtttctcagatcttctctgggatgttggggttctcagggacacctgttccttggctgggcaccatggccttggctcactgcctagccttcagggtttaggcagcagacatacacccttaagtaaggtaggtgacctgtcacatttcaccccatgtcaaagaggaaacgagtcagataatttgtggttgtcctaagattttggtgacagagtaaaaattcagtgttctttcttgatttccttaccaagtttctttcccatagagcagtggtccaacctttttggcaccaaggaccagtttcatggaagacaatttttccatggacagggttgggggttggagagattttgggatgattcaactgccttacatttattgcacactttatttctattat

SEQ ID NO: 18308 - DNA, 1054 bp, Homo sapiens
gagaaaaagatgtgtctaagtgactatcagatagcaatgtaatgctccctaattgtaaaaaaaatcacaaatttgtgaactcacaaattatagacatgtataattgacctacaggtcaaaagtgcctgtggaagagcttgttaaaaatagaactactcagccccttctcaaatagccatcggcctcagccagctgaaaagtaaagttggcaggttatgtaacttagtgtttcttttctctgtagatgtgttcaaactcttccagggtaaactgcttaactcatttgagattctttgacttaatactgagctatgtgcatttgcattttaaaatttttgtatctttttcccaccatagagactgagagaaattaatagtatgatacgcacaggagaaactcctactaaaaagagaggaattcttttggaagatggaagtgaatcacctgcaaaaagaatttgcccagaaaatcattctgccttattacgccgtctccaagatgtagctaatgaccgtggttcccactgaggttagtctcttgtattaaactcttcacaaaatctgtttagcagcagcctttaatgcatctagattatggagcttttttccttaatccagctgatgagttacagcctgttagtaacatgaggggacattttggtgagaaatgggacttaactccttccagtgtccttagaacattttaattcatcccaactgtctttttttccctaccattcagtgattactgtcaaggctgcttagaatccaaacttggatttttgactctggcaaagcttttagaaatactgcaagaaaatgatgtgtacccaaacgtgagcataggaggcttctgttgacgtactccaacagaagaactgtgtttcaagttcaatcctacctgttttgtggtcagctgtagtcctcataaaaagcaaaacaaaaattaggtattttgtcctaaaacacctggtaggagtgtgtgattttttgcattcctgacaaaggagagcacacccaggtttggaggtcctaggtcattagccctcgtctc

SEQ ID NO: 18309 - DNA, 1026 bp, Homo sapiens
accaactgttagtaggaatgtaaaatgagagttctacttgtttcatatcttttcatcgcttgtcagtcttttacattttaaccattctagtaggtgtgcagtgatatttgattttaatttgcatttcagtgatgactaatgaggttgcatatctctctttttgtaaatctttattgagtgaggtataatttacataccataaaattcacctgttttcagtgtaggactcaatggttggtagcatatttgcagagtcgtgtaactgtcaccaccgtcttattttagaacagttccattccagaagaaactttgtattcatttgcagttatttctcaattctacttcctccctagggaaccacgaatctactctgttctttagatttgccttttctggacatttttatatagatggactcatacaatatgtggtcttctttcacccaggatgtttttgaggttcatccatgttgtagcatatattggtactttgttcctttttattacacagtggatagaattccagtgtcaggccgagcatggtggctcatgcctgtaatcccagcactttgggaggccaaggcaggtggatcacctgaggtcaggataacttagatcaagaccagcctggccaacatggtgaaaccctgtctctactaaaaatactaaaattagccaggagtggtggcacatgcctgtaattctagctactcgggaggctgaggcatgagaatcacctaacctggaaggcagaggttgcagagagcccagattgtgccactgcattccagcctgggtgacagagtgagactgtgtctcaaaaaaaaaaaaagaattccagtgtcaggatataccatattttgtttatctgttcaccagttgatggacatttgatttgtttctacattttgactattatggaaaatgctactgtgaacatttgcaccctagtttttgtgtggacgtgttttcattcctctttggtagatacttaggagtggaattacaggacttatggtaaatctat

SEQ ID NO: 18310 - DNA, 1021 bp, Homo sapiens
ggattacaggctggagacttgaggaagtgtaagatataatctttgctattgaggacctcagtttaggaggaagacaggcatgtaaacaaataattataataatgcagtatagtaaatactagtctactgtgaatgtgtacttcttgggagcatgggcgcaatagtaaaatcagcctcattggttttttttgctgtgttatcaaaagcagaattctgacatccactttgagacttgtttctgaatgactcgtagctgtttgaaagaaatctcttccttcctcactggagacatgtttaccaccctagggggatagtcaaaggaaagttttccaaaaatgttttgatcaatgatcacatctttggatatgtatagagtttcccaaggaggctacttgaaaggagatagtgcttatgttgtttatgttctggcatttatgtataaatcagtcttattgctttagagtatagtttatgaggagaaactgtagcctgtggtggttaagaacgtggaatcctttagctctatttactggctgagtgatcttgggcaagtcacctattctccttgagcctcaatcttcatctgtaaaatggggatcataatagttgtgaagattaaatgatttaatatatgtaaagcatttagaatattgttggggtaagtgctatataaggttattattattatgcgtgtgactattaatgaaattatttttcatatgtagcttatgaaagtcagcttcgtaaatatagaaccacactgtatatataagtatatggtatgtgagatagagaagcatttcttaaatttcttaatgaaattttttttctgattacataataattttttattttagaaaaactaacaaatatggaaaaatatgaggcagaaaaaagtctcatactcttcagagataaatactgttactttatattagtgtattgcttagaatattgttattatgcttatatataatatatacagtatgactaattttaaatatatttatgatctatattt

SEQ ID NO: 18311 - DNA, 1022 bp, Homo sapiens
gatgtggacaggtaaacaaacattggttcagtctactgcctgtcattatcatgataaatattaaataagatcactgatatccctttcttatttggctttctactctttacctacttgttttgccagattggtaactgattttcaacataagaactgtagcttggaggtgatttaaaaagatatttttaaaggaaagcaaatattgccaaacaatctggtttggtttaacaccctttggattgtacatttctcacaaatgcttatgaataattcagcaaagccaaatgcaatctgctggtggtatctagtgttattcacacttgctaatgaataattccctttggcttttatagggcggctctaaggaatgacttctgagactcagatgagttattattgggctatttgtcagtgtccttggggcattgcgagccaaagcccaacttggctacccactccacataccttctgcaattcttctgggaaacatgcagctctctctgtcccagctttttagccccagaacgttgctatgaaagagactctaacagaagaggaaataaaaatgacagaattcagctccactgtgattgcattggttcagttccttcattgtttcattcatataaagaaatgtttattgagcaccttaaaagcattgtatgtccacaaagataagatagatttttatgtgcaatgtcctcaaataaactagaaagtgtagggtgtataggagaggcataggatcccagaggaggatggtcagggtcttttgtcaaagtgatcagttaccattttctcatcatgttctcaggtatgcacttaaatgcatatttgccatttgtggtgttgggtgagggttccgttgctttggataaacctaagatttgactaatcttgaaactgcttaaaggataagccctataatgtgatcccagatatgactaagtggccgttgttcatttctgttgctctgaagtcaggaatgtggtatgacctggctttaccagcctgggcaatct

SEQ ID NO: 18312 - DNA, 1050 bp, Homo sapiens
tacaccttttcttcccattttcatttccacaggcaatcatttctactcttttctttcaggtaatgcttttggtagttgataacatacttacattgttttgaacattatatattggcttcctgatatggaaggtgaagatttacctagctctcttctttctccctgcctgcctacacatgtacacgcttctgattcccattatagatttactgtaattttgattatatcactattcagcctttatagttatcatatatatacatgagaatgccttccaaaacctgtgatctgttatccttttcttttcaacttttttcttgcattaatggtagtcttgctttttgtgtatttgtatagttttctatgtagttatgactaattaaatcccttgctatctaccacatctcctcttaagagcttcagaaccatcagatattctgtccatttcattttcttggagcactgtcttccagagtcttcttgtctgctccaatctggtgttctatgcctgatgcatggggatccctttctgtgacctcttcattgtaatccagcggattcctttacttctctcttttgtgaactcctcacgttcctgcatcctggccttgctctttcctgactgttttcttattttggtggagcatgtcctacaatgttttcttcagaaagatgcttaggaggtaaatttttaagaccttaaatgtcttcaatcatctttattccaccttggtatatgtaggttcttccagtatgaaaaccttgttaggaaataatattttttttcagaatcgtagtgacattgcattactgtcttttatcttacagtgttcattttaagagttctgaatttttcttcagcttttatgtcgctttttttgttggatctttttttgaatgttttacaatttcacagtgatatttttcactcattttactgtcattgtgtagggctttcaatcatgcccttcagttgttggacattttcttgaattgctttgttagttatttcttcctctccagttttctcatctctttggaatccatatg

SEQ ID NO: 18313 - DNA, 1033 bp, Homo sapiens
ctctggcttctgtctttgtttcctgtagagccgtggttataattagaaatgtaaacaaagtattttgtgctttattaaatagaattttttctcaaaaactagctggcataaaacattgaatgggttaattttggggggaagttttggacaatttaaacttgacttttaaacttaacagtcttttgtatgttgtcacatcttctacttatttaacagtttggttagtgggagctgggagctgggagtgcaccaaacacactgaggtacttaaaatcttttcaattttattgaggcttaaaggcaagtaagaacctgttgcctctgcttgttgccaaaataacatggggcaagagtaatcagttacagttgctataggtaattacaagttgatttcactgagaagtaagaacactatatttaacaataaaaagtttatcagacgtgaaactttcctcctccctacacagcctaaggaggggaaaaactctcaccaaactatcattttactgagcagatttcaaaggtgttggatttttgggagacatcgagaaagactaattgcaattattgtctctaattgtctttattgatgccagcttgagaagagtaccaggatgaaagttagaagggaaagtagtcaagcagactgttaccctatgaagattcccacttattagactgtccacacgcagtggcattaaaacttcataaaaactgttccttacagtttgaaaattatttttttcaagtcattataattggttttctttttttttatttatttatttatttatttatttatttatttatttatttattttaaggtgcagtgtcactatgtcaccaggctggagtgcagtggcgcgatctcggctcactgcaacctctgcctcctggattcaagcgattctcctgcctcagcctcctgagtagctgggattacaggcacgcaccaccacacccagctaatttttgcatttttagtagagatggggtttcaccatgttggccaggatggtctcaatctcctgac

SEQ ID NO: 18314 - DNA, 1073 bp, Homo sapiens
tgttcattttcaccatgcctagtgcaaattaatgtgaatgaatagttacaaaggggagtttctttttttccttcctttcactgcctttgacccttctgcacatttggcggtagagtacgacattcagaatttagggattctgtgtgtgccatctgggatgcatgtattttttaaattgtttatgtgatatatacatgatacagcccagggaaaacatgctttattgtgcattttgaaagctttgcatctttttgtcttcctgcattacttctcattttaccctctgccagtctaaacactgttgtctttcacgtttgaccttctctaagagttctgctctagttctgtcgttgaacctctctcctctctaaacttctttagtactgaggactgtactagtttagcagcaatgccatgctttcttatgtcctttggttgtaaatttgaggcatttttgtttttttcttccaaattaacattttctttccctgccatctagcacaaggactgtgaatggagtgaactaaaagaacattttgtttaagcaagccatggtgttcattgaatgccttctctgtgccagtcactagggctataattgtggatgaaatagaaaaacagactctgccctggaagatcagagtctagtacagcagtttaaagtgtgatggaatttcaatttaaaatgtccccttcatggtaatcagtgatgcacatttacagctccactaaaaggagaagctccagtggggcatagctctttgtttcagtcactgacatatcccacatgcctggtgcaatgaccagtaaatagtaagtgctcaataaataattattaaattaacttttaaaagtttttatgtagagttattcctgcagggctgtgattataggcaaatcatagtgtgtataccttctaccttttttagtgtatctcccactcttgtaccccagaaaaactagtcttgagtatccttccagaaatgttgtattccagtcttgtgtatccttccagaagtattataaatattatattattatccttccagaaaaatcagtcttgagtatccttc

SEQ ID NO: 18315 - DNA, 1028 bp, Homo sapiens
taggtactttattattattattttttttagctattatcaaagggattgagttcttgatttgattctcagcttggtcattgttagtgcattgcagtgctactgatttgtgtacattgattttgtaacccaaaactttactgaatttgtttttcaaatctaggagtccttggaagtgttgttaggattttctacctacacaatcatattactggcaaacagagatagtttgacttcctcttttcaatttggatgccctttatttctttcctttgcctggttgctctggctgggacttcctgccaattccacttttacttggatcatttgtatttctctttcttagaattttctaaaaattctgttatatttaaattttctaaaaattataccatattttagattcttccaggcaaggactgttttagctttgtatcctgtacagcacctaacacagtactttgaatatggctggtgcttactaagtatttgttgaactaataagtgaatgaatgaaccaagaactggcttttttttttcatttcatggtagtgtgtcttggttatacaagcaaaaggaagtattaattctatccttgaaagcccctgcctgggaaaggttttgaaattccttctcaaacagatggccattcacctaatgcttggagattaccagagacagaatttagaatcttccatggcagcctattctttttcacagtaactcatgcttcttttccttacatctagtctaactaaccacgtgacatcacagaactttctaaagagacacagtatctggatccatctgtacattcccttctaaatttttttataagaaaaccatcaaagataaaaataatgtgttggtttcttttaggctgaggaggaatgttttactatgcattttgaaatttttttgttctctcatatttcattcaattagagtcaccctgttttggggtaattctgcatctgagtttggtggtggaatttttcccattggctaacagtcttcatatgccctctttg

SEQ ID NO: 18316 - DNA, 1025 bp, Homo sapiens
tgtcatttaaggcagatggcgtaccttgactattcctgaaacttgggttcatgatgtcactatcattaaacatataccaatcaatgaagggtaagtaaagtcaaagagaaaagaaggtcaaagggaagtggctgacataaaacttaggtgcagaactctgggtgcacaggggatgcattcaggaagggtgctggtgtggctgcagggtagagagaagggtgaaatcttcagaactttagaaggcagagtaaagagacgacggtttcagctgtggcagggttttcaccttggcccctctttagctttcacagtagagcccatgggctgttgagccggaagtggtgcagcaggggcattggttaggaaggctcacgtcgttagtgggccaaaggagatggacgctaatgtttaaggagcctgaatggatctgagaaaacgtggccaagcagaagcaagagtgagtggcatgatttagagtagcagagatgggactggcaaaagaagagctgctttgtgaagacctgattcattcccaactctttggtggacctctatttttagagcagaaacctaatttcacccaagttaccaccgtctctaattagaccagtaagaaagtttctcctgtttctgtcagtgcttgaccacttctggagtgttttatcccataaagcattctttaagcattagtgccattggagtctagcattgaccatatgggtccttaatttgtatctgagtatccagttgcatgaagatggatggttaagaaaaaaaccaagagctattcatttattccacaaatatttactgaacacctaacagtgtccctggaactgggtatacaagagtgaacaaaaaaaccacagcctgtttcttgtgctggtagagcttacagtctagtggcaggaggctgactaaaaataagcaagcaagtaaaaaagaggatgtcagataatgacatgcactatggagaaaggcaacaggtaggcaattggggaggggaatggaactttttagggaag

SEQ ID NO: 18317 - DNA, 1092 bp, Homo sapiens
cccgggttcaagtgattctcctgcctcagcctcccaggtagctgggattacaggcgtgtgccaccacgccaggctaatttttttttatttttagtagagacggggtttctccatgttggtcaggctggtctcgaactcccgacgtcaggtgatccacccacctcggcctcccaaagtgccgggattacaggcatgaaccaccgcacctggtcccactttggttttagaactaaggcaaccctatttaaaatgtatttctataatatgtagatgtttgcttcagggatcctttccttagattatctttttaagggttggcctgggcatagataggtcaactttaagatgatcttttttcaattgagggcatatcccaataaaattttcttatcccctggcttgcccggggctggcatttctgacagacgtgtaaacagatgcaagcattgttgctaatgacaggtgattataagaggcatggaggccaaggtaattaaaccacgatttgacagggacatttggcaatgtgatatttcagcattagaactctctttgcaacgcacttcctccacttggcttggtgaatataattcatttttattcttcagagtgtgttgctttgagatctgaaactgtcctctctgaatttcttcatggttcattgtagaacgctagaaaatgattaccattggacgttgtgggaatctagtcagtatctaagaccctatccaaggttcgtccagtagtagtggaatagggtctgtgaccctactgctggcattgtatttgaatattattatgccctatgtgatagtgatagtgcctttggagagaaacatgagttattttcataccactctaatttcagtttctctgttacctggatttacttgacgttgttctcatgaatcaaaagatagcttattcaaatctcttcttccctaaatttccactactggcagtaggagaaatctcaaattatcagtaacctggtattaggaggaatgatagtagaaatgatcatcaagacatggaatttatttattcattggagttgaatgtaatttttttaaagtaccttctttttgctat

SEQ ID NO: 18318 - DNA, 1025 bp, Homo sapiens
acacttagaaaatgcctgccgtgcgtggcactggtgcaatggtatcgttggagctgccaacttgttttatttctgatagtgcttggcagcccctgaaggagggaaagtatgaatttttatctcccatttactagactttcattgtattgtgcttacagacacagtgtcagcacataaaatgttaaacatcactggtctgaaagaggctcccattgtcttacctctggtgctgggggaatcttgctagctttgctgtagtggttctgtcagtgtaatatgacatgaagcatttctcagtaatgacagacattgaatatgagtgacaggaaccctgaccacaaggaatgggttcaattaccagaaatgggggtggggggggcgcggttacctgagataaaaccaaagggcccaattgtgcttggttttgaccccttgactcccagatccagagcaaagacaaatggctgattaaccagcccctaaccctctttttcagtgataaacttgtttggatttctctgtccgaaaaaaaatctatgggtggcatggtttctaaaggaaatatgatcagaaacaggaggactggtgctcgtcatttttgtctcttgcaagcacaaaactgaaaactgtcattctatcttggactggatctaggacggtgtccagaaatcaatacaagataaatgattgctctcttcaccccacctttcttctgctgcagtgcctacattgctccagttcacctgtagccaacctgacgccagtgtaaatgagagatcctgccatcagaggctctccttttttttttttcccctctcctgcaggctgttctgctctgcatcgagtgcagctttgtgcttgtttatagtccactgcttacagcccccagatagagttatagcgagcagaccaattaaactgtcgcaggctgccctcacttgactagctctgcagagtcatttagccagcagacattcctgactattaaagctagtagcagcatgtctccagtgctggagataaaa

SEQ ID NO: 18319 - DNA, 1052 bp, Homo sapiens
gaaagccagccaggaaaacgtatgataccatttgcaatggtagaatgttgcatgctgttcttctgtaattataatggcctgatccgtgtggagtgggtgagtcctgcttaacaatcgttaatctactgagtcttcgtatcagcctcccatcttgaggagcagcagttcttggctggatgagtcggtctttgatttcattataataaggatagctttgttaaaattccgctgcgcagtggtgcctaaggattctgggaaaaggtttttctttttattttcccctttttttgcacggtggggatgaattgtttctctctcttccatcccctaggttactgtttgtgctctcccttgatctcctgcttgtccctttatttctccacgttgtgaaagtttctttctgtgtgaccaggagtctgtttagcagaccatattgtgagtgaagggccagcgtttgttgcctgattttggcaacgctgggtagtcagctgggatgtaattaagactctgagaacaggctgtcttctccacgggaagggcatgttagatggtgctgggatttggggctgtcagtttggccaaggatggagacagagagctagggacagagatatttcctttcatttataatccctttatgtacagtgtgtgcacttggcaaagtttacatataacctagtggctagagcttacaagccaacgcagtgaaattagcatatgttacatgtattttttagtaatattttaaagcaagtgcatatttccaaagtgaattatgcatggatgacagcaatagggttgtgttgcactgggtgtcaaatcccacaactttttgtcgagactgtgggttttacactaaaaaggcagaaagactaaacgaagtaaaacagttttaatttttaacagtttggttcggcccaaggagccgggctgtgacagatataactgacatttgaataattggattaatttagagaagggcaaatccggttttgacggttgtgcttgtgtgtacatctttttttattattatttgcaggaatggagttgtg

SEQ ID NO: 18320 - DNA, 2020 bp, Homo sapiens
agaaacccttttctctctgccttcaagtagggaaaataattatttgctgagcaattaattcgaattcacaaacacacacacacacacacatcagatatggtaagctcagatctctgcagaagccggcaggtaatgtcaacgagtgaagcaggggttggtgtaatacattagggagttgtggggacaagaaagaactagaaagcacacccccggtctaagaggacaaccagcactctgctcccagccagctgctgccatgagagaatatgggcccactgttgtgtacggctcagggtttttgttttctgtttttccaaaagaagccagaaatccagatgtttgtatgaaaggtatttttataaaaattttgacaactaatataaaacactatttgaaaatgtatttgagggctagctttggcctacaagccactaggttgtaacttcagctttcaaaaattgcaaaaggtagagccagctgcttagtggccataccttctcattctccaagggaggtgtttggagcctggtgcattctaaacaatgactgttctgtggcttaaaaccctattgtgaagaacacagttactctgaaattgagggcagcttgtctcatttatatcatttctttttagtgacacagatccttcgttaaggccaacttttaagggagtcaagttgcagaaaagtttacagggcataaccaccctcaccttgcttttcttactgacttttaaccatcacaaagtaattactttccctcctctatccctcccttggaatgggtctttttttttttttttttttttttttttgactcactctctcgcccaggctggaatacaatgatgccatgatggctcactgcagactcgacctccccagctcaagtgatcctcccacctcagcctcctgagtagcagggtctacagcgcccaccacgatacctgactactttgtatttttttgcagagacagggtcttgccatgttgcctagcctggtctcaaactcctgggctcaagccatcctcctgccccaacctcccaaagtattgggattactggcgtgagctactgtgcccatccagaatgtgttactttttaaagtacattgtgaggcaggacagtattcacattgcctttcccagagcccctaaagcatcaactgaagatggtgtccctactgcagtcaaacagaaatgctgagtaatgactggtttaataatgatcagatagacgagaaaaggccttgactaagtcagtgatattgggatatgattattttaattattttaatattgattcttttggtgtcttttggattgtttagctgtcgctttttctcttggcttttgaggtttcaggacacggagtaaaatgatggaaatgtgtttgtttttcagggcagagaggagtgttggtaagtagagaaattacattgtgtcctcagctgccattgatgtccttccaaataggtgaagtttagtttaaaacctgccgttaatttctggcctctggcaagagtggtacaaggttacctgtttgttccagtatgtgtagggaggggctgggggttggggagagagaagggtggcaattagtcaatgacatttatgacccatttataaaatacaaatgaaataattggttacaaaatcatgacaagccttcacttgtcttttacaaacttgttctcaacacactgtgaaacttaatggacaccctttgtagaaagtgaggaacaacagccattctgaagagaccgattcaaagcgttcaacctgagactagctgtggtggcgaagattctctgagtatgtttctcattctcatctcagatacccgcattattatcgcagatccagaggcagggaatttgtagattcctcagccagggaattgccacagttttggtgtaggatgaccagacatgagaaagaaaaaaattttcccacaaatctttaaatgcatgggaccctttggggtctttgctgagattagagcactgtgtgtttataaa

SEQ ID NO: 18321 - DNA, 1050 bp, Homo sapiens
tgaacacattttacagatgcctgttgaactaaaagttctgtctaggactgtagtaagatttgacccggcttagcctgggaattttgacccactgatggtagaagtttattaacagccctattcatttagatccttccctgtttctacttttctcgttctctccccggagggtttttatgacgttgtaatcatttataattttaaaatgtcttcaatcgtgcttaaaaacagcacttgattttaatgggtactgcttaaccatagaaagattgtgtctgtattactgtcggttcttacaacaatactttggaacgaaagtagaaagtttatgacacattttattatattcctaaatgtgaaagaggattctaatttaaaaataagtggccatactttttaattcttatttagcctctgtagctgttttaatatcccttttatggttgactggtcgatgttttaaaacaagttcttcagggactctgcccattagtctttggcaataaaatctgaactttactaaaataaaacatgaagccatggagtaattaagaggggaactttcagagatgaccgtgaatatgaaatacagtgatttgtattattaatggatttggggaaaaccagcccacctcttttaagctcaactatgtgtatttggggggttttatatttttaatttatttctttgtttctctcaaggcagtaggggttccatcgcaagctcttaagatctaccaatcctccttttgtagcctgctgcttctgaatatgagcctttcttttttcattttatttggaaaatggggtgatgtcacttaggaaagcatttttcccaaaagtggtttcaggaaccagaatctggtgaagtgttatttaaaagcgataacatagtaaagctctgctttgtgcttcaaataattgtaggatttacgggatatatccctaacctgttcagttttatggaaggacaaaatacagggattcattttatcatagtttcttaaaaactttgaaacccagttgacagtcatttctctagcattataa

SEQ ID NO: 18322 - DNA, 1034 bp, Homo sapiens
agtgtttttttttttttttgagatagaatctactcttggtgaagatactgtgaacaatgttggaataataacaaaggatgttgaatcttacataaaccgagttgatgaagcagtagcaaggtttgagaggattgactccaattttgcaagaagtaaaattgtgagtaaaatgctatcaaacagcattgcatgctacagagaaatctgtcatgaaaggaagagtcaactgttgcagccaccttcattgtcttattttaagaaattgccacaaccagcccagccttcaacaaccaccaccccaatccatcagcagccatcactgttaaggcaaaacaattgtgacttgctaaaggctcagataattgttagcattttttagcaatcgagtatttttaagtatgtacatcgttttttacactatattgtagtctgctatgcatgcaatagcattatgtctaaaaaacataatttttatatgcactgggaagccaaaaaattcacgtgagctactttattgctatatttattgtggtggtctggaactgaacctgcaatattgtcaatgtgtgcctgtataagattctccatgcactaaaaaggacatttgaaagtcatgagtaagttgtagaggaactctggtgacttgaagcttgtttacttttagcagtgtgtacctgttgacacttctagtataatttatattctttctctcatgagtattttacaggaaatgcgttttcctttgctagtgatatatgcactttggttttcaggaagctgtggtgctttggttgaagctctctgtctgttttagagaaaagacttacaatgacctcctgatatagtttggatatttgtctgctccaaatctcatattgaaatttgatccccaattttagaggtaggatatagtgagaggtgtgtgggttatggaggcagatccctcatggacaacttggttctgtcctctgggtaatgagtgacttctcactctattagtttttgtgagagctgacttttgaaaagagcctggc

SEQ ID NO: 18323 - DNA, 1047 bp, Homo sapiens
caggtgtggtggctcacacctataatcccagcactttgggaggccaagggaggagggtcacttgaggtcaggagttcaagaccagcctggccaacatggtgaaatcttgtctctactgaaaacacaaaaattagctaggcttggtgacgcgtgcttgtaatctcagctacttgggaggctgaggtgggaggattacttcaactgggaggcaggggttgcagtgagtgaccgtgccactgcattccaacctgggtgatagaatgagactccatctcaaaaaaaaaggtggctgggcgcggtggctcgcgcctgtaatcccagcactttgggaggccaagacaggcggatcacctgaggtcagaagtttgacaccagcctggccaccatggtgaaaccctgtctctactaaaaatacaaaaattatccgggcatgggggcgggtgcctgtaatcccacctactctggaggctgaggcaggagaattgcttgaacccgggagatggtggttgcagtgagctgagatcacgccactgcactcaacctgggcaacagagcaaggctctggctcaaagaaaaaaaaattacttatttttattagtcagcacaacattgagaactcatataattaggcattttgctggagaaatggctcatgtttggctgcaaatatcaaagaccagaaaaacggtaacttaaacaatatcaggatttattttccttcatctgaaagaagttcacaaagaacagggttattctggtggctccacaacatcaccaatgttcatggcccctttggtcttgaggttctgctatactttgacttggcttctggcttcaggtttccctcacggtcacaaaagaactgctgtggctcctaatggctcacctacattacaggtaggaagaaggaagaaagggagggaagggtataatgtgcctggcagctgagccaaaccccaacccctttttaaggaacttccccagaagccttgcccaacaatctctacctagactccattacctaaaacctaatcacttagtttcatc

SEQ ID NO: 18324 - DNA, 1035 bp, Homo sapiens
ggaagagagtggaggagtgatgcgagatgagaatagtcagagaggaaggtagggccataggaagaagttttgatttttattccaagcacagagaatactttagaaagctaaacactgacttttaaaagccatcaacaaaggaaaaatatgcctaaggtgtgtgttttatatgggaccgaagaagaaaataccgaggcttctccccattttattcttccacattgagtgtacagctattagtaaaatgaaatattatttgcaaaaatgctttgaaaatgttaaagcactattctccttaaatttaagaatattgtcctggaaagatttaaaatgactaagggtactattactttatcacagaagaatcatgctgtgttagtccattctcacaatgctgtaaagatgctatctgagactgagtaatttacaaaggaaagaggtttaactgagtcacagttcctcatggtggggacgcctcaggaaacttacatcatggtggaaggcgaagggaaagcaagacggcaggagagggagcacagggggaaaccaccacttttaaaccatcagatctcgtgagaactccctcattatcacgagaacagcatgggggaaaccgcctccatgatccaatcacctcccaccactcccctcccttgacacctggggattacaattccagatgagatttgggtggagacacagagccaaaccatatcacatgttaaactttaagcaaactctccctagtagacccacctagcgattcaaagaaatacatggctatgaggattccgttgccattttccttatctcatataggtctaaggaaggaagatttccactgtttagaccggaagaccctgaggacagtatcctttctggctgccctgctgtcatatgagtccatagggggcaaaggtgaggctttcctgggcttgtgattcccaggatgtctccacttctagggccacattagctaaatggtaattatgaaaatatccagggcaagaagctaataaataagaactgacaggc

SEQ ID NO: 18325 - DNA, 1047 bp, Homo sapiens
atcccaattctggtcggcctgatagattaaacatgagccctctctcattattccagcagccgtagagcattgactttgcctccagcctgataagtattccatgcacattcaagcctccgagttgacatcttcttctaaaattgtttggctgtaataaatataaaactttcaccactgatgtaaagcattgctggttggcatcatttcctacccccttttaattattcctgacactgtggagaaacatctaatataaatctgtaatgtgcactgatgacaaactacacggttgaaggaccatgtaatttctccacaattaattaaagtgcatggagattttttttttctctttcattctttctttctttttttccccccagcagccagatgccactgactagctcagataacactgctgtcaactgtaaaaaattaagatccaaaccgtaagaaaggtacttagataaagaaaccagatgccaggttatttgtgatactaccacatacgtcttgatggaagccaccattgttcaacatctgtagttccacagccttaattacgcacttaactcagcaagcctgtcagcagtttatttctacaagtaccgtcacttttgtaaatcttcccttaaaaattgaatgctgccaatcagcacagggaagagagacagagaccctggaagaccttgtgcaaaaagagatggctgcccgtttatgccggtagcacatgctggtgtttatgggcatgtgtgtgtggtcacccagagaggaaaaaatgctctgctaccatttcaggctgatctaccacctggaattgatcaaaagcaaattaattttcattttcaattaggaatacaattaaattcaaagtggtgagggggggaaatggccatgtttacatatagctcctgctggtgggagggcttgaggaaataccagatgaaatgaaatacttgtctttgtatctttgcatttaactcattcaagtgttaaggtggtggctggggctgctgctgctgggactgcagtttacctcccctggagctg

SEQ ID NO: 18326 - DNA, 1049 bp, Homo sapiens
atattcacagccttgtgtaatgccctccctgtcagtgtgggctgacgcttctgatgaattgagtaagggggaataaactaggttacaaaaggcagtgtggccacttatgatctctttctgtctggactactcacgctgggagaagccagttctacattgtgagcaaccctatggagaagcccttaagttgctgaagcctccagccaacagccatgtcgctgattttggaaggcgattttggaagcttatctcccagaccaaatcaagcctcaggtgactgcagccccagctgaaacattgattgcattcttatgagaaaccctaaaaccagagccatcagctcccaaattcctgacccacagaaactgtgaaataataatgtttgttgttttaacctgttcatttttggaggtaatttgttacccggcattaggtaatgaatatactggccaattaccacatgtatcgattcatttatttattcattcagtaggcattgaatgacaactttgccagggactgtgctagatgctagggataccaagacaaataaagcaaggtccctgccttcaaagaactcacagtctaggagagtgagatggacacggagtcagagaacactgaaggttggtttatgagcagcaggcatacaaaggaggaagctggagtggaaggagccgtaaaattgacaaagtggtctctaatataaccctccccagacacacatacaaatacaacactttcttcctaactttcacttagcttagctgtagacagttccagcaaaccttgtttagcactgctccgtgctacattgactccttatggagctggctgaccactgtggaagagagagcactatcctacattctcagcccttggctgtgggcatcccatgatcaacgtgactcagtttgagtgactcttgccagtctgtcagttttctttcctcttccctggtctctctgtcattaacaccctattacctatggatgtcttcattagaagcaaatgttgttttttgttttttgttttgacacggtctcatt

SEQ ID NO: 18327 - DNA, 1050 bp, Homo sapiens
agagtaactgaatttccctgatgattggcttctacgaagccacctgagataatacaaatctgggagtcaaagcaaaggaagtcccaacaccatcagaaacagtcttccttcttataaacacctgcgttccacctgtagattcattcagtcgtcaccatgaccttcacccccgaggactgtctttggagcattggccagtgttgctccaagcttcctgtgggttggggtcttctgggggtttcctcccgtggattaatttcctatttttactcttccaggtgccagtcacgaattgcccgaacattacctgctgatcagaagccagaatgtcggccatactgggaaaaggatgatgcttcgatgcctctgccgtttgacctcacagacatcgtttcagaactcagaggtcagcttctggaagcaaaaccctagaaggagcacaagtctcaggcggaggagaaaaagagatcggcttttctcctccaacgttgtcatgggcttaagcaagagcagtggagacttctcttggcccctagattgtagcacccgggtcccaatccaaaacagctaggaaatggtgcccatgaagttttaaatgttttaaaatgaccctgtgttatagtctgatttggtgttaaacaggaccttcttcccccaaaattgttcagattataaaatgtgagccattcagcccccaaggtccagggcaggcgacaggaacgagcccagcgtgtgacaaagcctaacctactttcctctttcccaagctttttcagagactctggagtggacccagccctctggggaaagacagaacttagagacatcccagttactcaccacacccatagtgctgtccaatatggtagccactagctagctgtggctacttcaatttaaattcagttttaattttaattaaaaatgcagctcttcagtcgccctggccacatttcaagtgcttaacagcctcatgtggctagtgactgctgtattggacggtacagatatggaacattttcatcatcgaagaaagtcctattggacaac

SEQ ID NO: 18328 - DNA, 1072 bp, Homo sapiens
gtggcacgatctcagctcactgcaacctctgcctcccaggttcaagtaattctcctgcctcagcctcccaagtagctgggactacaggcacgtgccaccacgcccagctaatttttgtatttttagcagagatggggtttcaccacattggccaggatggtctcgatctcaacctcgtgatccacccacctcggtctcccaaagcgctgggattacaggcgtgagccaccgcgccaagccaaggtctgcatttttctttagaactcagaacacccaatagtcctaggcccccatcctcgcatggcagcaagctaaataagcatcttcccactgcgagttggggcatgacccagcctatggtttgccatactccctctttttctccgttttttcattaattgtgaacctgacctgcatcaccctttcatgtcagtgctctccaaacctgcttgcttgcacccctctagtcgaaatattttgtgcttaccccaatatatgtgtgtgactattgaactctattcgtagactgcttgtactaatgtcatttgcatcataaaatattcatatccaataaacatattaaaaggatgagataagaaaccgagagattttgctgtttttttccttttgcatggatgagccagcttcactgtcctgggtggggcccaggtggaattagttctcaaagtcctccaggtggagtcagggaatgtgcaacagggttggagaaatcactactttaagtgaatccgaaaggtgagatcacatttgctctaaagaaatggtgatcccagcactttgggaggctgaggcagcagatcactggaggtcaggagttcgagaccagcctggccaacacggtgaaaccccgtctctactgaaaacacaaaaattagctgggtgtggtggtgtgtgcctgtaatcccagctactcgggaggctgaggcaggcaaatcgcttggcccgggaggcggaggttgcagtgagccgagatcatgccactgcactccagcctgggccacggagcgagagaagaaagaaatggtgactttcattgatcatgtgtttgagg

SEQ ID NO: 18329 - DNA, 1074 bp, Homo sapiens
ctggaaaatcctgagccatttttattgaatattgtcccccctccccacagtctctttctggaactcaaattaaatgtatgttagatgtttttcctctaacctccctgttttttttaacctctcttccaagtttttcacctttttctcactgtgctacaggctgagaacagtagtcctcccttgttggggacactaatggaggatacattctaagacccccagtggatacctgaagccacgaacagtactaaactttatatatactatgttttatagagcatatactgaaactgtggaaagcaaacccgcagatagggaggaactactctaattcctttaaacctgtcatccagggcactattttcccctcaactgtgtctaatttatctaactcatccatttcctcttttaaattgaagtgtaaattatatagagaaaagtgtaaaaatcataggtttacagcttgatgaattttcacaaaatgaacgtacatacaggaccctaaccaaggtgaacaaacagaacatggtcagcatctctgaaatgacacatgctcctcctatcatcatccactttctccacagaaaccactcttcttgcttctaacaccatagatggttttacctgtttgcaactttacataaatggaataacatgattgcacttctttgtgtctgactttactcaatagtatgtttttatttatttttattttttatttttttgagacagagtctggctctatcacccaggctgagttgcaatggtgcgatctctgcttactgcatcctccaccttctgggttcaagtgattctcctgtgtcagcctcctgtgtagctgggattacagggatgcaccaccacactcagctaatttttgtatttttagtaggaacagggtttcaccatgttggccaagctggtcttgaactcctgacctcaagtgatgtgcctgccttggtctcccaaagtactgggattacaggtgtgtgagccaccacacctggccaatagtatgtttttgagattcatcaatgttgtgtatattatcaacatctaggagtttcatttagt

SEQ ID NO: 18330 - DNA, 1038 bp, Homo sapiens
tcactaccccgccggagcgccggcgcccggcccgcatccagccgcgggcgaggtgcctccgggtcccggcgggccctcggttatccattcgccgcctccgccgccgcctcctgcggtgctcgccaagcccaaactgtggtctttggcagagatcgccacatcgtcggacaaggtcaaggacgggggcggcgggaacgagggctctccatgcccaccgtgtcccgggcccatagccgggcaagccctaggaggcagccgggcgtcgccggccccggcgccgtcacgctcgccctcggcgcagtgtccttttccaggcgggacggtgctgtcccggcctctctactacaccgcgcccttctatcccggctacacgaactatggctccttcggacaccttcatggccacccggggcccgggccaggccccacaaccggtccggggtctcatttcaatggattaaaccagaccgtgttgaaccgagcggacgctttggctaaagacccgaaaatgttgcggagccagtctcagctagacctgtgcaaagactctccctatgaattgaagaaaggtatgtccgacatttaacgcgggctgcgtcggtcccggacttttctaatttattaaaaacatggccttggcagttatttttccatcaccgagagagagagacagagagagaaaataaactacccctcctattcagaagtttatagtttatggagatggatgacataaaaatgtaaacatctccacacaaaaaaaaaaatgtcttaaccaaccgaaaagaaaaattaaaaaaggatttgtattaaatcttattctgtatatttaatgtagcatttttgtatttaaattgataattcaatatctttgaagtaaattatgaaatcaagacacctgtacaggcatttaatgtttttttgtaatataaatatatacatttgtgtttcccccaaaactgtttcatagttaaaaaatacaagtttaatttaattttttacacctattgattctgctgggtatgagctaaagtatta

SEQ ID NO: 18331 - DNA, 1047 bp, Homo sapiens
tgtaaagaaaaacaaagtatagcttataaatagtttaaaaagcagtcaatacaaactttccctgagaaagcccagactttagtcttactatacaaagactttaaatcagatatttaaaatatggtccaataactaaaggaaaccatgtttaaagagctaaaagaaagtatggagcagggtatcaccaaatggagaatatcaataaagatgcaatgcattgtgtgtgtgtgtgtgtgtgtgtgtgtgtgtgtgtgtgtgtattcactagaggggctcaacagcagactatcaaacaaaaaaagaatcagcaaacttgaaaacaggtcaactgagattatctagtttgaggaacataaaaaaagatgaagaaaaatgaacagaacctcagagacctgtggacgctatcagctttaccaacagtttcgtaatgggagtcccaggaaaggagaaagatgcagaaagaatattagaagaaataatgcccaaaaacttgctgattttgattaaaaacactaatctgccttcccaaggagctcaaggaactcttaagaataaactcaaagatacctatatatagttacattatgtacaaagaatcctcaacaagattaatgactgattgctcatcaagagccacagagaccacaagggagtagcaggatgacatattcaaagcgctgaaagaagactgtcaacaaagaattgtatagctagaaaactatccttaaaatgaagtataaatgagcaaaaactgagagaatttgtcattagcacacatgccctaagataaataataaagggagtctctcaggctgaaatgaaaggatactagacagtaactcaaattcacatgaagaaataatcagcagtggtaaaggtaactacatgggtagacataaaggacagtacaaatgtaatttttttgtttgtaaatctttttttctcttatccaactttaaaaacatctacataaagcaataattataaatctgtgttgatgcacatacaatgtataaagacataatttgtataataataatagcaaat

SEQ ID NO: 18332 - DNA, 1032 bp, Homo sapiens
ggtttgataatgggtctcctagattttctaattgcatccatggattgtgtaacgaaaaccttaagtttgcctgtgtcatgcagagttctgagtggggtctagtgcctaagtgacaggactgtggaatttaattcacaagaatactattttgctttgctagatagcttagtgatttggccatttagagactgtcagtaataccaaatgatttaggagggcaaattacatttcagaatgagttttgtgaaattttcttgagatttgcatgttttctgcctgtcttgaaaatatctgtttattaattatatttcatacacccccacttttaaaaccagttcagttatctctcactgtggccaaaaaaaaaaaaaaaaaaaaaaaagaaaacccacacttgttcttgggtttttcttagaggttcctggggaacaaaaactaatttaataacatttggaagtatcaagggaaacaaaatgaattttttttttctcaagactactcagtgcctttgaaatgtctgacttacagaacctttttctctagatatctcccggaaccagtgttctatagaatacacttcaggaagccttatatcataatatttctaaatactctgagcactgctcttgcttctttaatagctgctcaggtagtctaggcctgtttcacttttctaaaaaaacaagaaaactcatactttaaaaaagccatgctatcttctctgcaagatattgtctcttcctctcaatgtacccctctgtagctaaaacaagatctagcaacacatgtagaaatgtatacaaagctgtcttttttgccatagcatgtcagtggtcaaactgcattacaacagaggtattcagattcctctttttttttttgtcatgaccattattaccacatttcctttctgtgtcatggctttctttttttttttctgtcttttttttttttaattacgatatttgcattctccagccagttctgagacctgtttggatcatatttttctggcaaagaaaacaatgtatt

SEQ ID NO: 18333 - DNA, 1039 bp, Homo sapiens
gcagaaataaagatgttctttgaaaccaacgagaacaaagacacaacataccagaatctctgggacgcattcaaagcagcatgtagagggaaatttctagcactaaatgcccacaagagaaagcaggaaagatccaacactgacaccctaacatcacaattaaaagaactagagaagcaagagcaaacacattcaaaagctagcagaaggcaagaaataacgaaaatcagagcagaactgaaggaaatagagacacaaaaaacccttcaaaaaattaatgaatccaggagctggttttttgaaaggatcaacaaaatagaccactagcaagactaataaagaaaaaaagagagaagaatcaaatagatgcaataaaaaatgataaaggggatatcaccaccgatcccacagaaatacaaactaccatcagagaatactacaaacacctctacgcaaataaactagaaaatctagaagaaatggataaattccttgacacataaactctcccaagactaaaccaggaagaagttgaatctctgaatagaccaataacaggagctgaaattgtggcaataatcaatagcttaccaaccaaaaagagtccaggaccagatggattcacagccgaattctaccagaggtacaaggaggaactggtaccattccttctgaaactattccaatcaatagaaaaagagggaatcctccctaactcattttatgaggccagcatcattctgataccaaagccaggcagagacacaaccaaaaaagagaattttagaccaatatccttgatgaacattgatgcaaaaatcctcaataaaatgctggcaaaccgaatccagcagcacatcaaaaagcttatccaccatgatcaagtgggcttcatctctgggatgcaaggctggttcaatatacgcaaatcaataaatgtaatccagcatataaacagagccaaagacaaaaaccacatgattatctcaatagatgcagaaaaggcctttgacaaaattcaacaacgctttatgctaaa

SEQ ID NO: 18334 - DNA, 1050 bp, Homo sapiens
aaccgctccaccttcccctggatggatcttccttcagctcctctgtgaagggtctcagtttcagcagaatgcccacaccatcaaggtcagaagcaacaagaacggacagattttagcatcctcacgggctccagcccatgcctgtgggttgcagcttgttctccccaactccacatcttttctgactacccgccctatgggcttcaagctccagcattggacaggaagagaacagccttacagagactacttcactacttcttctttatatgttaaccatactggaaattaggaacgttttaacaaaacttgtgaacatatttgcatctttgaataagaagaaaaataaaatgtctaaggaagtaccctataaataacactagtccttaatctttaaaattaggtccacatctttaattttaaagtccacatctttaaaatgtggaaagttagggttccaaaagaaagaatctgttagttttgaactgggcttgtctactgtttaaagattgcctctcaaaattccactgaatgtgggtttcttccccacagaacaccccctcacacacacacacacaaaaaaaaaaaaacaaaaaaaaaaacaaagcttgggttacctctcccagaccagtattttttattttttattttttattttttttgagacggagtctctgtcacccaggctggagtgcagtggcatgatctcaactcactgcaacctctgcctcccaggttcaagcaattctgggattacaggtgcctaacaccacactggctaatttttgtatttttagtagagatgggatttcaccatgttggccaggctggtctcaaactcctgacctcaagtgacccacccgccttgacctcccaaagttctggcagtatttcttgaataagaagttttggggtgcattactgcttcaacaccatgacatacttaaccactactaaacaatgaggaagcacaaaccctgttgaaaagggtcgaggagatctagtgaagtgatgccagaggagggctctccagcctgcatggaaatgggt

SEQ ID NO: 18335 - DNA, 1076 bp, Homo sapiens
acttctccatgttcatgcaaagcatatgtaaacatttattaccccaaagttttacagcagattataactctccttgtgataatactataagctgttgtttaagctcttactgtttgttaggcgctgtgccacacactttacacgcattatataatttctttttaaaataaccctgtgaaagtgttatctgtgttttaaacttgaggaaagtcaaatagtgagtggccaagccagaatttcaaatccaacttagtaggaattcctcatatttgtatggtacttttcagtttctgaaggattgtcacaggcactttcctgactggtctgcagtgcctgagaggtaggataggcattttcccccacattcaacagaggaagaaactgaggcttagaaagattatgtatccaatattttcagtgagtgacaggtgagacttgaacccaggcctcctgacattttatatgcttcccatgtatgctgggaacagtccttgtccttctactctcctggaactggaaggagactccagcttccatgactttctgctcatgtgggactgcctggcttttgggaattgaagcaggtagaaggcagggaaccttccaaggatttttgcacccttacagactgaagtttctagtacaagctttatttataaagccgtccctaccctagattccctgtctccttcgtcagtcctttctctccctgcatatgcattgcataagccgtacactgcataagccacacactgaacagtttctacaggtgtcaactacttaaatgacctttcttttctgacaattctagtagataatttttaaattctgaggttctcaaaatcctggtatatattaaaattattttggcactggatacattcttatgtgtctctggtagagtacagcaccatgggacaaaatttagacatagctagcaaaattgacccagcaattccacttctagggttttgtcccaaggatatactggtaaaaaacacacacaagaaaaccctgtgcacagggatattcattacagcattatttgtaatagcaaaaattgaaaacaaacaaat

SEQ ID NO: 18336 - DNA, 1026 bp, Homo sapiens
gagagagagagtgagcgtgtgtgtgtgtgcacgcacgtgtgtgtgtgtgacagaaacagagacagactgataggaaaagagcctttcccattttgatttttagaaatctgggaggctgcttaaaactgtagtgaattgccctggagaaatattgaggactatacttcctcttcccattttagcctcttcccattagtaattgcttttattggggaactacttcttgaaaacacatttaaaatggaaatcttacttctgaaatttctttcaccgaggtgcatttcgtatctggcccacttataaaccctgctctcactcttttggtttatagtcatatcaaagtcagaaccaccactctggggcagcaggaacttattagctgggaaagcttacttttccctgttgtttcttaactcctgggcagtctagtttgggtatcagcaagagagaatgaactgtaatttgttttagtgctaaataaggctgtgcagaaatcttctcttttttttattgactgcctaaatctggtgttcctcacttaaaataatattcaggatgaaatgtctgcaataaattagcagaattgcttcttcattctcagctaattagtaaggacagatgagctgtgaatgccataccactgactttgggtcaggccgtctcattttccccgaacttccgtggctgtagttgcatataatgaggaagccaactttgggaattgaatactgttggtaatgatgcttagtcacaaagaagagcttagtgcctcggtacattggccaagaaccgccttagtatgttaccacctaaggctggaattatctcagggagctgaaaagatttgaaagaacaagcaaaagtaatatttagctcccctttaagtataactgcctgcatctacctgggcagggcctagtagacactaataaaagttaagaagtggttttgttcagtgcccgttaaggacagcactatggagataattcgaataaatacaaattctggatgctgccctctggaagt

SEQ ID NO: 18337 - DNA, 1050 bp, Homo sapiens
ctgtctcaaaaaaaaaaaaaaagaaatgtcctgttaccacttgctgtgtgttttttcagcactgagttccttttgccatctgtcttagaaagcaaatccaaaatttttcagatattttttctaagcctcctgatttttctctctagttcctacttatcagcaaatttaaaatcattgatttcactgactctctgggtcattttggaaaattagaaagcacagatgtcttattgctgactcctctgtgcttctagtaagtctgccctttcatgtgtagtttccttggtctcttttatagttttaataggactttatatctttaagaaagccagagtctggctgatgaaatatatgcgttgcccagggcaagcaattccacttgaagtattttttggatcctaattgcttctctgtgtttaaaataatagctctgtgcacccgtctctctcttcctccccctccataatttgtcttgtcagcctggagtcatagataagtttactagtgacacaaagcctattatcaacaaagttgcttctgtggcagaaaataaaggactgtttgaagaggcagcaaagctgtatgaccttgccaaggtaaagtgtgcccacttccttcttttgcacttcacaggtctgctggccttttggcattaaatgtgcagccacttggacagtgtcattgttgtagcaccctccctgcagaggcatttgctctagtgcttagacagttaatggtccagtcaggacagaattcccattttacagcattatttctgcccataagatttttctgaccaaacaacatattgaaaggatgtcctgcaggcattgaactgttgtctcacttggcagcagaattagcatccatcacatttcgatggtgaagccactgttgaaaattacattatgctgaccctggcaaccacagacacactggggaacagtggtgttagaaaataagaccacatcagtgtgcaggaaggagtgaaagaaaataagaccttagctgggcgttttgagaggactagaatacatgtttctaccgaag

SEQ ID NO: 18338 - DNA, 1046 bp, Homo sapiens
acctcccacctttcatgaagattggatgctgagatgatgatcaaggctggagaaccatgcttcatgtggtggagtacctgtaggtggattcataccaaatccactatcagtgcttggctgtttcaaaataaacaccattttacactctttaattaacttcacccagagagctcagaaggttttgatgctttttatacattttttttgtatgttaagacagggtctccctgtatcacccaggctggagtggagtgcagtagtgcagtcatagctcactgtaaccttgaactcctgggctcaagcaatcctcccacctcagcctcctgagtaactaggactacaggcatgtaccaccacactcagttaatattttaatattttgtggagatggggtctcgctgtgtgtccaggctggtcactgactcctggcctcaagcaatccttccgccccagcctcccatgtagctgagattacaggcatgagcgaccacaccccactgtttttttaaatgctattccactgttacggattacacagaaattcctgatacactcttactacccccaccccgtttttgtctttcaggtatagggctcaaggaataagcgcaaataaatttgtggactccacgttctatcttcttttggacttgatcaccttttttgacgagtatcatagtggtcatattgatagagcttttgatgtaagtttcaggaaaggtgtttgaagtgcaggttaatgtacaccctcgaaaattcaaaacacttcatggaatttacttaaaacaaaggagctgttgccagtatgtttgttgtataaagaaagacaagtacaatcctgggacttaaaaggagtttcctgtgtggctttttttttttttttttttttttttttgcctattcctttcccctttaatctgaaaacagagaagtttctcaaagtaatttgcaatctcagaattttaaaaattgtgtcaggaaatgatgataagaattaagttagctagttagaatcaaagcctttgtgtgtacaaggaggaatggcg

SEQ ID NO: 18339 - DNA, 1561 bp, Homo sapiens
gccaagatcacaccactgcactccagcctgggtgacagagcgagactctgtctcaaaaataataataatagttgcagatctagttgtttcatttgatatttgctgccaggagcagtcaaaactatgacaacatcaacacagttgtgctgtggaagcctgagaaacagccctatccagcctagggcatcattccctggggtcctggctgcctgctgctgtgcctatggggcagggggcagggatttaccctgccctttcctaacattatttggtgttcatcatagccctaattgttttctcattgtttcattacctcattgtttcattacctgtaggaaggcactgatcctgaaactgaagaccccaaccacctccctccagacagggatgtactagatggcgagcagaccagcccctcctttatgagcacagcatggcttgtcttcaagactttctttgcctctcttcttccagaaggccccccagccatcgcaaactgatggtgtttgtgctgtagctgttggaggctttgacaggaatggactggatcacctgactccagctagattgcctctcctggacatggcaatgatgagtttttaaaaaacagtgtggatgatgatatgcttttgtgagcaagcaaaagcagaaacgtgaagccgtgatacaaattggtgaacaaaaaatgcccaaggcttctcatgtctttattctgaagagctttaatatatactctatgtagtttaataagcactgtacgtagaaggccttaggtgttgcatgtctatgcttgaggaacttttccaaatgtgtgtgtctgcatgtgtgtttgtacatagaagtcatagatgcagaagtggttctgctggtacgatttgattcctgttggaatgtttaaattacactaagtgtactactttatataatcaatgaaattgctagacatgttttagcaggacttttctaggaaagacttatgtataattgctttttaaaatgcagtgctttactttaaactaaggggaactttgcggaggtgaaaacctttgctgggttttctgttcaataaagttttactatgaatgaccctggcagagactcctgtcatcctagcagtttactctgcgtttgttgtatctagacagtcaacaactgagttgtcggtgtttaacctgaatgcttgtttttcagaagaggactgtttgtgccggtaagaatgatcaggtaaggccatgaaagtttttgttggcgtttttgtttttgagatggggtcttgctttgttccttgggccagagtacattggctactcacaagtgggctggtagctggctacagccccagactcctggcttaagccacctcctgcctcagccaccctggcagctgggactacaggcatgcgccatcacacttagcttgaaagttttaatttactaagaatatacctgtgtttccccccatttcctgatttaaacagtactggcttatataggaacccatcaaagttaaattccccaaatttaaatttagtaaatttagtggtttcaccttggcaaatct

SEQ ID NO: 18340 - DNA, 1044 bp, Homo sapiens
tctcatgatgtcatggcacgtgttcctctaaccccgactttcctggaaactggacgttagatcaaaaggctccatgacattcagtttcatgtttgtgcccaaaaaacttacgtcaccgacagagctgtgcacttctcattgcagcctgtgacaaggcacctaagaactgactgttccccaaaataacctgtaaaaattattataaaatacacataacaaaatttgccatcttaatcatttctaagtgtaccattcaggagtgttaagtacatccacttttttgtacggccaatctccggaactcttttcctcttgcaaaactgaatctctatccccattaaacaacaccccatttcccccctaccccagcccctggcaaccaccattctgctttctgtctctatgaattggactgctctaaatagtttatatgagtggagtcatttgtatttgtctgtatttgtctttttgtgactggctcatttcattgggcataatgtcctctggttcattcatgttgcagcgtgtgtcactgtgtcagactttccttcctttttttttttttttttttttttgagacagagtctcactcttgtcacctgggctggagtgcactggctcgatctcagctcactgcaccctccacctcttgggttcaagcgattctcctgcctcagcctccggagtagctgggattacaggcgcccgccaccacacccagctaatttttttttgtatttttgtagagacagggtttcaccatgttggcgaggctggtctcgaactcctgacctcagatgatctgcccgtttcggccttccaaagtgctgggattacaggcatgagccaccacacccagccctttccttttttaaggctgcataatattccattgtgtggatggaccacattttgtgtatccacttatccatcaattgacacttgggttgtccattcaagtgcccaattgacagtccctgctttctttttttaaatattattttatttcaaaaacaatagagatgaggtctcactgttttgccc

SEQ ID NO: 18341 - DNA, 1018 bp, Homo sapiens
ttgttagtcctgcaaagacatactggaccccaggcaagaagagggtctttttgggaatgggctgttatcagtttgtttcagagtcaaaccgtgaactgaatcccttcccaaagttagtttggcctacacccaggaatgaacaaggacagttgaagggttagaagcaagatggagtcagttaggtctgatttctttcgctgtcataatttcctcagttataattttgcaaaggcggtttcaataggagtggggagtggcagagcctcttctgatggttcaggaggcagtagagaatctgtgggaaaaatgggtaccctggagtggcgggtgccagggtttgaatcctgccgctgtcccttcctcactgtgtgacttgggcaagtcacgtcaccttagtttcctcatttgtacagtgggaaaactaataggatcaatcaggaggaggtagtattaggattaaataagatcactcagcacatggcacccaaaaagacctgagggacggagaaggacaggccagcaaagcgctcagggaagagtggccggggtagagggaacaggaagcgcagggcgtggaggcagcacccggccagaaggagctcagagtgccagaaggagcttcccggccctgaccctggcaacccggagcctggggcatgtttcttcttatggaatggaatgtttcctgctctaaacccatttcctctttttgttttttgagacagagtttcactcttgttgcccaggctggagtgcaatggtgcaatcttggctcactgcaacctccgcctcctgggttcaagcgattctcctgtctcagcatcccaagtagctgggattacaggtgcccaccaccacgcctggttaattttttgtatttttagtagagatagggttccaccatgttggccaggcctgtctcaaacccctgtcctcaggtgatccgcccgcctcagcctcccaaagtgctgggattacaggtgtgagccactgcacccacacccatttcctcttatga

SEQ ID NO: 18342 - DNA, 1018 bp, Homo sapiens
aaattgtaataaaagttatccttcccaaataaggaagtaaaccacaaacaatgttaatttaagctcattggaaaaatgggtgcagaatagactttgagagagagagtttttttgttttgttttgtttttaaagagacagggtctcactttgtcacccaggctggcgtacagtggcgtgatcatgactcactgcagcctcagcctcctggactcaaaccatcctcccacctcagcctcctaagtagcttggactacaggcgtgtgctactgcacctggctaatttttaaaaaagtttttgtagagccaggtcttgccatgttgcccaggctggtctcaaatacctggactcaagcgattgtcgagcttcagcctccttaagtgctgggattgcagatgtgagcccccacgcttggccccttgcaatattttaaaagagagtgacatagttatacaaacctctttgtttttaacttttctcaacatcgaaatctgtgttactgtatataaatctacaactgcttctgactattacagagtattcccttgtatgcctgaaagtattatattttgttacattttcatctggtgatggtcacttaggttactgccaaatttttgttcttacaaacagcactgcagtgaacagcgcaaatatgcattgatttttggacctgtgtaaaaatttatctacaactgttgggtatatgcatacttaattttattattgccagatcattcttcagaaatacttgcatcagtcaattatattgtttaaacaggcagcacctaatgagtacctgaaatgaccatactaattcccatatcacaaggttattctctggattaaatgacttaagatgatagtttttggggctttttttttttccacactaaaacagagacccacaatatgtaaacaaataagtggtgagttcttaagcagttagaattgtttaatggaaaacatctcattattgaagttcccctgaaggactttttaaagatttctgggatcac

SEQ ID NO: 18343 - DNA, 1034 bp, Homo sapiens
aaaataaattagtcaggtgtggtgttgcatacctgtgggcctagctactcaggaggctgaggctggagaatcccttgagcccagcagttcaaggctacagtgagctataattgcacccctgcactcctgcctgggtgacagagcaagacccagtctctaaaaaaacaaaacaaaaataatgcggggggtggggctggggtggtggaaagaaaaacgaaagcaatcttgaggactgtctcatcattcattcacgaaacagccatctgttccgtttgcaggcaccataaggatgaagtggctggtgacatattcgacatgctgctcaccttcacagattttctggcttttaaagaaatgtttttggactacagagcagtaagttactactcctatttatttagccactttgagccacttagaaaattccaggtagaaataccgaacatgaacctcccacgcttcccccatcattctcccttcaaactggccgatgaggcatcagaagagtgagctgctattctgttgtggctgggaccttctcatgttttcatgaaacaagcccaggtaccaacttagagttcctaatcagaaggacaaaaccgaaaaagcaggtctcaggtctcattctgccttgcctttcttttatttatttttttttttgagacagagttttgctcttgtcacccaggctggagtgcagtggcaccatcttggctcactggaacctctgccttccaggttcaagcaatactcctgcctcagcctcccgagtagctgatactacaggcacctgccaccacgcccagctaattcttgtatttttagtagagacagggtttcaccatgttggccaggctggtctcaaactcctgaagcatggtccgcctcggcctcccaaagtgttgggattacaggcgtgagccaccgcacctggccctgccttgcttttcatataatgcaagctctttataagaaaaataggagactgggcatggtaactcacacctataatcccagcactttgggaggccgag

SEQ ID NO: 18344 - DNA, 1045 bp, Homo sapiens
gactccgctctcccacatcccacacgtcagacaaaaacaacgactcgcaggaaatctatgtgaattgcagacacgtggtcttctccgccccactgcggctgctgcactttaggcagccagcatcccggaacagagctgcagctcattatcctggcctctgggaggagtttctttttccttacgttccaaatcaccctacctgaggtgccccctctgcagattcccaaacctaatttgcagtgcagcttctgactctggtggctttggtgggtgtcagtctttatcaagtggtcttggtgatccagggagcaacagctcttaccaagcattttctaacatgacgtcacctcttgtttgtattgcagccctgtattgagctgagatggctcgagcctaacattccatgatccaggatcgtgacagatgtgcacaggctgctgctgttgctgctgtgggtaatttggaaccacgaggcaccccagggccagaagacgaggcattctgtctgcctggatgtgtgggaactctctgccaacttgattggtggatctggggggggatccacccccaccccacgaggaaagcacagtttattttgtgggtggggcttcaggtgccagccagctgaaggatggccacccctgtggtcaccaagacagcctggaagttgcgtgagtggttttcatttttctttatcaccccatttattctgttagcggcttgttgctgggaggcctgaacccacagctttgtttcctgttcttggcacaggaggagactcctagacttgggagtaagatagaccattatgtaaatcatgactgtggcacttcttagctgggtgacactgggcaggtgacttaacctctctgaggctcagttttcttatatgtacaatgagatgacgcctgcattctatggttgctgtgaaattcaagtgacaggatgaacccatcctaaagcacttagcacagcatttccagttaggctgacagtggggtgagaaatcctgaaagatgttcacagcattctcagacatctcaca

SEQ ID NO: 18345 - DNA, 1049 bp, Homo sapiens
ctggacggccagggctggctgctccacaaggaactcattacgaactcacggcccagactccatcctcagagaacccgattcagtactggggtgggcccaggatctggattttaataagcttccaggtgattccgatggacagccaggttgacagatgggcaaacagaggcccagggagagcaccgagcttaggaaaaccccagtagctgcaggtagcagagcctgggacttgaatcccggtgtcaggactcccatcccagtgttgtctgttctgccattggatggaagagaaacttgccatcagcacagcaggtagagctaagacctccggcccccctccacaccccctcgccagagtgcaggtgacagtgacagacaggcaaattgaggccccaggtgtggaaaggttccaaagagagctgctctgcgggcatggtggctcacacctgtaatctcagcactttgggaggccaaggcaggaagatcacttgaggccatgagtttaagactaacctgggcaacaaaaggagaccccatctctatttttttaaaaaaaaaaaaaaaaaggagagagagagagctgcctcatatcggttgccttgaaaggccacccatcactggagggttcagatgtaggctgaggaggtgctcagctgggaggcgttgggggttcctgtgtggggcagacagaccccggaagcccctccactctgcagttcctagatcccatgattgaatgtaggcatcagaggccttcgtgggacagaagagcaagggcaggagtcaagccggaagaatgtggtcctgcctgctttccacagcgcagccagagggcaagggtagctcagcgcaggggatcccacgggatctcacaggagggcggccggtgcttcatgcagccagcccacacagggtgggactccgccacatcctctctgggcagggcaggattttggaagccttgctgtgggatccaagctgagtgggctgggagcgggtgtggactggagcaagagccagcgtggcctccttggccaggaggcaatgcc

SEQ ID NO: 18346 - DNA, 1043 bp, Homo sapiens
ctcacacctgtaataccagcgctttgggaggccaaggcgggtggatcacttgaggtcaggaggccagcccagccaacgtggtgaaaacctatctctaccaaaaatataaaaaaattagccgggtgtggtggcacatgcttgtaatcccagctacctgggaggctgaggcaggagaattgcttgaacccgggaggcagaggttgcagtgagccgagatcacgccattgcattccagcctgggcgacagagcaagactccttttcaaaaaaaaggaagaaaagaaaattcgttgttagggtggtgggacccttgattgtttcctactgttttaaaaatgtgtgttattgttctatttttctgtgcagctaatccaaaagcgcacacacaaatgcccacagcagcccttcctctgccagccttctcatttgcctcttagccactgtctctgctttccttcttgttagttcttcgcacactcatgggacacaaagccaacatctgcagcctggatttccacccgtacggcgagtttgtagcctctggttcccaggacacaaacatcaaggtgagaggccggtccgtgccccgtgtctcctgctgggcctgtggcaggaccagcccggcccggccctcagtgctggatgcctgctgaggggacctcttccctttctgcagccacatccacaccatcctagggaaagcgggtggcaggcatctatctgccagatgcttctgctcagaatgccagctttagtgagcagtttctgtccttgtctccgtggggagtaacgacctagagaaggctgggccccaccgtctgctcacgactgcacaccttcctccagtcgtggctctgacctctcctgactctgcccctctgcttctctctcccccacagctctgggacatcaggaggaaaggctgtgtcttccgatacagggtaaggatgcgctctgtcggtgactccatgagcaccttgcgggcattgagtgtggtgtggtgcccagaccccagcagggggtggaggggacggctgtcccaca

SEQ ID NO: 18347 - DNA, 1170 bp, Homo sapiens
ttttccttgatttcctttagcacgatagggtgggtctccaagaaaaatatcccaagtttagattagcttcagctgtgtgtaacagaaaacccatggtaataataagtaagataaaagtatttttttctctctcataaccaggatctcaaaatagaggattcccaaatcatggcttcatgattctcaggtaccttgactctttatttctatatcactactatgccacctttagaatcctgcctttgagcctaaaatggctgttcaagctcctgccatcacatctgtattccagccaggaggcaggaggaagagtcaaagaatggcatgtctccccttttttttttcagacagagtctcactctgttgcccaggctggagtgcagtggcacaatcttggcacactgcaacttctgcctcccaggttcaagtgattctcctgcctcagcctcccaaatagctggggttacaggtgctggccaccacacctgggtaatttttgtatttttaacagagatggggttttgccatgttggccaggctggtcttgaactcctgacctcaagtgatccacctgcctcggcctccccaagtgctgggattacaggcatgagccactgcgcccagccatgtctccccttttaagaacactgcctgaaagtaacatgcttccatttacctcgcactggcagaacatcacgtcatcataaacaaattttattcccatcatccacctactcatctaaaatatggggattattattaaggaagaaggggagaacagatatggggggataattagcagtctctgctgcagtaggactctttcactggttccctatagaagctgcctaaatggaatgtgttattggaattctagttccatctggccttgcccttggtcttagaattagaggcctgttgtgtctattgtaatgtccgtgcttaacacctggagccatgttgtgtagagaagcagagtttacacgttggtgctgtacatcaccttcttactttatgaaagcgctgtgttatgtcctttctaagatgcaccttttttttcatactttaacatctctaagattgggatgcatcatacagtctctgttggcaaggggggcctcatgctgttactgccatcacatgaacatcagaatttgcgagtggatgtca

SEQ ID NO: 18348 - DNA, 1029 bp, Homo sapiens
ctgaatcaagatcagctgtaagtataaaaatacacatttaatttcaaagatttattacccccaacaaggaatgtagaatattttgttaataactttgttgattacatgttaaatgataatattttagacatactgagctaaatatattaaaatctatgacttatttttttcttttttttttttttctgagacagagtctgtctctgtcgcccaggctggtggagtgcagtggtgctatctcagctcactgcaagctctgcctcccgggttcacgccattctcctgcctcagcctcccaagtagctgggactacaggcatccgccaccatgcctggctaattttttgtatttttagtagagacggagtttcaccgtgttaacaaggatggtctcgatcttccgacgtcgtgatccgcctgcctcggtctcccaaagtgctgggattacaggcgtgagccaccgcgcccggccgacttttttctttacatttataatgtggctgttaaaaaatctttaattatgtggctgtgttacactggtgactcatattatgctgctttcagacagcactgactagagtgtgagccccgtcctcaagttgcttagagcttaacacaggagacacaagtggaaaccgctgtatataagctgttgacagggagctgcatggtgcagaaaagaggaaactacctctctggcagtggaattgctgtttgctgagaataaaggaaaaaaaatggaaaaggttccaggtagaggagccaatagtgtacagagtgccagtcatgaaaagattggtaggaggtattcagtgtggtcagaacctaggaggcagtggcttgagactctgggtggaaaaggagactgtgagagccatgtctggagccaggaagccaaacttcctgatgactggaagaagctgaccaaacagcatgcaaggaatgacatccccctctcccaccccaggcaccagctctcagatagccatcagagtgtctgaaggcccccacgtgttcttagttattgttt

SEQ ID NO: 18349 - DNA, 1053 bp, Homo sapiens
agctggggtggggtaaggtgaggactcagggccatgcccaggactgggaggcagcataggtgtgagcctgggccatgctgggttttttttttttgtaggggcgggtgcggacagggtctctctctctctcacccaggatggagtgcagtggcctgatcacagctcactgcagcctcgacctccccgggctcaggtgatcctcccacctcagcctcccaagtagctgggatttcaggcacacaccaccatgcccggctaatttttgtatattttgccgagatgaggttttgccatgttgcccaagctggggtcaaatttctgggctcaagcaatccacctgcctgggcctctcaaagtgctaggattacaggtgtgagccactgtgcttggcctgggattctaatctggctctgccacttcccagctgcgggactgtgagcagttggcttcccctgctggaacctcctctatcctgaccacagggcctggctcagaggagcactggacaaggaacatgaaaaggctctgacttcacctcaaactccttccccgcagggtctctcattcatcacttttatctgctatgtggcgtcctcagcatctgccttcctcacagcgcctctgctggagttcctgctggccttgtacttcctctttgctgatgccatgcagctgaatgacaagtggcagggcttgtgctggcccatgatggtgaggacaggggccccaggagggaggggtgccctgcacaaagtggccagatgaggagtccagagtcgtgcacttgggcccttatcctttctctagtgtgctggagtttgcagttggttagaactggatggagagacccagcttcagatcatcccagctccactactcagcagccctgtgacctcaagtgggctgtggtgcctctagagcaggtctgtgaggcagggaacccggagaggggtctctggccaccaggtggcgccggtgctccccaccgggcctacaggaatgagctgccgccacaggaattcaagccatttccacgtgggcaggacaggttaa

SEQ ID NO: 18350 - DNA, 1050 bp, Homo sapiens
aggtgcaagtggcttctgcggccgggcacggtggctcacgcctgttaccccagcactttgggaggctgaggtgggtagatcacctgaggtcaggagttcaagaccagcctggtgaaagcccatctctactaaaagtacaaaaattagccaggtgtggtggcacacgcttataatcccagctactcgggagggaggaagttgcagtgagtcgagatcccgccattgcactccagcctgggtgatgagcaagactctgtctcaaagacaaaaaacaacaacaaaaaaaaaagagagagagaaagtggctgctgcctgtggagggcctcaggcccgcggcctgccctgatgccagcgatcactgggaacggtagagtcagctgcaggaggcctgcacccaggctcctgccagcaacccagctgtgcttccccagagaccgttcccaggcaccgctgccctgagcctcctgccaagcatcctctctgctttcctttcagaagagaattccgactcggactctgactgaaggcctggcgggtgccttggcaacctgagccacacaggcctccacccctgcgcctcacaggggtcgctggcgttggagcggaggcctggacttctgagttgcagagggggctgcggacacagcaggccccctacagcctcaggttctgcctgagcccagcctaccaggcttgcccctcagctcagcactgttgaccacgctgcgtatgagggcatcttgggtatcccactccttctccccatttctgtcccacaggccttcagccctttaacgtctctgccaaaaaccagcacaaggagacaaagcagagccttgtctgtatctgggcagcaggtgttccatgctgctaggtggcgggggtcgggggtcttctgtttcactaacaggaacaaagacagaaaccatgacagggctgccccgccaggccccggtgggtttgtctgcacttggtgctcctgcccacaccagccactttggtgacaatgacccttccaagaatctttggttcaaggagcaccagttccct

SEQ ID NO: 18351 - DNA, 1050 bp, Homo sapiens
cggcgatgctgacattgccagaggacttggcgaggatgtacagggatgatatcactgtcactgtggtgtattttaactcagaatcaatcggtgcatattacaaggggggttaagaatctcccatcctattgtcaaggttaacataaatgctcttctaaaatgtttcacttactcctaaactagctatccaaaccttactattaaaagcgcaggcagatttaatttgctaaatagactaacaggaggaaaaaaacaaacagcctagctttaaaaaacagtgaaatagcagtgatttcatgtccctgtatgttctgattaagtcttatatgcagagaggacagagcataaagtctatagaattggcttgggcttgtgtagccccagtcatttgataaagatgttgttaaactgtgtcagcctgagccttcaaagggtaaatttaatcatgattctgagaataaagaacttcaggagcttcttaggtcttgccacaaaaatctgcaaatttgataattctcctgaattcacaatcatggacttgtagactatgaagagatattttatttgtttgtcttttatttaaattactaaggtctaggtttacaaagcatactacaggacccttttctatgcaatatcctaacttttttttttgtgattatgcttgtgagaaattttgtaatactacattctagttctgttttcgtttattttaaaactgaatccttaaacttgcaaacacgcctactgtaagcatgcttggaatgacttgttttggttttcagctgataggatctatgcctctggaccagctgaacttactggtgcagctttttgtgccctctactgagtcccattccagaaactttgagccatgctaggaggtaactagtctatgccttaactcctgacctttcctgcattagtaaaatttcctcctgggctgagcctttgggggttgattcacagcatttaagctttctgattatacctctcaaacattcttctgtcaattccacacaatccttctacctctgctatgctgaaccc

SEQ ID NO: 18352 - DNA, 1026 bp, Homo sapiens
gctcaggctagagtgcagtggcacaatcatagctcactgcagcctcaacctcctgggctcgagcaatcctcccacctcagcctccccagtagctgggactacacgcacatgccgccatgcctggctcatcttttttactttttgttgcccaggctggtcttaaacttctgggctcaagcgatcctcccaatgtgctgggattacaggtgtgagccactgcacctgagccaactttattcttttgcatgtggcatgatccagttttcccagcatcatttgttggaaagactattctttcccttattgaatggtcttggcacccttgttgaaaatcagttcaccttggccaggaacggtggctcacacctgtaatcctagcacttcgggaggccgaggcaagagggtcatttgagcccaggagttcaagaccagcctgggcaacatagtgagactccatctctgaaaataaataaactaattaaatcagttaaccatagagacatgggtttatttatggactctcaattctgtatatctgtcttatgccagtaccatactctctcttttttttttttgacagagtctcactctgttgcccaggctggagtgcagtggcaccatctcagctcactgcaagctccgcctcccaggttcacgccattctcctgcctcagtctccggagtagctgggactacaggcacccaccaccatacccagctactttttttctttcttttttctttttcttttttttttgtatttttagtagagacggggtttcaccgtgttagccaggatggtctcgatctcctgacctcgtgatccgcctgcctctgcctcccaaagtgctgggattacaggcatgagacaccatgcccggcccagtaccacactctcttcatagcatttcttcctcataagttttgaagtagggacgtgtgagttcttctactttgttccttttcaagattgttttgcttgaagtgggaccacagacatgtgccaccacacccggctaatttcct

SEQ ID NO: 18353 - DNA, 1068 bp, Homo sapiens
actgtaacacaatttggtaagtatttgtgtatcttgatgtatctaaacatagaaaagatatggtaaaaatacagtatttaaaaaatggtatacctgtatagggcacttactttgaatggagcttgcaggactggaagttgctctgggtcagtcagttgagtaagtggtgaatgaatgtgattctgtagattatataaacatagtatgcttaggccgcactaaatctataaaaattaagcaattgcactgcaatgttaaaatggctatgatgtcactaggcaataggaatttttcagattcattataatcttacaagaccactgtcatatatgtgatccattttaggctgtaacgttgttaaagcaatacatgaatgtattaaaaagatatgtttttaattctattaggaagagtgatagaactatgcaggctatcaggaaatgtacattttattaatactggttttagaagtttttttttctgtgaagggacaaatgtaaatgttttcagttttgcaggctttcagtctctgtcacaactactcatctctgtaactctgctgttgtggtgtgaaagggaccctagacaatatgtaaacaattgagtgtggctgtgttccataaatggtgacactggtagaaatcagtatctttccctcagatgtaaatctgtaaatgtttatgcataggtcatgtatttctcagatagaattttgtcaacatctgtactacttctgtactactttttttctagaagaaaaaaaagcattttaaggcaaaaactcgtactgtactgttccgtgccactgtaataaagttctccagtgaatttagagaaaaggcattgccctgtgttttctcatccgtggagctcagactgtggggtctcgaatttcttttctctttttatggtctgttttattataaccattaggttttgtttctgtccccacaggactaggactggaagcaaagaaaattgaaggaacttctccaaatgttaattatttgcctctgttccttatattggattccaaatcagtgtcttcttccatattctctcaactga

SEQ ID NO: 18354 - DNA, 1048 bp, Homo sapiens
ttctttctggactttatacttaaaagtcttttaatttatttttatgagcataaaataaagcaaaatctaacaagattggatttaatgagtgaggacagaattttattttaaatggccttttctaataaaggtctatgattctgcttcttctggtaccatttacgcacttgcctgcaggatctttgtcccaaaatacatattgtgtttgtttatataccatccacaatttggcagagtttacaggacttcttgatgttagctttgagaaatccctatttaagctcaagaagttccttctctgtagatagcccagtcattccaaataaaagatctctatggtaaagctttggagtgtgattttcttcaagagaaattagacaactttacaaataccttgtcacatctggattttaagtatttcagttcgactaaaatatgaattgacagcacttagttattgacagtttagtgtattgaaatctggtttttaaaaatatgctttagataaactataatactctaataataacggaatcataaaatttagaactggtaactgcaagcttatatatatatatatatttgacacctttgtagctggcagagcgtttgtatttttaaagaaaagtttttattttagttattttagttatttttcaatctaagagaggaagtcgactttctgaaaaaattaaaatgttttggctaggtggggtggttcatgcctgtaatcccagcactttgggaggccgaggcaggtggatcacctgaggtcaggagttcgagaccagactggccaacgtgatgaaaccccacctctactaaaaatacaaaaaattagccaggtatgctggcatgtgcctgtaatcccagctacttgggagactgaggcaggagaattgcttgaacccgggaggcggaggttgcagtgggctgagattgtaccacaacactccagcctgggcaacagagcaagactctgtctgaaaaaaaaaaaattaaaatgttttaaaattagtatgtcatagtaccttccagttagagtacg

SEQ ID NO: 18355 - DNA, 1114 bp, Homo sapiens
aggtggggaagcagatttgagagaaagaccttagtttggataaacggggtctgaactcgcctcggatttgccgggggtggagctcaggacgtcctggttggggagggcattcagagagtagatgccagtcctgggaaaggcaggggaggagaggagagccacggctgacgcttggggacagaaggaggagcctgaggaggagacaggacagagcgtctggagaggcaggaggacaccgagttccccgtgttggcctccaggtcctgtgcttgcggagccgtccggcggctgggatcgaggtgaacttaaaccccagcctgggtgttcactgggggcattgagggagtggtcagaggcggcgagggcagcggggagggcaaccccccattacttctctcccctttccccatgcagccccgacaatgggcaacgcgcaggagcggccgtcagagactatcgaccgcgagcggaaacgcctggtcgagacgctgcaggcggactcgggactgctgttggacgcgctgctggcgcggggcgtgctcaccgggccagagtacgaggcattggatgcactgcctgatgccgagcgcagggtgcgccgcctactgctgctggtgcagggcaagggcgaggccgcctgccaggagctgctacgctgtgcccagcgtaccgcgggcgcgccggaccccgcttgggactggcagcacgtgggtccgggtgagcgcgcggggcggggcctagggcagagcagggacggggctggggcagacaaaaggcccggggagggcagggttgtcgtctccgctagaagtaggcgagtgtgaaaccgcacaggggtaaattgagcctcagtcactcccacttccgccccaggctaccgggaccgcagctatgaccctccatgcccaggccactggacgccggaggcacccggctcggggaccacatgccccgggttgcccagagcttcagaccctgacgaggccgggggccctgagggctccgaggcggtgcaatccgggaccccggaggagccagagccagagctggaagctgaggcctctaaagaggctgaaccggagccggagccagagccagagctggaacccgaggc

SEQ ID NO: 18356 - DNA, 2046 bp, Homo sapiens
ttttcttctgcttcccctgtgtcctcctggccagaggtttgtagtggagtcatcaccctgtagcgccaccacctctgcctggtgacctgacccagggtctggtctcagtcttgcacagagcaggtgctcagcaagggtgggacagatggggtaccttctgtcagacagggggtgcatgctgagcccagaaagaggcttctgtggcctttccgagttagaaaagctgtaccaatcgcttgcagggggcctttggtaccctgggctcagcactgaggaattcaggtttagcaagtgaggccaacagacagtgccagcttggcctaggcaggacctacatctccttagctgtgtggagcctcagggtgggtggtataggatccgaggaagccagggggctgtagtggggccaggctggacctctgtgccctgagcatggctttcttgtttttcagttttggaactccccaaagagctgtcagaaatctttgatcccacacgaggtaggctgctgcattcctccctgaggctaggggtaagggacacagctcattgggtcctatggctgttttcttgcccttttgaggaccttgttgtggcgcttatggtaactggggcaaagggtgaagttcctgatgggcaggtggggttccctttcctgggctttggtgggtggagaggtgggagctggaatgttagtaactgagctccctccattcccagagtgcatgagctcggagctgctggaggagttgatgtcctcagaaggtgggtggccctggaaggtgggagtgggtgtgggcaggggttgggctgctgctaggggagccctggcccagggcctgagactagtgctctctgcagtgtttgcccctctgcttcgtctttctccacccccgggagaccacgattatatctacaacctggacgagagtgaaggtgtctgtgacctctttgatgtgcctgttctcaacctctgactgacagggacatgccctgtgtggctgggacccagactgtctgacctgggggttgcctggggacctctcccacccgacccctacagagcttgagagccacagacgcctggcttctccggcctcccctcaccgcacagttctggccacagctcccgctcctgtgctggcacttctgtgctcgcagagcaggggaacaggactcagcccccatcaccgtggagccaaagtgtttgcttctccctttctgcggccttcgccagcccaggctcggctgccacccagtggcacagaaccgaggagctgccattaccccccatagggggcagtgtcttgttcctgccagcctcagtgtcttgcttctgccagctccttcccctaggagggaagggtggggtggaactgggcacatgccagcaccacttctagcttccttcgctatcccccaccccctgaccctccagctcctcctggccctctcacgtgcccacttctgctgggcctttagccctagaacctgcaggtggtgggggcggctaccaagaaggaacagaggtctctggggaggagtctgggtggtccagccctgatgattggccccacctcctgctgccccataaccctctcttcatttcggctttttcatttaccctcatttagagccatttgcagagatttagaaagatttacagtaacgaatggattcctatataaagattatttttatactttttgcagcaaaaggaaattgtaatatttgtacagtgttcaagtgaataaaaaccatgcctaaggctagctctgatgtggttctttggggaccctccttgggactgtgctggactggcagtgtgattgggtgggtcaccttgctggaactaggggtggggcggcctccggcagcctgccctccccgcccccacctgccgcaccttggtgtggggcggggccgcctcggcggggcggggcaggcggagccgtcctaccttcctacccccagactccaacccggaactaacctcggctcccttgggaaggccgcgttgcatggccaggagcagcagtctgggcc

SEQ ID NO: 18357 - DNA, 1033 bp, Homo sapiens
gttcctatgggactcgggggatggtggcagcagagggccaaccagagagagaaaagtgatggaacagtcagcggtttccaagtccagaatcccaggggatccccaccctgcaccatcccagggagcagagccccacttgctgatggtatacgataccatcagccagtgggaagggagagggaggattgcatgtcgggtaggggagttggggtggacatagacttaaaatcctccccaccaacaaacagctcaggacctgctgttcctgtgtctaggcagcccagcttcccccactgttcccccccttcatctcccaggtgctacaggacccccagagcgctgtggtgagccaagcagatatgccccaggtctcacaaggttcagtctggtgggaagacaggccctaaaggagaactgacaactgggttatgtggtctcggggttcagagggaggaagtcaaaaagggggaaccaacccagggcctgcttcctggaggaagaagtcatagggtagacttgaggaaggagagggacttggggctgagtagtgggaagaaggaataggagcgatgggggctgccggtcagattctgaagaaccttgcaggtattgagagagggtctcagttgctggaacagagaaagcaggggactgggaggagaggagtggttgaaagaatgtgagggacaggacaaatcctgaagggcctacgtgggtcatgttagagagtctgggctttctccctgggacaagagtggctgtggctatttcacatcagtctgaatagagtgatattaaagatttagagtcctggggtcagacagcctgggtttgaatcatggtcttgacacttaccacctgtgtgactgttttgttttgttttttgagacagagtctcgctctgtcgcccaggctggagtgtagtggtgagatcttggctcactgcaagctccacctcccgggctcatgccattctcccacctcagcctactgagtagctgggactacaggcgccagccaccacgcccagcta

SEQ ID NO: 18358 - DNA, 1065 bp, Homo sapiens
gtaggagagatggcgccaggggtgggagagtgggatggggctagggccacccttgacctcatcctcactcattacaggagaagagggacagtctgcccatcgacggctggaggagtccctggacgccctgccccgcatctttgggcctggcagcatggccagcacagcattctaaactattcacccatgggttcctggtgcccctttccccccactttcagggctcaccaggcactggcagggagggtaagggctggctccagatacccctcccccacagattcctagcaatgaaaatctaatatattcttctgttgcccctggggttggagagtcagtgcctgcagtcaagtgcctcccagcctcggctcagcacatcccttgccacaaatcagtgtctggggcttggccaccctgccgctgcccagccacatcccttggttttgtattttatttacagagttttacagaaaataaaaaagcaaaatgtctttcctacatggcctggtacactcctgaccctctgctccaacaccctctggctgtggccctgcctgacactggtgtgttcacactgcagctgtgacagtgccatgtgcacttgccctggaaattcaggtggaagaaagcccagaggctggaactgggcttggagaagagagcaggggaaaagggtggttcagcctgcaggtggggcctaccctgggcctgggaactacggcccaaggtggagctaaactggagttggcccagaaaacaccaaagggtgccaatcccaggctgtggcctgggagcaaaggggaagggaaaggaaaaacaggaagggaaaggaggcacggggtggctggagcttctgcccaccagggggcagcagatccgcgtcagcagatgccaggtttgggtcttctgcagcctgggcagctttctgcagagggggctgaaggagctccttgaagctggatggcaggggagaggagctccttgcggaggggaagagctgggacctgggaggcaggagacctggatggctaacctgtgacccaagacagcaagtcccttccctct

SEQ ID NO: 18359 - DNA, 1083 bp, Homo sapiens
cctggcttccgaaagcgttaagattactggtgtgagcctggagtactattttgctacttagaaacctttagtcctttatatatttagcaaatgtgtgaaaaaataaatgaatgttttgttattggcttgatggtggacatttatggaatggctcggttagtgacatgacatgaacaggtgttttgtttctttcccaattttttctgtcttcagttttccctcattttttttcatactatatgcgtatttgtatgaatttagtgtttcataaaatgatttgtgcttttcttttagaatgattacggacctgaagccaaagaacaagatgcgctagtggacagattgctgaccaggggcttgagagctgggttctattttccctcctcaaactgactttgcagccacggagaggtaagtgctatttccattttttctatcttaaaaatggtagtaatataaccctcctggagttggaggatttgttggctaattcttgaatataggggatgcaggatatcaggtgattgagagcatacaggcttcataatcagagtcctgggtttgaaactctttacgatgatatactagctgggtaatatggggcaagttactttaacctgtctactcctgtagtcctcacttgtgagagaataacaccaccaatctcagagactattctccgttaatgagaatgtgttttgtaaagctttaagtactattctgaacatgtacatagaaagatcccaggaaattgtggctgcttttctgtagaaacccttggaatgtgtattttgactattggcaaatgaactgaaaagaaagtccatgacctgtggctacttgtaattttgataagaaacagatggaatcctgttcttggggaacctggtatcctggataaaaattgtcttaatttgagttagcctagctcattgcccattttgcgtcagagtgtgacagtgattatcattttaatttagcctgtaatttttgctataaaatataatggacattatatggaacttggaacagaccttctataaatattggaatctactatgctttgggatctcataaacaaca

SEQ ID NO: 18360 - DNA, 2000 bp, Homo sapiens
agataaacatgacccatcttcctagaacttcagttatagtcatagaggaggtggtgagttaagtaatttaactggtcagtgattaaatattaaatattggccaggcacggtagctcacacccagtacattggaaggccaaggcctccaaaatcccagtaatcctagtactttgggaggccaaggcaggtagatcacttgaggtcaggagttccagaccagcctggccaacatggtaaaaccccatctctactaaaaatataaaaactagccgagtgtggtggtgggtgcctgtaatcccagctacttgggaggctgaggcaggaaaatcgcttaaacctgggaagcagaggttgcagtgagccaggattgtgtcactgcactccaccctgggcgacagagtgactctgtctgcccccccccgcccccccccccaaaacaacaaaagactgggcgcggtggctcacgcctgtaatcccagaactttgggaggctgaggtgggcggatcacaaggtcaggagttcgggaccagcctggccaacatggtgaaaccccgtctctactaaaaatacaaaaaattagctgggtgtagtggcgggaacctgtaatgccagtttctcgggaggctgaggcagaagaattgtttgaacctgggaggcggaggttgcaatgagttgaaatcactgcactccagcccaggcaacagagtgagactctgtctcaaaaaaacaacaaaaaaaaccccaagaagacaattagctgggtgtggtggtgcgtgcctgtaatcccaactactcgggaggctgaggcaggagaatcacctgaaccaggaggcaggcagaggttgcagtgagccaagatcacaccactgcactccagactgggtgacagagcaagaccgtctcaaaaaataaataaataaataaatattaaatattgttatattaaaacaaatagacatttttggagcagaatgaaaactgtatgattaagataacataggtcttcaacaaaatgagcatgagtgcctgagggtgggaagttctctctgtataggttctatagtggatatgtttgagaagcaatacatttgagctatagaacagctctgctatcctgctccttactttgtccttgtagtatttgtgtagggaaaaactctcaagcccaggtttttcctttgctttcacataacaaccaccatcaacacaaaagaagacttacgtggctgggcccagtggctcatgcctgtaatcctagcactttgggaggccaaggtgggcagattgcaagtccaagagattgagaccatcctgaccaacatggtgaaatcccatctctactaaaaatacaaaatttagccgggcgttgtggtgcgtgcctgtagttccagttactggggaggctgaggcaggagaatcgcttgaacccgggaggcggaagttgcagtgagccgagatcatgccactgtactctggcttggcgacaaggcgagactccatctcaaaaaaaaaaagacttacgtgaccaaagatggggtggagggattttcctcacacaccaaacagtgtatgccaactaggtgtcatccaacaccatctacccaagatggtgtcagatcccacacgtttagggttcagtcccataagaccacctgtccttcctaccagtcacaagcccattccttcagagcttctgaccaactggcttcaagttgagtttcccacgacctctttcttgggttccattagtttgctaaagcagttcacagacctcaaggaaacacttctttagatttgccagtttgttaagaggactactttatttatttatttttgagacaatctcactgtgtcgcccaggctggagtgcagtggcgtgatctcggctcactgcaacttccccctcccaggttcaagcagttctcctgcctcagtctcccgagtagctgggattacaggcgttcacccccacgcctggctaattttggtatttttagta

SEQ ID NO: 18361 - DNA, 1046 bp, Homo sapiens
ttgagacggagtcttgctgctctgtcacctaggctggagtgcagtgccgtgatctcggctcactgcaatccttgcttctcaggtttaagcgattctcttgtctcagcctcccgagtagctgggattatgggcacatgccaccatgcccggctaatttttgtatttttagtagatacagggtttcgtcatgttggccaggctggtctcaaactcctgacctcaggtgatccacctgcctcggcctcccaattgccctggcctcccaactgcccaggcttcctgaagtgctgggattacaggtatgagccaccacgcccagcttgtttttaatcttttgccattagagaaaaataccctagtagtagatagccttcttatatacacatctttaggctcgtgtactagtgtaaacatagagaattgcttgtatattcctagaagagggaatggcatgtacaaaggcccagaggcaggaaaggaaagacctagaatgttctggctactgaaagaagttcagtgtgattagaggcgagtatgtcaggctggatgcagatctgctgatagggccctgaagcacttggtaggccatgtgaaagagtttggactttaagagttttcagcatggtggtttcagaagggaagtcttcttgctgataatggatttacattttagaaatccgtggccgctgtgtgaaaaatggtgggtaatggagcaagaggggaagcagggaaactgtttagaaggccattgcattggtccatgcaagatgtaatgctgtcctgacttaaggtgggataactgggattgctgtttgtctagtttgttaaattataatgattattttaaattaatttagagacagactctcgctctgttgcccaggctagagtgctgtggtgtgatcatagctcactataaccttgaactcctggccttaagtgatcatctggcctcaagctcctgagtagctaggagtgtaggtgcgtatcaccaggcccagctaattttttttgtaaagatggggtcttactgtgttgcccaggct

SEQ ID NO: 18362 - DNA, 1093 bp, Homo sapiens
tggcacaatctcagctcactgcaacctctggctcctgggcgcctgcaatcctcccgcctcagcctcctgagtagctgggactacaggcccgcaccaccatgcctgactagtttttgtatctttttgtaaagacaaggttttgccatgttgcttaggcttgtcccatctcttgggtttataggtgtgagccactgtgcctggcctgctacttgctaaagatgtcattttagggtaggtaacttcttaaacatttttttttttttttttttttttggagacagggtctcgctctgtcgcccaggctggcatgatcacagcttgctgcagcctcaaaattctgggcacaagcaatcctcttgcctcggcctcctgcagtgctggaatggtaggcgtgagccaccctgcccagccaataattttcttgattgttgtcgaagacattatattgctatttattattaccacattgctatttggtacaagtatccattgttgttatttaaactgttagcttctgatttaatgttaactttacaggacaacccctttaccaaataaaagttgtcttggttttactaagtagccttcatgaggtgagtcctgggttacagagacatttttatttataaaaataaaaaccatgacagttcaccctatcatgtgtgcccatttctgcagggttttttttttttctttttcccttctttcatgcctacagattgtccttactacctagagattgttaaatattggttgtacccaaaatagaagtgaaacttcaaggcttactctgcttggcacagtggctcacacctgtgataccagcacttagggaagcagaggcaggaggatagcttgagcccaggagttcaggacctgcctgggtgacatagcaagaccccattctccacaaaaagggggaaaaagacaaaagactcattgagtcatacattctgttattgcttatgtgagaattatattagttttgagataggctttgtagtttttttgttgttgtttgttttgttttgttttgagacagagtcacccaggctgggatgcagtggcgtaatcttggctcacttcagcctct

SEQ ID NO: 18363 - DNA, 1051 bp, Homo sapiens
acttctgggcccaagccatcctcctgcttcagcttctcaagtagctggaactataggtacaaaccaccatgtctggcttgttctgtttcttttttactctttctccttcattcctggatttagtcagtcaccagcttctgtcaactgattgtaccttcatcgtacagaaatccagtactttatcagagaagtcatttttgtggggaaaatttatcaaaggtttagataagattagattctaggaatctaattagaaagctaagaagccaaaaaagcatatattgttgagttaaccatgttgaatgtcttcttggctggcggtataaggatacagaggatggcagttggcaccatgcatgtattgtttcattgggtttttatgatagcctgtgaaatgggtaccatttccttattttatagaaaagaaaactgcagcgagaaggtagcatatctcaccccaggtcacaatgctaattagaaaaaccagaattgggatgcacgtctctgactcttaacagtgattccattctgcctctcctgtccgccctccctttttaaatatagaacaaacattttctccatattatgtattaaagcactatttttgatgtctacgattcacaccaccaattaccttcagtagaattgtgctagtttcactgcaccaaggacaacattggggagtatctttctttttttttcttttcctctttcttttctttttttttgagacagagtctctctctgtagccaggctggagtgcagtggcatactttcggctcactgcaacctccacctcctgggttcaagcaattctcctgcctcagcctcccgagtagctgggtctataggtgcacgccgccatgcccagctaatttttgtatttttagtagagacggagattcaccatgttggtcaggatggtctcgatctcctgacctcgtgatctgcccgccttggcctcccaaagtgctgggattacaggcatgagccaccatgcccagtctggggagtatctttcaaaacaaccatagcagtttaacagaggca

SEQ ID NO: 18364 - DNA, 1807 bp, Homo sapiens
cgtgatcttgacgcactacaacctccacctcctgggttcaagcagttgtctgcctcagcctcccgagtagttgggattacaggtgcccgccactaagcacagttaatttctgtatttttagtggagacggggtttcaccatgttggccaggctggtcttgaactcctgaccttattatccacccgccttggcctcccgaagtgctgagattacaggcgtgagccaccacacttggccctgccaatgcttctttgtttcatacaacagatacattccaaatggattaaagataacttctgtttttttcctacatagttaactgtttttctggtaccttttatgcagtaattctcttttccctactgatttaaaatgacagctttttatttgctaggctttgtttctggattctctcttctgtttaaattgtctgcctatagtagtaacagtaccacattatatgaattatgtagctttatggatatagataatagtgtcgctacttagtgaggttttttaaatgcctcctggaggagtttggggctggaggggaagggttgttttctttttggttttgtttttcttagtttttttttagaccatgtctcactttattgcccaggccagagtgcagaggcatgatcactactcactatagccttaacctcctgggctcaggcgatcctcccagcttagcctccaggtagctgggactacaggcatacaccatcacacctgactaattttttaaagtttttgtagagatggtgtcctactgtgttgcccaggcctggtctcagactcctgtgctcaagcaatccactctcctcagcctcccaaagtcctagcagtcaggtgtgagtcactgcacctggccagtggaagagttttataatcttcaaatagaccctgcacattttcagttcacgttattctttttcttgtatctttttatgtttatgtatattttcctatatttatttaatagattgtatatacactttcaagtttatagcccatcttgttccagaaagaacttgaagaaatatttaggaaagacagataataagtgatataaataaaccagaaaatacaaattataatagaaagttattattacatggtttgagaggcaacaaattaatcaagctgtagccagctaaaaaaatggcaacatgatcctgttacataggtttcacaatgaaagaaaaaaatttccttgaagaaaagcttttccaagtatttaactcccagtgcaatttctcccacatatcttttagtgtaagctaaggcatgatgccaaagtgaaactcgataaaagcaattctgtaggggataaggccgtgtggcccaagtatacccagctttctgatggtctggcataattctgggataaagcctagactagaatgctgaattccacagagaggtcaagtcagatgaggacagaaaagcctcggtggatttaccaattaaaggccattgctggcctcagagcagctccgtaaagtattggggatcagaaaccaaactggtgagtggaaagtaaggaaagaattagagacagcaagtgttaagttgagcgtggtaggaaaaaagagatgacagatactaaatcgtgcattggggttgaggggagttataaatgggcaagatttaagcaacatagagctagctaagaagtggctgaagtggccgggtgcggtggctgaagcggccgaatgtggtggctcacgcctgtaatcccagcactttgggaggccgaggctggtggatcacgaggtcaggagatcgagaccatcctggc

SEQ ID NO: 18365 - DNA, 1038 bp, Homo sapiens
attctacaaatgttctttgatccccaccttctgcggtaacatttttttatatttgtccccactgtcatggaacagcatagtaagaagcctttgcattggatgttgttgtatttttctcttggttgttgagaacaagggactaatgaaagaaagaaggtaatggaagaataaaccaaactggcaatccaacaacctcgggagtttaccttgagccttgtttttttccaggcagatggtggggtttgctgaatctgtccaaaagtatatgttgcttcaagcccggcttttgcccttaaagagctttcacacccaactgggaaaatagatcgttttgagaaaattttaagtgctaaactgtgtccttattttatcagaaacacatttggagcaaagtagtggccacaagaacctcagaaagctttgttgtgccagggatgagctggtgttgagaggagtggatcagacgtaaagtacagagtgaagacagggagatgacagtaggaactgtgtctggatgaaaagacagcttgactgaaggggagagtgctagagggcaagacataaatctgaataggttatcatggggtcaggtacgaaggggctttgtgagccagaagggtggtaagtgcatcatgtagtttttgcaaaagtagagacacactttttgaggaaattaagtcttcttctttgtgaaatgagtgaatctttacttctctgcccagaaagcataagtggttttccattgccagtcatctgaggtattttgttattcaagaccatccaaactatggggggcaaccagcacatctttcacctgtcttactaccctctcctctgtcctgtgctttaagccagttctttttcttactcataactaattcccacatgtatttattgtacccagaaatccaaacctttcccctacagaatacatcctctgccctccactgtcaaactctgcctttaaatgtcctgctcacgtttcagggttccgttcaaattccacatttatgaagcatttttctatcacacctggtt

SEQ ID NO: 18366 - DNA, 1029 bp, Homo sapiens
tttttttttttttttttttgagatggagtcttgctctgtcccccacgctggagcgcagtggtgcaatctcggctcactgcaagctccgcctcctggattcaagctattcttctgcctcagcctcccgagtagctgggactacaggcgcccgccaccatgcctggctaattttttttgtatttttagtagagacggggtttcaccgtgttagccaggatgttctcgatctcctgacctcgtgatccgcccgcctcagcctcccaaagtgctgggattacaggcgtgagccactgcacctggccagtagtggttgtttctttcatcaagaggcacatgtctgttgtgtcttttttaatattaacaaccattgatgcctaattcattcaccaaagggtctttttgttttaaaatgtatatttttatttagacatgctttgctttaaataacaatctgtgttctcccttaataaaggcaggggaaatggaaggtgatgcagtcgaagccattgtggaggagtccgaaacttttattaaaggaaaggagagaaagacttaccagagacgccgggaagggggccaggaagaagatgcctgccacttaccccagaaccagacggatgggggtgaggtggtccaggatgtcaacagcagtgtacagatggtgatgatggaacagctggaccccacccttcttcagatgaagactgaagtaatggagggcacagtggctccagaagcagaggctgctgtggacgatacccagattataactttacaggttgtaaatatggaggaacagcccataaacataggagaacttcagcttgttcaagtacctgttcctgtgactgtacctgttgctaccacttcagtagaagaacttcagggggcttatgaaaatgaagtgtctaaagagggccttgcggaaagtgaacccatgatatgccacaccctacctttgcctgaagggtttcaggtggttaaagtgggggccaatggagaggtggagacactagaacaaggggaact

SEQ ID NO: 18367 - DNA, 1001 bp, Homo sapiens
ccttttcattcattttctgtatagcacccagagtaatacttaagaatcaggagaaatgggctgggcgcagtggctcacacctataattccagcattttgggaggccgaggcgggcagatcacgaggtcaggagattgagaccatcctggctaacatgatgaaaccctgtctctactaaaaatacaaaaataaaaaataaaaaaattagccgggcatggtggcgggcgcctgtagtcccagctactcaggaggctgaggcgggagaatggcatgaacctgggaagtggagcttgcagtgagctgagattgcgccactgcactccagcctgggtgacagagcaagactccgtctcaaaaaaaaaaaaaaaaaaaaagaatcgagaaatgtattagtaacttgttaaaatgcttgtttgtgttttcacattaccctgggctttttactgtgctttcaggtgtccacttgcgaaagcagcattcctatattgagcaaggcaagaaatgccgttactgtgatgctgtgtttcatgagcgctatgccctcatccagcatcagaagtcacacaagaatgagaagcgctttaagtgtgaccagtgtgattacgcttgtagacaggtaggaaccttcattgaaagttgttggtgctttctcggtgtctggtgttatcagagggcatttacatatctagtacagtggctgtttttaaagatagtattttcaaactgtggattatgaggaatgtcaccaaaatcaaaggtcatgctccttgtcaattgtgtcatcccggtgtccagatgatgttttattcagtcacagcttacctcttccttaagcagacatctttctgaaaactgtggaaagtaagtccaggacttgagagaggggaagaatctcatgcggggacatgactgttgggagggagccaaagaaggagctcagcaggaataagcagctctatctgtgctacaattatggaagcagttgtgcaccacactaaaaa

SEQ ID NO: 18368 - DNA, 1100 bp, Homo sapiens
gcgtatgcctgtagtcacagctactcaggaggctgagacaggagaattaaacccaggttgcagaggttgcagtgagctgagatcgtgccgctgcattccagcctgggcgacagagtgagactctgtctcaaaaaaaaaaaaagaaggaaaaaaaaattacctgggcatggtggtgcgtgcctgtagtcccggccactcaggaggctgagccacgagaattgcttgaatctgggaggcagagattgcagtgagccgagatcgcgccactgcactccagcctgggcaatagagtgagactgtctcaaaaaaaaaaaaagaaagaaagtgtatatatatatatatatatatttataaaacaagacttcaaataatatataattgttttctttcatcttccaccacccttctccttgccccaccacctgtgcttcctgatttcatgaaaagaaaatgctgaaccagatctggacgacaatgaggatgaggaggagcctgccgtagaaattgaacctgagccagagcctcagcctgtgaccccagccccaccacccgccaagaagcggagaggacgaccccctggcagaaccaaccagcccaaacagaaccagcgtaagttgttcatctctgctctggaggctggcgtcttctccgagcatgtgggggagccagatgggtccttgttctttggggatgtgggaactaagccatgagaacaagttaagggcatgtcgagaacaaactctcaggaaatggctttttaggagtttttactgaggaacatctgaggaagtctttagaggcctgttacatttcaagaagaagtccagagtagaagggtacttgtgttctgcaagatgggtactgttaatgtgggcgggttttgaaaaacaaccaaagtcacagtcagctggcagaatggatgcggtaatgaatataaaagagccaaatcgtaaaggttggagagggaaagcagtttctgcactgagattgccccttctaagaaactcagggtcaggcggtggctcatgcctgtgatcccagcactttggggggccaaggcgggaggatcacctgaggtcagtagttccataccagcctgg

SEQ ID NO: 18369 - DNA, 1035 bp, Homo sapiens
atcacaatcatgtagcagaatggcacccagaccactgcccaccagtgacggacatgcacgtggcagatcatgatttccagcccacggagccagcatttgaaccttgtataattaactttcagttatgatttcccatcgacattttctttgccctgtttgtagctgattgttgtgttttataaatcttctgttaaggcagaagggtgattatgagtggttcacagcagcccttataagctgggccagaaaatttcactaggtcagtaatttaaaccttggatcttcaaaaaataaaataatgtgaagcaaaaccaactaaaaagtgattcttgcacatgaactgtcacatgtttaaaaatgtgttttttagagagcctcagtcttactgatttcaaacacttttttcttctgtgtattgcttttaagagagccatcagttagctatcagactctaggttgatgcattttgtacttagctgtactgtgtgatatttttcattattttaggacgccaacatgagacctgtaataaaatatgtaatggggttgaaagctggggaggaggatctactgctgtacagctaataaatcataacggattaacaagtgctccaaagactccatcttgcgtgattcctgcctgcttgagggaggctggggggctgcatacatggttccaggctgtgcaggctgctgcctttcacaggcaacctctgttccctgggatggtactttctctagcagatgggacgatatgatcttggcgggtgactggatattgagcgcatcctgctgtaactgtttttttgttttgttttgttttgttttgttttgtttgagatggagtctcgctctgttgcccaggctggagtgcagtggcgcaatctcagctcactgcaacctccacctcccaggttcacgccattctcctgcctcaacctcccgagtagctgggactacaggcgcctgccaccatgcctggccaattttttgtatttttagtagagactgggtttcactgtgttagccaggatg

SEQ ID NO: 18370 - DNA, 1084 bp, Homo sapiens
cttactgggctttcaagggcctgctctgacctttctttgttgtagatctacccttagcacccctcctgtgtgctccacgaccctatcatctatgtgtctcatcaaccaagaactcaaaggagaggctgggtctgatctacctctgggctcctagcactggtctggcttgggaggggtctcctgccagttccccagggcctgtccgtgttctctgagagaacagatctcagcaaaggactccaggaaggccagtgaggggtgggggtcagtggctggtcacctactctcatggtaccaatgcttccctcctggtctcattggtcttgcaggtctccgtgaggccgggtgacgctccagaatgggagacaagccaatttgggagcagattggatccagcttcattcaacattactaccagttatttgataatgatagaacccaactaggcgcaatttacgtaagtttccagctctagggccagaatggaccctaggggatcaatttggatgttgggccagtgtgtccagttcacaagttctggcagccctatctggactggctacacctctgtatctgaacttttgtccacgggacaggggtctgacgcttggcccaagtaattacctggtctatacttttccttttgtcaacttccacaagagtgagaatcctgctgttctgggcttgccattccatgtggccagcatttgtcatggcacatggttttggattgggcagcaacaggcagaggttagggctcatggtgccctctggaggcagcagccatgagcatcctcagtgcaaagctgagctctcttggaggcctggggtccagcttccttttggatccaaggctcctgaatgctcatggaaaacaaatgaggttagcccagggaggctgataggtcatttcacaaacccttctatgcaggcattgctggctgctcttttttttttttttttttgagatggagtcttgctctttcgccaggctggagtgcaatggctcgatctcagctcactgcaagctccgcctcctgggttcaagtgattctcctgcctcagcctcccgagtagctgggat

SEQ ID NO: 18371 - DNA, 1020 bp, Homo sapiens
agctgtggagggcagcatgaaagagaacatctccaagctgctcaagtccaaggtgctatagggcccaagatgtgggtggaggtggtggttcctgggcctagtcaggccaggctgggctcaggctttcaacttggcccctccctctaaccccagaacttgactgatgccatcgcccgagcagctgcagacacattacaagggccgatgcaggctgcctaccgggaagccttccagagtgtggtgctgccggcctttgagaagagctgccaggccatgttccagcaaatcaatgatagcttccggctggggacacaggaatgtgagtggggtcatatggcccaaggtgggaggggttatcctctttcctactgttcctcttatagtccctgtggtcacccctcagacttgcagcagctagaaagccacatgaagagccggaaggcacgggaacaggaggccagggagcctgtgctagcccagctgcggggcctggtcagcacactgcagagtgccactgagcagatggcagccaccgtggccggcagtgttcgtgctgaggtgcagcaccagctgcatgtggctgtgggcaggtgtgtgggcagagtactgggcaaggtggtgggcttgagaaaggccagactaggctccctgtccacttcacctcactcacttccctttgcagcctgcaggagtccattttagcacaggtacagcgcatcgttaagggtgaggtgagtgtggcgctcaaggagcagcaggccgccgtcacctccagcatcatgcaggccatgcgctcagctgctggcacacctgtcccctctgcccaccttgactgccaggcccagcaagcccatatcctgcagctgctgcagcagggccacctcaatcaggccttccagcaggtacgataggcattaggccctgctaagggtcacgtgtctcttgacaaggcccacataccatacattctactccacccaccacctttgcaccttctggccccagcagactgttcttggt

SEQ ID NO: 18372 - DNA, 1077 bp, Homo sapiens
tttgtcgcaatctctggcagagttcctgacccacagcaggaattcagtaaatatttctgggttgaacgttgggattttggaaggagaaccccaggtacattgccagggtctgtatttctgatgatggcgaggtctcactctgttgcccaggctggagtgcagtggcataatcatagctcactgcaaccttgccttcccgtgctcaagtgattctcccacctcagcctcctgagtggctgggactacaggcacacagcatcacacccagctaattttgtttttttgagacggagtcttgctttgttgcccaggctggagtgtagtggcgccatcttggctcattgcaagctctgccttccgggttcatgccattctcctgcctcagcctcccgagtagctgggactacaggtgcacgctaccacgcccggctaattttttttgtattttttagtagagacggggtttcactgtgttggccaggctggtcttgaactcttgacctcatgatccacctggctcagactcccaaagtgctgggattacaggcgtaagccaccgcgcccagccacacccagctaattttttaaacattttttgtagagaggccaagacaggcagatcacttgggctcaagagttcgagaacaagcctgggcaacatggtgaaaccctgtctctactgaaaatacaaagattagccaggcatcctaggtactcgggggctgaggcacgagaaccgcttgaacctgggaggaggaggctgcagcgagccgagattgcgccactgcgctccagcctgggtgacagagtgagaccctgtctcaaaaaaaagaaaaaacttttttttttttgtagagacaaggtcttgttatgttgcccagcctggtttcaaactcttggcctcaagtgatcctcctgccctggcccccagagtgttgggattatagttgtgtgccactgcgtccagccttatttctgtaattattgagaaattactacctacttcattttagtagacagtttttctttctttttctttctttctttttttttttttttggagatggagtctcgctc

SEQ ID NO: 18373 - DNA, 1068 bp, Homo sapiens
cacctgttatcccagcactttaggtggccaaagctggcggatcacttgaggtcaggagttggagaccagcctggccaacatgaaaccctttctctctactaaaaatacaaaaatcacccaggcgaggtggcaggtgcctgtaatcccagctacttgggaggctgaggcatgagaatcgcttgaacccgggaggcagaggctgcagttagctgaggtcgtgccagtgcactccagcctgggtgaaggagactccatctcaaaaaaagaaaaacaaaattatttgtttttatgcttttctctttatttagattgtgagtttattgaccatgttctacttgtttgtgtgtgtgtgtgttaaaatataacctaccttggaccatgttttatttattcctgtgcccctggtatctactagatatttaataataaatgttttatctgaattgttcatttctcttccagttctatttgtcataatttttttttttctttttgagacagagtttcactcttgttgcccaggctggagtgcaatcacgcgatctcggctactctaacctccgcctcccgggttcaaacaattcttctgcctcagcctcccaagtagctgggattacaggcatgtgccaccaagcccggctaattttgtatttttagtagagacagggtttcaccatgttggcctggctggtctcgaactcccgacctctggtgatccacccgccttggcctcccaaagtgctaggattacaggcgtgagcctccgcgcccagcctttttttttttttcttttaagacagatctctgttgcccaggctggagtgcagtggcacaatcttggctcactgcaacctccaccaggttcaagtgactcttctgcctcagcctcccaagtagctggggttacaggtgtgcatcaccatgcccggctaatgtttttgtatttttagtagagatggagtttcaccatgttggccagactggtcttgaactcctgacctcaagtgatccgcccacctcggcctcccaaagtgctgggattacaggtgtgagctaccgggcccagcc

SEQ ID NO: 18374 - DNA, 1023 bp, Homo sapiens
gggggcctgattgaaaggtatgagctttgtcctgggccactgaggagccatggaaagtctctaggagggggtagtacatggggtatttcataatttacaagtctccagtggactagagggcaagagcaagacagtggagtggtgggggagccttcaagtgtggagtcagaaggaaggtttgggtggagaccaagcctgcaatgctggccagggctggggttctggagttgtaggtgcctgaggttatgggtgaagggcatctcttaggccagacactagagctatggtaggtaatggcccctgcagggacgccttagctacagagccctgctggctgcctgcccaccccattccactcaagaatgacacagccatctgtttaactgtattttctgggtttattcccccttgttccaagctctaagcctcagcttactccacctccatagcctgcacagtttcctccactagctccagggttagtggcttcactgtctgggtcaggacagctgtggttccaggcacaaagtggtagcggccagacctgggagggaggagggacagcctctgaacatgggcctgtcatgtggcccatcccctttttgcagccccctatctcccctgctatagccccacacatccctgtggtccccgatctccagctctcacctcttcacgggctctgtgggtgagctcagtgtccgcagcagcttggcgccagtctttgtgatcacacatgcgtccacattgcccccggagcccaggtcacccaagatcccggcggtgacggcttccaccagcagcccctgagcagcctccagctgcggtgatgggtgtgtgagacctaacgggctctctctgctgttaacttaggctacagcctggggacttgcctgtccacttacccaatctggtcttgccctccaaacccccactgtgtttctccctctgagccttagccacctctgaggcaacatcacctgcttccatcccaccccaaacaaaatctaggctccagacgtt

SEQ ID NO: 18375 - DNA, 1044 bp, Homo sapiens
ataaataaaaacccactagaaatcccttcatgtctttcttgaattacctgctttgcatggcttgcatgttttgcatatgtatatatatttctatgacaaaagtttatcagtagacattttggttttctttttcttttttttggagacagggccttgctctgtcacccaggctggagtacagttgcacaatcatggctcactgctgcatcgaactcttggactcccaatgattcttctgcttaagcctcccagagtggctgggactgcaggcaccttccatcactcctggctagttaaaaaatatatatatatttttggtagagatgggatcttgctatgttgcccaggctggtcccaaactcctggccttgagtgatcctcctgccttggcctcccaaagtgatgggattacaggtgtgagccaccttgcctggcatagacattttttaggactattgtaattcagataaaatgctctggaaagaatacttgcccagtaatggcatctccaccagtgaactgaagacaactctggctttgatcctctaggaaactcatgaactcttttttttcttttttggagatgagtctcgctctgtcaccaggctggaatgcagtggcgtgatctctcactgcaacctctgcctcccgggttcaagcgattctcctgcctcagcttcctgagtagctgcgactacaggcatgcgccgccacacccagctaatttttgtatttttagtagagacggggtttcaccatgttggccaggatggtcttgatctctttacctcgtgatccgcctgccttggcctcccaaagtgctaggattacaggcatgagccactgtgtctggccatgaactctgtttctaagcaacttatataaatctctccctttctgccaataaaagcttccttttccccttctgtcaccagatgtacttgtggcttgcccttctgtgcatcctggattataatccttttctctcattctcaaataaactcaacatgtttggaggtatttttctttaatgtcttttttttt

SEQ ID NO: 18376 - DNA, 1033 bp, Homo sapiens
tggtttatttctctgattagtgatgattagtgatggtgaacatctttttatatgcttttttggccatttgtaggtcatattcacccagaataggtaattttttaaaaacaacaaattaaaaattatgtttttagaaagaaataatttcttttctttttttttgagatggagtcttgctctgttgcccacgcaggagtgcagtggcaccatctcagctcactgcaacctccacctcccaggttcaagcaattcttctgccttggcctcccagggagctgggactacaggtgcatgcccccatgcctgcttaatttaggtatttttggtagagacggggttttggcatgttggccgggcttgtattgaactcctggcctcaagtgatcctcctgctcgggcctcccaaagtgctgggattacaggcttgagccactgcaccgggtctgtgctcttgtaaaaaatcaattaatcatagatgttttgatttgatttatatctggactctcatttctgttacgctggtctgtatgtctacctgtatgccagtaccacagcctttttttttctttcttcttactggtgaattgaggacacaacacagtcttgattattgtagcttggtaggttttaagattgggaagtataaattctccaactttttcttctctttcaagattgttttgtgtaatctgggttctttgcattgctatatgaattttaggatcagctggtcaattctgccagaaaggcagctgggattttgatggagtttgcattgaatctgtagattagtttacggattattgctgtcataacaatatttagtattccaatccatgaacatgagatgtctttatttaggtcttctttaatttctttttttttttttttttgagatgaggtctcactctgttacccaggctcaagtacagtgacatgatctcagctcactgcaacctatgcctcctgggctgaagccatcctcctacctcagcctcctgagtagctgggactacagccatactccacccca

SEQ ID NO: 18377 - DNA, 1061 bp, Homo sapiens
tgatagggaaatattgtccttgggctgagatttaggaccctgtaagcagagggtgtggtataagcaggggcctggggatgaatatgaggtagacacagggaggcctgagtagcccgatttgaccagaggtttgtcgagtgggagatgatgaagaagaagcagactgcaggatcgaaaaccttggttggtaaaagatcagctggacttggactttaggtatctttgggcttttttttttttttgagatggagtctcactcttgtcgtgcaggctggagtgtagcagtgcaatctcggctgactgcaacctccgtctcctgggttcaagcgattctcctgcctcagcctcctgagtagctgggactacaggtgcccgccaccacacccaactaattttttttgtatttttagtagagacggggttttgccatgttagccaggctggtcttgaacgcctgacctcgtgatccacctgcctcggcctcccaaagtgcagggattacaggtgtgagccactgtgcccggtggttttgctgttttctgattacttctttgtgttcctaaattatgtgaggagcagagttaaaatgatctggaggcagggtaaggtggtatataccatttatataaggaggatagggaatgattatatatatttatttgtttattcagggaagatttttggagagacacagaagaaactagtaacattgatttcctctggggaaggaaacttaagtttttatctggttatgcataggtagtaaattcccattacaggggtgctactgaaaataattaactggcacagcactggcactgatcagtcagaagagacaccaatcaatatgccacacatgtacatactagctgaatatctgctgtgttctcatggttcaaaaattgaagccagataaaaagcatagattgaggctgggcttggtggccgatgcctgtaatcccagcactttgggaggctgaggcgggcagatcacctgaggtcaggagttcaagaccagtctggccaaaagaatgaaaccgcatgtctaccaaaaaatataa

SEQ ID NO: 18378 - DNA, 1067 bp, Homo sapiens
ggtgagatcagaaaccctccctacaatgtaatctgttctaagtgttctccaggtgctcagtggctgggaagacagatgcatagctgagcatttgatgagtggttgaatttttcaagccatctacagcttctctgtggtcccttcccagtggaggggctgaccagcccagggtctccctcctgcctgctgtctggtctgactatggctgatcccatgatttaggtgaagtcatgtctggagggacttcagatgagctggccaagcctctgggaccttatactgtatcaggatcctgttacatgtggtacaaataggtgggccagcaacctgcctgaggcagagggctctagagctgatgtggcatttgggccccaagttccacactcaggccctcaaggttggagatttgcaggcaggacaggttattgggaaggatagtccacccgtctaatgccagttgttccctctccttgaccacattatcttctccctctgacttcattcacccctgtcccagttgaatctagtgatccatccagaattctgaccatgtaaatcccctgctctaagtccttccactgctccctactgccgtcaggataaagtccagacactttgcagtggcctgcagcattctgcccactcatccggccccaccttaggcttctgcccactgcaggttactttatggttatcaagtctttggaaatctgttctctgcctggaatgaaacttgctcacttcttgtctgtcactccggttcctactaacccctgtcaaggccctgcagctagcaggcttatgaactgtctctgagctcctggcacaaccctcatctctttgtacagtaattatagatttgctggtcccctctcccctacccctgaagggagactttatctctgaatccccaggaacagcacaggtaccggtacaaaacactgggcagaaatgaagcaatacaagatgaacgtcttggatgccctggacattccctgtcttcctgacccaaggtctagtttggctccctctagggctccctggtagctcaagtgtcagtccagaca

SEQ ID NO: 18379 - DNA, 1096 bp, Homo sapiens
agtgccttcagagtgcacaagtgagaaatagatgcaatttaatctcaaatgaaactgaactgtggccgggcgcggtggctcacgcatgtaatcccagcaatatgggaggccgagatggacggatcataaggtcaggagattgagaccatcttggctaacacggtgaaaccccgtttctactaaaaatacaaaaaattagccgagcgtgttggtgggcacctgtagtcccagctactcgggaggctgaggcaggagaatggtgtgaacccgggaggcagagcttgcagtgagctgagattgcgccgctgcactccaacctgggggacacagcgagactccgtctcaaaaaaaaaaaaaaaaaaaaaaaaaagaaactgaattgtgtacttgttgctgagaaactaatctttaataaatttaaaatagtctttaatgaatatttaatcagattattttactttttagttcttatctaaatatggaagaactgtctgtttaattaaagccgataccttttattgaaattacctggtgaaaatgctcattttcagttactagaattggaagagacttttgtaggtcttaattttctgaatttttttagatgatttaatatagattatctgtatattttaaaataatgtttgggttttagaaaaatagtttaggctgggtgcggtggctcacgcctgtaatcccagcactttgggaggccgaggcaggtggatcacccaaggtcaggagttcgagaccagcctgggcaacaccgtgaaacccccactctactaaaaatacaaaaattagctgggcatggtggtgcatgcctgtaatcccagctactcaggaggctaaggcgagagtatcacttgaactcgggaggcagaggttgcagtgagccgagatcgcgtcattgcactccagcctgggcaacaagagtgaaacattccatctcaaaaaaaaagaagaaagaaagaaaaatagtttgaaagaatttgctttactgtgaacatttgtctaaaaagtgcttgaagacaaaatgctacttaaattactaatttcagtggcattttgtaggttcgtgctgctattaattgta

SEQ ID NO: 18380 - DNA, 1046 bp, Homo sapiens
atactgttttccataattgttttaatttataatttacattcccatcagcagtggacaagtgttcccttttcatcacatcgatgccaacatctattgttttcttggctttttaataacggccattctggctggaggaaggcggtatctcattgtggttttaatttgcatttacctgatggttagtgatgttgagcatttttttcatacgtttgtgggccatttgtatttcttcttttgagaagtgtctgttcatgtcatttgcctactttttgatgggattatttgtttttttcttgctgatttgagttccttgtagattctgggtattagtcctttattggatgtatagtttgctaatattttctcccattctgtgggttgtctgtttattgcgatgattatttcttccacagtgcagaatctttttagtttaattaggccccatttatttatttttggttttgttacatttgtttttggggtcttaatcataaattctttgcctagggtgatgtccagaagtttttcctaggttttcctgtaggatttttatggtttcaggtcttttaagtctttaatccatcttgagttgatttttatatgtggtgagagacagggatccagtttcattcttctacgtgtggctgtcctgttttcccagaaccatttattgaatagggtatccttttttcaatttatgtttttgtatgctttgtcaaagatcagctggttgtaagtagttggcttttttcctaggttgtctactctgttctattaatctttgggtagtgtggtcattttcacgatactgagtcgtccagtctgtgagcatgggatgtttccatttgtttgtgtcatctatgatttttttcagcagtgttttgtagttcttcttgtaaagatcttttacctccttgtgtaagtacacttctaggtattttattacttttgttgtagctattgtaaaagggattgagttcttgatttgattcttagcttggttgttgttggtggcggtgtgtagcagtgctaccaatttgtgtaca

SEQ ID NO: 18381 - DNA, 1077 bp, Homo sapiens
tgcctcatatcctttctgaaaataatatataaaccaataaatagaaaagagtatattaatttctatgaaaaattatcaagaaattgggaaaggctcatatcccaaataatatgaaagcattggagcagtaggatctaaatttacctgtctcctccatcatcttccatttactagcacatggaacaagggtaatagtcataatttatgtcccttcctcaaccagatctagcatgtactgtgtattttagaccagaaaggaccaggctgcagaaataccactatgactagtaacatacaggtagtcctcctcctgcaaccctaccacacacatacctaaaacttcttgaccattctatctgctctgtactggtagattgtggaacaggagttctgtaggacccaagcgttatgtatattggagaaaggattaaataaggggcaactaggatgttactaaacctaagaaactttttttaggtactgtagataccagggtagctaatgatgaatgagcctgtttactcagtagctaattgctaggataaactagtatcctagtagcttgttgaatgtaactatattattcagtacagtggttgaatataatatagttccagataatggtaggtttaaaattcccaggtgatagataagaccatggttcaaaataatttatgcataagtgaaccttaagtatgtattaagtgtctttactgttctcttaaggcaataaggtgtggaaaaattcatagatactcccttggttttgcctactaagccatgggcttggttatttcaagcctaaactcttttttttttttttttaaacatctcaattggctttattggtgattctggaattgggcaacacttcattccataaaatacataagtgttccgacaaggttgactttatagacagagaagggctgaagaaagacaagcaaagatcaaagaacatgttgatcatttttttttttttaattgatcattcttgggtgtttctcgcagagggggatttggcagggtcataggacaatagtggagggaaggtcagcagataaacaagtgaacaaa

SEQ ID NO: 18382 - DNA, 1904 bp, Homo sapiens
ttgttgactttaaatattagatgtggtctcagttgttattttgtaatgatttattataaggaaattagaagatggacggtaggtttaaggtcttttttcagaagggttttaatcaaaaattcccagcattacagaggggcaggtgttcgtgagtatgtgtgtggttctgggtcatgaactctccttgtacccttagcaccataaaaaggcagtgtggccaggcgcagtggctcatgcctgtaatcccagcacttagggaggccgaggcgggaggatcacctgaggttgggagtttgagaccagcctgaccaacatggatggaaaaacttcatctttactaaaaatacagaattagccgggtgtggtggtgcattcctgtcgtcccagctactcaggaggctgaggcaggagaattgcttgaacccaggagtggaggttgcggtgagccgagatcgcaccattgcactccagcctgggaaacgagcgaaactccgtcacaaaaaaaaaaaaaaaaaaaaagaaatgagctttaacagaaaggtaacatgatcagacttgtgtttcaaaatcattttcctcatatttcttttctttataaagtgtcaagaaccagtttaatcttttctgaaattagtgactctgaggagtgagatttacatgagataagtccaagaaggtgattcaaacaccaagagtgttttgaatatacagacagaacatcagtgatgataaagaatatcaggttttggggacagatgagaggggataggatttaaaatgggccttagaggggagaaggaacagaagggaaagaagataaagaagatggattaagatggatgtagatgaaaaaagtttgtagatttagtaatggagagtttaaggagcttccatatgatagctttaggttttttccgcaaaaaatggcatgaagtgtcctgttgtggagcagagggaagtttgggtgatttcacagttggacaatcatggagaatgtttgaaatagtttctgtaggccgggcgctgtggctcacactttgtaatcccagcactttgggaggttgaggtgggtggatcacgaggtcaggagatcgagaccatcctggctaacatggtgaaaccccgtctctactaaaaaatacaaaaaattagccgggcgtggtggcgggcgcctgtagtcccagctactcaggaggctgaggcaggagaatggcgtgaacccaggaggcagagcttgcagtgagccaagatcgcgccactgcactccagcctgggcaacagagcgagactctgtctcaaaaaacaaacaaacaaacaaacaaacaaacaaaaaacacacaaatagtttttgtaaagagagagaaagttctctacagaaacctagtagcattgtagacttgattgaagggcaccattgatgttgatcatcaatttacagatactattataattaattctataattaggggtttatttatttattttttttttttgagagagagtcttaccctgttgctcaggcttgagtacagtggtgtgatcttggctcactgcaacctccgcctccagggttcaagttcatatgattttcctgcctcagcctcccaagtagctgggattacaggtaccctggctaatttttgtatttttagtggagacggggtttcaccacgttggccaggctggtctcgaactcctgacctcaggcaatccgcttgccttggccttccaaagcgctgggattgcaggtgtgagccaccgcgcctggcccaggggtttaattttctttttcctccctttttgtttttcataccccttggtaacaagttgacctgctgttaaactttcttaagtagcactcaaattcttcaaggcgggtggtaaggtatgcatctcctccagaa

SEQ ID NO: 18383 - DNA, 1031 bp, Homo sapiens
gtacttgagcactctggtatttaagcattttgctgctgttctctgtgcacagctggcataagtgtcactccctactaaatgatgaaaccaaaaggtagagagcaggctgctacttttatgcaaaacagatttgaaataaaggcttacgcaaatattggctttaaaaatgttgcctgtttcttttagcagttttagactaactcttcacattgctttttaccctgaaacaaggactgagaccttgagtcactcatttgtgatataactgaagataggagatttattgagactttaagagcacttcagctcattttttttaaccaatgaagatattttttccttctaaaaagagcccaaagctagaacctgctctttctaatttaccacaggttgagagatttgggggtagagggtcggataggcaacaaatcagatctctagaaagattttgggaaaatgtatttcattatttgaatatattaagatttgttgcaaaaacagaagatctggaaaggtgaggtctgtgagggcaactgtaaaagcaattttatttttgctccctttattatagtagggcatacaagcaagaaaggagccaggtgccgtggctcatgcctataaactcagcactttgggaggctgaggtgggtggatcacctaaggtcaggagttggagaccagtctggtcaacatggtgaaaccctgtctctactacaaatacaaaaaaaaaaagccagcgtggtggtgggtgcctgtaatcccagctacttgggaggctgagacaagagaattgcttgaacctaggaggcggaggttgcagtgagctgagatcgcgccattgtactccagcttgggcgacaagaacgatactctgtctcaaaaaagaagcaagaaagaatgttcctagattgtagccccccagagactagctatcacatttgctcattgccacccctcaggggacttaatagaagctcagtgctgccaagcagtaattacagagggggaagagcagtacacaatggtgtgca

SEQ ID NO: 18384 - DNA, 1035 bp, Homo sapiens
cctccacctcccaagttcaagcgattctcctgcctcagcctcctgagtagctgggtttacaggctcacaccaccacgcctggctaattttttgtatttttattagagatggggtttctccatattagtcaggctggtctcaaactcctgacctcaggtgagccacccgccttagcctcccaaagtgcagggttataggcatgagccaccatgcccggtctagttttcaatgtagaaatcttatgcctctttggttaattcctaagtattttattctttttgatgccactgtaaatagaattgtttttcttaagattgggcacagcggctcacacttgtaatcccagcactttgggaggctgaggcaggctgatcacctgagttcaggagttcaagaccaacctggctaacgtgggcccacctggccaacatggggaaactctgtctctactaaaaatacaaaaattagctgggtgtggtggcatatgcctgtaatcccagctatttgtgggactgaggcaggagaatcgcttgaacctgggagacagaagttggagtgaaccaagattatgccactgcactccagcctgagactccgtctcaaaaacaaaccaaaaaaaaaaaccccaaaacaagaattgttttcttaattttttttggacctttcattccaagtatatagaagtacaactgaatattgtgtgttgattctatattctgccactttggtgactttatttgttagtgctaacatttttttgtctgtgtggattctttagagttttatgtttatactatcatgccattcgtgaatagagataattttctctcttcctttttaatttggatgggctttatgtatttatttatttttctaacctaattgctctggctagaacttctagtggtaggctagtagaagtggtgaaagagtgggcatctttgctttgtttgtgatcttagggggaaagcttttgttctttgttgataatgataggaactaacagtttttcatatatggcctttttcatattga

SEQ ID NO: 18385 - DNA, 1033 bp, Homo sapiens
gggcaacatggtgagacctcatctctgcagaaagaaaaaaaaaatccaaaaattagaaaggcataggcgtagtagcacatgcctgtaggcccagctactcaggaggcttaggtgggaagatcaaggctgcagtgagccgtgattgtgccacctgcattccagcctgggcaacagagtgagaccccattgccaaaaaaaaaaaaaaaaaaaaaaaaaaaaaaaaaaaaatagaaaaaagaaaaaaaagagagaaaacacgtcatgtggtttttgatgataaaacaccatttaaaatccgtttgtagttttaaaacttgaacagtgaaatacaaattgttaaaagtgtttttcatagcagcctggaacatctttgaaattattgcctttggaagtgataaatgataagaaaagatgatttgattgtgagccaggtgcttgcttatatatttggctttttgccactgctgtaacgcctgcctaaaatacacactgtgaaaatcaaataacatgcattagtcttaacatactctggtccccttcctacctaccacctaatgaactttcactgtgcttgttctaaatagcttccaagtgattgtattgaattagggtccatttatttagtcatcaggaatgggtgtttcctcagtggcaaggttcttgccttttgggagttcatagcctatttgggagacataatgatgatgcctgatgataatctaatatgaagaggaggcatgttagaagtcacgcacagagatttgtgggccatccttgtgctccctcttagcacaagactagctcgtagaacccccagaacctgcacagaaaacactcttccttatattttttgtgacttgaaataacaggtgccaagggctgccttgcgttcttatgcccactttatattccctctctatgtactgtataagaggtatttctcttctccattgtactgatggggaaactgaagagaaaaatatattcttatgcaaagcatcctcacaacttttcatttacaaagaaactattc

SEQ ID NO: 18386 - DNA, 1040 bp, Homo sapiens
gcctgggcaatgtagtgaaacactgtctctacagacaaattaaaaaaaaaatacataaataaatagctgggcatggtggcaagcacctttagtcctagctactcatgaggccgagatagaggactgcttgagcctaggagttggaggctgcagtgagctatgattgcatgattgcactccagcctgggtgacaaagtgagaccttgtctcttgaataaaaaagagagagagagactgaaagagaaaaaagtcttatctgccttcagttttgtgtgattctgctactctccttggctgaaggagtccttaaccttccagcaggaactttgtctttcattcaggtgctgcgactgaaattctaggcatgaggtcttgtggggctgtgactgtgccccacctctctaaataaggccactgggtagtttcgccagtgtatttgacaaacctgataaagccatatcagcgacaccagtgccaggttttatgaatacaaagggaatacctagtaagctcaatccctcctcccagctagagtctgatggaatagggcgagctgtattggtcactggggtcagatttctctgcttgtctccatgttgacttgggtagaaaaggcatcctaggtctctttgcacctgactcttatgtgagactataggctccccagctgtgtactggttttgttctaatggatgcctgggctcacctgacaggcacatgaaaacaaatatgtttccaggtgcctgcacaggaaacctgcatggcttggtgccagagtgagagcaaaagtggtgctgccttaaagctcagcctcactgaagcagaggtaggctgccttcactcctgggactgggggaaggcttcactagggcctaggaggagcttttttacttggtctcaggtccagacttgaaggggtttgggacagggaaggcaggagttttgggtggggactgtggagatcagcatttcccctaagaactactcactcttgactctctgtggtttccttgctctgagctccatgaggccagattcgg

SEQ ID NO: 18387 - DNA, 1521 bp, Homo sapiens
tctgtaatcctagctactcgggagcctgaggagggaggatcccttgagcccagaaattcaaggttgcagtgagctatgatcatgccactgcactccagcctaggtgacagaatgagactttgtctcaaaaaaaatttcatatttaatctctttcatcaaatactcttagaaaacatggtttgaagatacataagcaatctccaggcagtatagtatagtggttaggattgcaggcctccatgccagactggatttaattttcagctttatcattgaccaactgttgatcttggggagttaactaattgctgcctcgattttctcttttatttttattttttgagacagagtcttgctttgttgcccaggctggagggcagtggctcaatcttggctcactgcaacctccacctcccaggttcaagtgattctcctgcctcagcctcccaagtagctgggattacaggtgcaagctaccatgcctggctaatttttatatttttagtagagatgcggttttaccatattggccatactggtctcgaactcctgagctcaagtgatctgcccaccttggcctcccagagtgctgggatcataggtgtgagcctgtaagtgtgggcccgccagcctctttcattcaacatgtactttcatccagattcctcgggatctgaattcctgcaggctttctatcctagaagcactggcttttccagaatctaggcctgagggcaagaacttgcttgtcatagtagtggccaagtcataaaaccatattctcttccgactagggtaggctttagggttcagcttacttcccttcttggaacttaggttgcagtatcaggctttcaacagagctaggatatgctgagtctccttgagtagaggcggcagtgggaacaacgtggtttcaggagacataaattgcacgaaaccaattaggttatttaggggaaagaaatgaaaggtctgcactgaatctagggtaagacttcggtaggataggagaattaagttggtcttgaaattgaggcatgagaggggtccggcttgttggttgggagactgcctaaacaagttatagccacgccattctagacacttccatcctagaagggagggcccaggaagtctgtatataaccaactctagggcagaggctgccagctggtggcccgtgagccagacttgggccccagagatagatttgtttggtttgtggtgttgtaaataattttgaattagttgccaacatttgaaaatcaggacttgccttttctcttgaaaaatcaaaagttcaggcatcattggacccaaattcctgcccgataaaataagctggatttcagtagtcgtagcttctttaaaaaaaaaaaaaatttcttttttgtttatttaaaaggagtatccctatgttgcccaggctggtctcaaactcctggctcaagtgatgctcctgcctcagcctctccaagtgttgggattacaggcatgagcctctgtggagggctctgg

SEQ ID NO: 18388 - DNA, 1038 bp, Homo sapiens
accctgcctctacaaaaaaatcaacaaaaattgggcatcatggtgcatgcctgtactcctggctggctgcttgggaggctgagataggaggattgcttgagcctgggagatagaggctgcagtgagctcagatagcaccactgcactccagcctgggtgacagtgtgagaccttgtctcaaaaaagaaaaaaaaaaaagaataatgtcaggacgttagctttcttcatccgaggtttctctacttctaaggtacgaattaaaaaatagattttgttgtcactcatgttaagaatttctgattttatcgtctttatcttatcataagccccatatacatatttcccccctaagaatggatagctataaacaataaaggtgatgttgcaaaccttgtaaaatattcattaatgtaaaaatgatcaatctaagatgatctttccccaaattccctgtactataaagtcaggttcctaaaaggcacttagaataatttcttccttttcaggaggaaaagaactaaggacaatgttgttcgggagtggagcccagggaagcaaagcattctgattagattaagagcttaggatgcctcatgccccgtctgctcatgggcccccttaccagctcccattcttggctgtagggctgcacggagaggatgttctcaatccagcctggagtggccgtctccaagtagtaaatgtcatacacatagtcatcgtgtttttgttcttcctggcgcctgactcctggtccatcctcagacacagtcaatcgctcacggatcaactctacagaattgcagaggatcacatctgggtcagatgtctgtaaagaaaccacagattacacacacacgcatgacccaaaacatgatgttccaagaggaggaacctatgagttgggtgaaggaaggctccctacagttttttttgagacggagtctcactctgtcgcccaggctggagtgcagtggcgtggtcttggctcactgcaacctccgcctcccaggttcaagcgtttctcctacctcagcc

SEQ ID NO: 18389 - DNA, 1187 bp, Homo sapiens
tgatggggatagttgcccactgtccctcataataagagaaatgcagttttagctgctcacagcacctatgctcccagcctctcaggagactgaggcaggagggttgcttgaacccaggaagttgaggctgcagtgagtcgggactgcattactgcactcccgcctgggcaataagatgagaacctgtctctaaaaaaaaaaaaaaagagaaatgcaactttaaactgcaatgagatctcattttcacctactagtgaataaagtttaaacagtttgcaagcacactgttggggaagctcagggaaaaagcaggaaagcgagtcatcagaacgtttcaggtagaaagcaatgctgctttcagacatggggctgtggctggatttgcgtctgtgcagaatagatgtgtgcagccctggtttagtagaaaaaggccaacctaaaggccactagcagggatcaagtccattatcctttcagtgggtgaggtagctctctgtgcactgatgtgggacaagcttcagggtggattattacctgacacaaaaataaaggtgcagaatggtgtgttgtgtggcagcactggtgttagtaaaaataggaatatatgtgtttgtgagtggatagtcatgtgtggtgtacatataaggaggtctttggaagaattcccagaaattcgtaaaactgactgcatctgggaatggggactggaggttaggggtggaaaggaaacatattttttactatgcgtccttgtataccttttgaattttctctcatgtgcttgtgttatttacacccccatccaccctctctcactctcacactcaaaggaaaagaaagtgggaaaggtgtgtcggaattgcctgatgggttcttcccacccactgttcagacaaaaccaattcgctgacaccatggcattgcaataaagactttaattgacacgaagccagccacaccacgtgggggagagatttgttactcaaatcagtctccctgaaaattcacaggctacggttttttgtttgtttgttttgagatggagtttcgttcttgttggtcaggctggagtgcaatggcgcgatctcagctcactgcaacctctacctcccgggttcaagcaattctcctgcctcagccccctgagtagctgggattacgggcatgcgccaccatgcctggctaat

SEQ ID NO: 18390 - DNA, 1027 bp, Homo sapiens
tttgtgcaagaaaaaatggaaaagcttccttttaattttctcatcaaagcagaaccatagtcacaaagtcattttgggaagggcatttttattaaaaggatttgaaaagctttaccctggatggagagtgtatctcatttgatgagagtggttttctctcctagcttagtggctccatcactgaaagtctgggcatttctcctgtgttacttgtttacctaatcagatttccacatgaattctggttttcatggccaaagaggggatgtcacgatccatgcgtgcgtgtgaccaggaggaagggagggaaggctgtgtggcctgagtgtcctctgggttcctcttggcagggcctttttctctccccagcatcctcatgaactggagatgatgctggggagagaattggcttacagatttcttcccaaagaaatgatgttcaggatggcccggataggagtgtgcagcccccagcctaggagctctggccgactgtcccttataggagaggactcaggtgtcacgtcagagcttgcaggttcccgcccagcccagtctgttacagaaaccgttgtggatctttgttctctctgagccccttcatacttgggggtctctttcaggtgtgcagggaacagcaagatgtgcctcttgttcttgctgccacgcttccctgtgtcctggcgggcgggtgtggacggggctgctccttcctcacaggacctgtggcggatccggagcccctgtggtgactgcgaaggcttcgacgtgcacatcatggacgacatgattaaggtaggcagggccacactctgcatagtacccccgacctgctcctgtatcgcaggcctctcacagggtcccagcttgggcagcacaggctcttctgttgggggcagtgaggtcaggtgctgccattttgtgtggttcaacatgagcattgcttggtaccagccctgttcttggctccgtgctgtcaccctgtgtcagaatctccactgggcctgcacgtcctgtcattgcaact

SEQ ID NO: 18391 - DNA, 1027 bp, Homo sapiens
gtgctcgtcttcctcattataagatccacaggggaggggccatgtctatattattcatacttacagtccagtgtctagtatctggcacgtagtaggcactcactagctattgagatataaatatagatatttgttgaattgaaaatgaattgggccgggcgtggtggctcacgcctgtaatcccagaactttgggaggccgaggcaggtggatcactaggtcaggagttcgagacaagtctgaccaaaatggtgaaacccagtctctactaaaaatacaaaaattagctgggcgtggtggcacgtgcctgtaatcccagctattcaggaggctgaggcgggagaatcgcttgaaccccgggaggtggaggttgcagtgagtcgagattgcaccactacactccagcctggacaacagagtgagaccctgtctcaaaaaaaaaaaaaaaaaaagagaaaaagaataaaattaaaaaaaagaaaataaaggaacctcattcacatacacctccaaaactctgatttcctaaagttgggcatttctcattgctggaggtgttcagttagaggcatgccgcccccttgaagaaatgtttatttcatttgtacagtgggttgggattttacctgaatgctttgagtacccttttaatcctatgatgctagagattgatagacccatgcctattattcctgtcagttctccctgaaatgtcatcagttcttcatgttccgctatttctagctgttggccctactcgtttctgtgcctaaatgccctacctcccactccttttctgagaaagatcttctgccctgtcagttatgaagtaaagatgtcctaagattcctgctctttcttttttctttctttctttctctctcttttttttttttttcgacggagtttcgctcttgttgcctggagtgcaatggctggagtgcaatggcgcgatctcagctcactgcagcctctgccacctaggcccaccttggtctccccaagtgctggcattacaggtgtgagc

SEQ ID NO: 18392 - DNA, 1026 bp, Homo sapiens
ttcttcttccatgcaggtggcacttacctcttaggacctggtacagagcctaccttgaagtgttctctccctctcccaatcttttgtgctttgagcgcctgcagcacctcaccttactgtgtattgtctcatattgtgctctaataaataacgcttttaaaataaactgaaccgtattcaaggactgcagtgtttttcttttgcatttttagtctgccacagtgtatatagtaaatccaggcaccttgtaaatatctagtctgtcaaatctctaaccttgatcagaaaaatggccccagtttcatccctcccctgttcctgcagggacacagccaagtgttgaacagaaatatggggcagaggagccagtatggtgtgtggatgtggtcatgcacctcactcagtagaaggggccactcctgccttctttaatattcaaatgtcatccatctccttaaggctcaactcattcaggaaacagagatatagtgtgagtcaggtacttgctggacaatggtgttgtagaatttcaaaaacaaccaaaagtattatccctgccctcataatgtgtaccatttaactaggaaaacaagcattaaatagatgagtaggtttgtttgaataatggtaggtgtgcagagtggtttaaagcacatgatagggaggttgactctccagtgggggatcagaagacttcactggagatctgctaactggcacctgaagtatgaaatggaattagctaagggaaatgggaggacagaatgatactcttgaggaatttgagtgaatcggttcagctatacctaagcaaacaagagaagggtacagaataagctgaagcctctgtgaaaccttccctcactgctccagctaactcagctctgctttcgatgtctttttgcactaattgtctttgccatactttattatatactttctgagacagaagtctaaccaggaattagctagatatggtggcatatgcctgtagtcccagctactctggaggctaaggtgggagga

SEQ ID NO: 18393 - DNA, 1032 bp, Homo sapiens
acctaaatcaggatgtccctggggctcactgatagttttaggggcaggcatgagacctagttcagctaatcagagtcctttgccagaattttttccaagtagagctggaaggagccctactttgggcttttgtgttgctaggccaaaagataaaggcctagagcttcctggaacctgatttcttaccagagatgggaagtaggagaggacaaggttgacatgatggtgttcttgtttctatttcctgatgtccttagacctggctcaatttctgaagctctccttgggattcaggaagctccccatcagtccaacagtttctcctttttgctcaagctaattttttatgtttgttgcttgcattaaagaaacctaaaatatgtatgatatacttttacctgccagagcatctagcgcacctccatggaagatgagaaaagacttctgcacttttaggcatattgatggtggtgatgcttggtttttttaatagctgcagtaggcttttcactttgcagtattctgacttcaagattgagcactttttaaaaatactaaggtggttaattcctactcatctgttaaaatgcaaatggtgcttcaggaaaggttttgctgactctcctatttcaattacattggtctcccttttaaaaattttcatggattactgttaatgtcctccatgttaccacagtttgtatttgtgattatttggttttctttttcctacactagatggtgagttccaggaaggcaagagtccatgtctgttttgatagctctttttattaccctgctaattaatgccaggcatatggtagatacttaatatagtgatatagtgttttaagtgagcaattgagtggagattgattgctagacaaagaagactggtaggtaaatgaaaagatgctcaatcttgaagtcagaatattgcaaaataaaacaatgtaatactgtttcctaccaattaggctggcaaaaattgagaaatctggcagaggggaattagaacttttatacactgct

SEQ ID NO: 18394 - DNA, 1099 bp, Homo sapiens
gggaggcctgataggctgagttcaggatgttgaactttattctgagggagatgcgaaacgattaacagttttaagaaagagagaacatgatcaaatctgcagtttagaaatatctatctggaggtattgtgaagaatggattgggtaagagcagaagcagggagatcagttaaaaggcagacatctgaggaatcacggaggcttggattaatgcagtggtcatggaaatggagagaaatgaatgggtttgagagatatttaaggaggagagttgccaaaacttaacgaagggctggatatgtggggaagaaggaagagagctagaagaataaatcttgacttcatttctggcataatgtaccttggtcccatcagacaaaagtgaggtcagtgtggttggcagacgttggtagatttggtctagagtggctataatattgcctcccctcagttctccccacagtggcttctagggccaatgaaataacaaatgatcagttacccataagaagttgtcccttacaaacaggtctttgcatcttccttttccaagaagggttagacctcacttaagggcatgcagatttgagagctactataagaaaatcagaaccctctttttcctatgagttcccccaacttgtgcatgtatatatttgttgttatctattcataccttgtttctttcccaaaatggtttgaggcaggtttatattgacctgcatatttgccatttctggtggtctttatttctttatgtagatcaaaatttcagtgcaaacttccttctgcctgaactttagttgccatttcttttagtgtaggtctactggcaatgaatttctttttttttttttgagacggaatttcgctcttgttgcccacgatctcggctcactgcaacctctgcctcctgggttcaagcgattatcctgctgcagcctcccaagtagctgggattacaggtgccagccaccacgcccggctaatttttttttttttttgtatttttagtagagacagggtttcactgcgttggccaggctggtcttgaactcctgacctcaggtgatccacctgcctcggcctcccaaagtgc

SEQ ID NO: 18395 - DNA, 1027 bp, Homo sapiens
agcaattccctttttagtaattttatgaaagaaacttggattgtaggaacttgggagattttaggacctagactactcaaaaatagataacaataacttgaaaacagtgtacagagttatattctaataacaggtatattatagctttcttttgggaacataatttattttttacattgaaaaataaaatatttcctattgaaatataggaatctcacatttaaacagtcttgcggctgggaagccaaacgaaggcagactttgcatttatttatagtcttaaagtttctgggcctgccagaaagtgacagttttatttacttactataaggctgggaacccttgaagtcaggcattttatgtgtatttttaaatatgacattttagtcaaagccttggtaatataactaacatttaagagcagaattttattgggtttatgtaaataaccatattgtcctaagaatatttagaaatagtttttgaattttggagggattaagtaaggaaaagaaaaaacatgtttttatctttgtttacaaaagtacactctgtcaacttgttggaaatgatacatagcttaagagaaattttttttaaattggggaaacaaagtatttgcataaagtaacaatgttttaaataaaagtcataaaacagttaatctcataattaactcctatttgatctctattagtagttttatgaatctattaggttttttttttattagagtcttggaaatttgtattgagtctgttgattttaaagttatcagaactgggcatggtggctcatacctgtaatcccagcactttgggaggacgaggtgggtggatcacttgaggacaggagtttgagaccagcctggccaatatggtgaaaaccccatctctaccaaaaaatacaaaaattagccaggcacagtggtgcattcctgtagtcccagctacttgggaggctgaggtgggagaatcacttgaacctgggaggtggaagcgtcagtgagccaagattgcaccactgc

SEQ ID NO: 18396 - DNA, 1046 bp, Homo sapiens
tagctggacgtggtggcaggtaatcccagctacttgggaagctgaggcaggagaatctcttgaacccgggaggcagaggttgcattgagccgagatcatgccactgcactccagcctgggcgacaagagcaaaactccatctcaaaaaaaaaaaaagttacatggatgttaaaaccttaatccttttaaagctcagttttttaaaagtgatcaaaaacataaggcaatgcagaaaattatcatggtaaaatgtaaagtctttttctttaccgaaaaggtaaagaaaaacctcttacagtgtgattgttttttctaaagggaatctcatttagataacatggaaatcaaacctgatgaaaagattgtttgaatttaatctgacataggaagaatgggtctaggttataagagtaacaatttagatacatcaaggaaagtgaggaatacagaatcaaattatattggaggaaaacattgcttttttaggccattaagataaacactttcatgtcaggccataatggcagagttagaactggagaaaaagttcaggagctgatgacaaagttgaaggagagagttatcatctcaggcctttttaaggggagaaaatgctaaatgcagtgatgtatgacctataaatcacaagtagcaagatactgcaaaagtcaagcctctgaaatatgaatctgagaaattttatttcatttatttaatttttaatttttttttttttttttgagacagggtctgactgtcacccaggctgaagtgcagtggcacaatgtcagctcactggaacctccacctcctggagttcaagcagtcctcccaccttagactcccgagtagctgggactacgggcatatgccaccacacccagctaatttttgtgttttttgtagagacaggattgtgccatgttgcccagactggtttcaaactcctgggctcaagcaatcagcctgcctcagtctcccaaagggctgggattacaggtgtgagccactatgcctggccttatttatatttatattcttatttt

SEQ ID NO: 18397 - DNA, 1051 bp, Homo sapiens
aaagtattgtcttggtctcaattttttgccctttaagataagaatctcctcattccttttagtatggaaagggggtcttttatatgagaattttattttttgcttttaagaaacagcacgaaggtcaaaataatattttttaaaatatctgctagtttttacgtgttttttacttaaattgtcagcatgccagcctagctgaggagttttggaaaaagagagttagcttagagcaagagagtaagaaggaattctaagaaggggaggggcaagctccaaagaggagagtctcaaccaactttgagatagtattttatagctagtcagtctttgagtccgggttgggtttggtttttttagcctaaagatatcccttgagatatgagtcttatttggaatgtatgattttattgccatggtcttttagtttagttttaagaacaacagactgcatgatccctgtaatgtttgaacatgttaccagctggaatctcaaaatatatcttggcatgtctttgaactttgagagcccatttgtaattaaacttatctaggtgactcagtttaatgttgaatatacaaaagccaattaaatgcaagtgttgaatatgcaaaagccaaataaacacaagtgctgatggaaaataaagtatgtacttaccaagaggacgatcagctgcctttcccaactgaagggaaaaggaaaaattctttcacccaggcctcaacctggaggaaaaatatctcttcactcagacctcacagctgaggtctgccaggaggaaaagagtcctccccaacagatgatctcccaaccagagagagacccccctccaaataagaggaggaaagacccttctctaagcaaatcccaaacaaaacagaactttacccaaagcaggagtgccatccaggagactcaccagggaacacctagctgactcgtgggagagagggtgctcaaaggccctcaatgtgagtaccttatgtcatagttccaagggccgatgatttttcccaaggtgagtcaggtttggaatcccacttctga

SEQ ID NO: 18398 - DNA, 1050 bp, Homo sapiens
aaaaacaaagttctgctgctcaaaagaaaaaaaaagttttgagaactcactgtcaggctatgtacgtgcctagcgagaaagttttataccacatttcatgtgtcatgccacatacacacccttcctcacctcttcaccactgatggagaattcagtctctccttaagcctactttcataaaatgcaatgagaatgtttggatatctgtacaaatttctgagcttggttgtccaacacacagcccttaaccattatgaaaaacatcctaattgcagattaaaaaggtaaaaaaccatatggcattattttaggccagtgggttttaagtaattttttagcggtggaatccattttcaaatgagatctaacatgaaggcatcaaaaactcaggtgatttttattttcttctttgtgtcttttatatttttcatgttttctaatatgaacacgtattgattttataataagaagagaatgtttttaaaattacatggctgtttagggaaactgaattgtttcatgacaacaaggttcagggactagtacagattgaaacagatggcttccctcggtgtagtaccccccgttgaccttttcacaactagggattactaaagcacagagtgactatggctttttcactgtgaaattatatgacagcagaaacctaactgacaaacagatgtttttcccaagtggagcttttcttaatgaaatcgttgcttggaaaccagaccataataataacttctctatatttagtttgtaaagtgattcagtttgcaaaattattaagtcagagtatactaattagataaaattgaatgtatctattatttgtcttgcaattcagcaaccaaatggttaagctaggagcagaatttcatccgggatatatctgtccagatgccattcataacaggggacatacaaggaaaatgacagctcatagagcaacgctgctctgctcctcactgtgactgcattggcacagtggtgtttgatctttcactcatacttattagaagctgttacttgcagcacttatta

SEQ ID NO: 18399 - DNA, 1018 bp, Homo sapiens
acagctccgtctacctgaagcaatcttcctcttgtctgcccctatgagaatccttaccattcttcaagattaggtttaagtgctccctcctccatgaaatcttccccaagaagaatagatatcacccatcctgttgctctcatcctgcttagtacctctaacttcctagaagtaaggacaaaatctccatcatctctcaatctccagtgccgtatggcttcccttgcatatagtatgtatacattcaatgttttcattgaattggttagatggaaagatatttcttaaactgcagtttggaaattaaattctgatatattttcaggactatgtgtattctctaaaataatgtttaaaatattgtgttttcattttaataataattctgaatcaccaggatccacgttataatcaagttgcattgcacaattttaatgcccatatgtgtgtttgagaaacattggagtaaaacattattcagaatgtgtgtaaagttctgattacagtggagtgctggctgtaagtaatcattcgatttttggaaaatataattcgttttagctagcagtaccttaatgtgcaggataagatattctttagttacttcttcttggtagaaaatgaagagagcagttaggaatggttttgtctgtgttcacatgtgtgtctcaaaaagaaaagggggggcaggaggagaaagaagagagcccccctacattaataatagagttttaaaagaatggtgtaagaatttggcagagtggaattctttttcttacttgatttttctcagtttcacttttatgacctgttttagtgaattaggggaatgattgagcccttgaaattagcaggtcctctgactccaaaagtttagtgtgttctttttttttttttttggaaaaagggtcttgctgtgtcacgcagactggagtgcagtggcacaatcatagcttactgcagtcctcgaacatctgggctcaagtcctcctcccacctcagcctccctagtagctgg

SEQ ID NO: 18400 - DNA, 1040 bp, Homo sapiens
attgtcctggatggctgactgcagatgggtttggtggagtctggcgcataagtcactaacagcccgtagcaagcaggaggctatttcagctgatctcagcaaggcttgtcataactagctcctctctcagtcataccttcaaggtggcacagggattcaagaattggccttgaccggggtgcagtagttcatgcctggaatcccagcactttgggaagccgaggcaggcgaatcacttgagtccaggagtttgagaccagcctgggcaacatggcaaaactccatctctacaaaaactacacaaattagctatgcgtagtggtacacgcctgtagtcccagctactccggaggccgaggtgggaggagtgccagagcctgggaggtgaaggctgcagtgagctgagatcatgccactgcattccagcctgggtgacacagtgagactttgtctcacagaaaaaaaaaagaaaaagaagaaggctgggcatggtggtgcatgcctatagtcccagctactagggaggctgaggtgggaggattgcttgagccctggaagcagaggttgctgtgagctgagatcgtgctactgcactccagcctgggcaacagagtgagagtccatctcaaaaaaaaaaaaaaaaaaaaagaattgcccttgaagggaaagcccttttccaggcaggatgcttctgcctggacatcccagctgtgggattaatgcacaaatgcccaactgtgagagccagccttacactgagagctgaggtggaagcatgacccgctcagcaaagagaggcaggacagaggtgacaaaggcagacaccaacatggttctaggccagggagccttggtcttccaaacgtggaagcaggggcccaaagctaaacgtagaggggagcaaacataatgcctaagaccctctgctcggtccatggccttgggctggcttccataatttagccatcagaccaaataaattttacttccctgtgtcaagagggactcagacctatctctaacttgtttctctggtttca

SEQ ID NO: 18401 - DNA, 1044 bp, Homo sapiens
cttttctactctttaattctcctgggtcaacaggtacttagttacccagggatggtaagggaactatagccagagagatcttcctgagatgcaaatctgctaagtctggtcccgactaataatttttcagtggtttcttgtggtctatcagatgaaggtcagactcctttgcatgacatacaaggccctttgtaatctggacccacctgccttctatgactttctgtcccatgcttgccttcttatgccctgagaagctcatggcagccccagaataatctgccatcctgattcctgcctccacatcttggtcacatcttggtccatactgtttcttatgcctcgaatgccttccttcccccagctatccatctgatgagtttgtattaatcctgtaggactccgctacatgttatactttttatgaaaaggcttttttttctttaagtttaattaaagtgtaatagagatgaggtttcaccatgttgcccaggttgctcttgaactcctgggctcaagtgatccgcccatctcagcctcccagagttctaggactacaggtgtgagccactgcccccagcctccattcacttttatattcccaaaagctagcactttgccctgtttatgagtgaatgaaatcatttctgtaagaggcctggccagcctgggcaacatagcgaggcctcatctctactaaaataaaaaatgtagcttagtatagtggtgcatgcctgtagtcccagctactttggaaactgaggcaagaagatcacatgagcccgggagttgaaggctacggtgaattatcattgtgccactgcactccaccccaggcaacagagaagactctgtctcttaaaaaaaaaaagaaaaagaaaaaaaaaagaggcatggaacattgctcttaaattccttcgtacccacctttgcaataaatgactttttagatcttgatctttaaccgggaattctaagccaggcatggtggctcacacctgtaatcccagcactttgggaggccgaggcgggaggatcacaagg

SEQ ID NO: 18402 - DNA, 1032 bp, Homo sapiens
aggcgacagagtgagactctgtctcaaaaacaaaaaagtcatcttcccattatatttatatttatttatttagctgtcaaaattttagcatatgtatttcctttagttcatcccctctgggcagaggtttttgccataatgcttgctcccagccaaggaggaaactgcatttatcttatcttttcatcttcctacagaatgcatttccggccgggcgcgcggtggctcacgcctgtaatcccagcactttgggaggccgaggcgggcggatcacaaggtcaggaaatcgagacaatcctggctaagacggtgaaaccccatctctactaaaaatacaaaaaattagccgggcatggtggtgggcgcctatagtcccagctagtcaggaggctgaggcaggataatggcgtgaacccaggaggcggaggttgcagcgagccgagatcgctccactggcactccagccttggcgacagagcgagactccatctcaaaaaagaaaaaaaaagaatgcatttcggtagcctgtgactttctctatcttcagactcatacttcacatacatatgtttaagaacaaatttttaaaaatatttgtggggaaaagatgcaattttaatttgtgggtcaaaacttattctgaccgcctgccttctggaaaataaaatcattgtggataattcagaaaattccaagaagtgcaataagttatgtccaaatcactttgcctgtacctgaggcttagacttttcataggcaaagtctataaaaaagtgacctctccttttgaaaccatggtatctctcttgcagtctcctagccagtgtttttgcctaccatcctgcatccttattattagattgttagtttcctggggagcatcttattattattagattgtaagagttacctggggagcataaaaggaaatttaattttaatttttatttatttattttttttgagacggagtctcacactgtcacccaggctggagtgcagtggcgtgatctcggctcactgcaacctctg

SEQ ID NO: 18403 - DNA, 1075 bp, Homo sapiens
ttaccctggctggaatgcagtggtgcaatcacggctcagtatagcctcaaccacccaggctcaagtgatcttccctcctcagcttcccaagtagctgggaccacaaatgcgtgacaccatgcccgactaattctattatttcttgtagacaaagggtcttgctgtgttgctcaggctggcctcaaactcctgggctcaagcaatcctctcacctttacctcccgaagtgccgggatcataggtatgagctactgtgcctggcctacaaaaaaaattttttttttattagctgaggctgggcacggtggctcatgcctgttatcccagcactttgggaggccaagacgggtggatcacctgaggtcaggcattcgagaccatcctggccaacatggtgaaaccccatctctactaaaaatacaaaaaattagccaggcgtgttggcgggtgcctgtaatcccagctactcaggaggctgaggcaggagaatcgcttgaacctggagacctgggaggtgaaggttgcagtgagccaagattgcgccactgaactccagcctaggcaacaagagcaaaactccatctcaaaaaaaaaaaaaaaaaaacgctgggcgccgtggcacacgcctataatcccagcactttgggaggccaaggcgggcggatcatgaggtcaggagttggagaccagcctgggcaacatggtgaaaccctgtctctactggccgggcacagtggctcatgcctctaatcccagcactttgggaggccgaggcgggcggatcacttgaagttgggagttcaagaccagcctgaccaacatggagaaaccctgtctctactaaaaatacaaaattagctgggtgtggtggcacatgactgtaatcccagctactcgggaggctgaggcaggagaattgcttgaacccaggaggcggaggttgtggtgagccaagattgcaccactgcactccagcctggacaacaagagtgaaactctgtctcaaaaaaaaaaaaaaaaaaagaaaataaaccccatctctactaaaaatacaaaaattagccaggcatggtgg

SEQ ID NO: 18404 - DNA, 1033 bp, Homo sapiens
cccaagaaagggatcttggatctcgcgcaagaaagaattcagggcgagtccacattgcaaagtaaaagcaagtttattaagaaaataaagtagtgggccaggcacggtggctcatgcctgtaatcccagcactttgggaggccgaggcgggcagatcacatgaggtcaggagttcaagaccagcctgaccaacattgcaaaaccctgtctgtactaaaaaaaaaaaaaaaaaaaagctaggtgtggcatgtgcctgtaatcccagctactcaggaggctgaggcaggagaatcacttgaacccaggaagcggaggttgcagtgagccgagatcgtgccactgcactccagcctcggcgatagagcgagactccttctcaaaaaaaaagaaaaagaaaagaaaagaaagtagtgaaagaatagctactccatagacagagtagggcattcctgaaagtaagaggaggaacacgtccaccctaggtacaatgcttatatatataggatagaaaaagatcttggggccaggcgcagtggctcacgcctgtaatcccagcactttgggaggccgaagcggggggatcacctgaggtcagaagtttaagaccagcctggccaacatggtgaaaccccgtccctaataaaaatacaaaaattagccaggcatggaagtgcttgtctgtaatcccagctacttgagaggctgaggcaggagaatcacttgaacctgggaggcagaggttgcagtgagccaagatcacaccactacactccagcccgggtgacagagggagactccatctcaaaaaaaaaaaaaacaaaaaaacacacacaaaagatcttggggagatgtgctctgctacaagggtttgtgataaatgattaattttcttaattgctatagtttgcaagaatcaatattattattattattattattattattattattattattttctgagacggaatttcgctctggttgcccatgctggaatgtaatggggtggtcttggctcactgcaacctctgtc

SEQ ID NO: 18405 - DNA, 1056 bp, Homo sapiens
cctcacagcagctagagggtaacaggcacttcctacacagcaggcccggctggaacaggccctgctggaagctcctttatttttattttttattttgaggcaaagtcttactctgtcacccaggctggagtgcagtggtatgatctcggctcactgcaacctccgcctcccgggttcaagggattctcgtgccttagcctcttgagtagctgggattacaggcatgtgccaccacgcttggctaatttttgtgtttctagtagagacgggtttcaccatgttggtcaggctggtggaactttagtgtagatttcttcttccaccctggcctctcttggctgtcctctaaacacatgtcccccattcctacacctggtcttgtacttaagctatccttcctacctaaaatgttcttccctttctacatagcagctcaggttccccatgaaactgcccagcctgttccagctcacagagacctttcctgaaatcctcaaactcctcatgttggattctctcatcaatatttaattataaactgccttgtacagtttatacttgtactcttttttttttttatgagacggggtctcgccctgtcgcccaggctcgagtgcagtggcacgatctcggctcactgcaacctccgcctcccgggttcaaacgattctcctgcttcagcctcccaagtagctgggattacaggcgcaagctgccacacctggctaattttttgtatctttagcggagacagggtttcaccatgttggccaggctggtcttaaactcctgacctcgtgatccacctgcctcggcctcccaaagggttggaattacaggcatgagccactgtgcccggcctatacttgtactctcaagcacatttgtcttcaaaatgggtaacgttctagatggcagggaccagcccgagatctccaggtgccaaagcagtgttctctactcagagcagggcttcagcgtttgttaaatgagtgttgtaagtgcagcgtgaatcttctactactgagccaaataggaaggcttatttatcctctg

SEQ ID NO: 18406 - DNA, 1030 bp, Homo sapiens
tatgtttatctttttctggcttcctaggcccaggacctcctcagtcatggagggagttaggagagcttagcaggctgttttgactgcagttcacctggggtcgtgggaccttgtgaaactttcctggggacccaaatgcttagggaaaagcccttgagccctggcacaggctcaagccacagtgactttgtcatctattcccttcaagcacaggatctcacccccaccccaccctgccatctccctttcctggccatctgggttctggtggatcagcaaacaggctcacacacctgagctgtctctttacagccctgggatcactgcataaggttgccctgggccagagccagtgagcgcttgctggatctcagcctgtcttctaaccgcctgctgcggaggtatctctccctcctaggcagaactctgcccgagccagtggggaaacccaggcagcacgagagctcttctttccctaaccttgctcagttagaaagacatccaagacatccctggactgaaggaagcaaagcagcatataaagaatgggctagggcaggggcagggaggagcagtgagaccagcagaacagcagcagtgctgggagtcttggcctgtaagtggaggaggctctgctagtctggcctgaggcttcctgggcccttcccaggcatggaccaggatgtaaggatatgcctggtggggaggtgggaagaagcacatatgagggactcagcctggtgctgatgctgttctgattcccccttagccttctactgcttatctgtggccaccctgtcttccaacatagagaaagctgggtggggttgtggtgtcagaggcagcctcctttcctgcaggaatcttactcagcaactttaatacaaggatcttaggcttctacagaacagggttttggtttatctgtggatctctttgttgctctcctaacagtgaccacagagtaaatcaggtctgtaaaccagttctcctggccaatgctcactggatttgtgtaccacttcactaa

SEQ ID NO: 18407 - DNA, 1031 bp, Homo sapiens
aaaatgccttgatagctacgaaaacttttgggttgggtgcagtggctcacgcctataatcccaggactttgggaggccaaggctcactgcagcctccgcctcccaggctcaaacaatcctcccccgtcagcctccgtagtagctgggactataagtgtgtgccaccacacccggctactttttatattttttgtagagacagtgtctcactctgtcgtccaggctggaatgcagttcaaaccttttctgctgaaaatgttttgccgaactagtcctagtaaaagaaacaaatttaactgtataaaagtaattagaatttgagctgaaaaaatgaaaatgtcattaggcatgatctgatagcacaaaaccccacactagttatttatggggaagttgtttttaccatgttgcctgtgaccactcagtaccggtacctgatgaatttgtggtaatgttgagaagttatggtgtttctgcagtttttcccaggtcatgagtctcgggctacagaagctttgtgctgggcagaaggacagcgactctttagtgctgggctcaatggcgagattatggagtatgatttacaggcgttaaacatcaagtatgctatggatgcctttggaggacctatttggagcatggctgccagccccagtggctctcaacttttggttagtaagcaactattggtaattcaaaccaaaatttctctcgtgcctgctcagactttcttccctgtgctcataggagagtaacgatatattatggcatgtggcaaccccaactataagattggaattgatagtgaagattttaaaaatccccagcattctttttgctactagtctggaccttgttgattcatttatgaaatgagaggattacatcagttcaacatttcccaaactgtgttctgtggaatttggagatgtagaggtttttttgttttggtttgttttgtgttttatggtaaatttcatttcacaaatacagcatatttaatcctgctgtaaattcacaatgcacatcgg

SEQ ID NO: 18408 - DNA, 1035 bp, Homo sapiens
cctttttgacttattaaggaaatgtttgagtcctctcatttgcagtggattaaaatcgaggccacacaaactccacctgtgtccctggctatggactagagcttcagggaattagtgatgtatcagaggatagaagcaaaagaagtactcactgctttctcttcatatacccctcaaaaattgtgagcttactcagtgagcttgtatttttctgatttcccactgatagagattccatttttccaaggagtaactttttagaagaaaaatgtacaaatactctttctttcataagaaaaatctcagggaagtttcttgtttcaggcaagaatggggatactcttccactctctaaaaatgcagatcatttactgcacctaaagacaaaggtaaggaagtttgtttaggctctgaattctagagcctgaattctaggctcataattcccattctgaattttgaggttacttagtttgcatcataaattgtataaattctaaaactatttgaatgaaggactgtgtcaccaggactgggtttcctgtgattataagtaggacgttgaggatttattagatggatgtatacaggaaataggtttctcttcttttgatattattatgaaaataatgtgcttttatttatttatttatttatttatttatttatttatttttgagacggagtttcactcttgttgcccaagctggagtgcaatggcaccacctcagctcaccgaaacctccgcctcctgggttcaagcgattctcctgctttagccccccaagtagctgggattacatgcatgcgccaccacgcccggctaattttttgtatttttagtagagatggggttggtcaggctggtcttgaactcccgacctcaggtgatccgcccgccttggcctcccaaagtgctgggattataggcgtgagccaccgcgcccagccatgtgcatatttttaaaaactcaaatagtacaaaagggtatacaatgaaaaaaaaatcattttgtgagtttttaaaaactacat

SEQ ID NO: 18409 - DNA, 1023 bp, Homo sapiens
ttatagaatttgtaggtgatagaggcaagattagttactcagatttatcaaactacacagcctttgatattaaccattataatagactgcctctctggtggatcagtttgggttaagaagctagcaagtctaaagacaggatttattgttatgattggcttaattttcaggaaaattgtgctttggattctgtgttgttgcatctatctggaggttatccagttaatgtctctcagtcttttcctcatttttttttttcatgctggacctaaagctgtatgtaattaatcaactcatattgaataactacactctgttagacactctgagagaaatagaatatgtaagccccaaagattttacttttaagaagtacccaaaatgggtttgtaaatactaataaactgcacataagtgaatccaaagtatttcatacattataagtggtagacaaatgctgagagaacttggaataagtgagcaagtagtaggaatgtattttgggtcaagtgagagaagggtgggacatggaataggtgtgggtggtgggaaggatggagggcatgtttagaggggaaaggcatgtctagagagcaaagactggaacaagcagtgatgttcaaacttcagcaaacagatttgatgaaatagcccattttcaaggctctgtacccctttttaaaaatagtttaaatattttattagtaatataactgacttctgaaatatcttgtaataattgtattcattatctgcaaactgttttgtaatgtaaaaattaatttttcttttgtaattattctagccaaacttttttgttactgcttttacttttgatatattactatgttattttacttttggaaaacaccagttttaacaaagtagcattctccaaagtatattcatctttacaagtaaatctttgcccaaatgaaacaaaatctgttttactgaacactaaatgtctttgatttgcctcattttgctgtaattgttggccagtaaaagtatttacattgt

SEQ ID NO: 18410 - DNA, 1047 bp, Homo sapiens
tgtcctcggcctcacaaaatacagggattaacagacaggagccactgcacccagcccattatgtatataagataatacttcttggaaggaggttctaattattttgttaattcattcagtaaacacttactgagctcctgctctttaccatgtactctgtcaatttctgaaatccatgaaaatgtcaagttctgctgaattaggtaataatggtaatacctgaaatttgtatggctttcacaatttttaaaattatttttcacaagttaattcacttaatcttcataataattccctaaggataggtattatgattttatatataaagaaattgaaatcaggctgggcatggtggctcacgcctataatcccagtactttgggaggccacggtgggaggattgcatgagatcaggagttcaagaccagtctgggcaacgtgatgaaatcccacctctacaattaaaaaaaaaaaaaaattagctgagcatggtgtgcacctatagtttcagctactcaggaggctgagatgggaagatcgcttatacatgggaagtcacagctgcattgagctgtgattgcaccattgtactccagccccatgggtgacagagtgagaccctgccccccccccaaaaaaaaatagaagtaatggaattaaaccacttacatggatgtaagctctgaagggatggacatatgggaagcacaatctcttctaaaaagtaataaccttcttttgaaaaatagtattcttctctggtgccatttatctacttttagtttggctggggttgctgtgccacttttctaaccatgctcttcccctgtcattgctgcaaagcccatgagtgggaaggagagtgtggctatgactgtccaggctccttagtacttccaatggctcaaaaacgaccatttgcttctggagtgggaagcctactgacttaaatattgatccctgatcattttttttttaaagtctggatatctgacatagaaaaagtgagttatttctgagtgaaaagactgtggcctgaatctttac

SEQ ID NO: 18411 - DNA, 1060 bp, Homo sapiens
aatatttgtcatggaattttggaattaaatgtagatagttctaaaatgacagtattctttgatgttttcaaagcattgatggttccattttcttttcttcttcttctttttttttttttcttgagatggagtatcactttgttgcccaggctggagtgcagtggcacgatctcggctcactgcaagctctgcctcccaggttcacgccattctcctgcctcagcctcacgagtagctgggattacaggcgcctgccaccacacccggctaatgttttgtatttttagtagagacggggtttcactgtgttagccaggatggtcttgatctcctgacctcgtgatccacctgcctcggcctcccaaagtgctgggattacaggcatgagtcactgtgcctggcctgttacaaacaattttttaaaatctcaaatcataagaggtctgaaggtagactcttttaggactgatgcagcactctatgataatcatgtttgttctgttattcataataaggttgtttatctcatgattgcaactccagacatcttatccaaagctgccttgaggcataaattcaaagcaggaagaaggggaaagggaaagatactggttgggtctgtcctctttatcaagaaaagctttcccagatgccccttacagattttagcttacatcttgttggccataactagtggaatggttaccagtaactgcaaggggcattggagaagtgagtatttaactttatggtgaagatagataggagagagaggaggattgggagtgggtattggattagccatccaagtgtctaatacatacttgttaagtttgcagtacctgtaagacatcaggtctggttcaggaacttttcattgtttagccataaataccatattatgaaccatggaactacagttgattgatattaggaaagattaaataacctaaggaaaattagatcaggaccatcaagggccatcatggaagagctggggaatagggagatgttaatttaatggctggatcactggagatgtcaactcaaagaacattct

SEQ ID NO: 18412 - DNA, 1048 bp, Homo sapiens
agctcaagcagtcctcccacgtcagtgtcctgagttgctgggactacaagcatatgccaccacatcaggctaatttttaaattgttttgtaaagacggggtctcgctatgttgcccaagctggtcttgaacttgtgggctcaagcaatccttctgccttggcctcacaaaatgctgggattacaggtgtgagccatggtgcatggccctaaggttatgtttttatgttactgcaggagcaaactgctcattcagaagccatttgtttaagcttataattgtttactaaggagaattttgcttttatggcaggtttgttttaataagaaatttagctgaattaacccctcagcagataagattatacatatagagtctatgtgacaaccttcagtatatggagagagtgaccatttcccaaatattcacaagcacatagtggggctgaccaagggccttttattcaaacagttgcaagaatccttaatctagagcaattagcaacaacatttaactgaattgtgttactcatgccagaaatatttctgagaatttcactaggacagacaaattaggactgtaaaagtatatctgtatttgtgcagaatctctcataattcatctaatcaatattgactgtacatcttctgtgcattagtgattccagctatgaactgtttctcaatgcactgacaatttttgaccaatgtataaaatttatttgtgctacacctttgtatgcgtattgttacagtgatgccatatagagtggggttcaccttgctttaagaggttagaagcaactataattaatttcaagccactgtcacagaaatattgggtgtaactggaaaaagacatgaattttgccttatgaatgtgcaaaataatgtattcaaggcctaatggctctacacaaaccgcaacacagttctgaagggtgactaggaaaaaagtttaaaaaactatgaataaactctgtagaagtgatgtgttgtaattattgttgacttttatagtgtcttgagttttaatcccttcagtgtccc

SEQ ID NO: 18413 - DNA, 1050 bp, Homo sapiens
ggtcaggagatcgagaccatcctggttaacatggtgaaaccccatctctactaaaaatacaaaaaattagccgggcgtggtggcgggcgcctgtagtcccagctactcgggaggctgaggcaggagaatggcgtgaacccaggaggcggagcttgcattgagccaagattgtgccactgcactccagcctgggcgacagagcaagactctgtctcaaaaacaaaaacaaaaacaaaaaagctgtttaactgtcagtgggaaataactcactatctattctcatcttttttcagcccagtggtcccggtatctacttgtgtttaatcaggcttagttttattttataacagatttattttccattctcccagttattaataactaggatctgagacatcaggattttcagaactcagactgtgtcaaaggaggaatgtctgagagattgtcctaggaattgtatgatgtgtaaagactttcagaaggtgaacattctgtgcctcgagaaggatgaactgattcctatctgtagtgctaagtaggtcagtaggaggagtgaaggaaatttctggtcaaggttttgcagctgaacttttagcatgtgcttaaaagatgttatactggttacagtgccaaagcaactagatggaaataaatagtccctctagaaaatagtcagcctgatatacgatctgaaataaggacatcattgcctcccccacccagtttggtgggatgagggtgattctgaatcttctgctagaatgagggtggggcagtcactggccactggatgtggagaatgctgacaggctttcaggcataccacgcagagtaaagctgcatgctttactctcacttccagaggtaactggtaccaccgcttccccggcctcttagggattctccaacatggattggctgggatttggctctttccacttttcttaaatcagctaagtcatttaactcctctctttactagcttccaaaattttgttgtagtcactcctctcctgttcttggatttgtaagattatgctttttaaa

SEQ ID NO: 18414 - DNA, 1035 bp, Homo sapiens
gagccagactccgtcttaaaaaaaaaaaaaagaaagaaagaaaaattttttgttggggctgggcacgatggttcatacctataatcccaatactttgggaggctgaggcgggtggatcacctgaggtcaggaatttcagaccagcctgaccaacatggtgaatcccccactctactaaagatacaaaaactagccaggcttggtggcacttccctgtaatcccagctggggaggctgaggcaggagaatcgcttaaaccaggaggtggaggttgcagtgagctgagaccgcgccattgcactccagcccgggcaacaagaggtaaactctgtctcaaaaaaaaaaaaaaattggttggggtggggggcgacgcagtggctcacgcctgtaatcccagcactttgggaagctgaggcgggcggatcatgaggtcaggagttcgagaccagcctggccaacatagtgaaaccccgtctctactaaaagtacaaaaactagccatgcgtggtggccggcgcctgtagtcccagctactcgggaggctgaggcaggagaatcgcttgaaaccagaaagcagaggttgcagtgagccaagatcgggccactgcactccagcctgggtgaaagagcgaaactccgtctcaaaaaaaaaagttttgtagagatgggttctcactttgttgcctaggctggtctcaaactcctggcttcaagtgatttccccgcctcagcctccccaaagtgttgggattacaggcatgagtcactgtacttggcctaattttttttaaattgtaaaatacacataacatgaaatttcttaatcatttttaagtgtacaggtcagaagtgttaagtatattcatatttttgtacaaccaatgtccagaaatttttcttcttgcaaaactaaaatactctactcattgaaaaactccccatttcacccttccttcagctcctggcacttaccattctgctttctgtgagtttgctctagatacttcatgaaagtaggctcatatgttatttctt

SEQ ID NO: 18415 - DNA, 1057 bp, Homo sapiens
gtttctttatgcaaataaaaagaaaatatgaggcagggtgtggtggctcatacctgtaaaaccagcactttgggaggctgaggtgggagaatcgctcaagaccaggagcttgagaccaacctgggcaatatggcaaaaccccatctctacaaaaaatgtaaaaatacaaaaaaatgagctgggtgtggtggcatgcacctgtgtcctttcacacatgcactgtccagatcctttggctcgtatgtccaggtagaccagataaggatatcaacattatctgcatatattcagttcttaagtttctgacagtaaatagtaaagctttggttagtaagggatttatccaaaggttcacatcagttcctaagtttggatagtgagagttcagagggtaggggatatttcttttttgttgctttttttttttggaaatggagtctcgctgtgtcagccaggctggagtgcggtggcgcgatcttggctcactgcaagctcggcctcccgggttgttgatactaatttttatgtgactgattttaccgtttaactggttatattggtttttggttttttgtttgttttgtttaatttccatgttcatagtgttgttttttttaattggcaaataattatgtatatttatgggatacggtataatgttttgatacgtgtatacattgtggaatgctcaaatcaggctaattaacatatccatcacctcaaatatttatcattcttgtggtaaaaacatttaaaattttttattttaatgtattttgaaatatacaattttttttttgaaatgaggtctcactctgtcgcccaggctggagtggagtggtgcgatctcagctcactgcaacctctgcctcccaagttcaagcgattcccctgcctcagcctcccgagtagctgggattacaggcacatgccaccacacccagctaatttttgtattttagtagagatggggcttcaccatgttggccaggctggtgttgaactcttgacctcaggtcatccacccgcctcagcctcccaaagtgctgggatccgg

SEQ ID NO: 18416 - DNA, 1072 bp, Homo sapiens
ccgcctcagcctcccaaagtgctgggattatgggcgtgagccaccgtgcctggccttagattttaaatcctctactatttagttcttcctaccaggcatggtgaaacccagtacaccaccagttgtctcctaattggggatgtgaaacctcacaccagtattatgacatggaataaccttactccatagtgcacttttgcctgtggctttaagttcctaagagtttccatagctctggcacattctttacctaccttaaatttattttgcatcttcgtttattaagttgtctgtatatggtagtgaggtagtgatgcttagtgtcctttctccacagaccatggacctgcactcttgtccgaagccgattgtatttgtgttgcacacgtttttatcggccaaagtcactcgtatgggactgcttgtatgagcaacaaaaaatcagaaaagagccttgactgtcacaagaaatatttccacctcaaaaaaaaaaaagcacaaaaagaaactctttgctctccttcagcacagtgccttcccaaggacctgcaaataactgctgaaccataaccgtgtttaaagaagagcctacctttcacagtctaccttggccagatattctagcactctaaaaggctccaaaatgaagctgttgatttattctcatttcaaaatatggtttatgagtaattaggtttatttctactgctaaaaagaatggctcattgttttctttttttttcattgttttcatttttagacataatcaaatacccaagcattgttttctttttcttctccctgtaggatttgtgttgtgcttagccttgatctcttgttcagaacaattgtcccttcccaggtgctagcttgcagcagcctgttgcttcctgagcattccagataggtcgtatgtcttggaatttactgtcctcactagctccttccaccataggaagtccttgaattgtatcaccaaagggttgttccatttgccctggatctccctctatctcagcctggccatcacttcccaccttatcccaagctttgccactgtctctaggactta

SEQ ID NO: 18417 - DNA, 1041 bp, Homo sapiens
gatgtggtgggttccagtgtgtggaatggaaaggaaactgcagaatagtgtctgctccccattcagagggactgcttcctgtgccccccagacccggggcttcgacagcttctccacattccacacagatgcctaggagcagcgagttggtatatgaaaagtctcccaccttttctcctaaaacttctctcctttctctccataaaaagaaaaggaaaggaacaaaagaaaaacattcagtttttctttttctgaaaaaggtaagtcctttcctgaagtcatcaaatgaaacattatctggaaattagtttctaatgttgtatatgaagaaatacttaaatataagttcctgcagtatttattagatagttgtaactgtaaactcacctccctagtagataagagtttcaggttaaatactggaacatatataggcagtcaaaaatactactttaaatgtcattcacctattttaaagccatgttttagcactttttaggccaaagaaggtctgatagtgcctgtttttatgttctgtactctcacaaactttgttactcaaaattattgcatggcaggagagattggattatttatttcttatatttttataagtaaaaaaatctttctaaacaacaaatacctaacattattactgattgttttcctaatttatcctcctaagttgaatggtaacaaagcttttccagctgaatgaatgcacttagctgataaaccagaatttgttcttttttttccttcttttttttttgagacaggttctcactctgtcaccgaggttggagtgcagtggtatgatcatagctgactgcagcctcaaccttctgggctcaaatgatcctttcacctcagcctcctgagtagctgggaccacaggtgtgtgccaccacacctggctaatttttatggatttttttttcttttttttttttcgccatgttgcccaggctggtcttgaactcttggcactcaagcagtccttctgcctcagcctcccaaagtgctgggattacagatgtg

SEQ ID NO: 18418 - DNA, 1029 bp, Homo sapiens
tgctaatgattgtatactattaaaaccagcacataagtattgtaaatgtgtgttcctcctaggttggaagaaatgtctttccttctatctgggtcctgttaaagcgggtgtcagttgtgtcttttcacctcgatttgtgaattaatagaattggggggagaggaaatgatgatgtcaattaagtttcaggtttggcatgatcatcattctcgatgatattctcactttgtcgcaaatctgcccttatcgtaagaacaagtttcagaattttccctccactatacgactccagtattatgtttacaatccattggatgagtgcagcattataagaccttggtgcccagaaaaatctgtcctttttggtaccaaacctgaggtcttttggaagataatgtagaaaaccactacctattgaaggcctgttttggctaatctgtgcaaactctgatgatacctgcttatgtggattcttttccacactgctttcatttttaagtataaagacttagaaaactagaataatgcttttacaaataattaaaagtatgtgatgttctgggttttttccttctttttagaaccctgtatttaaacaagccttctttttaagtcttgtttgaaatttaagtctcagatcttctggataccaaatcaaaaacccaacgcgtaaaacagggcagtatttgtgttcctaattttaaaaagctttatgtatactctataaatatagatgcataaacaacacttccccttgagtagcacatcaacatacagcattgtacattacaatgaaaatgtgtaacttaagggtattatatatataaatacatatatacctttgtaacctttatactgtaaataaaaaagttgctttagtcacgtgggttgttttttttttccaatttttaaaatgctgaaatagttttgaacctacaggaaagttacaaaaacaatacaaatcttcttcacccaaaccttccagttgttaacattttgccatatttattccattaccttgtctttctc

SEQ ID NO: 18419 - DNA, 1057 bp, Homo sapiens
aggatgatccttgtagagttgagaaaataactttttctatttttttctttttctttcttgctctgttttttcttttcatttctctttctctttcttcctgacacagtttcactctgtcgcccaggctagagtgcagtggtgcgatctcactgcagcctccactttccagtttccagtgattcttgtgcctcagtagctgggattacaggcatgtgccaccacacctggctgatttttttgtgtgtttttagtagagacagtgtttcactgtgttggccaggctggtctcgaactcctggcctcaagtgatccacctgccttggcctcccaaagtgctgggattacaagcgtgagccactgcaccgggcaacttcctgcatttctgttcaggagatagacagtttgaggaaaacatgagtctctctgtttcccttaaaattatttcagaaaattattcacagatccagcagctagcttgtctgcatggatagaaatagtaacgtttttatgtctcttggattttaattctcttatagtataaagtttggataaagcctggtgcagagcagtccttcctgtatgggaaccatgtgttgaaatctggtctgggtcgaatcactgaaaatacttctcagtaccagggcgtggtggtgtactccatggcagacatccctttggtgagtagagatggtagctgttacagaactcaagtactcttattcaagaagggtatgtcttcaatctgagtgcttgagagaataaattctcagcacgttttgaatcccagaaagaccagaactgtattttttccgtctttgttatttccagccctcaatatgggcatattgaatgacttcagtgagttagtgtctcttcttttgaatcccagggttttggggtggcagccaaatctacacaagactgcagaaaagtagaccccatggcgattgtggtatttcatcaagcagacattggggaatatgtgcggcatgaagagacgttgacttaaaacgaagccattccaaggacagacggctgtatggaaaggccgagcttt

SEQ ID NO: 18420 - DNA, 1031 bp, Homo sapiens
ttaaacatttttaagtgtacaattcaattgttttaaatattgaatattgaatattgttgtgaatcagatctctagaacttttacatcttacaaaaatgagactatactcattaaacaaattccctttttttccttccccagtgcctggcaatcacattctactttgtgtttctatgaatttactttacatactgcctatatttttgagatttagccataagatgtcactgtagtaagtgaacacacttgtataaccaccatctggttcttcctcatccccagaggtacccactgtattaccataacagcatagattcattttgcctgtgtttgaactttttataaatggaaatttcacagtatatattcttttgtgtctggtttcttcagttcaacatgttgcattctcatgtgttgtgtatgtggcagtggttcgttctttttcattgcagattaggattccattgtatgattatatctcattttgtacatactctgctgtagatgtttgggctgtttccagtttgggactgtaatgaataatgctgctatggccgtgtgtgttgcgtgtgtgtgtgtgtgtgtgtgtgtaaatacatatatctattacacatttctctttagtatatattaggggatctcatttgatttttttttttttaaagagatagtgtctcactatgttgtccaggatggtcatgaactcccaggctcaagcgatccttccaccttggcctcccaaactgctgggattacaggcctgcgccgccgtgcctggccttcatttgattttttaatggaaatttttattgagataattgtagattcatatgtagttgtaagaaatgatagagatcctttgtactcttctctcatttgtaacattttgcaagactttagtatggtatcacaaccaggatattgacattaatcagtccacagatattattctgatttcccagttttacttctctcttttttttttttttttttgagatggagtcttgctctgttgcccaggctggagtgca

SEQ ID NO: 18421 - DNA, 1047 bp, Homo sapiens
cataggaaagtgatgctgcctcccttccattttcctcctccttgctgcttgcttcccattcctcattgagccgaaattactgaataggtttgacacagcaattaaagttggcctagacacaagaattctattaactcaagagattgcttgcttaacagtgtctgccatctgttgccctgcaatccagagtgtttgtgtaaattaactcttccatgttgctagactgctactctgaactattgaattgtttctgaaaggggaatgaaatggttcttaaaacactttgtaacaactgttggttgtttgtcctctcctcctaacacatgtactatccattcttgaatccttaaaaaaaaaaaattaaatagttcaaaacagtattctgtaaaaagtttcttcctgtctcaagctctcagtgtcttagttccccttccctggaggtaaccagccatcattttttgttgttgcttactcttaataacttgtgttattatggtaaaatttgaacgaagcgtggccttgatttgtatattgaacatgtccagaaaataccactttcagaggtcaacatctgattcaaaggatataggagccataacacatttctgcacagcaactatgagagcatcttttatattaaaacaatagaaaaaatatgtttgcaattacaatgtctagaagtctacagattgcttcttgttgctgtttttctttcttggtagtacagttaggaccattcttaggaatgtagaacaatgttccccaaattctgttcttgtatcacctcagttggaatcccttggtatgtacatgaatatatataggaaatgtttatttcttgggcttctactcctactgctttggaatctctggagatagggtttaggaatttgcaatttaagtaatctaggtgataagtaggtagctaagcccaaactttttgctgaatgatatgcccatcttttcatttgaaaacttaggaaaatttaattctcttctgtggtaagcattgtctgccttctataggccaaaggattagagatttct

SEQ ID NO: 18422 - DNA, 1079 bp, Homo sapiens
agtgatttataaagaaaaagaggtttaattggctccgattctgcaggatgtacaagtagcatggtgctagcatctgctcggcttctggtgaggcctcagggagcttttactcatggaggaaggtaaagtgggagcaggcatgtcacatagcaagagggagcaagagagagaaggaggaggtgccaggctctttaaacaaccagagcttgcatgaattcagagcgaggactcactcattaccaggaagaaggagcctagccgttcatgagggatccacccccatgacccaaacacctcccaccaggcctcacttccaactttggagattcaatttctcttacttttttgagacaagtgtctcactctgttgcccaggctggagtgcagtggtgggatcatacctcaactgcagccttgaactcctgggcttaagtgattctccctcctcagcctcccaagaagctgagactacaggcacaggccaccgcacctggctaatattttaatttttttttttaatagaggtgggtcttgctatgttgcccaggctggtcttgaactcttttggcttcaagcaatcctcctgcctcggtctcccaaagtgctgggattacaggtgtgagccgccatgcctggtctgaggattatatttcaacctaagatttggagggaacaaacattcaaacgatatcagactccaacgatgaagaacctgttggtagaagtttcaaacctttgactcatcatctcctttttcagacttttctctcttccatactctcaacatttgagcagtactgagttcttctgattctacttctatgttttacaaatacgattccttctttacattttgtttcctgctctactctttcaggcctcattggctcctggctggtttctctttctaggctctcagccgccagtttatgctagctctggtcaggtcatttcttcttaaaaaatcttcaatggtcctcagtgccttcaggataaagaacaaaatccttggcataatgtttaagatctttcacctctgcccttttcttacctttcaagtttcttacttcttcctccat

SEQ ID NO: 18423 - DNA, 1062 bp, Homo sapiens
tgacagtgagaccctgtgtcaaaaaaaaaatttttttttttacctgtactgaacatgtacagacttctttttcttgttgttattccctaagtgatgcagtgtaacagctatttatgtagcacttacattgtattaggtataagtaatctagagatgatttaaagtatataggaggatgtgcataggttatatgcaaatacaaaaccattttatattagggacttgagcatctggaaattttgcgggaagtcctgcaacccatctccaacagataccaagggacgactgtactccgatatatagtttctatagttaagcataaaggtgaaaacagaatatgagtttttggtcccttacaagtgagtactatcttgtgcttaactatgtatcataaatactaattttgagtaaaattcagatgtgcccatagtcatatatatactgtattctgatagctagtttgagatattaggcattaaaatgcttttattagcaattcaatagaacacttaaaatttgttggtagaagactgattacataactcaaattatttgtttgaattaaagttttcattacagtcatctaagtcaataaaactcgtgtttaagtgtgtcttatgacagtgaccataagccaaacacagacttaagccaacaaatagctatcctttacaatggagttgtgaatttgttaatgtttttcttttctccagtttataagtagcaacttgttggattgtcattctgaaacactgaaacaaagattttacttgaaaaaaaatactatggtaaaatggaatgaataataaattaattttcccaaatgtcaatattcaacttataaacaccttgataattgacatttgtaagaactttagaaacactataaaagttgcatctgaataagtttttttttttttttgagacggagtctggctctgtcacccaggctggagtgcagtggcgtaatctcggctcactgcaagctcctcctcccaggctcaagtgattctcctgcttcagcctcccaagtagctgggactacaggcctgcaccactaca

SEQ ID NO: 18424 - DNA, 1035 bp, Homo sapiens
ctgtcctcctgctctcctgtgaataccctccagtctacttggtttcttactccccactttgggcagccctactaggtagatagcctcctatcttgctcatcctgctaggattttgaatcctacctaaaactgccctttgcttctgctccctcaaccccgatagatgtcttccctaccccatttgaactccaacaccccatgccaggctgcctatctacggaaatgccctctttagtcagtcttctactttcccaccgtaggcaacccttctacacagatgccctccttattcagctcaggctccaaggcctcacatgccctcctcaccctgcttggattgtaactccccgtgctgggctccccctctcttgcccagtgaacacactatttatacctgccgggtaacctctgataaccaaccttaggcaatccttctatgtggacatcctcattactacttaggttatgataccctctgttggttgccccttgcatggataccctcctcacccttctctggctctggcattttatcctgggctctccctgctcactccacagagatccttctcattctattcatgcttttactccttgggctaggctgtccatccatatggagatttgcgttctgtttgggttcccacctcccaccctaggcagaccccctgtgcatcagccttctttcttgcgtggatgctgtcctcatcccacctcttgggcactaacatcccaacctgagccatcctcccctgcacagatattcatatattcttcaccctgcttaggctctgacaccacacactaggctgtcctatatagatactttcttcatgttgctcagactctgcatctagaatatctcttgcccctctcatccactcatttatgtcctcctcaccctgcttaagctctgaaatcccttcccaggcctccccctattctctataggtatccttccccctcccctctaggcttctgataccctcctttgagccctcttattcctcttggactccatctgagtccaaagtt

SEQ ID NO: 18425 - DNA, 2073 bp, Homo sapiens
tttacattaattttgtgggattgtttgtgaataatacagttctcctcatgagagaaaagacatactcattttgtgcatattagattgttgactgaatctcttttaaaaattgttttctcctctctttcccctccccacagaatctgtctatgatcttctcccaaaggagttacagttacctccatctagagaaacatctgtagcatcaatgagtcagacaagcggtggtgaggcaggctcgcctcctccagctgttgttgctgctggtatgcatttcattttactttattaaagaaaactagggccaatataaatctggccaacatgaacagtgctggcaaaattcatactaaaaagagtgtgatttgagggttttaaaaagaggcattaaaatatgtacttttaaccttaaactttttcaatattattttcttaatgtaattcttatttcttaaaattttacattgtctcatctataaatgccatttcctaaaatggaccttgtcttcaaatatgggaaccagcttaaagttgtttggttgactgtgcttaaaaaggttaaataccaagctgtgaatagaaaattatatttgagtttctgtttaataattaattttaaagacttgcaccaagggaaaatattttatatgatctgaaaaatgactgaagcactcaagtgtcttttatattcatagcatgttactgaaacctttttattatatttaaaaatatatgtgacttcgtagttttcaatttattgaaagtaatggaggacgtcaatataatatttatataaagacattttcttatattgatgaaaaggtatagaaagtaatgtttgaaatttattagacttatttttactcagctctcaaatcatacacttaatgatatacaattggctcaaatttttattttacataaaaataaaagatagacaagctaatagaaaaaagtgttatcagtgacaaattagtatcagtccttcctgtaatgttagtttacccacctaatattggatttatagactgctaagtgtgtttgttttaaaaaaaggaaacatatatatatatatatatatatatatatatatatatatatatatatatatatatatatattttgaagttttatctgtcctaattagaggtttcttgcctaatatgacacctctcatctttaaaaatgatatttaaagtttatcagagcattgttttcagtaaattattttagtttcaaaatgagaacagtaaagtgtaaggttgtggtttaaatgaggatattggtactatagtataacttcagatatatttctcatatgcattaacctatgtaccattaaccttatgtaccaatctttctcaggctgcatagtgcattgctgaagccttcctggttgaaggcaggaaaactttaaatatggcaaagaaactgatcagccctgttcactgttcatgtgttgccagacactttctaacagtttctgtggatttaattgtgaattagtgaactttttagtaatcaaattgataagatgacctggtttgctttatatccactgggttctaaaatggctctgatgatatttttctggaattttaagttttaaatctggttttaaaattgcatccaataataaaatatgacaaagataaaatattttttatgagatacttcactttaaatccacaagtagaaattgactaactgatttcttttgtatcttttgagattgttttttaaagatacgttgaatctatatagaactaaaagtctgtttcttctgtgctttttaacatctgttgacggtagatccagttccttttaaaagctgaaaaaattgttaggtttagaaaaagaacagttcttccttttagataataccaaattgaattttagaaattcttatatatataaaaatatattaaaagttcttgaatttgggtccctaatgaaatattaaccttctccccaccacagtatatttaagaaaaatctctcaagataaattacattgaaagctgtgagttgaaaaatcatgaaaataagaaatctaattaaaagaagtatttt

SEQ ID NO: 18426 - DNA, 1026 bp, Homo sapiens
tatataaattttggaatttatatgtggaatgcatacatggaatttttaaatcttattttgactgaagtacaatgttaaaggttatagtgacattagctattctttcctgttagtctcagtttattgcgctcaatcttcctcccttcctcctaccactcacatacgttcattttcttttctgtcaaacatactttgttttatttttgcatcatatagtaaacttttttacaaaacctttttaaagatactttgctcatgtatcttcctttaggcaatattttattttgccagcaagctgaatagttgtttttactattattgccagttctgtttcttcctttgtcttaatggctttttttttttatcaaaaaactctttttgatactttctccatgttgtgctttgatttctcagaacattggaaaaccaaaaaggaactggagtaaagaagagccctatgttgtgtggacaatatcctgttaaaagtgagggaaaggagctgaagatagttgtacaacctgagacacagcaccgagctcggtacctgactgagggcagccgtggctcagtgaaagatagaacacagcaaggctttcctacagtaaaggtatttactttatttatcatttgaattttagttaaaatgtaaaggggaatgagaatatgtcctgaaaagtaaaatattttcaaatcatgaattttcttccctcatatttgatatttgaattagattcatcccaaactttagaaagaattttttttttttttttttgagacagagtctcactctgtcacccaggctggagtgcagtggtgtgatctcagctcactgcagcctctgcctccggggtgcaagtaatcatgcctcagccacctgagtagctgggactacaggtgtgtgccaccaggcccagctaatttttgtattttagtagtgtcgcagtttcaccatgttggcgagactggtctggaactcctgatctcaagtgatcctcccgccttggaggaagaaatattaaagtgaat

SEQ ID NO: 18427 - DNA, 1044 bp, Homo sapiens
ttttctattcaagtagctttagtagaataaaaatttggtatatgtgctctcatttgatgatgatgatgatgccactaacagttttgtgagttttcccattagttatggtggtaggtcctgagcaacccaaatgctgcctgaagtactgtgcattcattctcatctgcttgtacaaataaattataaatgataatttatcatctaacatctaaatttataatttaagtatagttattacagaattaaaactatgacttacttcaggaatttagccaactcttttatgaaaatgttttatctctatttttcttgaagatttaaatttttttaaatgtaattcagttacaagtataggatttggtcttaaatatttgattttataattagattatttgaaatactaattagtgtttctgttgcatgttttctggtttcagctggaaggccataatgaacctgtagtgttgcaagtgtttgtgggcaacgactctggacgagtgaaaccacatggattttatcaggcctgcagagtaactggacgaaatacaactccttgcaaagaagtggacattgaaggcactactgttatagaagtcggccttgatcctagcaacaacatgacactggcgtaagtacttagtaagaatttttcattatacattacactcttgtgttaggcagaattgttcagtttctaatgtatagaagattttttgcgtattttattaaaatgttttaaatattatgaataaaaaaagacattacttcagaatggtaatgggttaaaattaactcttttaccatttgctaaagaattcccatggttgggccaggcgcagtggctcatgcctataatcccagtgcttttggagtctgaggctggtggatcacctgaggtcaggagttagagaccagcctggccaacatggtgaaaccctgtctctactgaaagtacaaaaattagctgggtgtggtggcacgtgcctgtaatcccagctacttgggaggctgaggcaggagaatcacttgaacccaggaggcgga

SEQ ID NO: 18428 - DNA, 1032 bp, Homo sapiens
attaagaaaatgtggcacatatacaccatggaatactatgcagccataaaaaatgatgagttcatgtcctttgtagggacatggatgaaactggaaatcatcactctcagtaaactatcgcaagaacaaaaaaccaaacactgcatattctcactcataggtgggaattgaacaatgagaacacatggacacaggaaggggaacatcacactctggggacggttgtggggtggggggaggggggagggatagcactgggagatatacctaatgctagatgacgagttagtgggtgcagcacaccagcatggcacatgtatacatatgtaactaacctgcacattgtgcacatgtaccctaaaacttaaaagtataataataatacatttaaaaaaaaaactttacaagaatagtaaattttaagtaacaaaactgtataatatgtgggatctcttttgcataattgtataatgtcaagattcaatatacttcttttctgacttgtactgtataacttgtgaataaagcaggtcatttttgcagaaactaaaaaaaaaaaaaaaagaaagtaaccgactagttctttctgtaatgtaaatacgaatatgtagaagataaatatattctaaaccttggggcctcatttggctgtcttatgcctttaacaaataaatttaaaaaatgagatatgggaaaaagttttatcagtaatcagtgaagtggaatttccacacagtatttgaaaatggagggaaaggttatatgctttacgtttcattttggtaatacaatatattaatgtaattttaacaagatataccatatgtttctggaatgtttttaaaaacaagtatctatttcctgttactccaaaaagttacctttgaataaactgatttagttaattcttcatttaaaagggtatatcattgtcagtgtatgaccaataaccctttccattctgttcacacatttaccctataggttctagacaatacttattttttgtttttttgttttttgtttgtttct

SEQ ID NO: 18429 - DNA, 1050 bp, Homo sapiens
actttcagcagattttgagacagtcttgctccgttgcccagcctgcagtacagtagagcgatctcagctcattgcaaccacctcctcctggattcaagcaattcttgtgcctcagcctcccaagtagctgggatttacaggcatgtgccaccatgccctgctaatttttgtatttttagtagagacagagtttcaccatgttggccaggctggtctcgaactgctggcctcaagtgagccacctgcctcggcctcccaaagtgctgggattgcaggcatgagccaccacacttggcctttcagcagcatattgactgacaacaacaacaaaaatttatgaagggagcgatccaacttatagaccatgtgccattttaaaagcttctttatagccaagatttcttctcgatatcaaattaagaaatttaacagctatgctttctgaagactgtttccatagagcttccaagtggtagtaaacttttaaatcaggatttggctatgtgctcaactcagaagactgtcattagcaatagcagtaggtaccactgagtgccactgcggactcaagtagacaaaaaagaagaaagaaaagcaatcaagggggaaaggtagatatagtgaagtggtagaatcttgctatatgttgcctctaggtataaatctagaactaactactcctgaaaatggaggtagtaggaggtgggaaataatttttcattttgcttgggaaatttggtttgtaaacctaaaatagcccttatttctggggaaaaaaaaaaagatgtttaaagtccagtctaaaagagaattgtgtccatgtgtcaacttgtcatattcaagttttctaattaatttagttttcttttaatttagaaaagcaaaatttattaatcactgggtggtattttctaatgagaagcttgaacttagtttaagaaagaagtgctctgacaatctcatagtccttaagaagttctgagactatattgtcagatagctaaatgctaagaggagagtgtagtttgtaattgagtagctttatcctcc

SEQ ID NO: 18430 - DNA, 1061 bp, Homo sapiens
agcactttgggaggctgaggtaggcggatcacctgaggtcaggagtttgagaccagcctggccaacatggtgaaacgccgtctctactaaaaatacaaaaattagtcaggcatgatggcaggcgcctgtcatcccagctactagggaggctgaggcaggagaattgctggaacctgggaggcagaggttgcagtgagccgagatcacaccactgcactccagcctgggtaacagagcaagactgcttcaaaaaaaaattttttttaattaaaaaaaaagtagatgactgcagcaaagaagagatttattagctcttcctttcaaggtatctgtgtactgtatataaacaacaaaagctgaccaagagtggtacttgtgctaggcatattagtaactgctttgtaattgaaagcaagaaatatcataaacaagcattagatggctaactaccaaacaagttaagtcccttagggcaggtagattcagtcttttccttctctgagcaattcccttctgccataaactacagagaggtgattaatagaacattggagagttgaatgatacctagccaaactgtaccctaaaactttagccctaaaaagaggaattaaattgtgtagatgcctttaaagaacatttttctagcatctttctacatctttccctaagtggcctcttgagcccagtcggattttggttatatgccatgatagtaatcataagaatcagttaaaaatgatccaaaaatgcacgaatacagtcgattccctctcatttattccttgtggaaaaagaaaaacacaaatcttaaaaactaaagcaagtcagggaagcctggaaagatacccagatttgataacatgttagaaggaaatccaggctaaggaatctcattttctagctttgatctggttgtcagttgggatggacttgcccaagtgatggcccacagaaaggccaaatttcttgtttttctcctcatcctgtacctcttttttcattaagaatcctgcctggaagtttaggtcaaagaggctgcttggagcaaaatacagtgg

SEQ ID NO: 18431 - DNA, 1048 bp, Homo sapiens
tcaggatttgggggccagtggccagggaaaccagccttgtagttagagggttggcacttttagtcccacacccagcctctgggacagggagagggactgaaagttgacttgatctgcagtggcagtgacttaattgatcatgcctgcgtaatgaagcttccataaaaaccctgaaggactgggtttggggagcttctggatggctgcacacgtggaggttcttggaggatggcaccctcagagagggcttggaggctctgtgccccttctcacatgcctcgccctacgtctcttcatttgtatccttcataatatcctttataataaatcagtaaatgcaaataaagtgtttccttgagtcctgtgagttgctctagcaaatttatcaatcctaagaacctcgatttatagccggttggtcagaagcacgggtaaaacaacctggagcttgcaattgatgtcgcaagtcaggggcagtcttggggaactaaacctgtgggatctgatgctatttccaggtggatagtgtaggaactgaattagaggacacccagctggtgtctgccagctgcagaattgattgcttacttggtatgtggggctcccacacatctggtgtcagaagtattctgtggggctgggcgtggtggctcacacctgtaatcccagcactttgggaggcagaggtaggaggatcgcttgagcccaggagtttgagatcaacccgggcagcatagtgaaatcctgtctctattaaaaaaaaaaaaaaaaggtagtattctgtgttgtgagagtatagcaggaagaaactgagtttgctttttcctctccatcctctcagtaagtaacttgctctggatcactcaaaggcaaatgagtggttcagcttattagcctccagaagattgacaggtctgaaaggttgttgctgaggtagggtgataaaagtgatcaggtgcttcaggtattgcaggagctgccactagcttaatctgatgtgtagttgttttctcctgtcaaaagttctgtaataattattatttttctt

SEQ ID NO: 18432 - DNA, 1047 bp, Homo sapiens
ctgacctcctccctgaagtttgggagctgcctgaaggacttgagtgaactgactagcccaccctgagccttggggaagaggaggagctgcaggtggggagtcccagggctgccgtctcagctgcctggcgcccctgtgccacccactgtatccttgtgctggaacatccggtggtagctgagcctggccttcctgtctgtgtgaaggagacagcaaagtgatggccgtgagccatagtatagagaaccataggcagctctgcgagcatttttctcttagaaaactcagtggcttgtggaggagggcagtgtttacaaatggggatgggggactggcttttaggaaccagctgattcccaggtgccatggcagagctactagcagctttgttctgccagatgcctgtgttattgagatcatggtttcccgcagctacctctgcttttcctataaaaactattggtgaattgattttctttggtgatggtccttgagtcactcttggacatttcaatagagctatatttcccctacatttatttttaggtaccattacttgttgtccttatctctaggaaccttatgttctagcagacaaggcaggtgccagccgtgtcttcaaaagccaggcgtctctaaccttggactgccttggaagtgtttcatggtggtgtctctcagtgcccaaacctgttcctaagatccatctctgaagggcagttgtattttagggatttctgcccactccagtgctgagggcttgatgtccatctctcccctttctgctgtgatggtggttcacctttacctcacaggcagcctgtactttatataacgtctgccccaagggtacagaacagtgtcacctttgccgtggggagcaggcagaagctcccctcttcagcagcgcaggaccagaggggggtcgagggtgtgaatgaggacatcttcatccctcgggctgctgctgtgagaattctgaggaccagttccaagatggtggtggtggggagctctgcctcctggaagagtttccacagacttgcg

SEQ ID NO: 18433 - DNA, 1047 bp, Homo sapiens
ctcccaaagtgctgggattgtaggcttaagcctttaggaggtttttaatgggttttggccacatccatcagaggaatcatgatctaaggcagttatagccttataaaatgtatttggtttttttggggcatgttttttggggttttttttttttttcgttttttgtttttgagatgcagtctcactctgttgcctaggctggaatgccgtggcatgatcttggctcactataacctacacctcccgggttcaagtgattcttgtgcctcagcctccaaagtagctgggattacaggcatctgctaccacatccggctaatttttgtattttagtagagacagggtgtcatcatgttgggcaggctggtctcaaactcctgacctcaagtgattcacttaccttggcctcccaaagtgctgagattataggcgtgagccactgtgcccagccataaaatgtatttcttaaatagtaagacttgaaaggcaagatgactccttgatccatgggctacagcatggatgttgtgttagcgggcatgaaaacaacattaatctccttgtaaatctccatcagagctcttgggtaaccaggtgcattatccatgagcagtaatatgttgaaaggaatcttttttcctgaacagtaggtctcaacagtgggcttaaaatattcagtaaaccatgctgcagacagatgtgctgtgatccaggctttgttgctccatttataaaacacaagcagagtagatttagcataattgataagggccctaggattttcagaatgttaagtgaacattggcttcaacttaaaatcaccagcaacattagctgctaagaagagagacaacctgtcctttgaagctttgaaggcatgaacttctctttatctatgaatgtccaagatagcatcttcttgcaatagaaggctctttcgtcaacattgaaaagctgttgtttcgtgtggccaaccccgtcaatgatcttagctagatcttctggatagcttgctgcagcttcttcctcagcattttcttcacttgg

SEQ ID NO: 18434 - DNA, 1028 bp, Homo sapiens
aaaaaataaaactaaaaattagccaggcatggtagcatgagcctgtagtcccagctgcttgagaggctgaggcaaggggattgcttgagcctgggaggtcaaggctgcagtgagccataattgtgccactgcactccagcctgggtgacagagcaagaccctatcttaaaaacaaaaaacaaaaaacaatggattgaaatattttaaaacatatttgaatccagtgcctcataaagattcttaaacaaaatgaaacctcattgttcatttttagaggatgcaaggaaatcaactcattctgaagactggtaaacaaagggaaagaagcaagcatttctcctgccttttctttacaaactgaacctccaggaagccaaatagttgatatggggaggtttctctttacagaagtattgtagctaataaatgaagaaggtgtggtagaattagaatattactattttgcaggcttcagtgaattatttaattatttaagcctatttctgaactttcttattaattgacacttgcctattcatacatcagtaccacattgttttaattgctgtagctttgtagtatgttttaatactttagaaactccccctacacacacacaccactcttttacaaactcctcctacacacacacacacacacacacacacacacacacacacattcttcttctttagaatgttcatggctattcttgtgtatttagttttcctaataaattttagaataaattcatctagctctgaaaaaagtcatagtgttttttttaaaattgagtaaaatgtatagctgtgcataaagtgaattgccatctgttgtgttttactggcttgcctgagatagaataggaatataaatatcaagccttgcatttctgttagggaaacattaattgcacaagatttagtcatttattaaacaactaatttagcctgtgtaccaggcaatattttatatacttcagagaaaacaagcaaataaatcatagccaatttctagcatcaggctct

SEQ ID NO: 18435 - DNA, 1090 bp, Homo sapiens
gacacagtggagactgaaggtcttgtgggggtggagggctgctgagggaccccggggagcccccagctcctggccccagccttcatcagaggtaaaaccccgatggacattagtgcaggatgaagttggcttggggtgcagccccgaggggcccccctccctgcatccactcagtgcttgtgagtcctatcctgcaggcacctccctgctccgtttacagatgagctcagggagtctcgggagatcaggggactgcaccaagtcacccaggggtggtgattgccaggcccacttgtttaagaagagggagggggctgggcacggtggctcacacctgtaatcccagcactctgggaggctgacacaagcagatcacctaaggtcagcagtttgagaccagcaatggccaacagtgaaaccccgtctctactaaaaatacaaaaattagccaggcgtggtgtcacatggctgtaatcccagctgcttgggaggctgaggcaggagaattgcttgaacctgggaggcggaggttgcagtaagccgggatttctccactgcactccagcctgggcgacagggtgagactgtctcaaaaaaaaaaaaaaaaaaaagaagagggagggggcggggtcagctgtgcgtggtggggagcatatgaggccgggctcctgggggcaggagactagggcagagaggcgtggctgtagggctttttgcatcacaggagggcagcatggccgggtgggagcagtggagcctttctgacaatggccagggcccaaacacagaaccagtctgcaacgcgtgggcactgctcacatgaccagatgggagaaagacagcaggagcgggtcccattgcctgggcagggccgaaggatgcccacgacaggatttggagatggaggctcagtcgtgagaggagctgggctcctcctggagggacatcagacaacaccagtgcttcctccagcaggactcctcatccagtgctctctttgccacctgacctggcacccggtggatgctcagagatggcaggggagttgaatctttgaggcctggcccagcagtcaaaggcctcccacaga

SEQ ID NO: 18436 - DNA, 1074 bp, Homo sapiens
tcctggctaacatggtgaaaccccgtctctcctaaaaattaaaaaaaaaaattagccaggcatggtggtgggtgcctgtagtcccagctactcaggaggctgaggcaggagaatggcatcaacccaggaggcagagcttgcagtgagctgagatcgcaccactgcactccagcctgggcgacagagcgagactccatctcaaaaaaaataaataagatgtcaaagaggctgtgacctgaggagattacctgtatttgggggagaggtggcaggaaccatgccaggagggaacagcatgcacagaacctggagccgaatagaacactcacgcctcacctgatatgtttgacgaattacaggttgttcagtctggtttggtcagagtgtgaggaaaggagaaatgagaccacagataagaaccagagtgtgaaggatcttgcacttgatatgaaaagagttttgcctttttcctgagggcatcagaaagtcattaaggtgggtgtggtggttcacgcctataatcccagcactttgggaggccaaggccagtggatcacctgaggtcaggagttcaagaccagcctaatcaacatggtgaaaccctgtctgtactaaaaatacaaaaagtaactgggcgtggtggcgcgtgcttgtagttccagctgttcaggaggccgaggcaggagaattgcttgaacctgggatgcagaggttgcagtgagccgagatcacaccgctgcactcccagctgggcgacagagtgagactctgtctcaaaaaaaaaaaaaaaattgctgaggaaaagcagcaaaaagggagggaaacgttgcaggtacatgaaagagagatagcagttgatggagctagggtcaagagaagagaggaggaagtgggatccagggcccttgggggagattaactttccagtggataaaagaaggaaggaagagatggttgcagatgcaagtgggtctataggaagggtttcagggaatgagatgagccaggttatctgcttagaatgagggaagaaaggaggtgaaattgaaggttgagagaggaatagctgggctc

SEQ ID NO: 18437 - DNA, 1047 bp, Homo sapiens
tggcccacagtctccatattggcactagaagactggcctggcggaggaatttgcgttggcttgctttcaggggttagctacaagattcagctttatatctctgttgcttcttggccagtgtagtcaataagggtcttctttaacatctaagatagaggtttggttggccgggcgtggtcgcttactcctgtaatcccagcactttgggaggcccagtgaggtgggagaattgcttgaacccaggaggcagaggttgcagtgagctgagattgcaccactgcactccagcctgggtaacagagtgagactcttgtctcaaaaaaaaaaaaaaaaaaatctaagatagaggtttggtcaacagtgcttaataataaataagaacctcctgccattctaattttcctgctgcaccccatcccccacacacccctcacgaacattgatataagcagtattaacacagtataaagaatgttcaccttgcatatgtcatttcaggcacatggattcaggagaagcacagttgagtggaagaaatggtagacttgtgaggcttgccccaggccttgtgtacacgcaataagtggtgagccatgggtctctccgtcagcgcctccctccccgccaccacttcaggccaacaatttaaggtgctgagttgtaaggctcctccattgtcagtacagggctcgcctttgtagccctgatcactaccagtacacttttcaagacaactgagtatttttgtatgcctttgccttccctttgtccatgaaacatgaagagttgtttatggttcttgacttctctgagcagagtgtctgcatctcttggagagttacacatttcttcatgagccatttttctcattcttagatgcacctgtttttatcctttgcagaccatcttctgccttcttattttcctgtctgtcaaagacagaaattacaggagatagggagggttttttagcatctctttcaaaagatgtatgtcagaatttcctttgcacaccaagaactggagcttagagccccactattctct

SEQ ID NO: 18438 - DNA, 1032 bp, Homo sapiens
gtctatgccatgggcttcaatcgaccctccaagatacaagagaacgcattacccatgatgcttgctgaaccgtgagtatgcagatgaagcgcatctcacccagtgtgattagatcaatcttccccaaactgcgtttttgtgcctgagaacagaaggagctgtttggggccacgtgtttcctcaggaatacagcttaggcaagtgcagagagaatcggatggagttagctacagtttctgcctttcccacttaacaatagaaacttatagagaaaggtagtgctttattccatgctatcttaaaaactgggcttaaggccgggcatggtggctcactcctgtaatcctagcactttgggaggccgaggcgggcggatcacctgaggtcaggagattgagtccagcctggccaacatggcaaaaccctgtctctactaaaaatacaaaattagctgggcacggtggcccaaacctgtaatcctagcactttgggaggccaaggtgggcggattgcctgagctcagtaattcgagaccagcctgggcaacatggtgaaaccccgtcttactaaaatcaaaaaaaaaaaaatatccaggcctgttggcatgtgcctgtagtcccagctactcaggaggctaaggcaggagaattgcttgaacccgggaggcagaggttgcagtgagccgagatggtgccactgtactctagcctggtgacagcaagaccctgtctcaaaaaaaaaaaaaaactaaactaaaaatacaacaattagcctggcatggtggcacgtacctgtggtcatgtagctgaggcaggagaattgcttgaaccccagaggcagaggttgcagtgagccgagacatgccactgcactctagcctgggaaacatagactctgtctcaaaaaaaaaaaaaaaaaaaaaactgggtttaaaaaatattattttgatgtgaatggtgttgcaataaattcaaaaacaaacaaaatattatttggaaatttttgagacctacacaaaggtgtaaagaacaa

SEQ ID NO: 18439 - DNA, 1122 bp, Homo sapiens
cctgtgtggcggacgtcctgggctgcatggcagagggccgtgggggcttgcggagcgggccagctgccaaccctgagtggatgcggcccttctcatacctggagtgtggagacctggcagcgggcgtggaggcgcttgcccaggagagggacaagtggctaagcaggtgtgtactaatggaggtcagatcccttggataagccccttgctgtctgggaagtggaccctgatggaggaaacccagagagaggtggggctcccttgggtaccccgggacagtcaggtccccaaagccaggcaatctgcccccagcttggggctgcatgccaccatccctcccccttctcttggcaggccagccttgctggtgcgagcggcccgccactatgagggggctggtcagatcctgatccgccaggctgtgatgtcagcccagcactttgtctccacagagcaggtggaactgccgggacctgggcagtgggtggtggctgagtgcccggcccgtgtggatttctctggtgagccccttgtggcaggtggggttgagggtagctgccccagagccaggctggcagcttctgtgaccagcttgagtcttgccacactgccatagggggctggagtgacacgccaccccttgcctatgagcttggcggggctgtgctgggcctggctgtgcgagtggacggccgccggcccatcggagccagggcacgccgcatcccggagcctgagctgtggctggcggtggggcctcggcaggatgagatgactgtgaagatagtgtgccggtgcctggctgacctgcgggactactgccagcctcatgccccaggtcaggcaccctgggacctctgcaggtggggctggccagctgggggctcggggcagaagctagagactgcaggccagtggggtctggcctgagggccagccagtctggctgaggagcctgaagggaaggaaggggctgggagtcaacctgcaaagatgacacgtgtccctgtctgggagcccagaggcccttttgtggcttggggatggggccagtactgctgctgggcttttgtcccaccggatgagtcccgcactgggctgggaagtccagggtgggtgggt

SEQ ID NO: 18440 - DNA, 1073 bp, Homo sapiens
acaggtggcaccaaagactacattgtagttggcagtgactctggtcgaattgttattttggaataccagccatctaagaatatgtttgagaagattcaccaagaaacctttggcaagagtggatgccgtcgcatcgttcctggccagttcttagctgtggatcccaaagggcgagccgttatgattagtaagtgatttactctacttgctgtatatgcctagtttaggataacaatgctgtgctcttggtggtgtgccagtgccaattaattacttatgtgggtttggcatcatgtttggatttactctaggtttaaagttgcatttcctttttaaaagagttgcattttcttttaaaacaatgggaaaaatcttaacacacctttctacttcccatctagttggaaatgggtgtttttcaatttctttttctttggcaaaaagactacaatgaaatgatcttatgttattagacagtgaatatcgttgctttcatcagcctgaagtgatgattcacattcatgtctcttctctgataaattcttgaagaaaatttttgtgtgtctgatcaggcctctagagggcagtcataaatcgttagatctatttcagagaataaggctaatgataattttatgaattactgtttttcagtatccttaaatgtaggactcattaaaaaattttgactagttagtgggatatttaagacctgtattaggaagaagggggccacaatgatgccattgtctttaaaaaaatttatttatttatttttaagagatgggggtctcagccgggcacggtggctatttatctttaaaagagatggggtctcagccaggtgcggtggctcacacctgtaatcccagcactttgggaggccaaggtgggaggatcacttgaggtcaggagtttgagaccagcctggccaacatggtgaaacccagtctctaccaaaaatacaaaaaattagctgggtgtggtggtgggtgcctgtaatcccagctacttggggcaggagaatcgcttgaacccgggaggcaaaggttgcagtgagccgagatagcgct

SEQ ID NO: 18441 - DNA, 1795 bp, Homo sapiens
acatatatgtattccgttttaaaacaagtttctcggctgggcatggtggctcacgcctataaccctagcactttaggaggctgaggcaggagcatcacttgatctcaggagtttgagaccatcctgggaaacaaggtgagatcttgtctcaatgaaaaagtaaatattaaaaaaaaaagtaaaacagatttctctagagtagaaaaagagtaaatgctactgtgccgctctctgagtctagtatgactacagtatcaaaactagggatggacagtaacaaaaaaaatttgcaggctagttcatacggttgtagataggaaaagctaacattccagcaaatcagattcagtgttttaaatgcacatagctaagtaacgtttttggaggagctaaaaaatggaaaatattttcatggttggaaatcagttcaccattggaaaatacacgttactaattgattatattaaaagactaaatgagtacagctacatttgtggtcatctgcatttcagcaggcttggggaaaactgatctagttctattttgaatcatttgcacttcaactgatgtctaaaataagatgttgtttggggaagatactggagaataaaaataaaggacagcacttacctttgttaatacgttaagcagatgaatttttgatcacacatctcattacttgtaacatattaccatacctttcatttacaagggctttttcattctttcaacacatttttattgagcctttgcagtcagtatgtgctaagtcagtctgctggatcttgggacttcagtggtgaaaaattagacgtggtgccgcctttgtgcaagattgagtctggtggtgaatacagataaataaccaaaacaattaccagaaactgtgccaaatgccatgacagcacagagaagaggttccctaaacagggaaaggaaacgaatgtgttacagaaagcttgctggagtctctaagctgagatctgagggctagttagaagttagctaggtgcagttggagtgggagaggaagtttcagttgtaggcaaagggaacagcatttacaaaagcctaaatacaagaaataacatggtccattcaaataattaaaagctcattatgatttaattattaagggactggggtaggagtaggggtggggtgaaagctactgaaggattctaagtagggaaataatctgataggttgacaaccttagaaagattaattgcttacattttggctaatgaaatggaggatattaagactgtaagaggggagactgatgaggacattaagagatactggtagctgctaaggaggtagaatcaatagggctttgggaggagagagaattgaaggattatactcaggtgtctggtttggtctgttgatggtagtattctctaaggtggagaatctaggaggtggagcagggttgggaaggaacttgagtttgtttatgaacatgctgttactttattttatttttattttatttatttacgttcttgagacagaatctcgcactgttgcccaggctagagcacagtggcacgatcttggctcactacaacctccacctcctgggtttaagcagttctcctgcctcagcctcccgagtagctgggattacaggcgcccaccaccatgcctggctaatttttgtagttttagtagagacgggatttcaccgtgttggccaggctggtctcgaactcctgacctcaggtgatctgcctttggtctcccaaagtgctgggattacaggcatgagccaccatgcccagcctga

SEQ ID NO: 18442 - DNA, 1050 bp, Homo sapiens
cgcctcctcagtagctgggactatagacacaagccaccatacccagctaatgaatgatatttttaaatgcatatgaaaatatgcatagaatcagaatagcaaaatattttttaaagttgtggaaaacagatgtgctttactgaggttttataaataataagatgatacacttaaaatgggtgtgttaattttttttaggagactggtgtgatggctgtataccctcagtactcacatgtgcgtctgtgttacagtagactccattgctctgcagagagagtaaagaattttcatttgaactgtccagtttgtcaaaactacaatacagatcattcacctcttttcacatattgatcagcagataattgtattggaaagcagctggatgtctgggatactagagaatcagagttgtgtttgaaaacagcactggagacattttttcctctaactttttctctgtgcagatagctgatctggccaatgaagatactccacagttgtatgtggcctgtggtaggggaccccgatcatctctgagagtcctaagacatggacttgaggtaaggttgcaatttctagataatctgcagggtttggagggaagcactgacaaagtagtttatgggtttactctgatgttgtcaaagacatagttaaggtgtctgtgaaaaagtatgttctttctccctgacttccccgaagtttatacttcagattttctttctttttgtctccaaaacagggtctcactgtgttgcccaggctggtgtgcaatgacatgatcttggctcactgcagccttgacctcttgagctcaagtgattattctgcctcagcctcccaaagtgttgcttacaggtgtaagccactgtgcccagcctgtgcttttttctattcctcaacttgttagcatgatagcccacatggtcactagtcatgacatggaggctaggaaatctatatggaacatttcactctctgtatacatctagtcttagttaaatcaactatatcaatgctatatatatttttgtatcttattaaatt

SEQ ID NO: 18443 - DNA, 1993 bp, Homo sapiens
atcccaaagtgctgggatttcaggtgtgagccactgggcccagccggtggtgactgatttctatgagtgcttatagaagggagaggtgactgccagccaaggggataagggaataattttgttaaaggaggtggcatttgaattggtccacatgggatttggccttatgggagctggggaaagaaaggggatgctaatttagatggcctgattgattcccagtggttactgctgttctgaggatgatcaaggcatattgtacttgaaggaaaggggtatggttttgcctgcagcaactgtaccctctcagacatcctgtaacttttgcttaagactgtcatggggattgccactaagaaccagcctgtttggttcttagattcttctttcactaggtggtttcatcctttaaatacagcatacgttgtgaaccctgcctttgagaccttattttttgatgtgattgtaagcaggtagctgagttgcatgctcactggatctgtggcttccctcttctcctgtcaggtgtcagaaatggctgtttctgagctacctggtaaccccaacgctgtctggacagtgcgtcgacacattgaaggtaagcagctttttcccaatagtcaaaatgaggatctaggtgccattgacatagaaggcttgaaaggctgcgttcataatacttctgtatcatttcatttagcaccatataccagaaactttctggcccaacactgtttttgaggctcttccgttcaggatgccttcacctaccatttctttttgtgcaggtgggaaagggggaacataggttggctgttatattttagtacataaaggtttcagaatcatagagctgtcaaatgtggtattgactttatattcataaaggtactggtttcatctgtaagaggtatgatatgagggaaagttgtgctttttcattcttcttcaactatattcttttaaattgttttgaaaccacagtgaaattgaaggtggtgttctaggaattaagagatttgggaaagcttgttagtcaatcttgctagtgcttaaggaaagcagagtggaattgagtggaattcgaattttagtgtgagtagaaaagcggggatggggaaggagaagggagtttgagctcctggatataaatggtcacctgatcctaaaactttgaaagtaataggagaatgcctagtagttactgcaatagcaggaaagtcttgtgacaattgaattgcagcctcatagaaagaaagctcagtctcattttcccttgattcacattggagctacgtttttctcttgttctctcaggaatgtgggatgggtgagtaacatcatccttgctagcagacaggtttttcaagaaaacagctgtaattctgcctgatatttagatattctgcctgtatgaaacagattgaaggagttgggagacatgtaggaggaaaacaacttactattagtagaatactcatttttgtggatttaattttcattgtaggcatttgaatcatatccaagttgagtagaaagggaaaattgtgaataggaaatgggtaggcttataagctgaagagataattattaggcacctggttttatgtgtagtatctacatagaagttggtccgtgttggtgttttactttggcttggtggcttgttgatattcatggcccttgaaagcattgcctagactgtttgaattagaaacacgttttaagataacctattgtgttctttctttttttcttttaactttttaaataaactttttattttaaaacagatttagggccaggtgcggtggctcatgcctgtaatcccagcatattgggaggccgaggtgggcggatcatctgaggtcagagtttgagaccagtctggccaacatggtgaaaccccatctctactaaaaatacaaaaattagctgggcgtggtggtgcaggcctgtaatcccagctacttaaggggctgaggcaggagaa

SEQ ID NO: 18444 - DNA, 1045 bp, Homo sapiens
gaacctgggaggcggaggttgcagtgagccgagattgcaccactgccctccagcctgggtgacagagcgagactccatgtcaaaaaaagaaaaagaaaagagatttaggtttacagaaaagttaactctcacttttatgaagaagacaggaagttataggggttgagtgtctcaagacacagtctaggtaatggggacagaatatcctggcttctgaatctcagttgaatgcccattttgattaactgcagtgagattctgtgggtcttggtggtttctttcaggataagtttagtttttgagtgcccaccatgtactcagtgattaagatagactctgcctcagagcacttgccatctaaaaaaagaagacaagtatacaaaagtgttgtgtgttgtgatgtggtgaaaggcacaggtacattgctgggaggggttaaaggagagggcatgtgtttgaaggtcagggcaggctctttagagggacagcatttgctaacttagtgataggccgtttgttgcattatggaacttgtagttgaacatttttctcctttattaaatgttagaagtcttggaaaggactatatcctgctaaattttactctttaggtactgtaatttgggagtcacctataaatacaggtcgggttctgttggttcactcactttccagatacccgaagttactattgagtgaacattccttctgcctgcacatgcagcagtcttccaggcaaatactaaccttggctggtacttggtgatgcacactaccaataccaagcctttttttctcttccacaggtggctggtgaaggtgctgatcaccacaggtgtgtacctaactgctagggtcgatgtggggtcttatagtttatccaaggagagggacctgcacaaaatattgaggctgccctgatggtgtctttcagagggtaactttgcagttggatgtcactgggcataatagtgctgcacaccatctgcctgtgcatcagatggtctgaggcaggagtctgcctctctacttcctcccacagaat

SEQ ID NO: 18445 - DNA, 1047 bp, Homo sapiens
agcgacaagtggtgattgccctgacaggaggagagctggtctatttcgagatggatcctgtatgttattttatcattcactgtgggacttattgtagggaccagagggaaagatgggcattgtagtctagtcatttagatgatagtatggtgaaatcctgtctctactaaaaatacaaaaattagctgggcgtgttggcatgcaccttgtagtcctagctactcaggaggctgaggcaggagaattgcttgaacccgggaggcagaggttgcggtgagctgagattgcaccactgcactccagcctggcgacagagcaagactccgtctcaaaaaaaaaaaaaaaaaaaaaaagcgagctggagtgacagtgttcacaaaccagtttggtcccttacagagatggggaaaaggggtaatttgatgtctaattctaggtagagttatgaaatcccctcttagcagtgaaacacttgctcctcctgcatttcactctctacttttccaacaaatatttggcatagatttaatttctgcagtctgaatccatttcagaaaacttctatatggaaggatgttcagtacacttaattctcttgctctcaggaggtctctagtgtggccaaatttgtagcctgcctgtacctttggttgagatttctctgtctttaaccatatttgaattcccttcacccagaatattcttgtaaaacacagacagttttatatgtctccatttcctgagaacaaagttggctcagaaaatttgtggcacattgaccttgtcaaaggtctgttcattctcttattgatggaagatactcattttgcttgctgtgagcctgttaacttcagtcttgagaactcaggtagataaattcttgtcatttactatagtaagaggagtgagaggaagcagaacaaaatacaacagccctccttcattctctggatccagggttttggggtgaattggagcatctagacccatccctctgtagttttgaccttgctgtgtctttcctcctgtagtcaggacagctgaatg

SEQ ID NO: 18446 - DNA, 1031 bp, Homo sapiens
tggaacctgagcatctggctcctgatgtctatctctgagatccactcctgatgtctatctctgagatcagctgggttagaacccagaatccatacctgctgcttctcttgtcattgcagtgtgtttcaggagtttcctgctgtggtttaaggatatgatctgagactacagaaatgtttctttggcttaagcctcaactcctttttttaagttaacaaccaagactgcataaatttgacttgctgcaggaccctaggtgacttttcaggaggtgtgctttgcttaattacctttgccattatcttctttgacaaaaggaggaaagcatgatcttcccgaagcttattctgaaattgggtgtaactaataactcagtactctcttagaactcactccccgggttttttctgtgcataaggaagtactttttcaatcctagaattagatttctctgggtatgtttttttcctaaaattgtcattttctgtgtttttatgatttttctctccctctcaggactgtttgcaacctctaagcatgcaggctctcccagcccagcctgagtccttgtgtatcgtggaaatgggtgggactgagaagcaggatgagctgggtgagaggggctcgattggcttcctatacctgaatattgggctacaggtaagagatccagaggcccacattgtggacattaggccttctgtacgtttcacacactcctttgtttgataacagggattttctctgcccatggtttcagatcctcaccttatgaaaagtgaacagtgtcactctgggttccacttttctcagctctttaattcgaacaaatcaggctgagaaagaaatattttgataaagagtcttcacatctgataaatgctgtttgatagctactctaagtcagaactggatgggttcctgaaggatcaactgtagttcccactattcactagtttcaaaagcagcaatgaatacctctcagttcataattggcttcattagcaataaaggacccctaaatgttccct

SEQ ID NO: 18447 - DNA, 1020 bp, Homo sapiens
tcttgatcatatgcttttcattttccttaatgattattgactcagacatctaagtaatctagcccaggtactttttgctttttaattttacttcctaatttagaaatctcaaacatagccagaagttagagagactaatacagtgaacttccatgtacccagtttttttgggagagggttgttgttatttttttagttttttttcttttgttggatttttatgggctgccacatgggttttcggtctatttttttcttttttagttttaacagctatcagcaacattctgctgttcttattttatcttttccctggactattttaaagcaaatccaagatctatcatttcatctataaatacttgataatgtagttccaacagatgtctgtttttgtaagatactagtattatcatgctcagcaaaatataacaatagttccttattaccatgttccagttttccctgttcttctttcccccaatgtggctttatagttggttgtgctcaggacctcagcatagcagtctacgctttttccatttccttcatctttctttttatgtctcttaaactgttctaccccattttgaagtattacaagatcagatcatttgtcttgtagaatttcccaccttctggacttaataaagtcattccttatgtgttcaagttcctgtatcctctgtatcaagctggtgggtagaattagaccatgccatccattagaaatgtaaggtgaactacaggtgtaatttaaattttctagtagccacgaacaggaaaaaagtaattttaatgttttttttttttctttaaaaaaaaatagagatagggtctcgctgtgttgctcagactggtcttgaactcctggcctcaagtggtcctcctacattggcctccaaaagtgctggtgggaatgcaggcatgaaccaccgtgcctggccagttttaatgttttattaactctgtatatctgaaatcattctaacatgtagttaatataaaaattgctgagct

SEQ ID NO: 18448 - DNA, 2122 bp, Homo sapiens
atgcccggctaattttttgtatttttaatagagatggggtttcaccgtgttagccagggtggtctcgatctcttgaccttgtgatccgcctgcctcagcctcccaaagtgctgggattacaggcgtgagccacccgcgcccggccaggccgtttgtttttatagtgtcccagggtttgcttcagtctgatgcgagtttacaaggttagcctgagcccagagctttagaactggactccacagactaggattgccaggattgatgggatgatccctcctggggcacacactgccatatggaatcaactctaggtttgccagagtttggcatgttttattccagccaaggaagctgggatcaggaatctgacctcacaaaccattctttatgtgtggcattctctcttgcactgcagacaacatgtggtctccttttggggtttaactatcgtgttgtagcagaaaaacctgtgattatcagaaagtgattagatatttcccgtgtgtttgtgtagtaaaaatgaatggcttgtctgttcgttgtgcttgtggaaactctagactagttgaaatcacttctcagtgacagattttttgtttcttctgccaggaccatgacttcttccagcatgtggaaatgcacctgcggtctgaacatccccctctctgtgggcgggaccacctcagctttcgctcctactacttccctgtgaaggtaggttgggggaatctgagctgaaaagggagatctgagaaaggagcagcacagggagtggattgatgggaatagtaccagggagggtgctcccctcagggcagaccacagccagagcaaaggcttcacctgcttctgccaatctgaactctgagtaccaagagtcaacttaagatagtgttcctggatctacaagtggggttcaagtatcgagtggagaataaaaagttttcccggtctgggcgtggtggcacacatttgtggtcccagccaatcgggaggctgagccccagattttgagagtgcagtgagctaagattatcccactgcactgcaacccggatgatagggtgagaccctgtctcaaaaactaaaaaataaaaacagctttccctacaagtgctgctttagcatgtgccattttctttgggcatctcaccattttttttctttctgctttctccatatcttagaatgtgattgatggagacctctgtgagcagttcaattccatggaacccaacaaacaaaagaacgtctctgaagaactggaccgaaccccacccgaagtgtccaagaaactcgaggatatccggacccgctacgccttctgagccctcctttcccggtggggcttgccagagactgtgtgttttgtttcccccaccaccatcactgccacctggcttctgccatgtggcaggagggtgactggataattaagactgcattatgaaagtcaacagctctttcccctcagctcttctcctggaatgactggcttcccctcaaattggcactgagatttgctacacttctccccacctggtacatgatacatgaccccaggttccagtgtagaacctgagtcccccattccccaaagccatccctgcattgatatgtcttgactctcctgtctacttttgcacacacccttaatttttaattggttttcttgtaaatacagttttgtacaatgttatctctgtgggaggaaggaggcaggctgtggtgggactgggtagggtatagtatcactcctgagttccactgctctagaatctaaccagaaatagaaacctagtttttaaggtgactggcatccatgtgtcttgttctggagatgaggatgtaggtgggaggtttgaacccaagttagagcaggaagaactgagtagactccttccttccagataccgacttggacttgcggcactctgtggctccccacccccaggtctgtggtggtttctttgttttttcctggttctttttgctgtgctgatgaaacatgacctcaataaccatgtgtatacccacccctcttcccactgggtattgaggaagggtggctgattcttcctcctcttctactctgaggatgttagtatggggattttagcat

SEQ ID NO: 18449 - DNA, 1023 bp, Homo sapiens
ttccagaaatgttccagcccacccctgagaattcctcctgtttagttgtgtgggaagccctcgtcttccaggctgtccttgcgccttgaacctggagaagtgagctcactgttctcaatacttcacaaatgtaaaactttctttcgtctgcatgtgctcagccatctaaattgagcaaatgatctggtgagcactgggttagaatcaggaatggtggaatacaatctgaacctctcagagcccagaacagagggttcctgacactgtgacactgtctcctggaactaagtatctcttgaatcatgacttggttttagatcagtcaagagagacccaggttttgccaggaatcgaatccctaaataacatgtttttttctcacttagctcatgaatttgcatagtagacagtagttctgaattagattttgaaaacctaatttcagggctcattttttcctgtggccctaaatccattctatcaaattgtgtgatactgacatgcagtcatctgaggaactcagcgtagatacttgagcagctcctcgcctcttttctaactcaagtttgactaaaatacatacactccgtacagaaggtagggggttatgtaagaaaggaaaacctaatctatggaatcaggagttgtcaccaccgagcttcctctggaagtctgcccatcagcttgcttgttctctgttaagaggaagggctaggacaaggatttgggcttgaatatgtggaaaggaattttcatagttgttgctgcaggacctacaaaagtttaaaattagattggatgtgactcaatgacaagtcccatctgtgtaattgttaaggggacctgattgactcctgtggtttgattgagcaaccaggtaaatagagacctctctccagctttggcaaaacccatcagaggctgctgcagaactcagacagagggatctgcccttgggtttgcttccatcctgttccattgctaagcccttgtgacttggatcctaggactgaaaagttttta

SEQ ID NO: 18450 - DNA, 1073 bp, Homo sapiens
gcccacttgggaagcccgatgaagagttaatagtttaatgtgttacccctcccaggaataggtgccttcagaaacaggtgggccggcgcggtggctcatgcctgtaatcccaacactttgggaggccgaggcgggcggatcacctgaggccaggagttcgagaccagcctggccaacatggtgaaaccccgtctttactaaaaatacaaaaacttagccaggcgtgatggcagatgcctgtaatcccagctacttgggaggctgaggagggagaatcgcttgaacccgggaggcggaggttgcagtgagccgagatcgcaccactgcactccagcctgggcgacaaagcgagactccgtctcaaaaaaaaaaaaaaaagtcagatgggagacgctacatttttaaccaaagaacaaagtctacgtaaaattctcccactgaagggtacaggtttgttttcccttttgccagtgaggtctctctaggcagcgtcattcgaatcccacggctgcttgagaccgcaccctcctaatgaaaaaactttgccatctctgccttgcacagaattcccataggccccttgtaaggagaaaggttcagggtgtactggaagactctgtgagctaggggagggtggggggggaagggaagacaagaggggacctggtccccacaccgcctcctagggacctggtgttttttccatccattgaatacccagataatgtgccccacacggtgaactgtgagcagatgggatatctcccctgccagctccaacaggagacaggtccgaggtgacgactgcttctggtttttgacacctggcctctcctctagggaggagtcaggctcccctctcccagggacttggaggctgagtccagtctgtctccctgctatgtccacacagcgggagagctcctatcctgagtttatgttacattatctaaaactaactagcataacaaagggtgcgcccagatacagtcaaagcttcgcccagggaaacagctgttgtttccctgactaaagcccattgcacttgcaactgcaggacctgggagaattca

SEQ ID NO: 18451 - DNA, 1072 bp, Homo sapiens
gtagcgtcactatccatttgtacattattttatttttagagtattttcacatacttgcttttttgttgttgttgttaacttcccacagtatcacacggttgctttcatttgagcctccccacatccctgtgggtgaagattggcagacttagcttcatttgtcatattgtctgaggcttagaaggactgaatggcttggccaagatgacaaggcagtaaaaagcggggacttgaacctggtggtcctgctctcggttcatttgtatttctcttcatgctcatccctgaacaccacgggaatggcaggagaccctctcccagaaggacacctaagaaggatttggggcctctgtcagtaacaaataaaagctgacctcggacaagaagatcttcagtctgttggcctgttggcttcctctgcctcgtgccatttgtgggttcctttcagtccaaatatctatcagtaaggtcctggttgaatagacaaatccatccatacaatgaagtcgaaggccacttaacaaaatgtggctcctcttgtaggaactgatctgaaaacatctggaagatacagtaaatgaaaaaatcaagatgcagaacagtgtacatggtacacttacttttgtggaaaaatgcagggaagggaatgaaatgcagatttaaatgtgctttttatttgcataaaggaacactggacaattatattgaaaccaatgaaagcggttggcaacattgaagagacggtatgagtgaaatttctcagtttatatcttatgtcatttcaattttttagaaacttttcgttttgaaatatagatttgcaagaagtcacaaaaacagtgcagagtactcctgtgtatccttaacccagttttctccaatgataatatactgcataactagtacaatatcaagaccaggaaagtcacaatctacagagctcatttaggtttcccccttttacctgcacacatatgtatgtgtttgtagttctaagccgttttatctcatgtgtagatttgtgtgagcagcaccatgatgcaatccagaactgttccctcaccctggacat

SEQ ID NO: 18452 - DNA, 1048 bp, Homo sapiens
gtttttttgtttgttttttgggggtctttagactcttgaaggcaactcagggtattgtccacgcagctctctggttagacttctcccaggctatgatcctggcatgtcctttataaggtatacttggattggccgagacctggcctggcatcaggagtccaaacctctgaggtctgatctctgctctgtcaaggactttcggcaagtctcgtgacctctggctctttcacttcctccccacctgccaaatggggataaataatcttacctacctcctggggggaggggaagttctgagaatggagtcattcttagtgttcaggtgctaaaggttgttctcctgggggaacagagtgactgaaactggcttgtttgctacaagccctaccctccactctttcattccttgaaagcagtttgcctggtcagtcagcttttgggggtccatcaaaggaggttgctgacctgaccgtgagtgcttcagtatctggtttgtgtcagaaccagacgccaactttgtactgcatttgggatcatatctttccccttctctgtcccccattctctgaatgctgctttctctggcttgtttcctacagtgggggcctgtggggttgagtcttgaggaatcccctcaaatgagaaggccttgggagaaggcctcatctctggctgtttcatgagcaactcattcctagagttcattgtttgcatgggtttctcacaagcgtccttcctcataggaaggctcatcaactgaatttagtgacatgtacacagtagatgctcaagcagtgtctgcaaggacacaagctgagctttctccttatggggcaaacctatgtctaaccagatacagaccaattagtttagatcaaatcaccttccacttgggctacttgtgactttccaacctggtaacttccactgaattctggaaagagaaattcttgaggaccctggcaagttgggccctgacctttctgttgctgtctcttgctggtgaagcaataccagcagttcctgtaataccacaatatcgttccat

SEQ ID NO: 18453 - DNA, 1035 bp, Homo sapiens
ccaccccctgggcagggagtttgcacgtagttgtgagctgtgagtggttagtgcattgctggtattgctgaaggcagggttgatccctcacttgactgatacttgcattcaagagaatctagattgtgttgggggagggactgactgtactcatggctaacttaaagtattaaaataaggctgtcccctacaaccttcttagtcacacaggatccctgtagccaaaacagtatatgatccagctgcagagagcagactgctctcagcttgcacagcaccttaggcgagggaagaatatacggatagggaatggggtggagaaaggatgggaatgttgtcatccaggtggctttagggtcctaaggagtggagaaggatggcactggggaggtctggatggatctgtgtaggagttccctgtagataaattactgatcccccatctactatccccagtatgtaatggctgaattaatatgtaatcaactgcattgtatctaaagccttagaactagtcaggtgctccctccacccaataccatttcttaccctctaatcctacctgatctttaacaaagcattaataattctaaggataatctctattttgttgtgcttttttgtaactgttttaaataaatcaatttgtactgtatatttgtacttttgtgagatcctttttgctgttttaccattttaagtctctgtacttggctacacacagattgtatttttattgttaatgctcttcttatggatacctgcatttaacttgtggactatgtaaacacaatatctatcaatatctatatatctatatatctatctatataaactactagcttttccttttggtgtttgcgccttcttcctatcccagccttagatggtggccatggggtgggggatagaaacctttgtgggagcagttgtaatggaacacaaatggtggctttatttgtgcggtgagctcaagggagatggcatgagcttgtcctcaagcatggtctttcccctctgttggtgtggatttca

SEQ ID NO: 18454 - DNA, 1025 bp, Homo sapiens
aactcaacagcataaactttgaggagggtcgggacccaggagctgtaggttaattacaaaagacactgtctgtcgtagtaaacttaaagtctggtcttagatctttaggggaaacttgaattttaaaattatgtgtaatattttaactttttattatggaaaatttcaagcagacaggagtataatgaattctctcatccagcttcaaacacgatcaactcatgcctaatcttgttttatctatacccttcctatgtctgtatttttctaatttaataatagttgaaatatatatgtatatatttccctctcctttcccagtagaagccttttggcttttgtacctacaagccaatagtttgtgggaaatttgcttcctcagaacttctgggatagggggacttggtaatagtcattagaagataaaactggccagatgtggtggctcacccctgtaatcccagtacttggggagggctaggtgggatgatcacttgagcttgggagttggagaacagcgtgggcaacatagcaaaatcccgttctctacaaaaataaaaacagccaggcgtggaggcccgcatctatagtccaggaggctgaggtaggaggattgcttgagcctgggaggtggagattatagtgagtcggtaatcgtgccactgcatttcagtctggaggacagagtgagaccctgtgtaaaaaaagaaaaaaaaaaagaaattaaaacacttcctctttttttgtatttatttttgtttttgttctgcagacgggggtctcactctgtttcccaggctggagtgctgtagtgcactccctgcagcttcgacctttcaggactcaagtgatcctcccgccccagccttgggagtagtagctgacactacaggcccacgcctggcttttttttttttttttttttggtcggggtcgggaggggagagtttcttaatgttgcccagactggtcttgaactcgtgggctcaagtgatcctcccaaaatgctgggattagaagtattt

SEQ ID NO: 18455 - DNA, 1078 bp, Homo sapiens
tgggcgaacagccgggcatggtggctaacgcctgtaatcccagcacttcgggaggccgaggcgggtggatcacaaggtcaggagatcgagaccatcctggctaacacggtgaaaccctgtctctactaaaaatataaaaaattagctgggtatggtggtgggtgcctgtagtcccagctactcgggaggctgaggcagaggtagtagtgagccaagattgcgccactgcactctagcctcggcgacagaacaagactctgtctcaaaaaaaaaaaaaaaaaaaattagctgggcgtgatggcagacacctgtaatcctagctacctgggaggttgaggcaggagaatcgcttggacctgggaggtggaggttgcagtaggctgaaatcgcaccattgcattccagcctgggcaacaagagtgaaactcggtctcaaaaaaaaaaaaaaagatcagaataaataaaataacacacgtcaaaaccaaaagcttttgtacgtattggagtgtctgtagccagtcttgaccttgctctctcccctcctcacttcgtacttttagagctacaaacactgagtttactcccttaggaagtctttttttttttttttttttttttggctacttttagctgctactactttgaatagagctttcaggatcactacttctgggcagcttcactattttgggcagcagttctgattcttttcctcctccagatatcctaagaggaaggactcagtccatggttttactttgcttattcaggatggggaggctaactagctcgcgaagtctcagcgagctgagtgataaaagaggaactagatgggtttgctatgccagtgttaagaattggagtaaagtgaaggattgggctgctgatccatgtgtgacactaataaaaataatggtgttacactaataaagataagtatatatgtatataaacagaataccgagaactaggattgtggtcactagttcataaccattttttagagtttatgttataattgcttacttgtcttatagttgtttttatgtcagctatacccatttgattgtgagcccct

SEQ ID NO: 18456 - DNA, 1031 bp, Homo sapiens
gtgttgggattacaggtgtgagccactgcacccagccagcatttttatagtagctgctttaaagtctttgtcagttaattccaacattggtgttgtctcaggttgatgtgtgagttgagattttcccagtgagtatcacccactttctgtctataccagcggtcccctttctagttcctcaagccaggactagagagctcttgatgctctttctctctgctgatgctcatttccgggtttcagcctgctgtgcatccaggctggggaacatcagagggaaaaatgataaactcgccgccagtttattggtacttcaaattgtggtcttcttcatccatctgctattatttttcatagttctcagatagctgctacatgcattctgttcaggttttacagcttcattcagtgaaagagacactgaacctagaaccctgttccttacatcttttgtttctatttttaaggaccatccatgttgctttaagtacagctgtttaattttgtctgctgcatagtattctgtcatgtttttgtcaaattttgtttgtcttttttttttttttttttttggatacagggtctcactctgtcacccaggcctggagtgcagtgtcatgaacatagctctctgttgcctccttgacttgacctcctgggtgcaagtgagcctcccacctcacccttgcaagtagctaggactacaggcgtgcacccccacagccagctaatttctaaatattctgtagagagggtcttgccatgttgcccaggctgttcttgaacaccggcctcaagcgatcctcctgcccggacctcccaaactgctgggattataggcatggaccaccgtacttggcctcatttgtcctcttgaaatgaacacttagcattcttctacttccttactaccacaaaatgcatacatgcgtcttcatggtgctgtgtacaaatttctgtggtggtgcgtgtccaggaatggaattgctgtgtcttaaggtatatgggtacctttcattaaagcatacttt

SEQ ID NO: 18457 - DNA, 1062 bp, Homo sapiens
gcctaacagttgctgaaaggcctgttaaaaagaaaatacagaatctgaaactgagaagcctaaatttgaatcttggctcgaccattttccgagttcatggccttgagcttgttgcctagttttgagttcctccaaaagtaaaataagatcacgaaaatggctagaagcctagagttattgtgagaatctagtgagattcacagaatggctttggaggctataaagtatatgaaacaaaagctaggattttgttggtttgttttaaagaatgttatattaatttttttccttgattagggaactagattctggtctggctgaatctgtgtctacattgatctgggctgctcctcgactccagtcagaagtggctgagttgaaaatagtgagtacaagtagtttcagtgatgtctgtagcttttcatattgttagaaaggttggttaatataagttacttctgctgatttgaccagatattttgtaccattcttatgttgcttttgaaataggttttgtaaatttgtttctccctttcagccttatatcgtagaatagaacagtgttttgcaaacttgagcagtttttttaaggagcaaagttttgtgtatctccagttttgtcttaatgttatttaactctatgcaaatagaaaagttcttatacaactgtaaaccagtaaagttaaaataacattaaggtgacagatgtttttgctttatttattaattccacaaatatttattaaataaattgtatgagctatgtaagtgctgggggtaacagtggtgaacaaaatatggcaccagccatactcctgtagcttagagtctagcagaagagacagacattaaccagaaaattgcacatcacaacatggatatggtactgactcctaggatacaaattcagttgtgttgttttctattttctacatctttgcctttctgttttatttcctaggagactgtgtcattcttatctctcaacccatctactgagatttccttcttttctaggtttttttcaagagctctttttaattctctgaatattttttatgg

SEQ ID NO: 18458 - DNA, 1052 bp, Homo sapiens
atacttggtaaacatgaaggcagtgtgtgggagcagtttattgtactgcttgtggcaattctagtgggtaccactgtattgctcagtatggggtttcacctttcatagtggggtgaggaggacagctgtgtggctggcagtgtggtccaatccttacacctgcccaattcctctggttactgtcattcctgactccacttccccactttgtatgcctcgtgtcatttgtgaaggttggaagtgaggtggggagaagggtggatgaattgaactgtggaaggcagcagtatcatcttttgccagcatctgggtcatgtgtaatgagaatgtgaaagagagacttgggtcctctgatgtgtcttgtgactctgaaaaaaatcatttaactgctctgaacctttttttccctcaatattacctgtaaaatgagaggagctaacttcgcatagtgaggtgaggattaggctggttggtatacatgcatcttagccctgggtctttttacttacagctaatgcacaagctgagtgtggaagccccacccaaaatcctggtggagagatacctgattgaaattgcaaagaattacaacgtaccctatgaacctgactctgtggtcatggtaagtttatcccagaatacaaagaaaaatgagtttgtaggtatgaccttctttggaaaacaaaaaaaacattctttgcactaacttaaatttgtgtgagtttaagcctttgtccagttagtacctttatgacaataaatgtgcctgcatatctcacagggtacttaaggaattagatgaatgacaacactttgagaaggtcaaaaccttgatacaaatgtaaaatggcactattattgctactttttggtgaacttcaggaattgagaaacctcctgttcatagcaagaaatgccccaagacccaaacagttcccgaaacatttattgggtacccaccatgtgtctgatagtgcacagaaagctgaggatacagggataaaaaatcatccaccagttggccaggtgcggtggctggctcacgcctgtaa

SEQ ID NO: 18459 - DNA, 1784 bp, Homo sapiens
agaagcactccagtaaacttgctttatgctaatctccatctcagactccgctttctggggaacctggccttggacatgggttaatgacctgggtttctctttttttctcaggcagaagctcctcctggggtagagacagatcttattgatgttggattcacagatgatgtgaagaaaggaggccctggaagaggagggagtggtggcttcacagcaccagttggtggacctgatggaacggtgccaatgcccatgcccatgcccatgcctatgccatctgcaaatacgcctttctcatatccactgccaaagggaccagtaagtatatataagtgtggatgtaagctttagaaaatgttatagataacaagttggctctgtgaacacactcaggaatcataggttgtcaggagccattagcagtaagaacatttggtattagctggcagtcatcttgtggggaaaaaacacattggattcagagaaggtcttctagttcagctgtaggaaaatctatagagttggtgctagaaaaacacttttcatataggtttactgaatatctttgggatctgttatagtcatactagtagttttttccacaaatgaataaaccaccaattattaccaggcagaacaacctttgtagataagatggtcattggtagtaagaaagtctcgttagagttttcccttgtaaacactgaagcacttgattcaataaagaatagcctttggctctagatctttaaaaatctggaatcctgaccacatgtggtccttttgggcatttttaaggatcttgaatatttatatatatttagtatgagaatataaatgtatttctttctcccttcccatacccaaaccttcgagattgcaaactggaggcagtgtctctgatgttgcctttctcctcttacagtcagatttcaatggactgccaatggggacttatcaggcctttcccaatattcatccacctcagataccagcaactcccccatcgtatgaatctgtaagtgcctgagcctcttttataagcaacaggagagtgaatgccatgaagagcgagcaaaataatgaccacagggaaggcagagttttgatcaactcctagtactgtcatcatttttgctttgggattcttgtgttgctttataacactaccctggaaatgtggagtgggtggtgatggcagtatcattggtggcaatgctttgtctgcaattaagccaggaatcaggaaggaactgcagatttcttagaaagttgtagtgctctatgagggcacttagccagttgttttgaccgactaggcagataatcacactgagctgatacaatcgtggtgctaaagtatcataattattaaaatattagtcctatgtgttctcaacacatgtaaaggaagagtgaccagattgatcttaatcagaaatgtccagttacatgtcggccgacagcattgatttcacattttagtattctagttaaaatttgctaatgaatagctaatataatacctcgaactgtaggtggttcaggttacttgtttttgaccagccttgtttcttcagttactgtaggccttttgagacctgtctccatctagtattttactgagaaacaaattggtgtggcatttgctatgtaaattactcatctaggaagatcttcctgttcctgagcttgctttctgttctttcctttggttcccatctgtagctgatgtgttctaccttgggcctgagtttttcttatgctttggttttgcatgcgtc

SEQ ID NO: 18460 - DNA, 1023 bp, Homo sapiens
caattggagactgaggccagagcaactggctcctggcagctgtgcttgtccgtttcctgtcagagtgatcccaggtttcctcctggcccgtcccatggtccctccacaggagtgtgagaggatgggggaagcactgtgggaagaccaccaaagatggctggacagtgggagagagcacgttgtgaagcatcccagcctcgtgttgaggttccagacttagaaacagacccctctgtacagggggattgtggtgagtgagaatcaaggccaccttgtgtgttttctcactctcgaatgcaagtgggagagggaaaatgactcgggacgccattgtaacggttcctggaagctgggccctctcattggcatatacagtactcctcgctgcagggcactgtcccaccgggatccagttgcaaagtttgtcttgacagttgaaggcctcgcttagttgtactggattctcagggagccctctgtggccttttgctttgcgtgctgtttcccttgtaccagagggcggcaccgtggaaattctgttttccctgtagcatattgtgttggattgcattactggcagagaaaggacaaggtgccattcaagtcctagggtgggcttccagctgccttaatagaagtactcaagtcttttgggtagtgagctggaaagcctacaggaaaagaggggtacctgttttcatttgaaaactttgattcatggaacctttaaaactaatctcagaaaaatttttggtgcccatgcagctgtagttgttcactgctttcctggatggatgggactcttatgtcataacttctgttactcctttggcccatagctaaggtcatccttccccacaggggtggctttgggattggatgatacagcttttgcttctgtgtagtatacctgtacatacttgtttcaggcagcctttctttaatgttttcagttggtttgtattctgtagctcagtagctgctaataaagttaaagatcctgtgtcctgctttctctactgt

SEQ ID NO: 18461 - DNA, 1092 bp, Homo sapiens
catggaagccttggcagtttcctttcgagaggcttcttaccaaatgggaggacatcagaatgatgagtgtgaaaatgcaaacaagaagccctcagaactctggtgggaagggtcactgttataaattaaaggggccttcaccgcattttctcttcctaccttagactcctcttcactatctgattatatggtgttgagcagacgtgtcatttcccctgactggccatgctcacacactaacaggcactgtaggctcagaaagagcactccgttaaggtgtcctcacctcagactgctagtttgagagccctggaaccagtgtaaaatgggagtgaataatgagtggggtgcagagatggggtgaatttagaaggaagtgcggggtgcctgagggtgcaagctgtgtctgtataaacacagatgacagagacaggcaaacctgacctctgaggtgttgtcctcaacacctctgcgtgggcccacacttgcagcagctcatttagaatgtgactcagactttttaaccggtaaccaggattcttgatttcacaactttcctggtttggctctccacccttcacctatgtcaggcatgttagaatcccccgggggtgcacttggaatattcagatgccctggcctggtgccagaccagtttcaccgccacatctgagagcaggacctgaaagctgccaggggcctttgtggtgcagctggagctgagaaccacggtcctggaggaaggcccctacacatcttgcctaccagtctcctgaggtgctgtgagcattctcaccttcatttgttgctcttccttcttggagcatctctcttaatcccctgcttccaggatccgaccgtgttcaccccgggaggcctttgctagtctcctgaaaggtcgctggagcccatcagtcagttctgcccagctgaacatcttccttcctctggttccccgtgggaggctgggggacgtggctggggcttcttgccagcccggatgaggagggacacagctggagctgatgtttattaagctgattaaagggttttgctgcttgacacgccttggtttcagggaagcactatcta

SEQ ID NO: 18462 - DNA, 1031 bp, Homo sapiens
attctgtgtattaaccccttgctaaatatgtgatttgcaaatattttctcccatactggaggtggcttttttactctgttggtactgtgctttgaggcacaaaaattttaaattttcatgatgcccaacttgtctattttttcttttctttcttttttttttttcctcgctctgtcacccaggctggagtgcagtggcacaatctcggttcactgtaacctctgcctcctgggttcaagcaattctcgagcctcagcctcccgtgtatctgggattacaggtgcatgccaccacatccggctaatttttgtatttttattagggatgggttttcaccgtgttggccaggctggtctcgaactcctgacctcaagtgattcagcctcctcagcctcccaaagtgctgggattacaggcatgagacaccacgcgtggcccaattttttgttgttgttgcctgtgcatttggtgtcatagctaagaaatcatttggaatagaatagcctgctccacactattttgtttcctgtagctttgtagtaagttttgaaatgaagaaatgtgagtactccacctttgctcttctttttctaggctgttttggctcaagattctgtgtgaatttgaggatgatttttctgtttctgcagaaaatgctactgagattttaatagggattacatcgaatctttgtatcattttgggtactgttgacaattttaacaatattaagccctccaactcacagacatggaatcttcgcatatatttatgtctttataaattttcctcagcaatgttttgtagttttcattgcacaagtctttcatctaggttatctgatttgttggcatacagttgttcatagtcttcgcttataatcctttttccttttcttttgttccttttgtttttttttttttttttttttgagaagtgggatctcactatattgcccaggctggacctgaactccttgaaatcctctcacctcagactcctgagtagctggaactgtaggcatgtgtcac

SEQ ID NO: 18463 - DNA, 1067 bp, Homo sapiens
ataacctaaggtcacaaagattttctatcttttctccttatccatgtgtgaaaaaaatataaaactggacctctatgtagcatgactttaaggcagactgtacacccaaaatcccttttagcaaaataataaagtttttagaagataatatagaggaatattttcatgaccttggggtaggggggatttctttaaaaaaaaaaaatcatttatgaggccaggcatggtggctcatgcctgtaatcccagcactttaggaggccaaggcaggcagatcacctgagcttgggagtttgggactagcatggccaacatggtaaaacctcgtctctactaaaaatacaaaatattagccaggcatagtggtacatgactgtagtctcagctacttggaaggctgaggcgccagaattgtttgaacttgggagttggagactgcagtgagcggagatcataccattgcattccagcctggttgacagcgtaagactcttgtctcaaaaaaaaaaaaaaatcatttatgagagcaggaaatgctgataaatttgactttactaggaacttcgtcagcatatcaaaaggcattacgaagaacacaaaatgcaagccacagagtaagaggaagtatctgcaacatgtataactagcaaagcactagcattcagaatatacaaagaactcctacattagagaaacaaattcaaatcacaatgagataccagtacaaaccttttagcagtactataatttacaaaattgacaatatcactctagtggtattcaaagcaactggaactttcatgcattgttagtgggagtgtaaaatggtatcatcattttagaaaacatttaggtaatgtattatcaattgctgcataataagttatatatatttagcagcttaaaacaacacacatttattatctcacagtttgtatgtgtcaggaatctagatgcagcttcactgagtcccctgcctcaaggactctatcaaagcctcaatcaaggtgtcagtcacacttggggtctcacctgaagctcaaacagggaaggatcctctttcaagg

SEQ ID NO: 18464 - DNA, 1056 bp, Homo sapiens
ccctaaccaaaaactttttttagaaaagaaaagtacacagccaattacacaaatggaaacaaatcctttagtatagaaaaaaaaagaatatttgaagctcctaccaaacaaggaggaaaagaaggggtacaaagaaaaaaaagccaaaagaaggataaataaaaaataaatgcacaaagctaacagacacaggtaactagaattatatgcctttaaaaagtttcaactccccaaccaaaaataatctgtgaggatcctaatgacccctagaatcccttgaaattctttctttagttttataaaataattctgcagctccctctaagaaatgaaggcagctaccttaagtgggagattataggacgggaggtgggagaaggaaagagaaagtggaattaagggacaagaaagagaaagtggaattaagggacaaggggagaaaagcttaggcgaatcaacggattgcaatctatcatctgctaggaatgaacaagacaacatcaaatgaggagctgtcagctggaccatacaaaaagctaaatgtacacaaaaggtttttttttttttttccttttaaatctaccatactgcttcagttcatttccaatgcaacaatctactcaacaccaaaaatggtcatatctatcataaatacagaaagtcagtttttaaaacttattttttttaagctacaagtcctcaacactctttgtgtgtgtgggttattatttttttttttttttgaaagtgggagtgcttaacttttccccttgaaattggcttcagcagaaaagctatccttaaaaatccccagaaagctaaagcagttcacattgtttttcttgaatactttctgcccatttttaagttaacaaaacaaaaaatcttttctggaacaaaaaaaaaaaaaaaaactgaaaaaacaataatatataaaacaatgattctgaaaacaaagtgtgagcgattgacctgagaataaaaagacattacatttctttttttcttttagcaagccattggtatctgaatgctaagatagcaagaaatttaaaa

SEQ ID NO: 18465 - DNA, 1029 bp, Homo sapiens
ggagctgtggtgtgggtggcggctgggctgctggcggcgggggaggctgctgcacctgtggttgctgctgctgctgctgctgctgggggggttgctgagggcccatcgccatcgtggcttgtgctggggttggggagctcagcgacgctgaggacggtttatttggtaatccagaagtggggaggccaggggaaggaacagttgtgctgggcagacccatcaagttcggcttaggagacgttaaagctgaaaggaatggagacagaaatcaccggtcagtctgggcaggggtagggctgaagctcaagacgttttaccggtgtcactggcacacagtttgagatgtcaaggcttgaaggatcctctcaaaacgaacatttccaacagaagtatcccaccaggctcagggctggacaaccttgtattctaatgaggactcagtcctaggtcagctcccatacttcccctttcagccaaacaacttccagaagtatcccaccaggctcagagctggacaaccttgtattctaatgaggactcagtcctaggtcagctcccatacttcccctttcagccaaacaacttccagaagtatcccaccaggctcagggctggacaaccttgtattctaatgaagattcagtcctggctagctcccatacttccccttccagccaaacaacttccaacaccttcctgcccaatgtgccacacccgctagttcacattttctttgccaagtactcccagctaccattcactctgcccaactgcaattagtctagaggccccaaagctagctgtttctagctggggcccatttgcaccaaaggccttcatcacaaaaatagtatggccacgaggtccccagagaagttatctggaggagagcggcaacaggagaagagagaacgaaggcaagaaagctagcacggccacatgaacaaaaacaaaacaggctctacaggtgttcctcctctctgacctctgttgctgcagctgactggatgctttcggagggtagagaga

SEQ ID NO: 18466 - DNA, 1072 bp, Homo sapiens
agtaaaatcccttcaggccaatcctttagaaaaatgaaaacactcaaactaccattctaactcaaaaatttacaaaaatatgaacgtcagggatttttgaagcattattgtggtgtcatttcaagttgagctatttccctgcttcccctccaacccgcatttttcaaaagcaccaataccctctggtcatctcgtcccaaattaccttaactagactcagcctggtactctgtggctggaaaccatgacgactacaggaattaaataaccatcttgctatgattctttgccaagagttcaatttttcccctaattattggtgataaagcatcacattaattgtatatcacttaacttattgcaaataatgattaattggataatcactgcattaatcattgctcagttgctgacacggggggctcttcattcgagaatacacacattcaaatctattctggtaaaagagaacaagggtcattttcatgtttcaaaagagaaaaccacaaagttggacagtggcaatggctgtgcattagggaagagaacaaagaaccttcctgtacccttcactggcccacaggagtacatcacactttccttgacaagatgtgcccgcaagggcctgttcatgtgctaccactcaccctcttggaactctcaggcggttgggactagtggatatcccctgtccatgtttcacagaggaggtacctgagccgaaagaggccaagtgcctcaatcaaggtcatctgctggctggtgggcttcctgactccaaatctagagtctttccacatcaccatcccgctttcagactgagcacaacgccagctccttacaagacatatatccatggttgataatccagttcattttgaacatcctggtggttatcgtgttactatgatcactgtacaatgtcaggagactgctactccttatacttagacatagatgaaaactagatctaatgatcaaactgaaaatgatccttctctgagagatggtatattggtaagagcttgggctctgtcctaagttagaataagtgcaaaagccagtgtgtaaa

SEQ ID NO: 18467 - DNA, 1028 bp, Homo sapiens
aacccagtaggattatatgacctttattgtggcatctttcaactttggaggtatctggagaataatacgaaggaggttctttctccatctttgagtctagctgaaggctcaggctcacttcctcacgcggaccctgtcccaggcgcaatgttggaggtgacctcacccagctcctcatattcagctctctgagtgggtttcctgcatttgtgtaaaactgtacggaaaccaaaataatagcaacaagatccatttgtttcactacagaatacctgtgatgatgtggaaatgcatatgcattcataagtagatttgtattcatgttacggatgacccgcttgcttccccaaggataggcaccatatggagtgttcactgtacacatctccataaacgcccaccatgctaattggtactcagtgctgtacccatggggaagagaggataatgagaatgataatgacaatgatgacgacaatgatgacgacaatgatgacgacactaaactgcagatgccgattccaagatgaagatagttctgggcatacagacatgcttaaccaacgaggaaggagggaagggagggagggagggaggatcagatcgcattgaaacactcagtgtaagtcctaaaccaaattccttccttccttccttttttctttttcttttcttttccttttcttttttatttgagacagggtcaggttctgtcacctaggctggagtgcagtggcacaatctcagttcactacaacttctgcctctgggctcaagtgatcctcctaagtagctaattagcctcccaagtagctgagactataggtgcatgccaccacactcagctaatttttgtttttttttgtagagacggggttttgccatgtttcccaggctggttttgaactcctgagctcaagcagtccatcagccttggtctcccaaagtgctgggattacacgtgtgagctagtgcactcggcctttttgtttgcttgttttaaagcataattactctattattaccta

SEQ ID NO: 18468 - DNA, 1060 bp, Homo sapiens
aaattatccttatattcttgaaattaatcctgcttggttgtgatgtatttttttaatacatttccagatttaatacgttaatattctcctttggatttttgcacatatgtcataaaatttcactcataattttgttatactgtctttttcttctcttactaagattaataaggcaaggcttggtggctcacgcctgtaatcccagcactttgggaggctgaggcaggcggatcatttgagttcaggagttcaagaccagcctggctaacatgatgaaaccctgtctctactgaaaatataaaagttagccgggcgtggtggcgcgtgactgtaatcccagctactcaggaggttgaggcaggatgactgcttgaacccaggaggcggaggttgcagtgagctgagatggtgtcactgcattccagcctgggagacagagtgagacgtctcaaaaaacaaacaaaaagattaatatagctttttttttggtagagactactatgggttttttttttgtagagactactgtgttgctcaggctggtcgtgaactcccagtctcaagcgatcttctcaccttggcctcccaaagtgctgagagtacaggtatgagtcaccatgcctggacaaaatacagctttttatttattttcttgagacagggtcttcccatgctggagtgcaaagacataactgtagtattttcaaattttttttaagttggcctctaacttaattgcatgataatcacagaacagtctgtatgatactgattgtttcgtttttatttatacttaatttgtggcatactacacagtcagttttcataaatatttcatttgtactttagaagtttgtataacaactgttgggtgagggggttggggaacgcagaaaaataaaaatgttgggtgaagttttattctgtatgtccttacatcaagcttatcagttatgttgtccaaatcttccatattttaccaacttttgatttttgttttgttctgttttgttttgtttgtttgtttgttgagacagggtcttgctttgttgcccaggct

SEQ ID NO: 18469 - DNA, 1044 bp, Homo sapiens
gcgccatctcggctctctgcaagctctgcctcccgggttcatgccattctcctgcctcagcctcttgagtagctgggactacaggcgcccgccaccacacccggctaatttttttgtatttttagtagagatagggtttcacagtgttagccaggatagtctcgatctcctgaccttgtgatccgcccatctcggcctcccaaagtgctgggattacaggactgagccaccacgcctggcctattttattttgtttttgtttctgttgtaatttctggaaacttgtacctggaagtgaaatctattcacagcacacttctccctgactatccccccaaaattgtgccccaaaatgcttatacctgtttagctctttgttagggaccatatctaccatttggccacaatttctctatgagttgttataagactaccacaggaaagatcgtatagcccctcctataaacttagtttgttcttagggaccaattaaataataagccagcaaagagctcgacccccactgcagaggacatttcgtaagaggggattcataggagccccactttctctttcccagccctctgttctgaagaatctgaatgtgtctaacttgtttcagagttcactgtttctttccatttttctttctgatgggatgattgcttctgccaatggctagactagagcataagaaatttttatcttggatcgacatctgagagctctaaaagaaaacaccaggcagtggggggacggggtgggtgggattttaagtcaggcctgcaagaggcagctagtcatgggtctgcactcagcctggtgcttttgcttccttggggtgctgccaacagaaaccgttaaataggcagcatgctggtgaggcctatacatctgtctgggataggatcccacagaggggtcttgtgtgggattgatccaataaccccatagtttgagtcaggtgacaggtcagcaggggcctgaattttcctccctcttctagtgatctgcagaataatcaaatgaccaataactaagcat

SEQ ID NO: 18470 - DNA, 1022 bp, Homo sapiens
aggcaggaggattgcatgagcccaggaggtcaaggctgcaatgagctgtgatcacaccactgcactccagcctgggcaacatagcaagaccctgtctcttaaaaaaaaaagaaaataaaagtgctgtggctctaataaatggtatctcatgttgttattaaattgcaatcagtttggccatcaaaaattgaattgtgggaatcctttttagccctatagctgggcctatgacattctttgtagttttgtaaaatggtggagtagattttcttaccttgtcagccataagagttgccccctgtgactccatttatctgctgtttataatatcagtcctttcaaccatctttgactccagcaggaactacagcccattgaacctattttcttctccctttccctcacgccctcatgcctgtacttttctccttaaacaacttaaattccatggtcagtcattataatgactgcctcatgtactacactctcaatcctcttcccctcttttgccttgtcacacttgcttggctaaatcacaactctggttaaatccaaatctctgcctactttgtgggtgtgcccctgggttagaagaaacactgagcacattcgctgtcctcactcttaattcatgattactaaccttaaacaggcccctaatgctgtctgggaatcctgctgtatttccacagttccttcattctccagcctcctagaggactcttccatactttctcctctcttttaaaaacacctttcttagcctttgttgatgaccttcctatttcattgagaaaacaatggcactcgccaccgtatccacccacgtgcttgtatatctgccttttccccctttcctgtaactaggtatgagttgtacatgatccttgcaagggccaatacctccatttgcaaacaaaatttcattcccacttcctgagtccatccagagtgctgctccaaccttcctctgctctctgctaaatattaccgctctagtggtacattcctattggcatact

SEQ ID NO: 18471 - DNA, 1018 bp, Homo sapiens
cctgtctctacaaaaattaaaaattagttgggcatggtggtatatgcctgtagtcccagctactgaggaggctgaggcaggaggatcacttgagccaaggtgttcaaggctgtagtgagctgtaagcatgctgctgcactccatctgggtgacagagcaagactccactggattaccatggaaggtttaagggtactattggcaatacatgtagagtctatttctggactttattctgtttttctttatacgtctgtccttaagccaataccatgttcctttgattactgtggtgttataataagtcttgaaatcaaatattattatttgatttctttattctttttttaaattcttatttagggtattctcaggctttcaaatttccatataaaatttagaatcaccttgtttatttctacaaaaaaaaaaaaaaaaggaatgcttgcaggaattttgattgggattttattgaatttaaggataaaattgaggaaagttaacatcttaacaatattgcaacttccaattcatgaacacggtatttctctagcttcatttaagtgctatttaatttttctcatcagtgttttatagttttttttttttttttttttgagacagcgtctcgctctgtcacccaggctggagtgcaatggcgcaatcttggctcactgcaacctctgcctcccaagttcaagtgattctcccacctcagcctccaagtagctgagattacaggcacaccaccatgcctggctaatttttgtatttttggtagaagcggggtttccccatgttggccaggctcatcttgaactcctgacctcaagtgatctgtttccctcggcctcccaaagtgttgggattacaggcgtcagctattgtgcttggcctatagttttagaataaaagtcttgtgcacattttaaaatatttacctctgaatgattcttctttgatgttgtttaaagattgttaaaattaattgtgacaaaatacacttagcataaaaatt

SEQ ID NO: 18472 - DNA, 1060 bp, Homo sapiens
gcatcttttgaagctttcatgatgagcagaatggatgatactgttgagatctgtattcatccaggatcttttgttcctcctgtttcagcaaactcttaagattggaactacatcagtagataggtgtgcaatgccagtcttttgcctcatttattaaacaaggcagccgggaagtactcagttttaatgtcacttggtcttcactcttttgtttttttgttttgttttgttttgtttttggagacacagtctccctctgtcacccaggatggaggacagtggcgcaatctagtctctgcctcctgggttcaagcgattatcatgcctcagcctcccaagtagctgggattacaagtgtgcaccaccatgcctggttaattttttgtatttttagtatagacggggtttcaccatgttgaccacgctggtctggaactcctgacctcaggtgatctgccacctaggcctcccaaagtgctgcgattacaggcatgagccagcattcctggcccactcttcttgtttgtgggtagatctcccccaccccagaccttctctccaattcaccttttcttccatctcctttaacattgtaaaaaatggtttctggaccccaaatctatgaatagaatgtgcttagaggcaggagagtactgagctgaaaacatctcactaaccactgattttagttagcatggcctttagaaaggagttaaagcactcatataacctgttttcctaatacaaaatttgggaagcaacaaaaccttttgctgacaaatgtggaaaagtctatgatgaggaagtggattggatcttgcttgtgaacacttattttcttccttctggtagctagatttcaagcttctcttattcctgagatgtagtgaccaagttcatatatgttgactatgattgcatatcatttacctagaagaatattctagggcagacttgaagcctatttttgttgtctgttgttaggcaacaaaacctacctcaaaacttaatggcttaaaacaacatctattttatatttgatcataattctatgacttgg

SEQ ID NO: 18473 - DNA, 1066 bp, Homo sapiens
acccagacgagcaggcgaggcaatttttaattcttaagaaccaaaccccaattgaggaaagaggcgatctctttggaaaagcacttaatctgaacacagactttgtttctttaagacaagtaccttataaatatgacttatatgaaaaaactttgaaatataattcagacttgcttaatagtaatagaagctatgcaggaaagcagactgatgagtgtaatgaatttggaaaagcacttctctacctgaagcaagagaaaacccacagtggagtagaatattctgaatacaataaaagtggaaaagccctcagccataaagcagccatttttaaacatcagaaaataaaaaacttggttcaacctttcatttgtacttactgtgacaaggctttctcctttaagtcactcctcattagtcataagagaatacatactggagaaaagccatatgaatgcaatgtatgtaagaaaaccttctcccataaggccaacctcatcaaacatcagagaattcacactggggagaaacctttcgagtgtccggaatgtggaaaagctttcacccaccagtcaaacctcattgtacaccagagagcacatatggagaagaagccctatgagtgcagtgaatgtggaaagacatttgcccaaaagtttgaactcaccacacaccagagaattcatacaggagagcgaccctatgagtgtaacgaatgtgcaaaaaccttctttaagaagtcaaaccttatcatacatcagaagattcacacgggggagaaacgctatgagtgcagtgaatgtggaaaatcctttatccagaactcacagctcatcatacacatgagaactcatacaggagagaaaccctatgaatgtactgagtgcggcaaaactttcagccagaggtcaactcttagattacacttgcgaatccacacaggagagaaaccatatgagtgttccgaatgtgggaaggcctttagcaggaagtcccgactcagtgtccatcagagagttcacatcggggagaaaccctgaaactccagccaggtcttactgtggaa

SEQ ID NO: 18474 - DNA, 1046 bp, Homo sapiens
agaaaaaacaatcctaaaacttgtatgtaaccacaaaagaccccaaatacccaaagcagtcttgaacaaaaagaacaaagcttgaggcttcatactaactgtatcagtgcattctcacactgctataaagaactacctgacactgggcaatttatgaaaaaaagtttaattgactcacagttccacaagcttaacaagaagcatgactgggaggcctcaggaaacttatactcatggtggaaggcaaaggggaagcaagcagcttcttcacatggtaaccggagagcatgctagcaaagggggaagtgccacacacttgtaaaccgttagatctcatgagaactcactatcaggaaagcagcaagggagaaatccacccccatgatccaatcacctcccaccaggcccctcctccaattcgacatgacatttgggtggggacacaaatccaaaccatatcactagttgaattcaaaatacactacaaaggtatagtaaccaaacagcatattagcatcaaaacagacacatagacccacggaatagaacagagctcccagaaataaatccacgcatttacagtcaactgattcttgacaaaaggtgccaagaacacataatgggcaaaggacaatctcttcagtaaatgctggacgttcacatataaaataacgaaatacagaaaaataaactaaagacttaaatgtaagacctgaaactgtaaaacgactagaagaaagcagggatccatgacatcgatctggtcaattttttttttttaatctgacttcaaaagcacaggcaacaaaagcaacaacagacaaatgagattacatccaactaaaaagctcctgcacagaaaaggaaacaatcaaaagagtgaaaagacaacctttagaatggggagaattatttgcaaatcatagtctgataagggatatctaaaatataaggaactcagacaactcaatagcaagaaaacaaataacccaattaaagagcaaaggacctaaatagacacttctcaaaaagaagacttacatatg

SEQ ID NO: 18475 - DNA, 1084 bp, Homo sapiens
ctgtaattggtgagtgaagggatgcacaggaattgaagggatgcacaggaattggcaggatttagggattgttgccttttgtagtctgttttattatttgatatttggttcatttttcataaacttcaaacactcagctctcaaacatgacctacctaggcctcttctcatatagcatgctttgtaatctgtctaaccagtatagcttggaagccctaatacattcatacagcagtgctttttgagtacttactatgtataggcattggtgggtattggagatgtggtgatgaacaaaacatacaattcctgcccttaggagcttacagtcttgagagtgaagtcaaacatttaacaaatctaatgaacatgtgtgcacatatatgtgtctctctctttatatatacatatatttttcatattcaatgtagcttctaatattctattggaatactatagtcaattatacacacatatacacatatactccccctacccctcacacacacgtgcacacacacacgcgcacacacacacgcgtgtacatatacatacacatctgacatgaataaatgtaagaaggaacacagcatattaagaggaactgaaggaagtccagtgtgattggaatgcagagggcaagggggtgatagttggaagagaccagatattgtaagaaatcaagacttggtgattaggagctggttttactcatcattctgtctaggtggatgagagccctcctgattttgaaatacatataactatgtgtgatgatgatccacccacacctgaggaagactcagaaacacagcctgatgaggaggaagaagaagaagaagaaaaagtttctcaaccagaggtgggagctgccattaagatcattcggcagttaatggagaagtttaacttggatctatcaacagttacacaggccttcctaaaaaatagtggtgagctggaggctacttccgccttcttagcgtctggtcagagagctgatggatatcccatttggtcccgacaagatgacatagatttgcaaaaagatgatgaggataccagagaggcattggtcaaaaaa

SEQ ID NO: 18476 - DNA, 1022 bp, Homo sapiens
cattgcagggccggtggtattttgaatttattactttctgattgggcattactttttttttttcttagggcacaaaggactatcttgagtgacatggttttctaatacctacaagctttatatctttaattactcatcagagaaggcaggaaataaagtagttcctaagcatatacatatttcaggtatctatttctggaaagaagatttttacttgtttttaatttgttttttctttttgctgatatccttttgattattcacccccttacaattatctcacccttttgaggtgggcctagctcttgatggtggtgggtaaggcgcaaacagagtagtctgtgcagccacctgccacaacatgtagcaacccaagctgatgcagaaaagcttcctggagagtgatctccatcctgctcagggttcatctttagccctcatgtgacagtcctggccgaaaggaactgggtgagtcaatgtactttaggatatcctgtcttagttgttgtggttaaaaacctcacctgcaaaagaaacagcaggctggcaccatgtctgagacatatataagttctctggctgaacacattttctgataactggataacagagtcatggcttgtcaatatgactccagccattatcattgacacaaaatcctttctaaacttcaccctatctcctccctccttttggggtcttaagacttccagggccacacattcccgacctatttttcatgtctgcatcttcaagatgtagattgagtcatgtctaattctatttgaataagttttatttcttcaaagcaaatccatcaaaccagatatgtctcattgtgtaacagtacagagattttggtaatgtgtattttctatgtatacatttcttaatataactttgtattttaataaaataaatgtccttactgatcttgtcaggatattcaaatttagctttattttttcttttatcatgagcagtaagtatatgcagactctatttgcaatactgtaatagtg

SEQ ID NO: 18477 - DNA, 1099 bp, Homo sapiens
cacccggaagtgtgatgccaccgccgctacggggaagtaatggtatccggccaattgagattcggagttaaaacaggtgtttgtatatctctatttcctgaggcccagtagagtctcctcttttcggaaagtgttggaggggggacgtatttgggcatgattttggatgtctcgtcctattgaaatccgtggggaaatgagcagtaggagtgtgtccaagggggcctgactctataaaggcttttcagaagtttctttcaccgcccgtcaccctcgattcccctcccactcagggatgtgcagatggaggtcggaggagacactgctgccccggcccccgggggcgcggaggacttggaggacacgcagttccccagtgaggaagctagagaaggtggaggggttcacgcggtcccgccggatcccgaagacgagggcctggaggaaacaggtatgactccacttagtggggtcttaaaaggaatccttaggggttgtcattgttggacgggggaagggtcagtgggtgaccagtagggagtcttgggacttaagagaagtggcttaaaccatcgccgggtcaggaggaggtcactgtggacacatggtgtagtttacatcattgaggaagtcattggctgtcaacggatgttcactgggggtttggtgtgagtttaggtcattgaggaatcaaaaagggggctgttaggaccaaagagggtcactgaggatttagagtgtttagatcaaagaatgcgctgaagaaagtcaatagactcaacagaggaggactgttgagaagttagtgtttttgaggagtagggtgttatttattaaataatagaagtgggaaggggaatcagtggagttcgatgggcactcagagtatttacatcattgaagtcacttgtagactgttggggaagtctttaagggaccaaatgttagtggatgtgtaaagttgttcatttgagatttaatggaagtcactgagaagtctgtgccattgatcactttggaattagtggatgtaaatggagtcattgggaaggatcagtggacctcactgagaataaatgtggatggggaggttgaggac

SEQ ID NO: 18478 - DNA, 1143 bp, Homo sapiens
tatttctactggacagagtggctctagatgactcatgtgtggccaggacactaggacactggagaagtaatgatcaccccatgtacagatacagtctgtgtcctacccacatccttaggaccctaccattgcagtgagctccagatcacttccaacagccaacatttgcatctgtgttcctgcaggctttttccaaagccacagcaggccagctggaagtgacagggaattaatgtcccctacattaaccctcaaccaatgactgatgggattttgcatatcagtagctcaggttctttgccccttgggtgggataattctgagacaggtgttctgtacttgctcccaaactgaactaaactctgggtgcccgctgtggtggcaagtttcacacttcttttcattggctgccttcccttctttgtctcatttctccactcccataacaatgtgccctgtagattccaaataaataacttgaatcttgtctttaggtttctaggtaaaccaaattaagacactcctatatctaatccgtcgccaaatcgtactgaatttatcttctgaatatctatcaaatctagttcttctcatctctaccgacatcaacttagttaaagctgtcataaacgtctgaaaacttttgcatctatctggtaactattaccctgcaccatctctcttctatagccagagttatttttcaatataaatatcatcatattttcttgaggcactcaaatggcttcccattgttttttatgaaaaagatggatggctcttacaaggccgtgtcctggctcctgtctacctatctggttatgtgtagtaccatgagccccctccctgctcatccactcctacagcactggcctgtagaggctcagtttcagtccatgggtgcctcagaactcttgcacaagctgatccctcaatcatttccctttgcctggttacctcatacttattgttgaaggatgccttctctgacaccttagctaggttagttctccttgttataagctctcttggtgccatgtacctctacttcataactcctgtcatagttacaatatgatatccccttgattctttgattgatgtcccctcattctctggacttcaacttccataatggcacag

SEQ ID NO: 18479 - DNA, 1131 bp, Homo sapiens
gtgttttgttttgttttgtccagaccggtattgctcagtcatccaggctggagtgcaggggtgccatcatagcccactgtagcctctacctactgggttcagacaatcctctcatctcagcctcttgagtggctgggactacaagcgtgcactactatgcccgactaattttttaagtatttgtagagactagggtcgcaccatgttgcccaggctggtctcgaactactgggctcaagcaggccacctgcctcagcctccagaattgagattacaggcgtgagccactgcgcctagccaggagtattttttagtagcagtcctagatagcttcactatcatttcctgggaaagttttggaaaccccagcagagccttcatctttaactgtgtgaccttgggccattgaaataacgtttaatcttggttttttcacctgtaaaatgggttgatacgagggtcagttcaggcactgtgcgtaaagcacatagcaccgtgtctagtaggtactctctgttccttaactgtcgttccttgattgctcttaagatacgacagtgcctcttatatcggcaccttagaatcacctaggaaatgtcctaaatacacgttttgggtctccatagagaacctactgtagccgactctcaactttgggagtctctttttttaagctttccaggtgaggtggaatatcacctggttttgagaaacatggatgtaaatctgattttcagcatctgggaaactttttttgtaagagcctttttctgggccccacttccagagggtttttcttttttttttttcttttgagacggagtcttgctctgtcgcccaggctggagtgcagcggcgcgatctcggctcactgcagcctccgcctcccgggttcacgccattctcctgcctcagcctcccgagtagctgggactacaggcgcccgccaccacgcccggctaagtttttgtgtttttagtagagacggggtttcaccgtgttagccaggatggtctcgatctcctgacctcgtgatcctcccgcctcggcctctcaaagtgctgggattacaggcgtgagctaccgctcccggcctttttttttttttttttaaagacagggtctcgctcc

SEQ ID NO: 18480 - DNA, 1045 bp, Homo sapiens
gcacgtgccactgtccccagctaattttgtatttttggtagagacagggtttcaccatgttggccaggatggtctccatctcctgaccttgtgatctgctcccctagggctcccaaagtgctgggattacaggtgtgagccaccgctcccgacggcctctagatattttgagtgattcagcaaacctcctaaagttgaccccgtagctggggtcacagtcctctttctccttcttccccctacttccttcttatatctggctatctgggagagaaaaaatttaatacaattgattactttttagaagagttaatttttacttattactgtggattttttgttttttaacagtcacaccgaggagaagactcagtgggaacatccaaaaactggaaaaagaaaacgagtggcaggaggtttgtatgttgttgtctaaggatcttggatggaagcattaagtagatgaggaaatgtcactggcagagaggtgacaggttattgtgtgtttagggagggctctctggtagagaaccagactcccactctgaggagcttatgggatttggcagaagaagatgatgagatcatagggtggagtgaggatgatttcttactggtcttaaagtaccaaaatggccagatgtggtggctcatgcctgtaatcccagcacttcgggaggccgaggcggatggatcacctgaggtcaggagtttgagactagcctggccaacatgttgaaagcgcatctcttctaaaaatacaaaaattagctgggcatggttgcatgcgcctgtaattccagctactttggaggctgaggcacgagaagtgctcaaacccaggagctggaggttgcagtgagccaagatcacaccactgcgctccagcctcggtgacagagtgagatgctgtctgaaaaatagcgacaacaacaacaacaaaaaccagaaaataattgaggcctttgattcacagtttatgatgttttcctatcgttgcagtgtttataaaattgttcttggctatactatggaattaaatata

SEQ ID NO: 18481 - DNA, 1057 bp, Homo sapiens
gcacaatcatggctcactgcagctttgatctcttaggctcacgtgatcatcctcctacctcagcctcccaagtagctgcgactacaggcgtgtgctatcacacttgaaattttgtttagtgtttgtagagatgaggtctaactatgttgcccaggctggtcttgaactcctgggctcaagtggtcctcttgccttggcctcccaaattgccgagattacaggcgtgagccactgtgcccagcctccagtatattttaataccatttctacaagatttagatcaattccaaatcaaaatgagtgctcgtaggaggtatgagtgcagagtcttaaaatgaaaatcgttagaattttggtagttggcaggtttcttatttacaactaagactttatcattttgagttttctacttctctacgtctttaggcccttgcacagggctaagagatttaattgaaatctactgaaaagagtggctgacagatcttatagctacatttacatgaattacataaaagcccaaaaccttctcaagaagccttttttgagatctaaggatacatggcaatagttattgtatgttacagcgtatgttataggcagttctgaaggaaaggattcgatgactatctttttttggcacaaatgtgatccttctggaggccagaagatagattcagtgggccccagttctttcaggtttaaggaataagcattttggtctatgaaaaatggggttttcctaaagtataagattgtcttatatttataaatgcctgtgttcattgctgtgggttcactgctttctcttttgggcagccatataaataaaagaaccacctacttggacccaagactggcgtttactgtggatgataatccgaccaagccaaccacccggcaaagatacgacggcagcaccactgccatggaaattctccagggccgggatttcactggcaaagtggttgtggtcactggagctaattcaggaataggtaggctcttcacttagttatttatctttgggactgctataatgagatccacttagatc

SEQ ID NO: 18482 - DNA, 1050 bp, Homo sapiens
tctttcttttttttttttaatgccccatatgacgctgctttgttggaattgccattggtgaggatctcactgataaagaaggggacatccctcccttgatagactttagggttgcactagagccatgccccctttgaagtggcctctaagcaaactctgtcttgtcatcattttcctctctgcagctgtaagtgatacggagctgtattttgagtttttgatactgatattactaaggcaattggagggattcttaattcatctaaaaaaaatcagggattctgacagataaaaggatttggaggaaatgtcagaataaagcattgtgggttcatgaagtcctaggttttataattaaggtttataggcaggtattaccgctgctgactggattcaactgtctggattggagatgaacaaactgccatctctgggctaactctgacccactgcctgattttgtaagtagaattttttttggaacacagccatgcccatttattcccattcctataatgttgaactactgtttgtgtatattcagttatcccaaaataatatggccctttgcttgttaccagaagagtcgcccagttgtggcagagatcatctagctcgcaaaactgtaaatatttactctttggcctttcccagaaaaaagtgccgactgctatgttagatactccagttcattgaaagtgatatcaccctaacattctctaaattagccacagcttagatgaaatttaggcaaatggaatgccccaggccccaggaagactgtggcagcacattgtatgtaactgttggggatgttgcctgaaacccccgccttttttttaggcagctgcaaggattagaatgttgcctcctcagaaactaacactcttctctccttgacctttgtttaaccagctttctgaacctgaagaactttgtagattgaaagctgtagcttgtggacctctctctgtggagatcagcatctcagtatccagggggaagccatctcttcacccaaagcttccgctaggagatcaagaggcccgg

SEQ ID NO: 18483 - DNA, 1018 bp, Homo sapiens
aaaatagaccataatcaagtttaatatttgccataatgtcagtaaataaaggactgtaaagcagaggaaggtggggggaatgatagcgtgagtgtgatggagtcatcagcagggagccttccaaagttgtgacatttgatctgagacctgaatgaagtaggggtaagccatgcagatgtcaagagaagtattctcttagcagtgagaagagcatatgctaaggctcagaggtaggcacaagcctggagatttcaaggatcatcagggaagctagtgtggctggagatgaatggagtgggtaggagaggtgctgttgggggatgggtatctggtagactctgagatagcggtgaggaagacattagagggtttgagctagagagtgatgcgagctgtttgatttttgaaacatcgctggatttcagaatgaagtccagactgcattcattcacttttcattcattcacatattcatgaagtgcacctctgtgatgggtgctggggtctactgttaaggacaacagacgttgccactgtctttgtagagctttcagcctattgtggaagacaaatttagtcaaaaaacacagatcttaatgtaaacttgaaaaagcagtgagtggtcctaggaatcagtaatgatgccagggagttgggagacctttggggtccccaaggaagaagtgattgaactaagatctgaagaaagacctgaagagggtggagaagggtcagatggggtaggggaatggcaggtgcagaggccctgggaggagggggaggaggagatagagcagcgtgtttgggagcagagcctgaagggggctgggtacaccctgtggaggccgtcttcatttttgaatgctgtgaaagatttcttgccatttgaagaaatagactacagtgtacttaagaaaatttttggtactctggactgaaaagtagtgaaaataaagaaaaggaagatttatttctgctttttcagtgtatttatgatgaaatatttgaaattcagtat

SEQ ID NO: 18484 - DNA, 1045 bp, Homo sapiens
gtggtcaggagtttgagaccagcctggccaatatggcgaaaccctgtctctactcaaaatacaaaaagttagccgggcgtggtggcacgtgcctgtaatcccagctactgaggaggctgaggcaggagaattgcttgaacttgggaggcagaggttgcagtgagccaagatcgtgccactgcactccagcctgggtgacaaagtgagaccctgtctcaaaagaaaaataaataaaaagctttgttttaaaataagtttagattctcatagaagttgcgaagaatagtctatagtattcttcacaagggttctgggtacccttaacccagcttccccagtgatagtcacagcataacaatcaagtctgggaaattgacactggcatgataatattaactaactacagattttatccgagttctgctagtgtttgcatgtactcatttgtgtgcggctctctctgtgtgtgtgtagttctatgaaaagttataacatatatacatttggtttaccaacatcatagtcaggatacagaactgtcccatctccccaaagaaacaccctttaccttagtttttattctttgagttatatcttaaccaggttaactgagggtaattgtcttaggcaagttagtaccaaatgatgctcttggttccttgtctgtctttttgcccatccaacccacccttcacacatggccgagttatgccaaactttgcaagaggtgccaggtgggcacaaagaaaagaggactgcactcaaggaacttagtctttgaggccaagcacggtggctcatgtctgtaatcctagcactttgggaggctgacacaggcagatcacttgaggtcgggagttctagaccaacatggtgaaaaccagtctctactaaaaatacaaaaaattagctggccgtggtggtgtgcacccgtagtcccacctacttgggaggctaaggcaggagaattgcttgaaccgcggaggcagagattgcaatgagccgagatcgcgccactgcactccagcctggtccacacacagag

SEQ ID NO: 18485 - DNA, 1092 bp, Homo sapiens
gcatgaactggtttgggccagttatggtctgttacatccttgctgaaatggttggtgctaagatgagcacttggcttaggccagaccagtccctagcctgtggagaaggggcaatctcttatctgaaggcctaggaggtgcagggatgtttatatgggctgctagcgcttagtttcctgccacagggagacagtaagaaaggtgacgtcaatctgagatgagagagagagcaaaacagttcttttgaccaccttgaccccgaccttgaaataaggtggaactaataaatcccgctttgtgctggagcaagttttggctgagtttctgtcacttgcaaccaaatcagtcctatccagtatacctagtgactctctggtctccaaaggctatgcctgctgggtactgagtgtctccccgaccgaccccatgatggctacagtgcacatcccttccagccaactctattgtgcacacatattcgtagggtgagttgggccccaggtagagtgattggctcagatcctgcatcctttcagggtctgactgtaatcacactggcatggcagggggaaagtgtattggatttcagagtcaaaaaccacttggtatgaaacccagctcattttctatgtggatgtccaacctgagccagataattaatcttggagatgacgctgcatacttcatcaagttgtaaagttgactgctgtgataatggagaatgctggacaggctgcttttcatgtcatgggttcgctatactttagttcccattatatcatcctgccaatccccatttgttgtttttttgggacccagggtatcagtcatctgatcattgtgtgactttctcaaggacctttacttgagtcttgcacctctggtccacaatgtccacataccagcttgatggtgacttgtgtcattctccatccccttgttaagagaaaatctactttatgagccctctttccaaccgcagtgttgaggactagaccaggcaagatgatgccgctggaccactggatccagctggaccgctagaccacagagcccctggagcctcccaaggccaagcccgccagccacaca

SEQ ID NO: 18486 - DNA, 1133 bp, Homo sapiens
aggttttgggtgaggatttagaacaaggcaggttcttgatcctcggaagagattcttatctgagaggggatttgagaatggcattgcagagtgggaggcgctgctgtgtggaaaaatgaactggaataattattagaacagttctcagaatttacaggatatttgatcataggagtaactttcctcaggagtgatggatggaatgcctgtacttggaatatttttaaattaatctattttcattacattgaaagtatgacacacagagaacactaaaattggatgaggcactacctggaattatataaagaatgacaaagatgcggttatccatttattttctaggcaagttagttagcctctctgtgtttctatttctttgtttataaaagagggacaaaaataggacctattactatctaggtgacaggatcattcataccccaaacctcagcataatgcaatatactcatgtaacaaatctgcataagtacccccttaatctgaaataaaagttgaaattattaaaaaagaaaacgaaggccgggtacggtggctcatgcctgtaatcccagcactttgggatgctgacgcgggtggatcacatgaggtcaggaattcgagaccagtctggccaacatggcaaaactccgtctctactaaaaattcaaaaattaggcttggtggcacgtgcctgtagtcccaagctactcaggaggctgaggcaggagaatcacttgaacccagtaggcggaggttgcagtgagccgagatcgcaccactgcactccagcctaggtgacagagtgagactccgtctcaaaaaaaaaaaaaaaaaaaagaaagaaaacaaaaacaaataggacccatatccctggattgttgaggaaatacgtgaacatatgtggcacacattatagtgtctggcatacaataaatactttgtaatgttactggtgtcttcttaccgttattgtctcactggtgaccgtttgaaatgttgaagctttattgttacagataatggtggatatagtctcttccttgtttattttttgacagaatctttttttaaaaaagtttttatttgtttggtgagaatttacttgttacaggtctagtgctgttatagtt

SEQ ID NO: 18487 - DNA, 1010 bp, Homo sapiens
atccatttaaaaatgttaggtctacccagttataattctccaaagtagcctatctgtggtttaatatgttatctacattctctaaggcagtgttaatttccttttgtagttaatctatcctactaccaaatttagtatatttatagttaaagattctgttaagagctaagtgatttaagtacatctgggataaagtggccttggctttaactatgaaacaaattttctttatttcattctcttcactgataaatccatagtaactggaggcatttttagaattgtgggcaatttcagcctctaaagtttgattaaagatacttcagatattcctactgagaggctagagggctgaaaggaatttattttgggttctggccctagtgcagctcagtggaagagaacagacattgtgagtttaattcccacgctgccaatttcccacgagtctagggtgggtgttacttctcaagaaggcgatggtagaaccgctggagacttcttatggctgtggcaggggactcacacgtcacaaggagtccagaggcatggctttgaagagctcttttcattcattcttccttttgttcacttgtacatcaaatacatgctgtgggcctactgtgtgctgagcactgatcttgtcaggttcttggggaagacttcattgctgaggtgacctttgagctgagtgtatgagtgcaagagagagcgatcacacctgggaactgcttaataaagtccccggcatcttgaagccacttgcagaccttggcagttgctgttgctcctgctgctgctgctgctgctgcattgtcaagactacattgatgtcttggaaatatagaaaaaagaggctgctggactgtgtgcttagaatcagtgtgctaactctgttaccaacaccgtagagaagtggttccagaaggaagagttcagggtgagaatgaataacggagtggctttgcagtgggaacctggctttgcagcacagctaggattggagaaga

SEQ ID NO: 18488 - DNA, 1033 bp, Homo sapiens
gtgctttgtcacccaaagtcaccgcagctcctcttgagtgctttcaagatcagaccgaggggtcctagttcaagctaattcctacctgtgcgatcactagccaagtactgaacctctctgaacttcaattatctcatctgtaaaaggtgttggtttgtaattgttcctacctcttagggcttttgtgagagtttagatgataaaccaccaagcaacagtggctggcattctgtgcacaatcgaagtctgctgctgtcagctctgtggtcgctgtctgcactcccacccctgtcatcctccaagtctgatctcctcccgaagtctcttcctggacctcagccctcagggattgcacctccctctgaatatgctgtcccttctaatcatgccatttagccacactgcctagcactttcttttttgaatattcgtgtcccaggtccctgaaaaagttgctaagcctgctaaaagcaaggcaaggcctttctttctttgtaaccttaatgcccagcaacgctccattcagtttgaccctcagttggcttcatactttgattttatgtctttatttgtttcttaatgagctactttatcattgtgaaaacagttaaatatcaatagtcaatgaataaatattaccaaaaaaaaaaaaaggtttgtcgtttaaaaatttggagctgggctggaaactagggatactacttggtatattttagttctactgatatgacagtatttgatacttaatcatattcaagcagctttacagagactaccatgagaatgggttaaattaagaggattgtctttgctgtttagccaatatgggccaaagttcagtggtttgagacatggcggggtttggtagtagatgtaggatattgctggggaaagagtgttagaggatggaagattgcatgatatttctggctttgctctttgactgtgtgctgtttgtaaaatcacttaagtcccatgggtcattttcttccccatatcaagcacctgctatgtatcaggtgttgtgctcacg

SEQ ID NO: 18489 - DNA, 1033 bp, Homo sapiens
ggtgtgagccaccacacccagcccctctccctattttaatgcgaggtaattaacaaccttaatttcaccggtaacctgaattctcctttgccacgcagtctaccatattcacgggtttcagggattaggacctggacatctttggttgggaaatgggcatcattttgtctaccacaacgtgagagcccattgccctgcatccacagtcataaaagtctgttcccttcctccctgattcttcctaacttctcctgcctgccttgcaggatatgtggagttatcagttcctagcaccactggccaaagcgaggatagctgattgcactcctactttcctgctggtggaaacagcatgtatataggtacaactctggtgtggggaaaatgctaaagatataaagtagaaatagcctttgtgtgatgtgagcagcagaacaaaaatcgagggtgccaaataatcgtatgaagtggtgaactgcctaagatggaatattgctgttcctaaatcctggctgtgttgagacatgtgatcctgccgatgagatgagagctgaaccactctcttctcccagatgctgggcttccgaccttaatagagaccgagaaacttaacagagggctcagaagagaaatctattgaaagttactaggtgccaggtgtctcggaaagtgtttaacacatgcctgagacgttaaaggcaagattcatgcattctttcagcagacagtttcttcacttaccggggaagggggtgtaatatatgggggtatagggataaataattctgtgtgctgtgcaggccgtggagactcatcttctgcacaggtcaagttctgaagtcagcatataagctggaagtggagtgaagtcaaatgaccctcaaagatccttccagacttcatgcccttggcaactcagtttggacactcatatgctggtttcttccttgtatttatgcagcagcctccttttccacaaaaagcagaggccaacgtatctcaccccctcaatttttttactttccctctccct

SEQ ID NO: 18490 - DNA, 1048 bp, Homo sapiens
gaagtccttggcgtccaggactaaagtcatgtgcaatttaacaagatcttggtgagataaaggaagttgcgcttgaggaaacattgaaacacaccagatggaattttccaattccctcctacatgatagagactaggtgaagggagatagaccacaaattgattttgtgtaactcttaaattaagtggagcagagttaaaaaaaaaaaatcactggatttgaagttggcctatgttagattactccaaggaagttagttaatatgttaatatgaatctagatgaacattgagtgttttgctcttcttgttaatttgcgccatctactaatctctggacaatggagaaaaagtcgtaggttatgagttttttatttatggacattaagcaatatctttaaaatgtaaaatgaagccgacaaaatgcacagccagataacaacaacaaatctaatctaaagtgacaggaagagactctcccagacatttttctctttaatgtaacatgactttaaattgatgcaaccccacagtgattgaaaaactctcagagcttgtctcctatgattacatttctgatctgtacaacttaattttttaactcggtgagtctcagttttgcgaatgaacagttctcttttgctttctctctcatattatttgggaagacattatttggcaaccaggcagataaagctctgttaccacgacgaatactgagaagtcctaaaacaataaagaccccaagaactcaccctggaatatgtacctccaaatctcttctcttttccttctctccttctctttgtttttctttctcttcctgttctcttgttttatcttgacttctctcgactgtggtgacggtttgcatatatctgcgattgtactgaaacttaccaaacattgtacgttttaaatgggcaaaatgtatttgaactatatatatcacaataaagctataatactcttttaaagtgtctcctgaatcattaccagtataattattctgtgaactgtattttgatgaattcagaattaatttaaaat

SEQ ID NO: 18491 - DNA, 1084 bp, Homo sapiens
ctcgctgtggagcgcctccagaacatgctctcagaggagatgcaaataggctcagggttcagggggctgtccccttccttttgctcaaggctcagaggggagccagaggaatgcagggagggacgcactccctgtcattcccctttcagtctcaggagattctggttgaagctctggcatggactttcctgcccaagaagtgtccttgcggtgatcatttatgtgatttgggtacctgctgcttgtaggctgtgactgtcagtagcagaaataaatatattgcctttctcactgtgtacagtggtgctgtaccaagggtgactctgcccatcaagggacacttgtctggagatatttgggttgtcatatcttggaggagaataggctgctattagcatctagtgggtaagagcaagggatgctgtagaacttcctacaatgcacaggcgcatcctacaacagagaattgtctggccccaaaagtcaatagtgctgaggctgagaaaccctgcacttgtgtggaccatgcccttttatgcttttcaaccttgaagcactaataggtcagagaagaatgccagggatgtgttgatgggtctgcaagaggttgatgggggatgcttgagctcctaccaagtggaaggtggtgtaggcaaagagaaggatgcataggcacattggacggtggaaggcaggggctgctgaatgatgtggcaggaaacatgcaaagtgctcagcgtccctgggcggtgcagagtcttgggaagcaagaggatggagccatcctttcagtttccagcctgggtttcccaaaggagagggtgtttgagttcagtggcagagagagtggggaagagtgttggagcccagctgagtggccacctttgtcaaatggagctgagaaatgattttcacatggctggcgtaatggcggagtttccaaaacagcagcacaacaaaatagccatttacatgtcaagactatattcatagaatccatatgtctaaggtggggaagttgtcattattcctgttttatagatgaggaaacagaggcccagatggagtaagtgactgctgaagt

SEQ ID NO: 18492 - DNA, 1023 bp, Homo sapiens
tagcttcttccagcatgtgatcatacatctacctaacctctcccattggttgaatttaatatactagtgaattttccattgcaaagatgaggttacgaatcatagtgttcatactcagaaggactttataaatattttgcctttttgaagtatatacaagaaatgaaaaaaaaaacaggaataaataaaaagaataaaaagagccaggactagaacctacaattcctgactcttgatcaaattgcttttctttttaactctagttaaatattttccattctttttaactcaagaagcctttgtttttgttgtcatcgttttatgattaacttatatctggtcctttagacatttagattttttctgttttatctctctctatatgtatatctgtatatatatttatctatatctatatagagatatatatatatatataaaataatgaatgaaatggactgtttgcaacctcagatgtatttctaggacttagagtgattagcttgaggcgatggtagtttctgtttttggagtctctgtaggtctcagactcacagtctgtacttcttgttttgggggctaattaagtggacagtttcagtgttggtagctcatttaagccataaacatgcagaccatgtggaatcccattagtcaaaccttagcagagtgccttgatgagtacctccttttctttctgaattctattagttgatgctttgttctttctccccaagagccatatctcagctatttcttttcatttcttgtgtatagttcaacatctttctttctttttttttctaaacaggatctcactctgtcacccaggctggagtgcagtggcatgaccatggctcactgcagcctcgacctctggggctcaagcgatccttctgcaacagcctccctagtagctgggactacaggtgcatgccaccacacccagctaatttttatattttttgtggagatggggttttaccatgttgcctaggctggtctcgatctcctgggctctag

SEQ ID NO: 18493 - DNA, 1089 bp, Homo sapiens
ctgtgaagtcagaggcagagattggagtgatgcgtctacaagccaagagatgccacggtcatgggcagcccccagaaacgaggagagaaacctggcacggtttccacaaggagtcacccctgccaacaccttggtttcagacttctggtctcctgaactgtgagagtcagtttctgttgagcttgtgctgatacgctagggcagccctagcacactgccacatctggtttcccggaggaacttcacagggtctttgttctttatctacagtctctggaagtctcagcagcctcctgtgttcgcaactgtcattccagagcagccgtctcgtgttatgcatttgcttactcataagcaaatatttcacaagaacctgcgagggccaggctgggccaggcaggtattgcaggtgcaaggatctatataagacagtgccctttagaagatccctgtctcattgagaagcgttgagtaaatgggtctctctggtcattctctccagaacatgaagccaaagggctgagagggagagactccaagaatgaattagtgtccagcaaggtatcgcttgtctcaggatgacaacttgcaatttggggatctctcaacgtcctgacctccatctcagtgggcatgttcctcacctggctggctgcccctgcttactgatgcagcctcctgtcacacggtactcacctctattcactgtattccaccaacactggccttgggagccagcagtacccccattgtacagatgaaagtcttgtgactgtcaacattaaaatgagaatgatattgacccatgatacttacccacctgttcagtggattcggtgtgccgtcagcatggttcccagcacatagtaagtgctccgtaaatgtcagcatctattattatcatttgtgtttttttttccccttctctgccttcctttctctccctccttggtctgcttcctcctgttgctatcagagcctgcctgcctcatccttgttccagccttgatggtgatgatgattgtggttgctgttgctatttgtttttttggtttgtttgtttgttttgagagggagttttactcttgt

SEQ ID NO: 18494 - DNA, 1011 bp, Homo sapiens
ctgcccacctttcttttttttgccatgggtgcaaaagatgcctctggggatcccagaggactcagcattggtaaggatgcagtcctaatcctgaaggagggtacagctgaccagggaggtaacacatgaatgcagctgatagggccagttggacccagatttcaactgcaatctctatttccttcggatctgttgcatctgctcaaacactagttctgcaatttcccaacacctgccccctgccccttataaaagctcatggttccatgtgactttccactcctgcgtctctggccttggggcaggtcagtccgtggatcacctcactgtcctagggatgctcttctggtccacactgtgcctaccttggatatggagttccacttgttcccttacctttcacccacctgtgctcctcacccaagcaggcattgatggaggtctcatactttactgaagatgtgaggaaagaggacacttatgtagaacccaactgcaggtggagccttggcgatccatagccctctgtaaagtggggattgaagcacatatcttgcaaggcttgggcattgattgcagggagtaatgtgtatatgaatcatcagctatgcaacataatgctgatgctaagtactaacattgatggagtgttggcatgagctgggcagagtgctccatcctctatgtgtgtattagttcattcttgcactgctataaagaaatacctgagactgggtaatttatttaaaagacacctttaattggctcacagttccacaggctgtacaggaagcatgatgctagcatctgcttggcttctggggaggcctcaggaaacttacaatcatggtggaaggcaaaggggaaggaaagcatctcacatggtgcaaacaggagcaagagagggagcaagggggcaggtgcaaaacacttttcaacaaccagatctcaggagagccaactcaccacacagcatacgtgctaaaccatgcatgagaaatctgtccgcat

SEQ ID NO: 18495 - DNA, 1074 bp, Homo sapiens
ttgactttccaggctcaagtgatcctcccacctcagcctcctgagtagctgggactataggtgcgtgcccccacgcctggctaagtttttgtacttttagtagagacagggttttgccatgttgcccaggctcatctcgaaccccttgactcaagcgatctgcctgccttgtcatcccaaagtgctaggattacaggcgtgagccgccgtgtctggcttgctccacgattttcctctatgaattccacctttcccatggtgggaccaaggctggaagtacttcacaaaggctccatttgaaaagtggctacaaataaaagggaaaatatagtattccttaaaaaaaaagtagcattctatttttccccattggtaagtagtacaaatttgagaaagtgtaaatttgaattccttaataatcagatctctgcaatgtgttttgcttttatcatcctgggttgccatcttggccaagtgtagattattctgctcagggtagccatactgagatcctggtgtgcacaggaaaagagctaacctttgtggatgaaattgtagagtcactacctgcatttgctgtagctcttacaattattttatttttggaagacatcgagagcatggtccaaagctgcataggttgcaagtgggtagaggcagaatttctctccaggcctggtggattctaaagctgtttactcttcacccaccatttcctaggtctggtttcttggttaaatacgtggaagagtggatggacagaaagacagattgatcagttctccacaggcttccccaaactggccaggtagaaataagctaagcaaataaatgacttccccattttataattttctgcaagtcacataagccttcatgttgtttatttcttggttttagatttttttaattataaaagaacattattatacattatttgaataattttttaaaattatagagctgtctaaaggaggcattaaaaaaaccctttctattccttcatctaattctatccctctgaggcaaccatgattagtattttgtacttcttgtacatcctccttcatgtta

SEQ ID NO: 18496 - DNA, 1081 bp, Homo sapiens
agacacaattatattggcatatttggactggagaacccagcatctgacttaaagagtctgcttctcttcaaaattgcttaggtgttttcaaactacaaacaaatacactcccaaaacctcaatagattctcccagtataccctatattttggccaaactggaatcacatcctggtctccccaaacactgcttgctttttgttcctttcttgctcttccttctgattgcaatgaactccccatttccagtccccatcctccaatcccttcatgtccagctcctgctcatcctttgaaacccactggattttaagattccatctgacaagaatgatcactgttccttccagttcttcaagcactttttctgtttttgatgggatttatcacttgaaaatgcatattatagtaatttctgaattcatcctgattctcctactggtttctaaactcttcaggttagaattcctgttggatatccctctggcccgaaattcctgaatgagttaagcaggacacctagaactatgcagaggtaataccttccttgacctgtcccttttctgggtcagtttgcccttcatgatttcggcaggagtgtgtctccttccattctggtgaacacatccaatgttcaatgttgctcatcagggtaagagttctaagtccctatgtcttagagacaggggttatctagctttgtcttctgcattggcttcaggcttcacatccttcctggacatgttcaatgctgctttcgtttcttgggcgagggccctagaatcaccttagacaccttgctctagacatggccccatcgtggtattcccttttgagaagacaaagattttaaaaattctttctcccttaatgcctcatgaatgcccaagcagcacttcatggaagtacactgagtctctactgcttgcagggattaaacataacattctcaacagtggtaagagagcctttcccttctctttggctcgttttcagtttttattaatttcctgtgcttctggttcatgaatcccaagtcatgatgtgaatcagttcagttcagcaagcactgagctcccatg

SEQ ID NO: 18497 - DNA, 1749 bp, Homo sapiens
aatgtaatagagctattagaatccagtgtagtagattggtaatagtaaggaacaacagttgtcttcacattgttaaaataaaagtgagataccctttaatcttcgcaaagggaaataactcttctgctaaccctcctgcccaacctgagatgaagtatcaggggatgcagtatggatgtattttcctgacgattggtccttctgtcctgggacccaggtgtgagtgcatagggaaaagggaggagaaatttaatcctgtaactatctccttatggaaaacaggaaaccacagatgaatcaaatgaatccgtttcccctctttctgatcctctgcaaaagtcatcaaaatcactctgttctcaccaggcaactggagtttcgtcagctgagtctagagtgttccaggcagttacagctaatcatggcaggctctacccaactgggggaacaatttagctgttgtgggatttccctttaaattaaatatgttcttcaggtacagttttttaaaaccagtttttctcccccacttttaacctactttatcgtccattgctgggcctagaattgcatgtccattggcatggctgacgttatatataaatatttggaattgtagttgtaatgatagatattatatatatttcacatgttttaagattaacatattaacagtttgtgatattcaacaaagaatgcaataacttctgcgaaacaggtaagagaaacaaccagtcacttgatctggatattgagacgttacctgtaggatatgtattaggctgttcttgcactgctgtaaagaaatgcttgagactgggtaatttataagaaaagaggtttaattggctcacagttttgtaagtggtacaggaagcatagcggcttctgcttctggggaggcctcaggaaacttacaatcatggcagaaggcaaagagagagcagcaggtgacatggtgacagtgggaagtgacagagcgtggggtgggggtgggaggtgccccacttttaacccttttcctgtttaggaaaaaaaaagcgcagctcactgccagcgctcatttaattttacataaacatgctctttgaagctgaagcaaatgtgaccgattttcaaagtgataataaaatataaaaacagttcttggaaatatttctgaacagaactaacatcagaatcatctgaatcatcagaattgtgtattttggaaaaatcggattcatcaaatgaatcttcagccaacaactgttcgagaattatgttaacatcacatgcaggaatgctacattttctcggatttgacattttcagtgatggagaactattatattttgtaaatggaaataccactactaaaaacagaaggctataaatagaacgatatccttcgtttccaaagtcgatatgctagagtgatgtgaaaaaaataataaaagcgagatatttcatggcaaagcgatctcagggtaaacactgcacaccagtaagtattcttggggcaaatgggaaaagggttaaaatgaccagatctccagagatctcactcactatggtgaagacagcgccaagccatgagggctccgccccagtgattcaaatacctcccattacggacatgtttcaacatgagatttgggcggggacaaatatccaaactatatcaggatcccagcagactgggtgggtggaggttcagggatatctgggaaggactaagaatagctttttcttttagtagatcaggag

SEQ ID NO: 18498 - DNA, 1323 bp, Homo sapiens
accaagtcctttgcagaatttcctggtagaagtttaaatgcaatagatgcagtaaagaaaagggttggcttaagagttgacttacaaagcttggtcctaacagctttttcctttatctgtttcaagagtcatacgatatttgatctttcaaacttacgtatttcttccattatgtttagtattagtttcgttttctcaagatacatatttaacaactagcaaaatgttggaagcggtctcctctgctgtctatttagggaaaatggaactgatctttctgaaataggcatgcatgtaatgatgatgtcattaatgcttggctagctggtggacttaaacccagagggcacttctgaaaaggggcaaagtgcatctgcttctgctttgtttatagactgtcagccttggatctgtcactccctcagaagggaaggattgaggccaggcaaggtggctcacatctataatcccagaactttgggaggcgaggtgggaggatcacttgaggccaggagttcgagactaccctgggcaacacagtgagaccctgtctctactaaaaaaagagaaaacaaaattaaccgggctgggtggcacccacctgtagtcctttggaggactacttgggaggctgaggcaggaggatcacttgagcccagaagttcaacattatagtgagccactgtactccagctgggtaacagagtgagaccctgtctctgaaaaataaaaactaaaaaaaaaattaagttagaagggagggattacgaccctcatgtgtatcaagaaacaagctccatgaagccccataggatggctcagcaccagaacgaggtctgactgttaagcaaagtcaagtgcatgatggctgaacattgctgggggaagattttgcaattatgcattgtttgtgcctttagccagtaggtaaggacagtggtaccattctgacggactctcggatgcttggttttatggagggatcttaaaacagtaatcggcccatatgtgcagcaacctttgcgcctaaatagctgaggacaaagtaggttgcttacttcaagagcccttccctttctcttctttgtcaggcctgtaatgttcctcacccactgagtatttaatatctgtgttttcacatcaaagaacaagctttctgtctcccaggatagtatcttgtaaagccagcctctttattacttcaccagttttaaggctttattacttgcgacctaaagcctgctagtgaattatgcatgttagaactcacagcaccgtctctgcccactcttttgccacctttttgggggtccaaaaagtaca

SEQ ID NO: 18499 - DNA, 1039 bp, Homo sapiens
ctacactggaagtgtaatccgaggccttggaattggtcaaacaaaactcacttggcaacatttacttagagagcactctgcgagcactctgcgagcggacatgtcgatatcagctccctcctcgttcccccccccaccccccatcccatgtttatttgtaattaaagttaagatgcttgagaatggctttaccattaatctagaaacatagagttgtttcctggtgaatgatgtatgacagttttctttgtgcttcctctgaatagagagtagtttttgtggcattgttacagagaacagctttcctgtagggctcacaggctcaactgtttcaaactcctgttgttcggtaaatctgtcagaagggtctgcaagggaccgtatttatgaagagagtgtagagtggtcagtctaaaaagctccttagtgtagtactttgaattttaaattacacacataattcaaaggtaatgtaacttgccgtgtcggactttagtccattccgttaaatggagaaaaatgactgacgtgaagaatgacttattgattcttggtgggaaaatgacttctgtaatatgggaagtatggtaaaaggaatagcttaattatttagggagcacttttcaaaatgtgcttttacagcagtacaaattgtacgtatacaaatggtatgactaggttctttttttaaaaattctttcataggagaaagttatgagaaggcttatattatttcgttgctaaggcaaagtttaattttgcttaaattcctgtaagactaactaagaaaggtaggaggagtgatgagcagtttcttaaccctttaagaaatatgacttgttctaattgccttttcttatttacattatacttaggctggtgttaggatgccgtggctgccaagtttacacagtgcactttctctctctctttcttcttttggtttatgatgtttttcagtagtgtcatggaactcacttaatctgatttcatcaagtaaatatatgggaagttgagatgacatatttttatctgacat

SEQ ID NO: 18500 - DNA, 1303 bp, Homo sapiens
caattcattttttttggatggtgtttattaaagtcaagaaatcttttgcttatttgctaatgattctctcccctttctcttcttatatttttgaaggctgaattggtaaaattatctggcccaataaaaatatgtcctgggttggaaaagagcacaagtttctttttctagccctggagtgaggtggctctctggcctctgggttcgtttggtatcctggggagtcattgacacccacacactcctagtcacaagacctttccctcccatccagattgtgtttattttacggctctcgcacggagcatgcagctgtgtaaacctgagaatggtttctgcacagctttgatctttgcatggatcaacagttgcccttagtccctgaaccctgttccatggccccatatttcttggatttttccattttctagtaattatggcatcatgtagggagccttccaacagcatcccccacagctttgggtggagaatttggaaaaaatgccttaagtctgccatttgtagaaccatattaagtagtgatttccatttgatgccaaaaaaatatgccatttagtttcttcctaagaggcaatctgacaatttcgagtagactgctggagtctgacaaatttgaatgtattatggactgaataaatgtttattgaacaaatgccatttttttaactcttaaaatgttcagttcttccaccaaacatagatgacacaactgttggagacggagcaccggactgatgcagtgtagcattattttgtaatctacgaactgggagcctatggagacctatgcatggtggaatacaaaagtcatgacctgtctttatatcctagtatgggcaataaaaccctccctttaatagccttaaacatggtacaaggaaactgtgcaggagttccagggaaggtgccatttttccatatggagttgatatggtctgactgtgtgtccccacccaaatctcatcttgaattctaattgtaatccccatgtgctagggggagggacctcgtgggaggtgattgaatcatggagaccgttcccccgtgctgtgagtgagttctcatgagatctgatggttttgtgcggggcttttccccactttgctctgtacttctctgtttcttctccttcttgccaccaggtgaggaaggacatatttgcttctccttccatcatgaatgtaagttttctgaggcctctgcagccctgtagaactgtgaatcaattaaacctctttcctttataaaccacccagtcttgggtatttcttcttagcagcat

SEQ ID NO: 18501 - DNA, 1049 bp, Homo sapiens
caaaggtgaagcctgcacagtaagtaggccagtggtgggataagggatccattggcccaggaaattggagggacttggagaaggaccatctcacccgtccaaagaatggaggagtaagggaaggcttctggaaagaagttgtgttgaggctgtgtttggaaaggtgaataggagttaggccagtgaggaatggggtgaacaactgcaggaacttgagtgatactttggggtgaattctctctctctctctgtctgtctctctctgtctctgtttctgtctctctcactcacattttaggtaaagcagtgtttcttccccaggggtgattgtgtttgttacagtgtgatggagactggatactgcatctagcagatagatgctgtcaatcatcctacaatgtgcaggaccgtgcccacacaaagaatgacccgtccccaaatgtcaacagtattcaggctgagaaaccatgtactaaggcacaggacaagcatcgggttggataatggcagagaaaagtaccttacctccttccagaacctgagagtgtgtgactgtgagtgtgtgtgtgtgtgcacacacttgcgtaaagtgagaaaaatctggtgttttttcgaagtctgcctcgtttaggctctggactcctgctctctgttgactctgtccagagagtaagcgactcagcaggtgtgcctccccatgggcccccttcacggtgtcctcaccttgatttattagagcattttattcccccaacagtgtttatgacatccaaggacttggtggaaccatgaggaaatgagagtggacagtgagactactatcattcattttcactccccgtaaacatcttctgtttctgttttagaagacattgctaatcccctcatgcactggctttgcgaatttctttttcagcctgggtttgaaagcaaagtggtagtgactttttcctgatagctgctgaaaaggttccacagtatttggaccgctgcctgcttctaccctggagcacaaaagatccaggcgtagaaattggttctaacaatat

SEQ ID NO: 18502 - DNA, 1054 bp, Homo sapiens
accgtggcctttgtcattcaggtcatgctgctttcctcaaggcaaggaactgaggttttctgttggcagtgaggtggtggcttcttgtttccctggtcttagatactgctcaactcacagttgaaatgtagaagtgaaaagtcagacagcagcaggtgttgctgggaatgtggagaagttggaaccctcacacaccattggtggggatgtaaaatggtacagctaacttggaaaacagtcggcggttcctccaatagtcaagagttcccatatgacctagcaattccactcctaggtacgtatcaaagagaaatgaaaacatggaccaagacttgtacatgaatgttaatagctgcattgttcttaatagccaataggtggaaaaaaccctaatgtccatcaatggacaaatggataaatatgttgtggtaaatgcgtgtaatggaatattccattttatattcataaaaatggacaaagtcctgaggcattctataatgtgagtgaacctggtaaacatgaggctaagtgaaagaagttagttacaaaagtccacatatggtgagattccgttctgtgatatgtccagaacagagaaatttagagatagaaaatagatgagtgatgactcagggctgggggagttgggggtgggcgggataggaggggtagaggtgaaggtgatgaaaatgttttgcaattgtctgtgttggttgcacaactctaaatgtactaaaaatcattgaattatacaattttaaatgggtgaatcgtatggtatgtcaattatatctcaataaagctgttaaaaaatctgaaagtgtcaattaatctttgctcccagagaaaaccactcagggcccgagctgctcatgggcacaaaaacccattcctcagattccttggccatgctggaagcctggcttgtgtgagagcctcaagtctctgtaacagcctgggagtgttggtcccgtcacagggctgtggcagcctttaaagctagaaggcactgctcagaggaactggttcctttgaatccttttccgtcaccatg

SEQ ID NO: 18503 - DNA, 1051 bp, Homo sapiens
tggattggtttgatcaactttgttgcggtctaatttatgtaaaataaattgcatccatttaaatatacaattcaatgagttttgacagatgcacatgcccatgaaaccaacacgaaaataaaaaaaatagaacatttacatcacctcaaaaagatttcaaatgccacttctgtggtgtatgactctgagtccagacagcctcagctccaggaaaaccctggtctgttttctgtcactattgatgaatttgcattttctagaattttagataagtgaagttttctagtacttgttctgcatctggtttctttcattccacataattaccttgggatgtacccatactgctgcctgtatcagtggcttactcattgtcattggtgagtagtactccattgtgtggagaaatcacattgttttaaaaatacctaattacctgctgatagacatttgggttcttcccagtttttagctgttgtaaatggatactaatgtgaacgaagccaccgtgaatattgatgcactagtctttgtgtggacatatatctgttttatcttgggggataatactctggagtggaatgggcagggtggtccgtatagggctatgtataactttttaagaggttggcaaatacttccctaaagtggtcatcccattttacattcttgccaacagtgtttaaggatccacttcctctacatccttaataatacttgatattattggtcttctaaattttctgtttgggtacatagtggtattttgttgtatatttttttttaattgtgaaatatgtgagtatgatgagtaatgattttgaacatgaaaactatgcttattgctcatatctatgttattttattatttactttttttgagatggagtctcgctctgttgcccagtctggagagcagtggtgtgatcttggtttactgcaacctctgcctactgggttcaagcgattttcctgcctcagtctcttgagtagctggtgttacagaagcctgctaccatgcctggctaatttttgtgttgttttattttta

SEQ ID NO: 18504 - DNA, 1034 bp, Homo sapiens
ccaggtctgaaatctgctctctggagggaagtgccctgtccattatcctccatggtcccatctgaactggatctagagaagggttactctccttaggggaattagcagctgtcagcccacttcctgctggtgcatggttgaggctccgtttttttgtttttagcagttataggcttttaaggtcagattaatctttatttaatttcttaataatcttataggattcagatgtatttgtttcccattaattcatgagtagtggccacaccagtctttcctagacttgaatctcaagttgctttatttttctaatttgttatcatcatgcctctctttcagcacagtagcagctactatgaggctatttggaataatgagcttggtttgaaaagtagcatcattaatctgatatatgctactgggctgaattatttgaattcataatgggctattgtctctcaaagacttttgcaggcttattttatgctttttggactccagaatcaattgactttttcaactctgtaatgtcctaactttcatttctgcttgcacactggacaatgctttttttcaggaacacatctctttcttgtaatatctttgtaaaagcagcgtggagcagccagcacacaatgacattttagctcttccctagagcttcagactcaataggtactagatctaccttatgagttatggcagagcacaattttaccaaaagtctttcagtgtaaagacacagatccacatgggtgtctctgattgacagttggctttgtctatttggtgagtaggatatccaagctcatttcatttagtggctgtattgtcccctaggaacttattataacttaacgtttatctcatggaaggttgaagtatggggaacccaattcatatgagaaatagcccaggagttacattctcttctgctcagtgaccattagtggaaatgtaaatatctcacctcaatgcagtgtgggttaggaaatgtggctttctgtctagtcaacctctttttcctatgctgt

SEQ ID NO: 18505 - DNA, 1049 bp, Homo sapiens
accttggcgaggcctttcaccaagtccatggtaagagaacagcttctggcgccgcaaacaccttgggtcctagagaaacctgcacacttgtgtctccacctttttacctcttgcgggcatgagtctggtctcagtaataacattgtccagcccatcataaagggctcttgaacacattttcatcaactttaggttaagtctgtttgggtaaatgcgtcttggagggctgggtagaagatgtgggtttcagtatcatgttaagtatggctgaaagtccttatggaaatggtgatttttttgtttgtttggttttgttttttttggggttttttattcagaaactttgaaaatctattttgttgaatggagcacttgaaaactgctgttttgtgtcagtaggtaaacaacaaacattggtgactactgaattttcagcagatgtgattcctttgtttcacagaaaaactgtatcttttgttctaaatttttttcttctaatgggtataatcctctgttggagagtcctttgatagctaggagtgtgttttcttctttactttcccaaagacaattttggatgaatcatggtactgtggttacatttggaagtgtttacaaaggtgataagatgtttttatagtttggtgttcatttatcgaccatattaagaaccttcttctatgaaatggttttagtaggaagtattttgaatgaagaaagcgtattttccacaatatatttggtagattatttttcaaaaccaaaggacttcaaaaatgtcttcctattagtggacaccagtattccagttacccaaacttaaaatctacttgacagaaatcacccttttcccaaacacatttgccttttagcgatatcacaggccttcacagttggacctaggatattaataaaacaaagcaaaacaacaacaaaagaagaactattgcaggcctattatcctccagctgatctcacgaccttggaaactgtctgctgccttctcttacactcattcccacctgccacccttaaccttcgtatttggg

SEQ ID NO: 18506 - DNA, 1054 bp, Homo sapiens
ttagaattattatctttattttgtaattgaaaagcacagaaacctcatgcagcgtgttcaagaaaatgatataccagccttgtaaactttcacttgctaattgcagctgcatttgctttgtccaatgcacggtaatgcccctggcatccatatctagttatgcagttatgcttcctttttaaaatgtttgacagcaccttcactgaaatgaatgctgccaccaccgccaaccccaccttttttttttccacataagctttcatttctggtaaatacatccttgccagagttcccaggtccaagccggtcctttgtggaccagtatgcagatttgaagttgagcactgtcacttgcctcttaggagtgttttgtgcaaccacatatttgtgttggcagataacagtagaaagaatatcatgtgttagggtagcaagagcttagcagatgttttagggaactgcattttcaaatcattttacattaaaaaatggcttacgtttatggaacttctgcgacgatcgggttacgtttcctgtgcccgtgtaaagccagtcatcgtgctgagttttaacggatgtgcagctaccctgctaatggatgggccggcaatgctggtcctgttgcaaagttataaattataactagaaaaagcacaagatgtcattcttctaaccttcgtgaaagccaaacggggtaattctgcccttgaataacccgctgcagggtgatttatagttgtacaatttaaaacgtaatgaaggagataatagatgttgatttgttcctgaaattagtattttagaaaaatacttctccccctttccatctttaaatacctgcagctgactacactatagatactatcaagggcaaagccccctgtttgaatgtgtattggtacattggtgtatcacatacaaggcagagggtgtataaaacaggctttctgttgcgagggggaaatatggttttcaaagtggaaatttcattgtattcttcatgaatctaaacattttgagactcctgagtgaggtttgaattttctggttgcct

SEQ ID NO: 18507 - DNA, 1787 bp, Homo sapiens
agggacgtatccagcggtgtgggtatgtttggagggaatgaatgtaaggagagagaggtgaggcacaggagagacaggatgagctttagaggtagacagctctcgggtccagccctagctctctcccattctaactcttgggcaaggttcaaaacctgattaagattcatgcataaaactgagatgttagaactacctcatgggcttgtcttgagaattaaagacgttatgaacttaaggcctctacagtgtgctagatgcttaagaaatgttaactactattgttattggcttgcagtagaaattaaagattatgaatgttcagcattcagaatatactagatactcaataaccattattgctgtcattattaacattattttccccagctttactgaggtatgagtgacaaaaatttcatatatgcgcatgagtgtgtgtgtgtgtgtgtgtgtgtgtgtgtggctgggcatggtggctcttgcctataatcctaacagttgaggaggccaagctgggaggatgacttgagcctgggagttggaggctgcagtgagctatgatggtgcccctgcactccatcctgggtgacatagtgagaccctatctctaaaggaaaaaaaaaattatatgtattcgtggtgtgaaatgtgatgttttgatattcatatgcattgtgaaatgactaccacaatcaagctaattaacacatcggtcaacttacatagctatcattttttgtgtgtggcaagaacattgaaagtctagtctcagcaattttcaagtatataatacgttattattattactatcgttaactgtattcaccatgctgtacaatagatctccagaatgtattcattctgtctaactgaaacttaggatcctttgaccactatctccccatttatcaccccctcccacttccccactaccagcccctcctgggaactgccctctactctctgcttctgtgagtttgactgctttaaattccacacaaaaagtgagatcatagagtatttgtctttctgcgcctggcttattttacgataaattgattgcttctcttcccattgtttatagatacccattctcgtaatgatggcactgtgtctgtcatagaaggcctaattctccctgttaacattgaacataaaaacctcatatgggccaggcacagtggctcatacctgaaatcccagcactttgggaggctgaggcggatgaatcacctgaggttgggagttcgagaccagcctggtcaacattgcgaaattctgtctctactaaaaagatacaaaaaaattggctggctggtcatggtggctcatgcctgtaatcccagcactttgggaggccgagccgggcgaatcacgaggtcaggagattgagaccatcctagctaacatggtgaaaccctgtctctaccaaaaatacaaaaaaattagccaggcgtggtggtggggcgcggtcgtgggtgcctgtagtcccagctactcaggaggctaaggcaggagaatggcgtgaacccgggaggtggaggttgcagtgagccaagatcgcaccactgcactccagcctgcgtgacagagcgagactccatctcaaaaaaaaaaaaaaaaaaaaaaggctgtgtgtggtgactcgtgtctattgtcccagctacttgggaggctgagacatgaaaatcacatgaacctgggaggtggaggttgcagtgagctgacatcgcatcactgcactccagcctgggtgacagagtgagactgaaaaacaaaaaaac

SEQ ID NO: 18508 - DNA, 1070 bp, Homo sapiens
ttgatattataattaatattataattgttcattattaccttataaaaattacttatgatatgtttttcttactatttggtgaacatcgagtatagtaccaagtgtatacttttttttttttttttttttttttgaggtggaatctcctgtctcccaggctggaatgcagtggcattttctcggctcactgcagcctccgcctcccaagttcaagccattctccagtctcagcctcctcagtggctgggattacaggcatgtgctactacccccggcaaacttttatatttttagtagagacagagttttgccatgttcaccaggctggacatgaacttctgacctcaagggatccacctaccttggcctcccaaagtgctgggatgacaggtgtgagccactgccaattatatacttattttaggtgtattatgctgtgccctgtgcttttctttgttatactggaaggtcatgatggcaggatgtcttatttatgcttctctgtactctgtcctgtccagtgcctttcagaagtaaggtttttagaaaggtttgagttatttcctgttttctgaaccagacaggcagagtatttgatcttacaaaaatctggctcagttcaagttagctgtgtagctttggaacggaccctggacagatggattttctaaaattacagaggaaactagatctgtaactctgtacatttactcctgtgccagtaacaatggcaatattttaatactgtaataaattttttcttatgcatttgctataaattagtaaatctgtgtaaagctgcttattgcatcatcatgtagaatttctacatcctgcagaagtttaagaaaattgtcttccttttacagacaaggacactgaagtttagaagtgctaagtaaactgtcttagatcacttagctagcaagtgacagggatggaattgaatctgtatttatcagaggtgaaagtatatgtgtaattattcaactacacttaggtaaatatccgcatacatgcatgcctccccttagactccattgttccaaaaggtaatgacaacaaaaatt

SEQ ID NO: 18509 - DNA, 1025 bp, Homo sapiens
tgttttaatgaagaggctggacattaaaatcaaggggaggaataatcatgtcttctcttgaaatgggcagtgaacttcccggaaccagagtgttgccttcctttttatccttttatggctgcttctgatcattgtcatggtgattgtcaactgtcttggcgctggtgagggggctgtttagcatggaaataggattataatgacacctgaggtctttttgaagtccttgggtcggctatcttgcttctaacaaatctcagctggtctggttacagagggaactttttatcacaggtgtcctgtttcttaaagataagcagtgttattacagggtagaaattcacctatgtcaagtaggcattataccaggtaacaatctcaagactcagcagggaaggatccacttgcaagcccacgtgcttgctggtaggactcagttccttatggcccagtggattgaaggcttcctttcctgcctggtgtttggttccttgccacgtagggatctccatcatggctgctggctttatcgaagcatgtaagccaagaaggaaatagaatccattggtaaaatgaaagtcacagttctttgtaatgtaaccacggaagtgacgtcttactgcttttgccatattctttttgttagaaggaaatcactgagtctgatcgttgttaaaggggaaaggatttcacagtggtatgaatcctgagaggcaggggtgatcagggccagctaccacactctacaacttgaattttgttttagatttcagtgccttttggggaccctgctacattgtggtagatttactcacaggacttgatgatttttcttgacctgcctgaagccatagcatttattacggataagtttgtcttttcttcgttctttttctgtttgcatcctttcgtcatccttttcttccctctttctggactgagagaggcaccaaatgcacccatttaaaacatatatgcatttctgctttctgatgggaggtaagatttagtcatttaataagaaa

SEQ ID NO: 18510 - DNA, 1027 bp, Homo sapiens
ccagagtgaaaacgcgaaagaaaataaacaggcagcactgaggaattatacacttgagcttggcatttttcttaacgcagggctattttaggtgcactgcgcatgttggaggtgcccttgcaggtataggtaggcattgtccatccgtggtaaaaagcaatagaagaaattcttacccgatgcttaatgaattgccaggctggttaaaaaggataacccttgaaacctagggtgtccaactgctaatttatatagactggagatatttccatgcctcgcagcaaaatttttctttaaattcacagaagcagcagctatccagcattgtccagttgtgctgagtagctgtcattattgataaacatgtaactggtcatttgtattgttttgagtaggatatggcttatcaggatgcatagtagagaaaaatgagatgaggtaatgagatcacatacactgaagcatcttacgaatctggcacatagtaggttctcaataaatcttttttgattctgtgactgttagaatctgttggctgatactctgtcatctggctctcactctgctccataaaacttgggtaattctaatgcttacttcatcccagggctgatgtgtgttaggttagggtttatgatcaagtaaagagtttaaagaagtgttttatgagggagttttgtttgcaaatgatcacctggtaatttaagagggtgagctaaacttcctccttttctagtatggacctttggggctcaggatgaggatgttcaatttgtactgctggtggagctgcctttccattaagtgagtctttctccaagggaacagaagtcttaggttgttgatctggcggtcagaacctaggacaggcaaggcagtgggctgttgtagaggagatgaagctgatcagagcacacccacaccagtgacaaccggtcaggacctgggaagggctctgacccattcatctgagagatgtggcatgaggaacactgagacctaatgcttattgcttaatattgtggac

SEQ ID NO: 18511 - DNA, 1033 bp, Homo sapiens
tctttaccatttctgaatgtggccctgagggaggatttgtcttttgctattttctttttttaagagatggggtcttgttgtgttgcccaggccactctccaactcctaagctcaagcagtccgcctgcatcggcctcccgaagtgctgggattacaggtgtgagccaccacacccagcctgggggagggtttgttaaagaactgtctgttttatcacatgaccacaagttaaaatgttgggcaatgtccctgaatgataccttttcattagtaactcacatggacccataatctctgaatttaacatgcttttcaggaatgtgttcatattttccacctataaaacctgttttagtaatttactcccttgtaaatgttccttggtatgtaaatttagcatatttccttttaattgcccaggtaaataatacccaccatcagagggcaccagtagtgtaatcaccttattttttaaaatgtattctgtgtttcatgattttttctgaataactgatctttacagtctgaattgcattctgttgggcttgacttatttttaaattaaaagagactaacacattaaacactaagaggtcacataggatattccatttatataaaatatgcagagtaggcaaattcataaagacagaatacgcatcggtggtttctggggcggcggggagtatggaaagcctgttaatgagtacaagtttctttagttttttttggttttttgttttttttttgagacggagtcttgctctgttgcccaggctggagtgcagtggcaccatctctgctcactgcaagctccgcctcccaggttaatgccattctcctgcctcagccttcctagtagctgggactataggtgcccgccaccatgcttggctaattttttgtgtttttagtagagacggggtttcatcgtgttacccaggatggtctcgatctcctgaccttttgatcagcctgccttggcctcccaaagtgctgggattacaggcgtgagccattgcacccggctatt

SEQ ID NO: 18512 - DNA, 1411 bp, Homo sapiens
tttgcttccagccatcccatggaatgctgttcttggaagggtcatctcatggtccattgtcggccctcttagaagagatttcaggccttcccttgtagcttgatagttacagggagtgctagggtaagtggaaaaagcacatgacttggaataaagacttagtacacatcccatgtctgatttatactaactagttcatggacctagcctacgttactgcacctgtttgagcctcagttttcctgtctgcaaaggagggatgatggtacttacctcaaagaattgtagttggatcaaatgagttggagtgggatacagcaacaatctatattctgatttcagcaacactgtgcagtgtaattccatattatattacaccacatcttctgtgggtctttctttgggggaagctaacattttaaaaggtttccctttgtaacctgtaaccccctctaccccaaaagtatattcaagagcgaaacttttggtatgacgatgtcttacatcagtagttctgaatgacttgacttagctatctttcttgagtctctcaaaagacagatggatggatagattgattttgttgtaacacctgttcagttttgctggccttactcgttttcaaatactcaaatgccattgagtcagatttcagaggcaaatggtgatacctcaggtttgaagttgcaagaagtcaccacatgcttgttatggaaatcgtcagggatatttattccctctcctgagaagcataattgagcctccaaaccacccatcaagatatccacctgtaaaatatttaagaactggtactatgaagacatttcccttatgcaatttgttttccatctaagagcagaacaaggaaaatatagctgactataagttacaaaggcagactcttaagctacaaaatacatctcttcacaggagcacttggagaagggctgaaggcaaaccaaaagtgagcaacaaggagactagtgttctgaaacagagatgacaggctccgcagtgagggtgatgatggtgttacgaattacccattcagtttaaactagacattccctggaagcatgtcatggggtgtgcagaagggcttttggataaaaggggtctagttaagagatgttaaaaaaacaaacttgaaaagcatagcaggctgccaggacatgtctgagtaccgcgcagatagtggggaatagtctatggattctgcttacaccatggacaaccaggctgggccatgggttgtgttttttttcctctcattttatagaaatgttaccaggcatattttccctgtttccctaagaagagcttcctctcagtgctagccagccacagggccaagtgacacctagaggtgatcctttggttatttgctaaacagatctaagacaaaccgata

SEQ ID NO: 18513 - DNA, 1030 bp, Homo sapiens
atgtgtttgtcaggtgcataaatctgtgactgataaaaccactgctcattacttggttcttaaactctccctcaatatagctgtagggacatgcaaaacaaaggctggctcattaataggatatgtctagagttctgctttagaaatcataatgtggacatcattgatttctctgatgctggaagctgctgctgcttcttcatctttatcttctcctccctgtgtattgagagcagggacctccttgtgctgttttgggctctccttgttcacccagattggctgcatcagcaccttcttaaaatattagtgttgctgagataggagcttttggtagatggataaactgggatttgtaaatattttgcttagtttttttcccagagttttgcagaagagaataaggtgttggtttgttataaggtggtcctttataaagtttagacctattttaataaggctgacttgggttgaagataactagagccatgactttcatcttgatggacaatgagtactcactctacttttttagtttatatttttattttagttcatttcatttaagacagcgtctgttacccaggctggagtgcagtgacatgatctcggctcactgcaacctacaccttctgggttcaagtgattctgatgtctcagcctccccagtagctgggattacaggcatgtgccaccacaccggctaattttatgcatttttagtagagacgcgtttcaccatgttagccaggctggtcttgaactcctgaattcaaatgatctgcccacctcaacctcccaaaatgctgcgattacattttaaaactctaccttttaaaaattagaacctggacaaagaggtattaaagaatgtgtctcttattaatttattatggtaatgagaagagtttggatttggacctacctaggtttttctttcctccagctccgccaccccaactccttactcatgcttcctctgtaaaatgatcactccccagtttgacaggaattgcccctggaatcccat

SEQ ID NO: 18514 - DNA, 1083 bp, Homo sapiens
aagcgatgataatgacgtatttccctcccttccacaaaacagggccaggtgtaacacactaagaacaaatggcttggcagcctactctcctctctcgaagctccatgcccaccttgctgttgcaccccccaccccaaggaaagccttcccacctttggaagctgcattaattattccaggccacaagggtgccgttgagttactggttcactgcactggctggcaggaaagagttttaatgcaggctccaaaggtgcttaatttcctgtggtccttatgaatatgcatacagtatgtgctcagcaatctagcagttcaaactagacagctggttctggtggtgagggttttttaaatttattttttatttatttattttttctctcccctttccttggacaagccctttctgaataagctgaatctgtagtataatttcattaactcatttccagtatttaatttggttttgatatttccatcatggccccttttctcctttgattttgtcattctgtagaagttgataatctgtattatgatcaacaaggcatattgccatgactgtaggaatcaccaatttagatatccaggcttcctaaaatataagtaagtcagatttagcattactgttttcctgaatgtaggagtatttggaaaaggaaaaaaaaataaacatacatcttggaaagcagagaaaggtgttttgttttctttctgtttggattaacatattctccatcactgtgtaacttcatccaatacgtattgaatacctactatgtgtctggcaccacttcagacagtaaggatatggatatgaatttgtatcagtcaagccttccaggatcttattatctagagagaaagattaaaacatatgcaaataattttgatagaagcaaagacctaactcagcctgagaggaggttgggtttagagaatgctttcattgtaatgttttaaagctttttatttataactatagtttatttggactttatgatttaccaagtaactttagatgcaaatatggtagtactgtgaagattatggtttttgaatgaagtcactttgtggcat

SEQ ID NO: 18515 - DNA, 1255 bp, Homo sapiens
taagacaggtggctagcattatttgggtccagaagcttccctggaaagaaaggattcactgcaagatcgacaggcttacccagttcatttaggcgtggcttgatttatgcacacaaagctttgggaacatatcagtcacatcaagctaggtccacctgtgtgagtaactaacgtgtttatttatgattttctttaacagcacagaagagcaattgcatttggtcattctagtatcaactgagttctttataaaatatctttggggtgtttaaggagaattattctttttacaagttctgattaatgacaccgcaaaaatgaaaataatgagctaatatgtatctagtacttgctatgcacttatatgtatagaagcgtataatccacagcactccttctgaatacgttacgtaaatggaaccctcgcaacagtcttacccccattgtagagatgagaaaactgaggcatacagaagagatggaactaggccaagagcatagaggtggaattgttgtgtgagcctgtagagtccgtgttcttacccactgcatgatgtctgatcatcgtcaattttctttccatttggatagatgaatggtaatacttccctactaggtagagcaatgattccagaagtttataataattggaaagtgtattagtcgattctcacactgctataaagacattcctgagactgggaaatttataaagaagggaggtttagttggctcgtggttctgcagactgtataggcttctgcctctcgggaggcctcaggaaacttacagttatggcagaaggtgaaggggaagcaggtaatgtcttcacatggctggcagtggaggaagagagaaagtagggaggtgctagatgcttttaaacaaacagatctcaggagaactctttcacaagacagcactagggggatggtgattagaaagcacctcatgatcccgtctagttcctgcagagaacagattagccccctatgcagcacacacctttgtgaggtcccttctccaacacagggattacaattcaacctgagacgtgggtggggacacagagccaaaccacactggaaggtaaaaaagttggcaaccagaggcttagaggaggttcaaatctcaaagtgatgtctttccttttgcattttggatggtttaataaataagattgatacaaacacaagcattaagcaaacaaaaggaaataaaaacggcaacaaataaaacttctgtgctttttgaa

SEQ ID NO: 18516 - DNA, 1870 bp, Homo sapiens
ttacagctctggcatttctgggtaacactttagaatacttccactccggttggtccataaaaagctgcctgtgtttttatgttttgaaaatacacgcagagagacccactgcatgtcctattaggcatcttatccttgagtaagcaggcatgcaacatcagtgtcacacacatatcacccccatactcgacattctttgagaaatgccttggtcccgtctccagccagatcagcattgcacctcttggcatgcgttcttacctgttgaggatttgcttgaattataatatggtagaggaggaaacacagtcttactgtgccgtgtgctgagcgcagagccattctcagcatcctgccttgattaataaggcgtgaaagatcctccgaattcgcacctgttcagacaagcttgtccaacccatggcccccgggtcgcatgtggcccaggacagctttgaatgtggccccatacgtatttgtaaactttcttagaacatcaggatttttatgcacggaccttttatgcatggactgtggtgttttttgatttttggttgcgtgcgtgtgtgtgtgtgtgtgtgtgtgtgtgtgtgacggagtcttgctctgtcactcaggctggagtgtagtggcatgatcttagctcactgcatcctctgcctcccaggttcaagcaattctccgtgtctcaatctccctagtagttgagattacaggtgcccaccaccaagctttgctaatttttgtatttttttagtagagacagggtttcgccatgttggccgggctggtcttgaactcctgatctcaggtgatcctcctgcctcagccacccaaagtgctgggattataggcgtgagccactgcgcccggccttttttttttttttttttttttttttttttaacgctcatcagctattgttagtgttagtgtagtttatgcgtggccgaagacaattcttcctccactgtggcccagggaagctaaaagattggacacctgtaaacaaaaacaacacagccatctagctgcaagacgtagctaattgctctgcagaacagggttggccagcctggccttgatgtcggagtgttctctagacctcacacccagtccctattcttaggttttatttctcaaaccaggttttgcctgagaaattacagcaaatgattcagagcacaatgatgttgctcatttttgataagtagttgaaagctgatggtgccctccatttcaaagcaacagaagaaacgctggtggtcatggagaaagagttgggaagcagagcgtgaatgccgggatctgcagatctgagcactatgcctgcagccgatgtctctccacagggctgatctggtggctggggtgcccctggtcagaaggggtgattactgtttcctctctctccttggtctctgtcaaacctaccaactcttttcaggaatgcagatatttaattatcttctgctgttacatctgcatcatgtattggctggctgttcaaaagtatcctctctaggcaaataacgagatttcgccagcaggatctcccgttaaaggcgtgcatgtgtggctttgtagacacgtatgtgtgtgtgcgtgcacacctgcctgcccttgcacagtgggcactgtttccagtgtgcagtgaggccctcccttcgtgtagaacaggacaggacaatgacaaagttattcaattaataattgaagcttgccgggcatggtggttcacgcctgtaatcccagccctttgggaggccaaggcaggcagatcacctgaggtcagaaattcaagaccagcctggccaacatggcaaaaccctgtctctactaaaaaatacaaaagttagccgagcgtgat

SEQ ID NO: 18517 - DNA, 1349 bp, Homo sapiens
gcgagccatgattgtgccactgctctctggcctgggcaacaaagagagatcctgtctccaagtctgtctgtctgtctgtctgtctgtctgtctgtctctctcggaaatattccttcagtgtattagtaaagaagttacttaggagtcacttatgcccttgaagagtgagtgatgtatcaaaatatgtctgtctttattgtttcactttcatccttctttttttggagatggagtcttgctctgttgaccatgctagaggtggcgcgatctccactcaccgcaagctccgcctcctgagttcaactgattctcctgcctccgcttcccaagtacctgggattatagacacccaccaccatgcacagctaatttttgtatttttagtagagatggagtttcacccttttgattggttggccagtatggtctcaaactcctgacctcaagtgatccacctgcctcacctcccaaagtgctgggattacagtcgtgagccaccgtgccggccactttcatctttctgattaactgaaaagtatcaagcaatacttacatgtaactgcactttctcatcaactgcaaccataatttagctatggatacaagagttgggcacaaatccatgaaagcattgagtgagaatcaattggctctgtgggatttacaataaagaatgttgtttatttttatttgtaaattgtgtgctacagatccttcgtatcagtaaaatgtatgataaacatatgtgtgtatattcacacacaccctttcattttggcaggagtgtttgttaaacatttaccacagcagtggattcacttccatcagctgctaactttcaaggatgtttgaggatgcatgacctgtgcaatgcacctgcttcggtgcctggcacagagtcgcaaagccacaaagatggtgcttgttggttgtatgtgttgtttccatctgatatcaccattgaggggagcaagatgacatgtgcctaccccacgtgtccagcagcaaagccacctggcatagtgggctgctcagcgtgcctggttcatactgcgtgtttatagtcccagggtgttttcagagagcaaaagtcctttatgattagcaaattgcaggtcctcccctttctgatatttacagcccttgcaaccgcctgtacaaaaatcgggaaaaggcagaagacggctgtcattaatgtaaaagcagctggttacctccccctccccagcgcacacatcacctcctagtacaattagtcaccatgtcttttcccttccgtcaagccttttagcggagttcacagggatgccttcggtccagacactatgaccgttgacgaaggatttgaa

SEQ ID NO: 18518 - DNA, 2085 bp, Homo sapiens
gtcccccttttctcttctctccccttccctgctccctctctttaaggttttctcacagattaagagagtagcatgtgctcatcccaattattgaaaccgtgcaaatgaatagcaagaaaaatagttcttggcgtgcccctttctttccgcagtgcccaggccagaagtacctgctgcccaagaccacagctgacagcgccccgggagtccttcacactcttctctgagctcttccatccttaaacagacatctatgccaaatgcagggagggtttgctgttggcttttacaagaacactgtcctgttatgcctgctgctctttgcttggttttccctggacggtcacaaacatacctccaggtcaacagttaaagagagaacccacttcttctaatagttgtgtaatattccatactacagatattctgttatttatggtagctagatttctattcatttttaattcccatgctcagagctttccagacatttggaaacattttagaaaattgacatcatctcttcaaatatctgaactcagatttcctctgtgatgttggaatctttaaaatatcatgcatacttggcctgtttctacaattttgttccccagccatcgttctccattttgcacgtgtattgtctcctcctattcctctgtacccttcacacgtgcctgcagggtatatacttttgcacaggcaaaagtccagctgaaatgatccttacttagcataatttaaacgcgagggtttcctaatgctccttccatttaaataattcaaaaatccgtggcaaggtacctgaaaactactaagagaagagaggtgttaatggacacatcattgaggctgaagccaaactgtgtgattctgtctgcagttgagaactgtaagaaaaagatcaagattaacattattattattggtgttacctcatgtctgtacctttttggagacttgggtctgtttcccgagaaatcatttttcctcctccttgaaaatagtgaatttcaagtggttttaattttaactgcattatttgtttgctttatatagtttttaaagttttatgaaaaagtcttccatgtgttttttatttatgaaatcggggcagccatccttcaaatatgaagcaggtatctgagaatactaaaatcttacagtgcattttataggagtgtgaatgatttttctgcaattgacatatcaaggagcttatcatctattattaagttaccttttcctgaaacaaaatatttgtcagatgtaacttggtacccaaatgccttttcttgctaaactaggaactgtcacacacacccacccacccacccctttattcttggttctctcctatattttgacatttgaagcatccacagaaaagtaatagaatgagcaattgaaaatcaccagaactgaaattatttccagctatgtttaaatatgaatgtcttgttcgacgcttcgcatatgtatttatggctgtgtgatatcattatggcatcctaatgaatgtctactgaattatgtgggattcaacaggggatacaaatggatttgaattctgtaactgtcatattgtggtccggagagggtggaaactgaagtatccctctgcgtcgccacatctgtcaaaagtcctcagcgctccccgcaatccatgtctggtggaagcgcgaggtggtgaggatggaaagggcatgcgttgacttcatgttgggacgggtcttaaactaaacacatgtcacgttatggagctgtttaccttggctttgaggtttatttccttctggattaagagtgatgtcgttttatataacaagaagtgaaaaaaaaaaagaatgatgttacacaacctattttttttttttttttttttttttactctgaatgtgtaactttaaatgaagaaccaggacacctcatcctttagtcttttctttactagtgagtggcagatatgtgtggaccacagagatggactgaaaagagaagtaacagtccttggtttgtattccagcccccaccttcctatgtctttgagcttggtaattagatgcttggagcttcagtttcccc

SEQ ID NO: 18519 - DNA, 1107 bp, Homo sapiens
attttagccttagcaacatgtatttactgggcatctagatttcatttatttaagaactttttattgaatgccgattgttcagcagccaccatgcaaggtcctggggaaccagtgggcagccacacagagaaggtcccaatggcaccagaacaaggccagcttcctaggaggtgtctggcttcaagacagggatttcctttagctgggtggtagagaaatggattgcctgtgatttcactgtgcataaaatgacctttcagcccttaacctgcgacatccacatgtgttctttggtactcacgggtgttatggttcatagctgtggtcttctgaagtataggaaaaggcagcttacagaaaaaaacttgcttgtttactgtcttctgagctgatttctcacctactggcaagtggataggtctagtttttgtttagctgtttttctaatttaatcttatacatgagacagctatagatggatgtatagtctttgaagtggggccagttggctccgtctattagctgtgtggcttttgtgcaggtgacttgtggcccccggcctcagggatctcatctctaaaacgaggctcttgatgttacctgccttacccagctgtgaagattaaaagggttttgtgtgttaaaggacttgcggagtgcctagaacccaatgagggccacagagcttgctccgattgctttcctgaaggcagtaagcatgttgctctggtaatagtcatcttcacggccatcattttgatcacattttggcttagtttcttcctctaccctcttcccacgtcagacctttccatggaaggtaaaacatgttaacagtctaatgtgtttccttctaatttttttcttcatttatattatacatctatgaaatatatatatatatattacatatggatatatagacatacacagatgcatatttagggtgtgctatggttagaaagtttgcatccccccaaaattcacaggttaaaatcctaatcctcaaggtcgtgacggtactacaaagcaggacctttaggacatgataaggtcctgggggcggagggtactaatccccatgaatgggtttagtgcctttataaa

SEQ ID NO: 18520 - DNA, 1033 bp, Homo sapiens
accctgtggtcttgccagcccaggacgtgtcaagactgcagcctttgctgacctgtgaccatctccaagtccatgcccaggcccctactaggagttgagggcaacaggggcagtgggtctctcctgcttaggaaatttgggttgagggtggcagtgatcttgaggggggtctgggagggaggagccagcctggcctggtctggcctggcccagtgtgccagcgagggcaggtgcaatggctcacgcctataatcccagcactttgggaggccgaggcaggtggatcacctgaggtcaggagttcaagaccagcctgaccaacatggtgaaaccccatctctactaacaatacaaaattagctgggtgtggtgatgcacacctgtaatccctgctacacaggaagctgaggcaggagaatcgcttgaacccaggaggtgaggttgtggtgagccgagatcatgccattgcactccagcctgggcaaaaagagcggggtaaaaaaacaacaaaaaaatgatgtaggaatgaacagatgaacaaccccacacaacctaaggacgactttgaatcaattcttctaagctggtagcagaagccacctttccatttgacttgtatctcgctctttttttctttcttttttttttttttggagacagagtctcactctgttgcctagactagagtgcagtggtatgatctcagctcactgccacctctgcctcctgtaatcaagagattttcctgccttgggcccctgagtagctgggactataggcatccaccatcacacctggctaatttttgtattttttgtagaggtggagtttcgccatgttggccaggctggtcttgaattcctgacttcaagtgatgagactgcctcagccagccaaagtgctgggattacaggcatgagccatcgcgcccagccagacttgtatctcttaatgagtttaactacatttaaccatgtatgtgtcagtcctactatgcaccttacagctcactaaccctgtttaataatgtatg

SEQ ID NO: 18521 - DNA, 1087 bp, Homo sapiens
caggaagtggagtgcggatgctggaactagctggctgctttggtgccagtagaggtgaactgcactcacttgaaccccctgcactccaccccttctgggaggaagcatgcaggtgagcaggtgcaggagccagggtaaatgcttttgggcactggcaggaatgaactctgtactggccctgggatagcatctggcaggggatgcccgtgacccctgaaaccctaaaaggagtgttacagtcagtgctcttttagttttgccatccacggacggcttaagtgttaacagttcagtggagggtcagcgtgacagccttttgcacccacatctgggttcttgtccagtgtccaggaggaacgaggtctcatgagcaaattttaaggatggcagatgtgggggattttattgctgatgaaagtggctttcactgggaagataagctaaaaagaagacaaagcaggaaggtaattttcccctggagctatgccatcaagctgttcttctgaagtccagccgcttctctccaactgtggtctctaatttccagctgcttctcctcttttcttcaatgtgccagcggagcctggggtttttatgggtacaggattgggggcaggccgggccatgggtggttgtggaaaaggcaatatttgagtggaaaaacagggatatatgttctcactttgggccacagttccaggcttgaggatggggccctcaccacggacctgccctcttctgcccagaatttccctgcctcctgtccctatcattgatacctgcaattctttgtacatatgaaatttaatatggtgagattggcatctagctgctgctagagatagtgctcataataatttttaacattgattgagtgtggataataatccaggagctgtgctaaacgttttacaacacattatctcacttaatttcacaactccataaagtagttttcacttagttgagggatgaaaaaagttaggctctgagaattgatattactctgcaaatatggaattggaatttcaaagcaatctatggtctttatcacttctccattaactgtccttgttttattaatgct

SEQ ID NO: 18522 - DNA, 1053 bp, Homo sapiens
tttttccttaggatgagaaagaaggcagtggagcccttttccttaggttagaatggttctgttggttgaattgtgcaccctgtttggttgaaacaattggacagtaaggatgtgactattattgttgctctctaatactttattatgtcataccaaaaattatcttttgtattttgctaccagttcttttagtttctcttacatgtatgaagttggatagttagaatgagatgaaaataaatgggctgggcgtggtggctcatgactgtaatcccagcactttgggagtctgaggcaggtgaatcacttgaggtcaggagttcgagactagcctggccaacatggtgaaaccctgtctctactaaaaatacaaaaatttttttgtattttgggattcggtttaggtgatgtgtgtctgtaatcccagctacttgggaggctgagacaggagaatcacttgaactccagaggcagaggttgtagtgagccaaacttgcacaactgaactccagcctgggcgacagaggaagactctgtctcaaaataaacaaacaaataaataaataaaaattgtttaaacctgccaactacaataactttttcagtctctttctccctttcccaccttcccaaaagggtgggaaatttttaaagtaaagtaataaacaaataagttttgggttgggcgggagattagttagagacaggatctgtaggtcagaagtggtatttgggggagtagggagttttttttttttttctttttcccttatgcatttgggagtggaagagctgtcagattctgaatttagttagatttataatgctagagacattcagcagtctgcctttccctttctgttataaaatcatgtttttattgaattacattttaatattggtatcactttaaaatgaaaatgagtacttgcaaaatgtatttttgaaggagttgggtggtggtggggggatgccattttggcaacagatgacttcggttcaagtcctctctctgtctcttacttgctttgtggctttagaccagccacccac

SEQ ID NO: 18523 - DNA, 1685 bp, Homo sapiens
cttttccctgcattgagatagcattgcatggagatccttgtactcttcgaacagaggctgcagatggacacaggatctgctcagggagataagatcacctgctaattctgctttctccatcagagtctgaatgatcagtgatggggaccagagctaggttaggtctctggaaacgccctctgtctgagtccgggagatggatgatatgggtaatgacttgctgctttatcttctctccatctccttacagcagctccaactactgacttttattgtgtggcagctaattgtaggattctatttctgtaaagagaaggcaagagaggaatgcagtgtccaccatccctgcagccctttggcgccttccccctcccattaccttgaagtagagggaaaggggacgacagaagaacccttagaagtaagactttttctgtctctgatgccacggacctttgaaatatttttttgaaaagaaggcctcccttggctgataccttctgactgttagtgaataaaggaagtttaaacaatctcttccctgtaatcattaatctcgtcttctttgttacaatgtatgttgtggtctttgttacaatgtatgttcacgaattcctagaacactgttcccgttggccatgggatcaggggaagagagaaggaagagagaaccagacacaagttggagggaatccatctccagtgctgctcagaggtatgacctagagcaaggggtttaggctttcttggactcattttcctcggtggtgaagtggggataatttattgacagtggaccgtgaggttctgcgcacaaaattcgttgcatagcacctgatacacacaaagctttcaggcaaggttagtttcgggtatttccagccttagtcttggctgtgggagccataatggagttgttcagaagtttacagctagtgtttataaattgcttgccatggggccttgtatacagtaagcattcattaagtgttccctcctattatatccttaggtttaagatacaggcaccacaacataaaccacccccagagtacacatgcatgggtgtaatttggtgccattctcctcccttttgcccccaccaaaatgaagtttttagtgtaaatgtcatgtagattttaaccaaaggttgattggagggtctgagtttctcagctaaatgaaggcatgaggactgtatccctcctgaagggtgtgatcagttccatgagaaagaagctgcgagctgtggggcatccaagataatgtaatctgccccggggtcctgtgagggactggccgacaaggcaggctgaatgcagccttgcccactgagctgggttctctctgctttaggtcctctctggaggtgaagagggaagtccgctgattgtttttctcttggtgcaacttcgcaccacccttacatatcccagtgtatatggtagccaaggacagtactgtttgagcctcccccattaagtgtcaacattgaatcaatgcaatcccatgcaaagaaagctgagcatgggattgtgccggtttagccagctaaagtgtggtctctgatgctgatcatgactatgaaaagggaaaatggaggagaatgatgacgaaggaggaggaggaggaaaaggtgacttgcctctagctgatgtggattatttctcttttttaatttccat

SEQ ID NO: 18524 - DNA, 1031 bp, Homo sapiens
agtttatcattatatgcctccaaagactttgtgtttcctatgtttgacatcgagatagaatttttcataaccctttactagtaataaatttgattgttaagggaccaggttaatcttatttctaataccagcatctgattttaaaaccctgatttaggagcattttctttctgctaccttcctaaaacgcatgggtggaaatgtataaaatatgtcacctgatattggaggattgtttatttctgttcatttggtcctgaatagtacctatgagatgcatttgaaaacttaccttgtttatatgtttcttctgttgcaatttcttccattacctggaatagctgctttggacggcaaaccaagcaatgccctttcacagctgtgggatgaatggggaaagaagtcttggtaaggaagcaattcagagaacatggaagcatctcatggcagcagtcacaattttgtgttgcgtaatatttcaggaacttgcaaccctgataacttgtgcctgcctgtctgtaggcctttaatgatgttttattgaattttggttttcccctagactttgcagtgcatgacacatagtaattgctcaataaatatgtgttcaactgaactatggtggttaggttagtaattagatgcacagacaaaatcacaggaatctgcgtgagccttgtcctactggtaaaggagtcttgtgaggattaattgaaataactcgcaaaaatatccagctctctgtttccctgctaggggctcttgtcataggagccattgttgtagccttagaaaacatacagcattattttagggggagaggttagagtagaattttaaagagtgcatttctcttccagtaagcaattctgcatcgataaaaagtggagaaagaataagtgaaaaaatatttagttaattcttgttgacagaagtaggacttcaggtccacatatatttcattgtagagtgcacacatgcatttttaagaatttcccgattctcttccacgtgtggacagattggcacat

SEQ ID NO: 18525 - DNA, 1049 bp, Homo sapiens
tgaaaattcccatcccacccccgcaacaatgaagggaaatgcctaggttgaaaacacgcaatacacattcaataaatgttcatggttgaatgaagttacctggtagggatttaatctttatttcaaaaagagtggctgtgaatctttaaaaatttctttggttctttaacattctcttcttcactaaacccaaattaataattccttactattgtcattaaaagttctcactggatcattccatttatactcagagtaacaaagcaaacccaattatttgagagacactgaaatgaattttgagtctagaacagcatctgcaaactttgcaaaggttcacatgataaatattttctgctttgtggcctacaaggtacctatcacaactactaagctatcatgcattagtgaaagcacatagataatctataagccaatgggcatggttgtgtgacaataaaactttatttagaaaaacaggtggtagactggatttagcttgtgggttgtagtttgctggcctctggtcaagagcacttgtttgtctgggagacataatttcaaaaatcattttcttttttgattttcatggttttagaacatgatattttctactatggatgaatgctcctcttttgaattttcatttttgtctgacataactcaaagtgcttgctttgggagttcttgttaaccctgacaattcttgtcaaatatcttactcctgggctgtgctggggatggcagcagagtggggtggttggatgggaaggcgggaaagagctagcttggagatgatacgcttttccatccttgaataacttgggaaaaagtcaggagtgtggaatgaagaattggaatataaaggctgagggcggacctaattttttttttaaggattaagaaaaaaggagtaagagagatggtatgacttatcacttggctggggactcagcattaattgataaatccactgtaaggaatgcatgacactgtcttttgaagaaagacattgcatgttaggattctgagtaacagtcaatatattc

SEQ ID NO: 18526 - DNA, 1413 bp, Homo sapiens
ctgtaatcccagctacttgggaggctgaggcaggagaatcccttgaacctgggaggtggaggttgcagtgagctgagatcacgccattatactccagtctaggcaacaagagtgaaactctgtctcaaaaaaattaatgataataatgttacaataataataatgttagtgatacatatcattttgaaaccagttcttaagcaattaaaaaaaagcagctatggtgattgagtttttgtgttatgaattttatactctgaaggcatggtcattgtgaatgccaaagaaatgaacaggagaaaattttatttgaaagctgggattgttgcatgctgcagaatttttttttcttttgctattgctgtgtaacaaatgaccacacacttagcagttcacattcacatcttgtttattaactacaattctctagatcagaagcctagacacaatgtgactggcttctctgctcagggtctcttggggacaaaataaaggtgtccgctggaggaacatcctttcctgcatgctctgtggaagaatccactgccaagctcattcaggatgctggcaggattcagatccttgaagttgtaagactagggcccctgtttcctactgacttctgctggtggctgccctcagctcccagaggcaacccacattccttgacttttggccccctgcatctcaaagccagcaacagaaactctcttgtgcatggagtcccctcctgctttgaatctctctgactttccttgactttgatgtctaggtctggatttcaagggctcagaaactctctcatgcatgtagttccctcctgctttgaatctctctgactttccttgattttgatgtctaggtctggatttcaagggctcacgtgatgaggatagtttctttatcttaagggcaactgatgtggagtcttaattaacactggcaaaatcccttcatgacagtacctagagtatgaattgactcagtaactggaagaatgcatgcgtacaccatggaccgggaatccgggaggccaatttagaattttatgtatcaaagccccatttttttttgaataacagaaaaaaaaaagagacctgatatttggagagactttttcaaaagcagaaagtttaatataaaagaaagggggtaattgaagaagatataaactgcaaagaaaggatgttaggtagagcgccttatagggaatcagaggttttattacaggcagacacggcttcacctgtgagccgagcaagtgattttgcctgcagagaagaacgcagggttccttctatggctcaggatcttcagttaccagcagtggaagtgaattgaaaatagttggtctcttgagtgacctgatgcaactcattatcttctctgtgccttaacgtctctatctaattt

SEQ ID NO: 18527 - DNA, 1034 bp, Homo sapiens
catgaacatttcatccagggttatatgctacagggatattcaagaaattgaagatccttgaaaatctagtctccctcacaaggatcaggtggcaggatctaatgggaggggtagagagtgagtgttaacacacagagaacccaggagacctttctcagaggtctcatatcaagaaaagatcatttctcctaagcaatcaatttctttttaaatctgaacctcatatctgagaatattcccttcttttatctggccactcgggagctcaaaaataaatttctggcacccttcttcctggctccagtaaagtcatacaaccatatggtacctctctggcaactaatttcacctatttccttatttgtttaaaaattttaacttaaattttttcccctcaagatctatttacggatcatcagttttattttttcttttctttcctctttttcttttgctcccttttctccccactcttgactcttctctagtttttatatgcagtttgtatttatccatgccatctgaaatcctccttcctttttaacaagacaagtagaaaacgaaaacaacatcaaaggatacactacacaattgttggagccctaggaaccgagagaagagtacaagcaggttcttgaactgttctctccccagcaactataactggaaggaacctcagtttgtccattcattcattcatcagagcagcatagcagagtagaaggaactctgactttggcattggtgcctctaagtttgaagtctaactccatcactgtgtttctttcctcttgctgatagctgatttgttataaacaaattaccaaaaacgtactggctttaaacaacacatgcttatcatgttgcagttctggggagtcacaagttcaaaatcagtctcacctggtcaagatgtcagtagggcttgttccttctggaggctctaggggagaatctgtttccttgcgtttttcatcttctagaggcctcctgcattccttggctcttggccccttcctctggcttcaaaccag

SEQ ID NO: 18528 - DNA, 1032 bp, Homo sapiens
tgtgtgtcctctcatggcagagagaggaaggggtctggaacctttctcttataaggatactaatcccatcgtaccccgtcccccatgatctcatttgaaattagtcacctcccaaagccccacctccaagtactgtcacactggggcatagggcttcagcatatgaatttgggggagctggggagaggaacacatacatttagtccataacaactatctcacttacctctctactaagtgattcagaaaatagcaagtatagtagtgggagaacatggtatcagaaccaggagagggtcctctggctttctgagttctgccaaaaaccaagttttgctgccttgggcctgtggcttctcctccctgattgtcgctggccttgctgtaaattgtgaggcatccatgtgaggcacaggatggttccaaggaccaactgaggctgtctgtgctgaggctgggagggtgtaagtgctcagaggcagccggaagctgtggtttttacctcccaagactgtgcagagcttccttcttctgtagggagaagtctctcaggacagggctcacaacagtgcagtcaggagattggaaattttagtgacaccaaagtgggctttacttcctcctcctagaattcctgccagaaaggtggagatgtgcaataaactgagcaccgatagagtaccaagaacatgctttttgcacattgtttgattcatcaatcagagtggggcatggctgtcatcagttcagagttgaaagaattgaagatcaaaggggtcacgtctctgtgaatagtattagtaatagcagcagtatcgatagcaatcatagtaattaaaatggaagcaaccaccagtgtaatcatagcagaaactcacatgtgtgtgctttctatgtgccaggcatgaggctgaagtcatacattcattatttgttaatcccaccctaagtgataggtgtattcatcattctcagtatcagaagaagaaactgaggttcagaatgacccagtaaagatcacaagcccaaccc

SEQ ID NO: 18529 - DNA, 1043 bp, Homo sapiens
aaaccgtttcttaaaattacaggatacctagggacctgttggggtgggagggaagaaccctatgggcagaaatgtgactttctgtagcaaagatgtactgtttcccactgagaagaatcaaaaatagaaaagtgcttccttgtctctctatattgttattaaaacaagtagatgcattttcattgaatcaaggcagttttcctttataaaatgtcctatttcatatcactgttcaaacttgacatccacatttgagttggtttaaaatatcactgttttgttgacattcacctgtattatacatttcagttggtcaagtcatttaatttatcataaaccatttaaggagcagttggagaaaagggggaaaaagttaaatgttaatgattcttttcgtaactgcaattttatcggctcctttttgtacatatatgattatgaagcaatttgcatgaaatttacaccttttcaaattttgaaaattgccttgttgaaaaagaatcgctgtacttctcaatactacactgattaatcacagttatagagtagacataacatttttattaaactctcagtgagcaggaaaattagcacttcctgcaataacgatactaatttcattagtgaacgttttcatttataaagtgcttcttccttatcttgaaccttttatcctcttcttattgaccaaagagagggcatatctttgggagctgctaataaaccatattcgtaatatgatgtgacctcatcgacaggctgctgcttctagctcatcatcttccttgatcataaatacccatcggtacctcttgtcacatggtgctcttagagcttcctctttgaatttcacatgtgataagagatggtttccatcctgaagagcttgcagtgggatggttatcggaaagattaaaactctaaaactaacaggtggatataaatataaagaaaatacagtattttgttgatttatgttcatataacttctttattggtaaaagggagacaggtgagaatacaggaaatccttgtggccttgt

SEQ ID NO: 18530 - DNA, 1049 bp, Homo sapiens
agccaggcatggtggcggggtgcctgtagtcccagctgctcaggaggctgaggcaggagaatggcgtgaacccaggaggcagagcttgcagtgagccgagatcgtgccactgcactccagcctgggcaacacagcgtgactccatctcaaaacaaacaaacaaaacaaaacaaaaaaggtttaagaaatgttctagtaccttgaaaccaaaataggtatcagatacttggctgttttgttttttcttcttagccattttgacctgtgagattttatgtgatgaaaacataagaatgtggtattacaccctgtgatttgaattttccatactccattccattctatatgtcagatgcatcttcctaaaacacacctttgtcacatcactcctctgctcaaaaacattcagtggctccctgggccctctgggactaagtttataatgctcagcttgtcattcctttgcccagtgtactctctgtctcactaatttgttcattattttaatgcattttcttgaatacacttctgtagacagccataagatgggtagcaggaatgctgcactgaaccataatccaaagctttcatcaggttcacttgcttcctgtccttgccacaccatctgctcattctcgatctccacttgaacacacttcacattctccacttgtgtatcattcactattcttgctacataaattaacacaaattttgcagcttaaaacagcacacatttattatttcatggtttctgtggatcaggaatctgagtatcagacttagctgggtcctctgcctagggtttcacaaagttgcaatcatatattggccagggtgtgttctaatttggtagcttgactggggaagaattggcttcccaaatcacccagattactagcagactttatttccttgtagctttttgactcggcctggcttcttgctgactgttggctgttggctggaggtacccctcagctcctagaggcatcaacagttcctgaatatctgggcttttcccacaaagcagcttccttcatcaagcc

SEQ ID NO: 18531 - DNA, 1078 bp, Homo sapiens
gatcttgtgacttcagctttgttttggactggggcattggatctcccacatgccctctcttaagtcgtgcatttgacgcatatttaataagcacctactgtgtgccattagagaccatgatacagttttgaaagcctagcctgaataatggatgacaccctcctaaagccacgatttggtcttgattatttttagcactatgaagaaaaatttcattaaatcacaactctatttacttttaacccaacatggtgaagttatcaacatataatgcctgtctatactttcagatggaaaatgcctagataaatactgcatgggacatttttaaacatgtaaaaaaatcaattttcgtaaggttacatctttttacctctttatataaaacatgctatattaaaagagagattaaattttaccctgtggagtaaaatgcaaacacaaaattatttttttcatttttcagagcatgtactggattatcatttatttatgaggctttttttaatctagaatatatggaaatcttttcttgaagcacaatataatattgaattgggaatgttgtctgacagtttccctcttaccgttgcatagaatgactctcctgtatgaatttttaaaagaaacttcaatatgctatgcatttgaaagggaagaagtaatcaccataatcttgaggtatcttttaaataggcttccttccagttcttctatgtttcaccaacttttctacaacaaataatgcatctgtgatttttcagaactcacaaaatgtccagctttctttcttttattcaaaatttatacttcataattgaagttcacctcccaaaagacatagcttggtttagcatagagctatgatgtgttttctctttgttccttttgcacactttccttgtctggaggcgttgggcttggatccttcattcttcatgaggctgatgtttttccatttcggtttccttaagtggtgaagctgcacaaccatgaaagcagtgaccacataaaaatgctgctttgaggcctggtacctcatgcctataatcctagcacattggatggcccaggcagg

SEQ ID NO: 18532 - DNA, 1318 bp, Homo sapiens
tggcagatgcccagaggcatttataagcagtcccatcacgaacaaattgccaaatgcaaggcctgaacaaaagacacagaaaggatttctttatcgtaagcacacttctctacattacctttacaatccaacaactctggtattagtaaattatagaaacaacttttgtaacactatcttgtttgcagagtatatgaaaaatttgaagttaaaattcagctccacgaatactgcagtggtgagaaaatggcgacaaagattagtcttctgtgagaagtctgctaattattcttcatttaataatgccatgtatgatggccttcattagaatgaattcttctcaacacctatgcctctttcacctcagacatgccttctaattttctttggtagtgtctgcccacccaggtggtaatttctggtcataagtctaatttagtagccagctaaaggatatctgtgaacccttcgcaaagagtaatctattgaaaaggaacaacaaaaaagtatatctgtgaacttattaaatgactttaatcatatgaaaatcagccatcagccttattagagtggttgattttttttttaatctaagagctttcttggttattttctgttcttaatcattgttgtatatccttaatgcgcaggacatgacaccgtataacaagtgttttaaaaatatttacaattctgatcttataaaggaaaaagttacatatggtcctttgaactaattgctaaaatgacactacattaattagataattaagggtcttgagcatgtggctattgtattcattgggctggaagccaaccttttctatagctgagaaaatgggttagcataattcaaaattcaattgctgtaccctttttcatatgaatagataatacagaatgagccttaaatctgggttggaaaaactaacaggaactggttttattttaattgagttttaaagcacttctaggccatctcattgtctttatagtttaaccctttgaagttgtgactgccaacgtgctagtcttgtcgtcttacacgttaatggtaatgatctttttagatttattgtgaacctctaggaatgttttttttaaccagtaaatgcactgaaacatggaatcaaagtctctttcccgtgggccccttttcattgggaataaatgctacccatagattgaagtagtttataccagtacattttttaggtgccttaacttaccaaggttatttgtcaggaaaattatctcttgtaacaccaggttccctacctttagatgacaggacttaatacaaaagttttccccatac

SEQ ID NO: 18533 - DNA, 1074 bp, Homo sapiens
aagaaacttgctcaatgtaaccaagtcacaattttaatattaaaaataatgagcatttattaagtgcctgttgaatgtgtaggattttgctaaatctttcacataatctcatttcatctttatcatagcccttatggtgaaaatgccattattctttgacatagaggaattttgattcaggaaggttaagtaatgtgcccagtatcatctatgtataattgatgggtctataatttcagactcaggtttgtttaagtccaaaaatcatgccattatgactgtgtaccatgttgcatgccttcatatccccaatggaaaaatcccttctcccacttttcttaaccctacaagatatgccaagattctatagcatctgaatttgaaaacctctactaattcatgaggcaatctatttgataatggcatgatttagttagtgttccttttttagagataaagcctcaccctgttgcccaggctggagtgcagtggcgtgatcacagcccactgtagccttgacctcccaggctcaacctatcctcttacctcagcctcttgagtggctggaaccacaagcagatgccaccatgcctggctaactttttttttttttttttttttttgtagaaacagagtctctctatgttgcccaggcttgtcttgtactgggctcaagcaatcctcccatcttggcctcccacagtattgggattacaggtgtgagccactgcgtgaggcccagttagtattctttacatttttaaaataaaatttcagagaaagcaaccaaagggagcataactctgataagaataataaaaagaaacaattcagcaactctcttacagatttttatcatcatcccattcataattgattccaaacgtgcatgaatctttcaagataagtgtcttattgattatcctgaaaacaagcgatcacttggtgtcctgagattcgctcactgccctcccctgattaccgtaaacagagatgttgatgagaagaaatgtcactttctttggtgttggatccataggacattttgaggaattgggtgtggggagtggaggg

SEQ ID NO: 18534 - DNA, 1201 bp, Homo sapiens
gttttggcagggttgagtctagtatttctgttgggatccggggagcatatggagtgttgtttgttattttttagagtttcttattgcggtaagtgctcaggagggaacagagggagaaggatagaggaaaagcaaagcaaaacaaaatagaaaagcacaaatgaagaatatttagtccattctgtattagtcctccttgatggggggacacatgccagccaggttacctgattcatctagttgtgattttattgacagtcatttctaccttgttggtatccgcagaggttgtcttgaagggggctgatgccttctttcactagctttatgtggctggcagttctgtcctgccactcttttcctcatcatctcagcctccctgcccatggcactcaagagtccaccttggcagaacctgcaactcttcagcgcctccctaatgaactccttgcaagggcccttggttaagttacagtagagaagtggttgcttaagcaagtagtttccggtaaaggcataaagatagcccataattgggtgataaaatacctggattgcatctaaaaataaagacttgtgaaggtaaaactgtagcttacagtgtgcgactgtttaccttcttttggtttcttctcatttaataggttggtcatctctctgctggctttttcccccttttttctcccttctgtagaataacatgtggaccattaactatgatgctacttcttagctgcaaggggggaaaaatggaaaactccaggggaagagggtctttacttagggagttggcatttgttggaatttcccaagaacatttcatgattagtgacaggttatcttctagtttacctgaaggctatggtcactcaacaaattttgtgttgcttcttacgtgtcacgcactgtgataagtcctaggattatagaagtcaataagctatgatgcctatccttaaggagagaaacacatataggataggaaaatagcttgccatgtctgatagatattaggcattcagtctctctctctctctctgtttattatagatagaaataaaaaaattataaatagaaatttatttctcgtggttctagaggctggaaaattcaagatcaagatgcagacaggcttggtgtctggtgagggctgctttctatccttcaaaaaggcaccacgttgctgtgtccttatttggtg

SEQ ID NO: 18535 - DNA, 1062 bp, Homo sapiens
catatatcaaaccaggacagtccaagtccttccggggactttgctgccacagttgacagggggaggtatttgcataacttcaccacacacagctaagctggtgatcctgctgcttggcagcatcttcccagcgtacaacagaggaaaactgcctgttgtagttaaaaaaaaaaagagagagagagagagagagactgatacacaaagagaatcagaaaggagtagagatgaaacaaagatagagctagcatgattgcaagctgaggacatacgaggagtccctgggtcagctgggccatacatttgtaagctgtagacaaacaaaaatgatctttgggttccttctttagcaattggagttggaggaggatgaccttagtttgcgtctttgtcccactatcattatatccaacttgtgtaattagaaacactatttaagtctcagtttcgtctcctgtcaattgggaaaatatcgtgaggcggagatgtgagatgtgatcacgtttataaagtctgcggcaagaggatgataaagtcacttctcaactccttctcaactcctcctcctggcttattaatgcccatcctttaacctgtcctctgctttatctcttggaatccttagggcctttttaaccccatatacgaagcaaacctatgtgtatgtgtttgtgtgtgcatcaattcatatggtcctctgcagccttgcaaagtcgattcctgacatttccgtagactgttttttttgttttcagcaatactctccagcagcaaaacccaatccgctcatattcttgcatttgctgcagcaaaacctgacctctctttgtgttacctgagtcttgacgaagaagactgaggaaaggccccccccccccccccgccaaattgtcccgttgtctcttggctggtcttgccagctggcacacagcttcctctgaccaccctgctaggtacaaatcccacatgaaaagtctcaatcacctggctcaaactcatagttttcaggtggcataagccatggcattttcacctcctttcctggttgtttccagaaaggga

SEQ ID NO: 18536 - DNA, 1008 bp, Homo sapiens
tctccttctcatatgtttaggcaagcgttgatgacatcaacctagccttttattttaaatcccctgtcaacgcaattagataatacaaaaataacaaaactacaggaggttgaggatggggctgggggccaaggagattacttggtttgaaatgaataaattgtctatcctaagggaattctttggtgcattttattgtgtgaaatgagcctggtcatatgactgccctgcctccctggaggcctccctgccctcctccttcccacagacacttatgggaggtactggccagctctgtatggccagtactgccctaagcaagaccaagaagcttagtctcaatttcagagagttattttggcaacatatttgggaaaatgatagttagatgctgcgttagccagcctctgcatgattttttacgcagaacaaacagttccaaatatcagtgctttcagcaactcatatatttctcacttatggtgcatgtcgctgatggttggctgctgctctgatctcactccagtatcagcttcagtcaaggaacgtattgttgtcaaggaaaggaaaaagaacagtggtgagaccaaaggatcttaaagtttctactttggaaggggcgtggcattgcttctctcattccattggctgaagcaaatcatgtatacaagccagaagccaatgagctataggaagggtagcaaagaacagaacagccatacagcctagcccacagatggggtcaagaagattcaataggcattggctgaagacttaagacttctcaagcaagttggatcctggtgtgcacctggcatatcctttaggattctttagtgttggtagattgagatggaaatgaggaaacttgtattacctactcctttgggccagaatttgcttacagcacagtgaggaggtattctttggagagcactgtttcccaagagtgattctaacaaagaggtgtaaatggacaagaatgaaaagcaattgcaagggcccttg

SEQ ID NO: 18537 - DNA, 1034 bp, Homo sapiens
gagcagatatcgtatgaacatgattttgaatgctggcatggtgatgaaaggtgatgttcacctggagtctgtacacacaaaaccctgttcattttacctaaagggtaagaacatcatggcccccttcatatcctggttaatgtccccgctgaccctgagttctgcctccatcactggaacaagagcctgtctttgggaagaggtgtcttccctggcactcgtttgatttgtagccgccacacatggcaggtcccaagctgtctgaagtcttggctgccattcctaagctactaaaactttgctggagaacatcaccaatcacgctgagggatcctttgacaactcagcttcatgaggacagctgcagttctgcgtttaggctggggtcaccggggtcgctgccccagccccactctttagcctcagtccctctgtggttcccctgactgagctcctcactaaaggggaggaatccctggagcctccccatccaaggccagcgtgttccatttgagggtaactggatccctgaaattcacccccacacaatccacaacctactactagaatgccatatgcttttctatatgctgttgtttaatttcagttggtacatattttattttttgaaacagacttcgttagaacatctttagatttaaagaaaaatcaagactgtagtaccaagttcccatgtgtgtaacagccagtttatcctattattttaacgtcttatgttatttggtacatttattaagattaaattattgatactgaaatattaggttgtgcaaaagcaattgtggtttttgccattaaaagtaatagtaataataatactcggttggtgcaaaagtaaatgtgttttttgctattaaaagtaatgcggttttacttctgcagtttttttgccatttgccaattacttttgcagtttttgccagtacttaaaagtaatggcaaaaactgcaaaagtaattggcaaatggcaattgcggtttttgccgttacttaaaattgcattacttaaaagt
